United States Patent Application Publication US 2018/0126003 A1 - sequence listing, part 15

SEQ ID NO: 22814 - DNA, 837 bp, Artificial Sequence
  derived and/or modified sequence
atgcctaggctgtcgttgttgttgcccctgttgctgctgctcctcctgcccctcttgcctcctctgtccccatcgctgggcatacgggacgtgggcggacgccgtccaaagtgcggcccatgccgtccagaggggtgtcctgctcccgcaccttgcccagcccctggcattagcgctttggatgagtgtgggtgctgcgcacgctgcctgggcgctgagggtgccagctgtggcggcagggctggaggaaggtgtggtccaggcctagtctgcgcgtcccaggctgctggagcagcaccggaaggaacaggactgtgcgtgtgcgcacaaagaggcacggtatgtgggtccgacggccgaagctatccctcagtgtgtgctctgaggttacgcgcccgccatacccctcgcgcccacccggggcatctccacaaggccagggatggtccatgcgagtttgcacctgtggtggtggtcccaccaagatctgtacacaacgtgactggcgcgcaagtgggcctttcctgcgaggtgcgtgccgtccccacgccggtgattacatggagaaaggtcactaaatctccggaaggaacccaggcactggaagaacttcccggggaccatgtgaacatcgctgttcaggtaagggggggccctagcgatcacgaagccaccgcctggatccttatcaatccgcttaggaaagaagacgaaggcgtgtatcaatgtcacgccgctaacatggtgggggaagccgagagccactctacggtgactgtgcttgacctgagtaagtacagatcatttcacttccccgcccccgacgaccggatgtag

SEQ ID NO: 22815 - DNA, 837 bp, Artificial Sequence
  derived and/or modified sequence
atgccccggctgagcctgctgctgcccctgctgctgctgctgctgctgcccctgctgccccccctgagccccagcctgggcatcagagatgtgggcggccggcggcccaagtgtggcccctgcaggcctgagggctgcccagccccagccccctgcccagcccctggcatcagcgccctggatgaatgtggctgctgtgcccgctgcctgggcgctgagggcgccagctgtggcggccgggccggcggccgctgtggccctggcctggtgtgtgccagccaggccgccggggccgcccctgagggcaccggcctgtgtgtgtgtgcccagaggggcaccgtgtgtggcagtgatggccgcagctaccccagcgtgtgtgccctgcggctgcgggcccggcacaccccccgggcccaccctggccacctgcacaaggccagagatggcccctgtgaatttgcccctgtggtggtggtgccccccaggtctgtgcacaacgtgactggagcccaggtgggcctgagctgtgaggtgcgggctgtgcccacccctgtgatcacctggaggaaggtgaccaagagccctgagggcacccaggccctggaggagctgcccggggaccacgtgaacattgctgtgcaggtgcggggcggccccagcgaccacgaggccacagcctggatcctgatcaaccccctgaggaaggaggatgaaggagtgtaccagtgccacgccgccaacatggtgggggaggccgagagccacagcacagtgacagtgctggacctgagcaagtaccgctccttccacttccctgccccagatgacaggatgtag

SEQ ID NO: 22816 - DNA, 837 bp, Artificial Sequence
  derived and/or modified sequence
atgccccggctgagcctgctgctgcccctgctgctgctgctgctgctgccgctgctgcccccattgtccccttccctaggcattagggacgtagggggacgaaggcctaaatgtggcccctgcagacctgaaggttgcccggctcctgctccatgtcccgccccaggcatctcagcactggatgagtgcggttgttgtgctcggtgcctgggggcagagggtgcaagttgtggaggcagggccggcggacggtgtggaccaggcctggtctgcgcctctcaagctgcaggtgctgcccccgagggtacgggactttgtgtctgtgctcagcgcgggacagtgtgtggatccgacggcaggtcttatccctccgtatgtgcccttcgtcttcgggccaggcatacacctagggcacatcctggccacctgcacaaagcccgcgacggcccttgtgagtttgcccccgtcgtggtggtgcctccgaggagtgttcacaacgttacaggggcccaggtcggcctgtcttgcgaggtgagagcggttccaacaccagttattacctggagaaaagttacaaagtctcccgaagggacccaagctctggaggagcttcctggagaccacgtaaacattgcggtgcaagtgcggggagggcccagtgaccatgaagctacagcctggattctgattaatccccttcgaaaggaggacgagggagtctaccaatgtcacgccgcgaacatggtcggagaggccgaatctcacagcactgtgaccgtgctggacctgtcgaaataccgctcatttcactttcccgcccctgatgataggatgtag

SEQ ID NO: 22817 - DNA, 837 bp, Artificial Sequence
  derived and/or modified sequence
atgcctaggctgtctctcctgcttccactgctgctgctgctgctgctccctctgctgcccccactgtccccatcgctcgggattagggacgtcgggggtcggaggcccaaatgcggaccctgccggccagaggggtgtcctgctccggcaccttgtcccgcacctgggataagcgcacttgatgagtgcggttgctgtgcacgttgtttgggtgcggagggtgcttcctgcggcggaagagctggagggagatgcgggcctgggttagtctgtgcgtcccaggcagctggtgcggctcctgagggtactggcctatgtgtctgtgcccagagagggacagtgtgtggttctgatggtaggagctacccaagcgtctgtgctctgcgcctgcgggcacggcatactccacgcgctcacccaggacaccttcacaaagcacgagacggcccatgcgaattcgctcctgtggtagtcgtcccaccacgatccgtacacaacgtaacaggggcacaggtaggcctaagctgtgaagttagggccgtgcccactcctgtgattacctggcgcaaggttaccaaaagcccagaaggtacccaggccttggaagagctgccaggcgatcacgtaaatatcgctgtacaggtgaggggcggaccatctgatcacgaggccactgcatggatcctaatcaatccgctgcggaaagaagacgaaggagtgtatcagtgccacgccgctaatatggtgggcgaggccgagtcgcatagcaccgttaccgtgctggacctgagcaagtaccgctccttccacttccccgcacctgacgataggatgtag

SEQ ID NO: 22818 - DNA, 837 bp, Artificial Sequence
  derived and/or modified sequence
atgccccgtctctcccttctacttcctctgttactgctcctgttgctccccctgttgccgcctttaagtcccagcctcggtatcagggatgtgggtgggcgccgaccaaaatgcgggccatgtcgccctgaaggctgtcctgcccccgcgccctgccctgctcccggcattagcgcacttgacgaatgtggttgttgcgcccgctgtttgggcgcagaaggagcttcctgtggaggaagagctggcggtaggtgcggcccaggcctggtgtgcgcgagccaagctgcaggtgcggcccctgagggaactggtctgtgcgtgtgtgcacaaaggggcacagtctgtggctcagacggccgctcttatcctagtgtgtgcgcattgcggttgagggcccggcacacaccacgcgctcaccctggccacctgcacaaagctcgggatggaccttgtgagttcgctccagtcgtggttgtgccacctagatctgtccacaatgtcaccggggctcaagtcggcctatcttgcgaagtgcgagccgtgcccacacccgtcatcacatggcggaaagtgaccaagtccccagagggtacacaagccctggaagagttgccgggagaccacgtcaatattgctgtgcaggtacgtggcggtccttcagaccacgaagctacagcatggattctcatcaaccccctgcgtaaagaggacgaaggcgtttatcagtgtcacgccgccaatatggtcggagaggccgaaagccactcaaccgtgacagtgctggatctatcgaagtacagatctttccatttccctgcgccagacgatcgtatgtag

SEQ ID NO: 22819 - DNA, 837 bp, Artificial Sequence
  derived and/or modified sequence
atgccaaggcttagcttactcctaccactgctcttacttctgctgttgcccctgttgcctcctctaagccccagccttgggattcgcgacgtgggaggtcgccgtccaaaatgtggcccttgtcgccccgaaggatgtccagcacccgctccttgccctgcgcctggaatctctgccctcgacgaatgtggttgttgcgccagatgcctgggcgccgaaggagcctcgtgcggaggacgcgcagggggtagatgcgggccgggcttagtgtgcgcctctcaggcagctggcgccgcacctgagggcaccggactgtgtgtatgtgcccagcgcggcacggtgtgtggctccgacggacgttcataccccagcgtatgtgctctgagactccgagctcgccacacaccccgggcacatcccggacacctgcataaggcccgggacggaccctgcgagtttgctcctgttgtagtcgttcccccccgcagtgttcataatgtcactggcgcacaggtgggcctttcatgtgaggttagagccgttcccacccccgttatcacctggcggaaagttactaaatctccagagggtacgcaagccctggaagagctgccaggcgatcacgtgaatatagccgttcaagttaggggcggcccctccgatcacgaggctactgcttggatactcatcaacccattaaggaaagaagacgaaggagtctatcagtgccacgccgcgaacatggtaggcgaagcagagagccattctacagtaaccgtgctggaccttagcaagtaccggagctttcatttcccggcccccgacgatagaatgtag

SEQ ID NO: 22820 - DNA, 1093 bp, Artificial Sequence
  derived and/or modified sequence
ccgccgctgtcccggagcaagccatgccgcgcttgtctctgctcttgccgctgctgcttctgctgctgctgccgctgctgccgccgctgtccccgagccttgggatccgcgacgtgggcggccggcgccccaagtgtggtccgtgccggccagagggctgcccggcgcctgcgccctgcccggcgcccgggatctcggcgctcgacgagtgcggctgctgcgcccgctgcctgggagccgagggcgcgagctgcgggggccgcgccggcgggcgctgtggccccggcctggtatgcgcgagccaggccgctggggcagcgcccgagggcaccgggctctgcgtgtgcgcgcagcgcggcaccgtctgcggctccgacggtcgctcgtaccccagcgtctgcgcgctgcgcctgcgcgctcggcacacgccccgcgcgcaccccggtcacctgcacaaggcgcgcgacggcccttgcgagttcgctcctgtggtcgtcgttcctccccgaagtgttcacaacgtcaccggggcgcaggtgggcctgtcctgtgaagtgagggctgtgcctaccccagtcatcacgtggagaaaggtcacgaagtcccctgagggcacccaagcactggaggagctgcctggggaccatgtcaatatagctgtccaagtgcgagggggcccttctgaccatgaggccacggcctggattttgatcaaccccctgcgaaaggaggatgagggtgtgtaccagtgccatgcagccaacatggtgggagaggctgagtcccacagcacagtgacggttctagatctgagtaaatacaggagcttccacttcccagctcccgatgaccgcatgtgatggagaaatggtcttagaaacattgatcatgggatgatggaaaagtcaaataacggatctttgtgcttcatgaagagttggaaaacctgtgtgtgtagatgaccccttttgtgtgtttttaaaaattagatgcaaactagatctgtatgcagatgtagtttttagcagggcaaacagtgagaaacggatttgcatgtggcttttttatacttttgaaatgaattgttccatga

SEQ ID NO: 22821 - DNA, 438 bp, Artificial Sequence
  derived and/or modified sequence
atgggcctgaagagccacgtgctgcccgcccccaacagccagggccagggcagcctgtgcatcttcgtgtacgtgaccagctacatggactacatccagctgcagggcaaggagaacctggactgcagcggcctgaacaagcagaagatcgtgttcccccacagcatggacagcggcgacggctggctgatggtgctggtgcagcagctgcacgagggcagaggccacgtgctggaccccttcgccctgatcagcgtgctggtgaccagctggagccaggacggctgctgcatccccaagaaccacgtgtgcgtgcagggcagaagaggcggcggcagaggcagagccaagctggccggccccgtgaccttctaccagaaggtgaagcccagacagaagagcgtgagctgcagcctgcccctgcacatcttcacctag

SEQ ID NO: 22822 - RNA, 837 nt, Artificial Sequence
  derived and/or modified sequence
augccccgucucucccuucuacuuccucuguuacugcuccuguugcucccccuguugccgccuuuaagucccagccucgguaucagggaugugggugggcgccgaccaaaaugcgggccaugucgcccugaaggcuguccugcccccgcgcccugcccugcucccggcauuagcgcacuugacgaaugugguuguugcgcccgcuguuugggcgcagaaggagcuuccuguggaggaagagcuggcgguaggugcggcccaggccuggugugcgcgagccaagcugcaggugcggccccugagggaacuggucugugcgugugugcacaaaggggcacagucuguggcucagacggccgcucuuauccuagugugugcgcauugcgguugagggcccggcacacaccacgcgcucacccuggccaccugcacaaagcucgggauggaccuugugaguucgcuccagucgugguugugccaccuagaucuguccacaaugucaccggggcucaagucggccuaucuugcgaagugcgagccgugcccacacccgucaucacauggcggaaagugaccaaguccccagaggguacacaagcccuggaagaguugccgggagaccacgucaauauugcugugcagguacguggcgguccuucagaccacgaagcuacagcauggauucucaucaacccccugcguaaagaggacgaaggcguuuaucagugucacgccgccaauauggucggagaggccgaaagccacucaaccgugacagugcuggaucuaucgaaguacagaucuuuccauuucccugcgccagacgaucguauguag

SEQ ID NO: 22823 - RNA, 837 nt, Artificial Sequence
  derived and/or modified sequence
augccaaggcuuagcuuacuccuaccacugcucuuacuucugcuguugccccuguugccuccucuaagccccagccuugggauucgcgacgugggaggucgccguccaaaauguggcccuugucgccccgaaggauguccagcacccgcuccuugcccugcgccuggaaucucugcccucgacgaaugugguuguugcgccagaugccugggcgccgaaggagccucgugcggaggacgcgcaggggguagaugcgggccgggcuuagugugcgccucucaggcagcuggcgccgcaccugagggcaccggacuguguguaugugcccagcgcggcacgguguguggcuccgacggacguucauaccccagcguaugugcucugagacuccgagcucgccacacaccccgggcacaucccggacaccugcauaaggcccgggacggacccugcgaguuugcuccuguuguagucguucccccccgcaguguucauaaugucacuggcgcacaggugggccuuucaugugagguuagagccguucccacccccguuaucaccuggcggaaaguuacuaaaucuccagaggguacgcaagcccuggaagagcugccaggcgaucacgugaauauagccguucaaguuaggggcggccccuccgaucacgaggcuacugcuuggauacucaucaacccauuaaggaaagaagacgaaggagucuaucagugccacgccgcgaacaugguaggcgaagcagagagccauucuacaguaaccgugcuggaccuuagcaaguaccggagcuuucauuucccggcccccgacgauagaauguag

SEQ ID NO: 22824 - protein, 400 aa, Artificial Sequence
  derived and/or modified sequence
MNGQLDLSGKLIIKAQLGEDIRRIPIHNEDITYDELVLMMQRVFRGKLLSNDEVTIKYKDEDGDLITIFDSSDLSFAIQCSRILKLTLFVNGQPRPLESSQVKYLRRELIELRNKVNRLLDSLEPPGEPGPSTNIPENDTVDGREEKSASDSSGKQSTQVMAASMSAFDPLKNQDEINKNVMSAFGLTDDQVSGPPSAPAEDRSGTPDSIASSSSAAHPPGVQPQQPPYTGAQTQAGQIEGQMYQQYQQQAGYGAQQPQAPPQQPQQYGIQYSASYSQQTGPQQPQQFQGYGQQPTSQAPAPAFSGQPQQLPAQPPQQYQASNYPAQTYTAQTSQPTNYTVAPASQPGMAPSQPGAYQPRPGFTSLPGSTMTPPPSGPNPYARNRPPFGQGYTQPGPGYR

SEQ ID NO: 22825 - DNA, 1203 bp, Artificial Sequence
  derived and/or modified sequence
atgaacggccagctggacctgagcggcaagctgatcatcaaggcccagctgggcgaggacatcagaagaatccccatccacaacgaggacatcacctacgacgagctggtgctgatgatgcagagagtgttcagaggcaagctgctgagcaacgacgaggtgaccatcaagtacaaggacgaggacggcgacctgatcaccatcttcgacagcagcgacctgagcttcgccatccagtgcagcagaatcctgaagctgaccctgttcgtgaacggccagcccagacccctggagagcagccaggtgaagtacctgagaagagagctgatcgagctgagaaacaaggtgaacagactgctggacagcctggagccccccggcgagcccggccccagcaccaacatccccgagaacgacaccgtggacggcagagaggagaagagcgccagcgacagcagcggcaagcagagcacccaggtgatggccgccagcatgagcgccttcgaccccctgaagaaccaggacgagatcaacaagaacgtgatgagcgccttcggcctgaccgacgaccaggtgagcggcccccccagcgcccccgccgaggacagaagcggcacccccgacagcatcgccagcagcagcagcgccgcccacccccccggcgtgcagccccagcagcccccctacaccggcgcccagacccaggccggccagatcgagggccagatgtaccagcagtaccagcagcaggccggctacggcgcccagcagccccaggcccccccccagcagccccagcagtacggcatccagtacagcgccagctacagccagcagaccggcccccagcagccccagcagttccagggctacggccagcagcccaccagccaggcccccgcccccgccttcagcggccagccccagcagctgcccgcccagcccccccagcagtaccaggccagcaactaccccgcccagacctacaccgcccagaccagccagcccaccaactacaccgtggcccccgccagccagcccggcatggcccccagccagcccggcgcctaccagcccagacccggcttcaccagcctgcccggcagcaccatgacccccccccccagcggccccaacccctacgccagaaacagaccccccttcggccagggctacacccagcccggccccggctacagatag

SEQ ID NO: 22826 - DNA, 1203 bp, Artificial Sequence
  derived and/or modified sequence
atgaacggtcagctggacctttccgggaaactgatcatcaaggcccagctcggggaggacattcgccgaatcccgatacataatgaggacataacctacgatgaactggtgctgatgatgcaaagagtattccgtggcaagctgctctctaacgatgaggtcaccataaagtataaggatgaggacggggatctgatcaccattttcgacagtagcgacctgagcttcgcaatccagtgttcaagaattttgaaattaaccctgtttgtgaacgggcaaccaaggcccctcgaatcctcccaggttaaatatctgcgcagggagctaatcgaacttcggaacaaagtaaatcggctgctcgactctcttgagccccctggagagcccggcccctccaccaacattcctgagaacgacacggtggacggcagagaggaaaaatccgccagcgatagctctggaaagcagtcaacacaggtgatggcagccagcatgagtgcattcgaccccctgaagaatcaggacgaaataaacaaaaacgtgatgagcgcctttggtctgactgatgatcaggtctcaggcccaccatcagcgcccgctgaggatcgctcaggcacacccgattcaatagcttcaagcagtagcgccgcacatccaccaggagtccagcctcaacagcctccctacaccggagcccagacacaggcaggtcagattgagggacaaatgtatcagcagtaccagcagcaagctggctacggcgcccagcaaccccaggcaccacctcaacaaccacagcaatatggtatccagtacagcgcttcatactctcagcagacaggtccacaacagcctcagcaattccaggggtacggacagcagccgaccagtcaggcccccgcccccgctttttctgggcagcctcaacagcttccagcgcagcctccacagcaatatcaggcaagtaactatcctgctcagacctacactgcccaaaccagccagccaaccaactatacggtggcaccggcatctcaaccaggcatggccccctcgcagcccggtgcctaccagccacgcccagggtttaccagccttcccggctccactatgacccctccaccatccgggccaaatccgtacgccaggaatagaccccccttcggccaggggtacactcaacctgggccaggctacaggtag

SEQ ID NO: 22827 - DNA, 1203 bp, Artificial Sequence
  derived and/or modified sequence
atgaacggtcagctggatctgtcaggaaagctgatcatcaaggcgcagctgggagaggatatcaggcggattccaattcacaatgaagatattacctatgacgagctggtgctcatgatgcaacgggtgttccgggggaaactactatctaacgatgaggtcactattaagtacaaggatgaggatggtgatctaatcactatcttcgactcatccgatctgtcctttgccatccagtgctctaggatcctgaagctgactctctttgttaacggacagcccagacctctcgaaagttcccaggtaaaatatcttcgaagagagttgatcgagctaaggaataaagtgaataggttgttagactctctggagccacccggggagcccggccccagcacgaatatcccagagaacgacacggtcgacgggcgggaggaaaagtcagcctcagactcatccgggaaacaaagcacacaggtgatggcggcaagcatgtcagctttcgacccactgaagaaccaggacgagataaacaagaatgtgatgagcgccttcggattaaccgacgatcaggtcagcggaccaccatccgcacccgcagaggatcgtagcgggactccagatagcatagcttcatccagcagcgcagctcaccccccaggggtccaacctcagcagccaccttatacgggcgcccaaactcaggcggggcagattgaggggcagatgtaccagcagtaccagcaacaagccgggtacggggcccaacagcctcaggcacctccccagcagccacagcagtatggcattcaatattcagcctcatatagccagcagacagggccccagcaaccacagcagttccaggggtatgggcagcagccaacctcccaggcccccgcgcccgctttttctgggcagccacagcaactccccgctcagccgccccaacaatatcaggcctccaattaccctgcccagacctatacagctcagactagccagcctactaattatacagtagctccggcctcccaaccaggcatggctccatcccagcctggcgcctatcagcctagaccaggatttaccagcttgcccggcagtaccatgacacccccgcctagcggccctaacccctacgctcgcaaccgccccccctttggacagggttacacccagccgggacccggctacaggtag

SEQ ID NO: 22828 - DNA, 1203 bp, Artificial Sequence
  derived and/or modified sequence
atgaatggccagctggacctgagcggcaagctgatcatcaaggcccagctgggggaggacatccgccgcatccccatccacaatgaagacatcacctatgatgagctggtgctgatgatgcagagggtcttccggggcaagctgctgagcaatgatgaggtgaccatcaagtacaaggatgaagatggagacctgatcaccatctttgacagcagtgacctgagctttgccatccagtgcagccgcatcctgaagctgaccctgtttgtgaatggccagccccggcccctggagagcagccaggtgaagtacctgcggcgggagctgattgagctgaggaacaaggtgaaccggctgctggacagcctggagcccccaggagagcccggccccagcaccaacatcccagaaaatgacacagtggatggccgggaggagaagagcgccagtgacagcagcggcaagcagagcacccaggtgatggccgcctccatgtctgcctttgaccccctgaagaaccaggatgagatcaacaagaatgtgatgtctgccttcggcctgacagatgaccaggtgtctggccccccatctgccccagcagaagatagaagtggcaccccagacagcatcgccagcagcagcagcgctgcccaccccccaggagtgcagccccagcagcccccctacaccggggcccagacccaggccggccagatcgagggccagatgtaccagcagtaccagcagcaggccggctatggagcccagcagccccaggccccaccccagcagccccagcagtatggcatccagtacagcgccagctacagccagcagacaggcccccagcagccccagcagttccagggctacggccagcagcccaccagccaggccccagccccagccttcagcggccagccccagcagctgcctgcccagcccccccagcagtaccaggccagcaactacccagcccagacctacacagcccagaccagccagcccaccaactacacagtggccccagccagccagcccggcatggcccccagccagcccggggcctaccagcccaggcctggcttcaccagcctgcccggcagcaccatgaccccaccacccagcggccccaacccctatgccaggaaccggccccccttcggccagggctacacccagcccggccctggctacagatag

SEQ ID NO: 22829 - DNA, 1203 bp, Artificial Sequence
  derived and/or modified sequence
atgaacggccagctggacctgagcggcaagctgatcatcaaggcccagctcggcgaagacatacgcagaattccaattcataatgaggacattacatatgatgagctggtgctgatgatgcaaagggtgtttcggggcaagctgctgtccaatgacgaggttaccatcaaatacaaggacgaggacggggaccttatcacgatcttcgactcgtcggatttatccttcgcaatccaatgttcccggattctgaaactcacactcttcgtgaatggccagccaagaccacttgaatcttctcaagtgaaatatttgcggcgtgaattaattgagctgcggaataaggtcaacagacttctcgactctctcgaaccacctggcgagccggggccttcaaccaatatacccgaaaatgatactgtggatggccgagaggagaaaagtgccagcgactctagcggaaagcagtctacccaagttatggccgcatctatgagcgctttcgacccccttaaaaaccaagatgaaattaacaaaaatgtcatgtccgcatttgggctgactgacgaccaggtgtcggggccaccaagcgccccagctgaagataggagcggaacccccgacagcattgcatcatcatcaagtgccgctcatcccccgggagtgcagcctcaacagcccccatacacgggcgctcagacccaggccggtcagattgaaggtcagatgtaccagcaatatcagcaacaggcaggttatggggcacagcagccccaggcaccaccacaacagcctcagcagtatgggatacagtacagcgcatcctactcacagcagaccggaccacagcagccccagcagttccaggggtatgggcagcagccaacttctcaggccccagcccccgccttctcgggacaaccacagcagctaccggcacaacctccacaacagtaccaggcctccaactatcccgcgcagacttatacagcccagacaagtcagcctactaactacacagtcgccccagccagccaacccggtatggccccatcccagcccggggcataccagccgcggccagggtttacatccctcccagggagtactatgactcctccaccttccggccctaatccctacgcccggaacagacctcctttcggtcagggctacacccagccaggcccgggatacaggtag

SEQ ID NO: 22830 - DNA, 1203 bp, Artificial Sequence
  derived and/or modified sequence
atgaacggccagctggacctgagcggcaagctgatcatcaaggcccagttgggcgaagacatcaggcgcattcctatccataacgaagatatcacctacgacgagctcgttcttatgatgcaaagggtctttcgcgggaaactcttatctaatgacgaggtcacgataaaatacaaggatgaggatggcgatctaattaccatttttgattcatcagatctctcattcgctatccaatgcagtcgcattttgaagttaacacttttcgtgaatggccagcctcgcccacttgaatcctcccaggtgaagtaccttcggcgggagcttattgagctgcggaacaaagtgaaccgcctcttagattccttagagccgccaggagagccaggaccctccaccaatattcccgagaatgacactgtagatggtcgcgaggagaaatcagccagcgatagctctgggaagcagagcactcaggtgatggccgccagcatgtccgcgttcgacccgctaaagaatcaggacgaaatcaataaaaacgtcatgtcagcctttggcctgacggatgaccaggtgtccgggccccccagtgcccctgctgaagataggtccggaacaccggacagtattgcctcatcttcctcagccgctcaccccccaggtgtgcagccccagcaacccccgtataccggggctcagacacaggccggccagatcgagggtcagatgtatcaacagtatcagcagcaggcaggatacggcgcccagcaaccacaggcacctccccagcagcctcagcaatatggaatccaatattcggcttcatattcccagcagacggggccccagcaaccacagcaatttcaaggatatggtcaacagcctacctcccaggcccctgcccctgcgttctcaggccagccccaacagctcccggcgcagccccctcagcagtatcaggcctcgaactacccagcccagacctatacagcgcagacttctcagcccactaactacacagtagcccctgcctcacaacctgggatggccccgtcccagccaggcgcctaccaaccacgccccggttttacttctcttcccggctctaccatgacccctccaccctcgggccccaatccatacgctcgcaatcggccaccttttggacagggatacacacagccgggccctgggtaccgttag

SEQ ID NO: 22831 - DNA, 1203 bp, Artificial Sequence
  derived and/or modified sequence
atgaacggacagctagatctgagcggcaagctgatcatcaaagcccagttgggggaggatattcggagaataccaattcataacgaagatatcacctatgacgaacttgtgttgatgatgcagcgggtcttcagaggaaagcttctctccaacgatgaggtgactatcaagtataaggacgaagacggggatctgattacgatctttgacagctctgacctgtctttcgccattcaatgtagccggatactaaagcttaccctgttcgttaacggccagccacgtcccctggaatcatctcaggtgaaatatttgcgccgtgaactaatcgagctgcggaacaaggtcaatcgactgctcgactcccttgagccgcctggcgaacctggtcccagcaccaacatccctgagaacgatacggtggatggcagggaggagaagagtgccagcgactcttccggtaaacagagcacccaggtcatggctgcctctatgtcagctttcgatcccttaaagaaccaagatgaaatcaacaagaatgtgatgagtgccttcggcctgaccgacgaccaggtgagtgggcctccctctgcgcctgccgaggacaggtcaggtacccctgactcgatcgcttcttcatcatccgctgcccacccgccaggcgtccagccgcagcagcctccctatacaggggctcagactcaagccggtcagattgagggccaaatgtatcagcagtaccagcagcaggcaggctacggagcacagcagccccaagccccaccccagcagccacagcagtacgggattcagtactccgcttcatactctcagcagaccggcccacagcagccgcagcagttccaggggtatgggcaacagcccacctcccaggcacctgccccagcctttagcggacagccccaacagctgcctgcacaacccccacagcaataccaggcgagcaactacccggctcaaacatataccgctcagacgtcacagcctactaactacacggtggcacccgcatcccaaccaggaatggcaccctcccaaccaggcgcttatcaacccaggccgggatttaccagtttgcctggatcaacaatgactccccctccctccggcccaaacccatatgctaggaacaggccaccgttcggacagggctatacacagcccggacctgggtaccgatag

SEQ ID NO: 22832 - DNA, 1203 bp, Artificial Sequence
  derived and/or modified sequence
atgaatggccagctcgatctgtcaggcaaattgatcatcaaggcacagctgggagaagacatccggagaatcccaatacacaatgaggatataacgtatgatgagctagtacttatgatgcagcgtgtctttcggggtaagctgttaagcaatgacgaggtcactatcaagtacaaagacgaggatggagacctgatcaccatattcgactcctccgacctgagctttgccattcagtgtagccgcattctaaaactcacgctgttcgtaaacggacagccccgtccactcgagtcctctcaagttaagtacctcagaagagaactgatcgagctgcggaataaggtcaatcggctcctcgactcactcgagcctcctggagagcctggaccctccacgaatataccagagaatgataccgttgacgggagagaggaaaaatccgctagcgatagttccggcaaacagtccacacaggtcatggccgctagcatgtctgcattcgaccccttgaaaaatcaggatgagattaacaagaacgtgatgtcggcctttggattgacagatgatcaagtgtccgggccaccctccgcgccagcagaagatcggtccgggacaccagactccatcgcgtcatcctcatcagcggctcatccccctggcgtgcagccccagcagccgccttatacaggcgcacaaacgcaggccggacagatagaggggcagatgtaccagcagtatcagcagcaagcgggatatggggctcagcagcctcaagcacctccacaacaacctcagcagtatgggatccagtactctgcttcatactcacagcaaacgggacctcaacagccacagcaatttcagggttacgggcagcagcctacgagccaggccccagcccctgctttttccggccagccgcaacagttgccagctcagccaccccagcagtatcaggcatcaaactacccagcacagacctacactgcacagacttctcagcctaccaactataccgtcgcccctgcctcccagccaggcatggccccatcgcagcccggagcgtatcagcctaggccaggctttactagtttgcccggatccactatgaccccacctcctagtggtcccaatccctacgcccgaaatcggcctcctttcggccaggggtacacgcagccaggtccaggatacagatag

SEQ ID NO: 22833 - DNA, 1978 bp, Artificial Sequence
  derived and/or modified sequence
gtcctgggtatgtccacgcgcaataaggaggggcgaaaggacatttttttttttcttgctcccgcctctgttcttcccccacctgccacgtacagagcccaagttctcgctaggcttgttgggtcagcgcgattggccggggcccgcgcgagcctgcgagcgaggtgcggcggtcgcgaagggcaaccgagggggccgtgaccaccgcctccccgcgacgccccagtccagtggcctcgcgtccgcccattcagcggagacctgcggagaggcggcggccgcggcctccgcaagccgtctttctctagagttgtatatatagaacatcctggagtccaccatgaacggacagttggatctaagtgggaagctaatcatcaaagctcaacttggggaggatattcggcgaattcctattcataatgaagatattacttatgatgaattagtgctaatgatgcaacgagttttcagaggaaaacttctgagtaatgatgaagtaacaataaagtataaagatgaagatggagatcttataacaatttttgatagttctgacctttcctttgcaattcagtgcagtaggatactgaaactgacattatttgttaatggccagccaagaccccttgaatcaagtcaggtgaaatatctccgtcgagaactgatagaacttcgaaataaagtgaatcgtttattggatagcttggaaccacctggagaaccaggaccttccaccaatattcctgaaaatgatactgtggatggtagggaagaaaagtctgcttctgattcttctggaaaacagtctactcaggttatggcagcaagtatgtctgcttttgatcctttaaaaaaccaagatgaaatcaataaaaatgttatgtcagcgtttggcttaacagatgatcaggtttcagggccacccagtgctcctgcagaagatcgttcaggaacacccgacagcattgcttcctcctcctcagcagctcacccaccaggcgttcagccacagcagccaccatatacaggagctcagactcaagcaggtcagattgaaggtcagatgtaccaacagtaccagcaacaggccggctatggtgcacagcagccgcaggctccacctcagcagcctcaacagtatggtattcagtattcagcaagctatagtcagcagactggacctcaacaacctcagcagttccagggatatggccagcaaccaacttcccaggcaccagctcctgccttttctggtcagcctcaacaactgcctgctcagccgccacagcagtaccaggcgagcaattatcctgcacaaacttacactgcccaaacttctcagcctactaattatactgtggctcctgcctctcaacctggaatggctccaagccaacctggggcctatcaaccaagaccaggttttacttcacttcctggaagtaccatgacccctcctccaagtgggcctaatccttatgcgcgtaaccgtcctccctttggtcagggctatacccaacctggacctggttatcgataaggaggctcctctacaccaattaatgtagctgctagctattggcctcccaaaagactccagtactattttaatttgtattgaagaagttcagaaatttaaaagcagagcattttttatgatatcattgttggtgttaattgaaagtataatttgctggaacacaaagaccaaaatgaaagttttttcctccctgcttaaaaatgtagcagcttcttagttactttggaacactactcttacatgtataaagtgattgacttgactttctagcttcccttgtccggaggatattaaaatgctagggtgaggtttagccatcttacttggctttttactattaacatgatgtactaaagtagagccctttgagaatacaagatattatgtataaaatgtaacactgatgataggttaataaagatgattgaatccatt

SEQ ID NO: 22834 - DNA, 1696 bp, Artificial Sequence
  derived and/or modified sequence
ggcagccgggacccagccagccctgcgcctcgcgccgtcgcgcatgcgtcctggtctttctctagagttgtatatatagaacatcctggagtccaccatgaacggacagttggatctaagtgggaagctaatcatcaaagctcaacttggggaggatattcggcgaattcctattcataatgaagatattacttatgatgaattagtgctaatgatgcaacgagttttcagaggaaaacttctgagtaatgatgaagtaacaataaagtataaagatgaagatggagatcttataacaatttttgatagttctgacctttcctttgcaattcagtgcagtaggatactgaaactgacattatttgttaatggccagccaagaccccttgaatcaagtcaggtgaaatatctccgtcgagaactgatagaacttcgaaataaagtgaatcgtttattggatagcttggaaccacctggagaaccaggaccttccaccaatattcctgaaaatgatactgtggatggtagggaagaaaagtctgcttctgattcttctggaaaacagtctactcaggttatggcagcaagtatgtctgcttttgatcctttaaaaaaccaagatgaaatcaataaaaatgttatgtcagcgtttggcttaacagatgatcaggtttcagggccacccagtgctcctgcagaagatcgttcaggaacacccgacagcattgcttcctcctcctcagcagctcacccaccaggcgttcagccacagcagccaccatatacaggagctcagactcaagcaggtcagattgaaggtcagatgtaccaacagtaccagcaacaggccggctatggtgcacagcagccgcaggctccacctcagcagcctcaacagtatggtattcagtattcagcaagctatagtcagcagactggacctcaacaacctcagcagttccagggatatggccagcaaccaacttcccaggcaccagctcctgccttttctggtcagcctcaacaactgcctgctcagccgccacagcagtaccaggcgagcaattatcctgcacaaacttacactgcccaaacttctcagcctactaattatactgtggctcctgcctctcaacctggaatggctccaagccaacctggggcctatcaaccaagaccaggttttacttcacttcctggaagtaccatgacccctcctccaagtgggcctaatccttatgcgcgtaaccgtcctccctttggtcagggctatacccaacctggacctggttatcgataaggaggctcctctacaccaattaatgtagctgctagctattggcctcccaaaagactccagtactattttaatttgtattgaagaagttcagaaatttaaaagcagagcattttttatgatatcattgttggtgttaattgaaagtataatttgctggaacacaaagaccaaaatgaaagttttttcctccctgcttaaaaatgtagcagcttcttagttactttggaacactactcttacatgtataaagtgattgacttgactttctagcttcccttgtccggaggatattaaaatgctagggtgaggtttagccatcttacttggctttttactattaacatgatgtactaaagtagagccctttgagaatacaagatattatgtataaaatgt

SEQ ID NO: 22835 - protein, 630 aa, Artificial Sequence
  derived and/or modified sequence
MPRYGASLRQSCPRSGREQGQDGTAGAPGLLWMGLVLALALALALALALSDSRVLWAPAEAHPLSPQGHPARLHRIVPRLRDVFGWGNLTCPICKGLFTAINLGLKEPNVARVGSVAIKLCNLLKIAPPAVCQSIVHLFEDDMVEVWRRSVLSPSEACGLLLGSTCGHWDIFSSWNISLPTVPKPPPKPPSPPAPGAPVSRILFLTDLHWDHDYLEGTDPDCADPLCCRRGSGLPPASRPGAGYWGEYSKCDLPLRTLESLLSGLGPAGPFDMVYWTGDIPAHDVWHQTRQDQLRALTTVTALVRKFLGPVPVYPAVGNHESTPVNSFPPPFIEGNHSSRWLYEAMAKAWEPWLPAEALRTLRIGGFYALSPYPGLRLISLNMNFCSRENFWLLINSTDPAGQLQWLVGELQAAEDRGDKVHIIGHIPPGHCLKSWSWNYYRIVARYENTLAAQFFGHTHVDEFEVFYDEETLSRPLAVAFLAPSATTYIGLNPGYRVYQIDGNYSGSSHVVLDHETYILNLTQANIPGAIPHWQLLYRARETYGLPNTLPTAWHNLVYRMRGDMQLFQTFWFLYHKGHPPSEPCGTPCRLATLCAQLSARADSPALCRHLMPDGSLPEAQSLWPRPLFC

SEQ ID NO: 22836 - DNA, 2479 bp, Artificial Sequence
  derived and/or modified sequence
agctgtcagagatcagaggaagaggaaggggcggagctgctttgcggccggccgcggagcagtcagccgactacagagaagggtaatcgggtgtccccggcgccgcccggggccctgagggctggctagggtccaggccgggggggacgggacagacgaaccagccccgtgtaggaagcgcgacaatgccccgctacggagcgtcactccgccagagctgccccaggtccggccgggagcagggacaagacgggaccgccggagcccccggactcctttggatgggcctggtgctggcgctggcgctggcgctggcgctggcgctggctctgtctgactctcgggttctctgggctccggcagaggctcaccctctttctccccaaggccatcctgccaggttacatcgcatagtgccccggctccgagatgtctttgggtgggggaacctcacctgcccaatctgcaaaggtctattcaccgccatcaacctcgggctgaaggaacccaatgtggctcgcgtgggctccgtggccatcaagctgtgcaatctgctgaagatagcaccacctgccgtgtgccaatccattgtccacctctttgaggatgacatggtggaggtgtggagacgctcagtgctgagcccatctgaggcctgtggcctgctcctgggctccacctgtgggcactgggacattttctcatcttggaacatctctttgcctactgtgccgaagccgccccccaaaccccctagccccccagccccaggtgcccctgtcagccgcatcctcttcctcactgacctgcactgggatcatgactacctggagggcacggaccctgactgtgcagacccactgtgctgccgccggggttctggcctgccgcccgcatcccggccaggtgccggatactggggcgaatacagcaagtgtgacctgcccctgaggaccctggagagcctgttgagtgggctgggcccagccggcccttttgatatggtgtactggacaggagacatccccgcacatgatgtctggcaccagactcgtcaggaccaactgcgggccctgaccaccgtcacagcacttgtgaggaagttcctggggccagtgccagtgtaccctgctgtgggtaaccatgaaagcacacctgtcaatagcttccctccccccttcattgagggcaaccactcctcccgctggctctatgaagcgatggccaaggcttgggagccctggctgcctgccgaagccctgcgcaccctcagaattggggggttctatgctctttccccataccccggtctccgcctcatctctctcaatatgaatttttgttcccgtgagaacttctggctcttgatcaactccacggatcccgcaggacagctccagtggctggtgggggagcttcaggctgctgaggatcgaggagacaaagtgcatataattggccacattcccccagggcactgtctgaagagctggagctggaattattaccgaattgtagccaggtatgagaacaccctggctgctcagttctttggccacactcatgtggatgaatttgaggtcttctatgatgaagagactctgagccggccgctggctgtagccttcctggcacccagtgcaactacctacatcggccttaatcctggttaccgtgtgtaccaaatagatggaaactactccgggagctctcacgtggtcctggaccatgagacctacatcctgaatctgacccaggcaaacataccgggagccataccgcactggcagcttctctacagggctcgagaaacctatgggctgcccaacacactgcctaccgcctggcacaacctggtatatcgcatgcggggcgacatgcaacttttccagaccttctggtttctctaccataagggccacccaccctcggagccctgtggcacgccctgccgtctggctactctttgtgcccagctctctgcccgtgctgacagccctgctctgtgccgccacctgatgccagatgggagcctcccagaggcccagagcctgtggccaaggccactgttttgctagggccccagggcccacatttgggaaagttcttgatgtaggaaagggtgaaaaagcccaaatgctgctgtggttcaaccaggcaagatcatccggtgaaagaaccagtccctgggccccaaggatgccggggaaacaggaccttctcctttcctggagctggtttagctggatatgggagggggtttggctgcctgtgcccaggagctagactgccttgaggctgctgtcctttcacagccatggagtagaggcctaagttgacactgccctgggcagacaagacaggagctgtcgccccaggcctgtgctgcccagccaggaaccctgtactgctgctgcgacctgatgctgccagtctgttaaaataaagataagagacttggactccagaaaaaaaaaaa

SEQ ID NO: 22837 - DNA, 1890 bp, Artificial Sequence
  derived and/or modified sequence
atgccccgctacggcgccagcctgcgccagagctgcccccgcagcggccgcgagcagggccaggacggcaccgccggcgcccccggcctgctgtggatgggcctggtgctggccctggccctggccctggccctggccctggccctgagcgacagccgcgtgctgtgggcccccgccgaggcccaccccctgagcccccagggccaccccgcccgcctgcaccgcatcgtgccccgcctgcgcgacgtgttcggctggggcaacctgacctgccccatctgcaagggcctgttcaccgccatcaacctgggcctgaaggagcccaacgtggcccgcgtgggcagcgtggccatcaagctgtgcaacctgctgaagatcgccccccccgccgtgtgccagagcatcgtgcacctgttcgaggacgacatggtggaggtgtggcgccgcagcgtgctgagccccagcgaggcctgcggcctgctgctgggcagcacctgcggccactgggacatcttcagcagctggaacatcagcctgcccaccgtgcccaagcccccccccaagccccccagcccccccgcccccggcgcccccgtgagccgcatcctgttcctgaccgacctgcactgggaccacgactacctggagggcaccgaccccgactgcgccgaccccctgtgctgccgccgcggcagcggcctgccccccgccagccgccccggcgccggctactggggcgagtacagcaagtgcgacctgcccctgcgcaccctggagagcctgctgagcggcctgggccccgccggccccttcgacatggtgtactggaccggcgacatccccgcccacgacgtgtggcaccagacccgccaggaccagctgcgcgccctgaccaccgtgaccgccctggtgcgcaagttcctgggccccgtgcccgtgtaccccgccgtgggcaaccacgagagcacccccgtgaacagcttccccccccccttcatcgagggcaaccacagcagccgctggctgtacgaggccatggccaaggcctgggagccctggctgcccgccgaggccctgcgcaccctgcgcatcggcggcttctacgccctgagcccctaccccggcctgcgcctgatcagcctgaacatgaacttctgcagccgcgagaacttctggctgctgatcaacagcaccgaccccgccggccagctgcagtggctggtgggcgagctgcaggccgccgaggaccgcggcgacaaggtgcacatcatcggccacatcccccccggccactgcctgaagagctggagctggaactactaccgcatcgtggcccgctacgagaacaccctggccgcccagttcttcggccacacccacgtggacgagttcgaggtgttctacgacgaggagaccctgagccgccccctggccgtggccttcctggcccccagcgccaccacctacatcggcctgaaccccggctaccgcgtgtaccagatcgacggcaactacagcggcagcagccacgtggtgctggaccacgagacctacatcctgaacctgacccaggccaacatccccggcgccatcccccactggcagctgctgtaccgcgcccgcgagacctacggcctgcccaacaccctgcccaccgcctggcacaacctggtgtaccgcatgcgcggcgacatgcagctgttccagaccttctggttcctgtaccacaagggccacccccccagcgagccctgcggcaccccctgccgcctggccaccctgtgcgcccagctgagcgcccgcgccgacagccccgccctgtgccgccacctgatgcccgacggcagcctgcccgaggcccagagcctgtggccccgccccctgttctgc

SEQ ID NO: 22838 - DNA, 1893 bp, Artificial Sequence
  derived and/or modified sequence
atgcccagatacggcgccagcctgagacagagctgccccagaagcggcagagagcagggccaggacggcaccgccggcgcccccggcctgctgtggatgggcctggtgctggccctggccctggccctggccctggccctggccctgagcgacagcagagtgctgtgggcccccgccgaggcccaccccctgagcccccagggccaccccgccagactgcacagaatcgtgcccagactgagagacgtgttcggctggggcaacctgacctgccccatctgcaagggcctgttcaccgccatcaacctgggcctgaaggagcccaacgtggccagagtgggcagcgtggccatcaagctgtgcaacctgctgaagatcgccccccccgccgtgtgccagagcatcgtgcacctgttcgaggacgacatggtggaggtgtggagaagaagcgtgctgagccccagcgaggcctgcggcctgctgctgggcagcacctgcggccactgggacatcttcagcagctggaacatcagcctgcccaccgtgcccaagcccccccccaagccccccagcccccccgcccccggcgcccccgtgagcagaatcctgttcctgaccgacctgcactgggaccacgactacctggagggcaccgaccccgactgcgccgaccccctgtgctgcagaagaggcagcggcctgccccccgccagcagacccggcgccggctactggggcgagtacagcaagtgcgacctgcccctgagaaccctggagagcctgctgagcggcctgggccccgccggccccttcgacatggtgtactggaccggcgacatccccgcccacgacgtgtggcaccagaccagacaggaccagctgagagccctgaccaccgtgaccgccctggtgagaaagttcctgggccccgtgcccgtgtaccccgccgtgggcaaccacgagagcacccccgtgaacagcttccccccccccttcatcgagggcaaccacagcagcagatggctgtacgaggccatggccaaggcctgggagccctggctgcccgccgaggccctgagaaccctgagaatcggcggcttctacgccctgagcccctaccccggcctgagactgatcagcctgaacatgaacttctgcagcagagagaacttctggctgctgatcaacagcaccgaccccgccggccagctgcagtggctggtgggcgagctgcaggccgccgaggacagaggcgacaaggtgcacatcatcggccacatcccccccggccactgcctgaagagctggagctggaactactacagaatcgtggccagatacgagaacaccctggccgcccagttcttcggccacacccacgtggacgagttcgaggtgttctacgacgaggagaccctgagcagacccctggccgtggccttcctggcccccagcgccaccacctacatcggcctgaaccccggctacagagtgtaccagatcgacggcaactacagcggcagcagccacgtggtgctggaccacgagacctacatcctgaacctgacccaggccaacatccccggcgccatcccccactggcagctgctgtacagagccagagagacctacggcctgcccaacaccctgcccaccgcctggcacaacctggtgtacagaatgagaggcgacatgcagctgttccagaccttctggttcctgtaccacaagggccacccccccagcgagccctgcggcaccccctgcagactggccaccctgtgcgcccagctgagcgccagagccgacagccccgccctgtgcagacacctgatgcccgacggcagcctgcccgaggcccagagcctgtggcccagacccctgttctgctag

SEQ ID NO: 22839 - DNA, 1893 bp, Artificial Sequence
  derived and/or modified sequence
atgccccgctacggcgcgtctctgcggcaatcttgcccgagatccggtagggagcaaggacaggatggtacggcaggcgcccccggccttttgtggatgggactggtgctggcattggctctggcattggcgttagctcttgccctgagcgatagtcgagtgctgtgggcccctgccgaggctcatcccctttctccacagggccatcctgctcggctgcaccgaatcgtgccacgcctgagggacgttttcggttggggaaaccttacctgtcccatatgcaaaggacttttcaccgcgatcaatctgggtctcaaggaacccaacgttgcccgggttggctctgtcgctatcaaactgtgcaatcttctgaaaatagctccccccgcagtgtgtcaaagcatcgtgcatctttttgaggacgatatggtcgaggtttggcgccgttccgtcctgagcccatccgaggcatgcggcctactgttgggctccacgtgcggacactgggatattttctcaagctggaacatctcactgcctactgtccctaagccccctcccaaaccaccgtcccctcctgcccctggtgcccctgtgagtcgaatcctctttttgacggatctgcactgggaccacgactacctggaaggaactgacccagactgcgccgacccactctgttgtcgcaggggatccggtttacctcctgcatcccggccaggcgcagggtactggggggaatattcaaagtgcgacctgcccctacgcacgctcgaaagtttgttgtccgggcttggccctgccggcccctttgatatggtctactggacaggcgacatccctgcgcatgacgtgtggcatcagacccggcaagaccaactccgggccctcactactgtaaccgcgcttgttcgcaaatttctggggccggttcctgtgtacccagccgtgggaaatcacgagagcaccccggtcaattcatttccacccccatttatcgaggggaatcactccagtagatggctctatgaagccatggccaaagcttgggagccttggctgccagcagaggcattacggacactcagaattggagggttctacgctctgtccccataccccggtctgcgcctgatatctctcaatatgaatttctgttccagagagaatttctggcttctaattaactcaacagacccagctggacagctgcagtggctagtgggcgagttgcaggccgcggaggaccgaggcgataaggtgcacatcattggacacattccccctgggcactgcctcaagagttggagctggaactactataggattgtcgctagatatgaaaacaccctcgccgctcagttcttcggtcatacacatgtggacgagtttgaagtcttttacgacgaggagacgctctcacggccactggccgtcgcattcctggcaccgtcagccaccacatatattggacttaatccagggtatagagtctatcagatcgacggcaattactctggatctagtcacgtggtgcttgaccatgaaacatacatactgaacctgacccaggccaatatacctggggctatacctcattggcagttgctgtaccgggctcgcgaaacttacggcctccccaacacattacccactgcttggcataacctggtttatcgtatgagaggagacatgcaactctttcaaactttctggtttctttatcacaaaggccacccgccaagtgagccttgtggaactccttgcagactggccaccctctgcgcgcagttgtcagcgagagcagatagtcccgccctttgccgacaccttatgcctgacggaagtctaccagaagcccaatctttatggccacgccccctcttctgctag

SEQ ID NO: 22840 - DNA, 1893 bp, Artificial Sequence
  derived and/or modified sequence
atgccccgctacggggccagcctgcggcagagctgccccaggagcggccgggagcagggccaggacggcacagctggggcccctggcctgctgtggatgggcctggtgctggccctggccctggccctggccctggccctggccctgagtgacagccgggtgctgtgggccccagctgaggcccaccccctgagcccccagggccacccagcccggctgcaccgcatcgtgccccggctgagagatgtgtttggctggggcaacctgacctgccccatctgcaagggcctcttcaccgccatcaacctgggcctgaaggagcccaacgtggcccgggtgggctctgtggccatcaagctgtgcaacctgctgaagatcgcccccccagctgtgtgccagagcatcgtgcacctgtttgaagatgacatggtggaggtgtggaggagatctgtgctgagccccagcgaggcctgtggcctgctgctgggcagcacctgtggccactgggacatcttcagctcctggaacatcagcctgcccaccgtgcccaagcccccacccaagccacccagccccccagcccctggggcccctgtgagccgcatcctcttcctgacagacctgcactgggaccatgactacctggagggcacagatcctgactgtgccgaccccctgtgctgcagaagaggcagcggcctgcccccagccagcaggcctggggccggctactggggcgagtacagcaaatgtgacctgcccctgcggaccctggagagcctgctgagcggcctgggccctgctggcccctttgacatggtgtactggacaggagacatcccagcccatgatgtgtggcaccagacccggcaggaccagctgcgggccctgaccaccgtgacagccctggtgaggaagttcctgggccctgtgcctgtgtacccagctgtgggcaaccacgagagcacccctgtgaacagcttccccccacccttcatcgagggcaaccacagcagccgctggctgtatgaggccatggccaaggcctgggagccctggctgcctgctgaggccctgcggaccctgcgcatcggcggcttctacgccctgagcccctacccaggcctgcggctcatcagcctgaacatgaacttctgcagccgggagaacttctggctgctgatcaacagcacagatcctgctggccagctgcagtggctggtgggggagctgcaggccgcagaagatagaggagacaaggtgcacatcatcggccacatccccccaggccactgcctgaagtcctggagctggaactactacagaattgtggcccgctatgagaacaccctggccgcccagttcttcggccacacccacgtggatgaatttgaggtgttctatgatgaggagaccctgagccggcccctggccgtggccttcctggcccccagcgccaccacctacatcggcctgaaccctggctacagagtgtaccagattgatggcaactacagcggcagcagccacgtggtgctggaccacgagacctacatcctgaacctgacccaggccaacatccctggggccatcccccactggcagctgctgtaccgggcccgggagacctacggcctgcccaacaccctgcccacagcctggcacaacctggtgtacaggatgagaggagacatgcagctgttccagaccttctggttcctgtaccacaagggccacccccccagcgagccctgtggcaccccctgccgcctggccaccctgtgtgcccagctgagcgcccgggctgacagccctgccctgtgccgccacctgatgccagatggcagcctgcctgaggcccagagcctgtggccccggcccctcttctgctag

SEQ ID NO: 22841 - DNA, 1893 bp, Artificial Sequence
  derived and/or modified sequence
atgccccggtacggcgccagcctgcggcagagctgcccccggagcggacgtgagcaaggccaagacggcacggccggggccccaggtctgctctggatggggttggttttggccctggcactggcacttgccctcgcgctcgccctctctgatagccgcgtgctctgggctcccgcagaagcccatcctctcagtccgcagggacatccagcccggctccacagaattgtgcccaggctaagggatgtgtttggctggggcaacctaacgtgtccgatctgcaagggtctgttcactgctataaacctgggcttaaaggagcctaacgtcgcccgcgtaggatccgtagccataaagctttgtaatctgctgaagattgcccccccggctgtatgtcagagcattgttcaccttttcgaggacgacatggtggaagtctggcgcaggagtgtgctgagtccttctgaggcctgcgggctgctgctgggtagtacctgtggacattgggatatcttctcttcctggaacatctccctgccaacagttccaaaacctccacctaagccacccagcccacccgcccctggtgcacctgtcagtaggattttgtttcttaccgacctgcactgggaccacgattacctcgaagggactgatccggactgcgctgacccattatgctgcagaaggggcagcgggttgccacccgcgagcaggcctggcgccggctactggggcgaatatagtaagtgcgatctgcccctgcgcaccttagaatctctactgagcggactgggcccagcgggaccattcgatatggtgtattggacgggtgatatcccagctcatgatgtgtggcaccaaactaggcaggatcaactgcgagctctgacaaccgtgacggccctggtcagaaagtttctgggcccagtgcccgtttatcccgcagttggcaaccatgagtctacgcccgttaacagttttcccccaccctttattgagggcaaccactctagtcgttggttgtacgaagccatggccaaagcctgggaaccgtggctgcccgccgaggccctccgcaccctaagaattggtggcttttacgcgttaagcccctatcccggactcaggttgatctccctgaacatgaacttctgctctcgggagaacttctggctcttgatcaattctacggatccagcagggcaactgcagtggctcgtcggcgaactacaggctgcggaggatagaggcgataaggttcatatcataggccacattccgcctggccattgcctgaagtcatggtcttggaattactatcgaattgtggctcggtatgagaataccctcgccgctcagttcttcggacacactcatgtagacgagtttgaggtattttatgacgaagagactttgagccgtcctctcgccgtcgcttttctggcgccctccgccaccacctatatcggcctgaatcctggatatagagtctatcagatagacggtaactactcaggcagctctcacgtggtgctggatcacgaaacctacatactgaatttgacccaggccaacattcctggagcaatcccccactggcagctgctatatagagctagagagacatatggactgccaaacaccctccccactgcatggcataaccttgtgtatcggatgcggggcgacatgcaactgtttcagaccttctggtttctgtaccataaaggacatcccccatccgagccatgtggaactccttgtcgactggcaacgctttgtgctcagctgtcggcccgagcagatagcccagcattgtgtcgtcacctaatgcctgatggtagtttgcctgaagcccagagtctgtggcctcggcctctgttttgttag

SEQ ID NO: 22842 - DNA, 1893 bp, Artificial Sequence
  derived and/or modified sequence
atgcctaggtatggcgctagtcttagacagtcctgtcccagatctgggagagaacagggacaggacggtacagcaggcgcacctggccttttgtggatgggattggtgcttgctcttgcattggccctggccctggccctcgccctgagcgatagcagggttttatgggcgccagcagaagcccatcccctgtccccccagggtcaccctgctcgattacaccgcatcgttcctcggctgcgcgatgtgttcggctggggaaatctaacttgcccaatttgcaagggtctgtttacggctattaatctgggactgaaggagcctaatgtggccagagttggatctgttgccattaaactgtgcaacttgctgaagattgcaccgccagccgtgtgccagtcgattgtacacctgttcgaggatgatatggttgaggtgtggcgcagatcagtgctcagtccctctgaggcttgtggactgctgttggggagcacatgcgggcactgggatatcttttcaagttggaatattagcttgccaacagttccaaaaccacctccaaaacctccctccccccctgccccaggcgctcccgtctcacggattctcttcctgacagatctccattgggatcatgactaccttgaaggaaccgaccctgactgtgcagatccgctatgttgccgtcggggttcaggcttgccccctgcctcacggcctggggctgggtattggggtgaatatagcaagtgtgatctgccgctacggacactggagtctctgcttagcggccttggcccagctgggccttttgatatggtatactggacaggagatatccctgcccacgacgtctggcatcagacccgccaggaccagctgcgagctctgaccaccgttaccgctctcgtccggaaattcctggggccagtaccggtctaccccgctgttggtaatcatgaatccacaccagtgaattctttccccccaccctttatcgaaggaaatcattcaagcagatggctctatgaggctatggccaaggcttgggaaccctggctcccagcggaggcccttcggacattgcgaatcggcggattctacgcattgagcccctatcctgggctcaggctgatttctctgaatatgaatttctgttcacgggaaaacttctggctgctgattaactcaacagatcctgccggacaactgcagtggttagtcggggaactgcaagccgctgaagatcggggtgacaaggtacacattataggccacattcctcccggacactgccttaagagctggtcgtggaactactaccgcatcgtcgctagatacgaaaatacactcgccgcacagttcttcggacatacacatgtagatgagttcgaggttttttacgatgaagagacattgagcagacccctggctgtggccttcctcgctccaagcgccaccacctatatcggcctgaatcctgggtacagagtgtatcaaattgatggcaactattcaggctcatcgcacgtggttcttgaccacgagacctacatcctgaacctcactcaagcaaacatacccggtgccataccacattggcagctcttgtatagagctagagagacctacggcctgcctaatacactgccaaccgcctggcataacctcgtttaccggatgcggggagatatgcaactgtttcagaccttttggttcctttaccacaaaggacatcctccatctgaaccatgcggcacgccttgccggttggctaccctctgtgcacagctctctgctcgcgctgattcccccgcactgtgccgccacctcatgcccgacggatccttacccgaagctcagagtctttggcctcgccctctgttctgctag

SEQ ID NO: 22843 - DNA, 1893 bp, Artificial Sequence
  derived and/or modified sequence
atgcctcgttacggagcatcactgaggcagtcctgccccaggtctggccgggagcagggccaggacggaactgcaggtgccccgggcctcctatggatgggtctggttctggcactggccctggctctagccctcgctctggctctctctgacagtcgggtgctgtgggcacctgccgaggcacatcccctctctccacagggacatccagcacggctccatcgcattgttccccgccttcgagacgtttttggctggggtaatctgacatgtcctatctgcaagggcttgttcactgctattaatttaggcttgaaagagcctaatgtggcccgcgtggggagcgtagccatcaagctgtgcaatctgctgaagatcgccccccctgcagtctgccagtccatcgtccatctgttcgaagacgacatggtcgaagtgtggaggcgtagcgtgttgagcccatccgaagcctgcggcctgttgttaggctctacttgcggccattgggacatcttctcctcttggaatatatctttaccaacggtgcccaaacctcccccgaagccaccaagcccaccagccccaggcgctcctgtttccagaatcctgtttctgaccgacctacattgggaccacgactacttggaggggaccgatcccgattgcgccgatccactgtgctgccgccggggtagcggcttaccccctgcttcaaggcccggagcagggtactggggggaatactcgaaatgcgacctacctttgaggacactggaatctctgctctctggcttgggacctgccggaccttttgatatggtttactggactggcgacattcctgcccatgatgtgtggcatcagactaggcaggatcaactgagagccttaacaaccgtaaccgccctggtcaggaaattcctgggacctgtacccgtttatcctgccgttggcaaccatgaaagcacacccgtcaattcatttcctcctccattcattgagggcaaccattcctctcgttggctgtatgaggctatggccaaagcttgggagccgtggttgcccgctgaagcactgcgcaccttgcgtattgggggcttttacgccctgtccccttatcccggcctcagactgatttcccttaacatgaacttctgctcgagggaaaacttttggttgctaattaatagcactgaccccgccggacaattacaatggctcgttggcgaacttcaggccgccgaggacagaggagataaagttcacattatcggccacattccacctggacattgccttaagagctggagctggaactactaccgtattgttgctaggtacgaaaatacgcttgccgctcagtttttcggccatactcatgtggacgaattcgaggtattctatgacgaggagacattatcacggccgctcgctgtagcatttctcgccccatctgccactacttacatcgggttgaacccaggctaccgcgtgtatcagatcgacgggaactactccggaagttcgcacgttgtgctcgaccatgagacctatattctgaacctgacacaggctaacattccaggagcaataccacactggcagctgctataccgtgcgcgcgagacttatggtctacccaatactttgcccactgcatggcataatttggtctataggatgaggggcgatatgcaactctttcagactttctggttcctttatcataaaggccatcctccctcggagccatgtgggacaccgtgcagactggccaccctctgtgcccagctgagcgccagggcggattctccagcactgtgcaggcacttgatgccagatggatctctcccggaagctcaatctctgtggccgagacctctgttctgttag

SEQ ID NO: 22844 - DNA, 1893 bp, Artificial Sequence
  derived and/or modified sequence
atgccacgctatggtgcgtcgcttcggcaatcttgtcctaggtcaggtcgggaacaagggcaggatggaacagcaggagcgcctggtcttctgtggatgggattggttcttgccctcgcactggccctcgccttagccctggctcttagcgattcgcgggtgctctgggctccggctgaggcccacccgctgtccccacagggtcaccccgcaagacttcatagaattgtcccaaggctcagagacgtctttggctggggtaacctgacttgccctatctgcaaagggcttttcaccgctataaacctcggcctgaaagaacctaatgtggcccgtgtcggcagcgttgctatcaagttatgtaacctcctgaagattgcgcctcccgccgtctgtcagtcgattgtgcatctgtttgaagatgatatggtggaagtgtggagaagatcagtgctcagcccctcagaagcctgtgggctccttctaggcagcacttgcggacattgggatatcttttcttcatggaacatcagccttcctaccgtgcccaagcctccacctaaacctccaagccccccggcacccggcgcaccagtttcccgcatcctctttctaaccgatctgcattgggatcacgattacctcgagggcacagaccccgattgcgctgaccccctgtgctgtcgaagaggttctggactaccccccgcctcccgccctggcgcaggttactggggagaatatagtaagtgtgacttgcctctgcgaacccttgagtcgcttctctctggccttggaccagcagggcccttcgatatggtgtactggacaggagacatcccggcccatgacgtttggcaccagaccaggcaggaccaactacgggccttaacaaccgttactgcccttgtgagaaagttcctgggacctgtacccgtttacccggcagtgggcaaccatgagtccacaccagttaatagttttcccccgcccttcattgagggtaaccactccagccgttggctctacgaagctatggcaaaagcctgggaaccttggctgccagcagaagcgctccgtacccttcgaatcggtggattctacgcgctgtctccatacccgggtctgcgcctcatctctcttaatatgaatttctgctcgagagagaacttctggcttttgattaactcaaccgatccggccggacaattacaatggctcgttggcgaacttcaggccgccgaggacagaggagataaagttcacattatcggccacattccacctggacattgccttaagagctggagctggaactactaccgtattgttgctaggtacgaaaatacgcttgccgctcagtttttcggccatactcatgtggacgaattcgaggtattctatgacgaggagacattatcacggccgctcgctgtagcatttctcgccccatctgccactacttacatcgggttgaacccaggctaccgcgtgtatcagatcgacggtaattatagcggcagcagtcacgtcgtactagaccacgaaacttatatcctcaacctaacacaggcaaatatacccggggctataccacactggcagttgttatatcgcgctagggagacctatggactcccgaatacacttcctactgcctggcacaacctcgtctacagaatgagaggggacatgcagttatttcagaccttttggttcctttatcacaaaggtcatcctccctcagaaccctgtggcacaccctgtcgcctcgctactctgtgtgcccagctctccgcccgagccgactccccagccctgtgccgacatctcatgcccgacggcagcttaccagaagcacaatctttgtggccacgccccctcttttgttag

SEQ ID NO: 22845 - DNA, 2188 bp, Artificial Sequence
  derived and/or modified sequence
gtcagccgactacagagaagggtaatcgggtgtccccggcgccgcccggggccctgagggctggctagggtccaggccgggggggacgggacagacgaaccagccccgtgtaggaagcgcgacaatgccccgctacggagcgtcactccgccagagctgccccaggtccggccgggagcagggacaagacgggaccgccggagcccccggactcctttggatgggcctggtgctggcgctggcgctggcgctggcgctggcgctggctctgtctgactctcgggttctctgggctccggcagaggctcaccctctttctccccaaggccatcctgccaggttacatcgcatagtgccccggctccgagatgtctttgggtgggggaacctcacctgcccaatctgcaaaggtctattcaccgccatcaacctcgggctgaaggaacccaatgtggctcgcgtgggctccgtggccatcaagctgtgcaatctgctgaagatagcaccacctgccgtgtgccaatccattgtccacctctttgaggatgacatggtggaggtgtggagacgctcagtgctgagcccatctgaggcctgtggcctgctcctgggctccacctgtgggcactgggacattttctcatcttggaacatctctttgcctactgtgccgaagccgccccccaaaccccctagccccccagccccaggtgcccctgtcagccgcatcctcttcctcactgacctgcactgggatcatgactacctggagggcacggaccctgactgtgcagacccactgtgctgccgccggggttctggcctgccgcccgcatcccggccaggtgccggatactggggcgaatacagcaagtgtgacctgcccctgaggaccctggagagcctgttgagtgggctgggcccagccggcccttttgatatggtgtactggacaggagacatccccgcacatgatgtctggcaccagactcgtcaggaccaactgcgggccctgaccaccgtcacagcacttgtgaggaagttcctggggccagtgccagtgtaccctgctgtgggtaaccatgaaagcacacctgtcaatagcttccctccccccttcattgagggcaaccactcctcccgctggctctatgaagcgatggccaaggcttgggagccctggctgcctgccgaagccctgcgcaccctcagaattggggggttctatgctctttccccataccccggtctccgcctcatctctctcaatatgaatttttgttcccgtgagaacttctggctcttgatcaactccacggatcccgcaggacagctccagtggctggtgggggagcttcaggctgctgaggatcgaggagacaaagtgcatataattggccacattcccccagggcactgtctgaagagctggagctggaattattaccgaattgtagccaggtatgagaacaccctggctgctcagttctttggccacactcatgtggatgaatttgaggtcttctatgatgaagagactctgagccggccgctggctgtagccttcctggcacccagtgcaactacctacatcggccttaatcctggttaccgtgtgtaccaaatagatggaaactactccgggagctctcacgtggtcctggaccatgagacctacatcctgaatctgacccaggcaaacataccgggagccataccgcactggcagcttctctacagggctcgagaaacctatgggctgcccaacacactgcctaccgcctggcacaacctggtatatcgcatgcggggcgacatgcaacttttccagaccttctggtttctctaccataagggccacccaccctcggagccctgtggcacgccctgccgtctggctactctttgtgcccagctctctgcccgtgctgacagccctgctctgtgccgccacctgatgccagatgggagcctcccagaggcccagagcctgtggccaaggccactgttttgctagggccccagggcccacatttgggaaagttcttgatgtaggaaagggtgaaaaagcccaaatgctgctgtggttcaaccaggcaagatcatccggtgaaagaaccagtccctgggccccaaggatgccggggaaacaggaccttctcctttcctggagctggtttagctggat

SEQ ID NO: 22846 - RNA, 1893 nt, Artificial Sequence
  derived and/or modified sequence
augccucguuacggagcaucacugaggcaguccugccccaggucuggccgggagcagggccaggacggaacugcaggugccccgggccuccuauggaugggucugguucuggcacuggcccuggcucuagcccucgcucuggcucucucugacagucgggugcugugggcaccugccgaggcacauccccucucuccacagggacauccagcacggcuccaucgcauuguuccccgccuucgagacguuuuuggcugggguaaucugacauguccuaucugcaagggcuuguucacugcuauuaauuuaggcuugaaagagccuaauguggcccgcguggggagcguagccaucaagcugugcaaucugcugaagaucgcccccccugcagucugccaguccaucguccaucuguucgaagacgacauggucgaaguguggaggcguagcguguugagcccauccgaagccugcggccuguuguuaggcucuacuugcggccauugggacaucuucuccucuuggaauauaucuuuaccaacggugcccaaaccucccccgaagccaccaagcccaccagccccaggcgcuccuguuuccagaauccuguuucugaccgaccuacauugggaccacgacuacuuggaggggaccgaucccgauugcgccgauccacugugcugccgccgggguagcggcuuacccccugcuucaaggcccggagcaggguacuggggggaauacucgaaaugcgaccuaccuuugaggacacuggaaucucugcucucuggcuugggaccugccggaccuuuugauaugguuuacuggacuggcgacauuccugcccaugauguguggcaucagacuaggcaggaucaacugagagccuuaacaaccguaaccgcccuggucaggaaauuccugggaccuguacccguuuauccugccguuggcaaccaugaaagcacacccgucaauucauuuccuccuccauucauugagggcaaccauuccucucguuggcuguaugaggcuauggccaaagcuugggagccgugguugcccgcugaagcacugcgcaccuugcguauugggggcuuuuacgcccuguccccuuaucccggccucagacugauuucccuuaacaugaacuucugcucgagggaaaacuuuugguugcuaauuaauagcacugaccccgccggacaauuacaauggcucguuggcgaacuucaggccgccgaggacagaggagauaaaguucacauuaucggccacauuccaccuggacauugccuuaagagcuggagcuggaacuacuaccguauuguugcuagguacgaaaauacgcuugccgcucaguuuuucggccauacucauguggacgaauucgagguauucuaugacgaggagacauuaucacggccgcucgcuguagcauuucucgccccaucugccacuacuuacaucggguugaacccaggcuaccgcguguaucagaucgacgggaacuacuccggaaguucgcacguugugcucgaccaugagaccuauauucugaaccugacacaggcuaacauuccaggagcaauaccacacuggcagcugcuauaccgugcgcgcgagacuuauggucuacccaauacuuugcccacugcauggcauaauuuggucuauaggaugaggggcgauaugcaacucuuucagacuuucugguuccuuuaucauaaaggccauccucccucggagccaugugggacaccgugcagacuggccacccucugugcccagcugagcgccagggcggauucuccagcacugugcaggcacuugaugccagauggaucucucccggaagcucaaucucuguggccgagaccucuguucuguuag

SEQ ID NO: 22847 - RNA, 1893 nt, Artificial Sequence
  derived and/or modified sequence
augccacgcuauggugcgucgcuucggcaaucuuguccuaggucaggucgggaacaagggcaggauggaacagcaggagcgccuggucuucuguggaugggauugguucuugcccucgcacuggcccucgccuuagcccuggcucuuagcgauucgcgggugcucugggcuccggcugaggcccacccgcuguccccacagggucaccccgcaagacuucauagaauugucccaaggcucagagacgucuuuggcugggguaaccugacuugcccuaucugcaaagggcuuuucaccgcuauaaaccucggccugaaagaaccuaauguggcccgugucggcagcguugcuaucaaguuauguaaccuccugaagauugcgccucccgccgucugucagucgauugugcaucuguuugaagaugauaugguggaaguguggagaagaucagugcucagccccucagaagccugugggcuccuucuaggcagcacuugcggacauugggauaucuuuucuucauggaacaucagccuuccuaccgugcccaagccuccaccuaaaccuccaagccccccggcacccggcgcaccaguuucccgcauccucuuucuaaccgaucugcauugggaucacgauuaccucgagggcacagaccccgauugcgcugacccccugugcugucgaagagguucuggacuaccccccgccucccgcccuggcgcagguuacuggggagaauauaguaagugugacuugccucugcgaacccuugagucgcuucucucuggccuuggaccagcagggcccuucgauaugguguacuggacaggagacaucccggcccaugacguuuggcaccagaccaggcaggaccaacuacgggccuuaacaaccguuacugcccuugugagaaaguuccugggaccuguacccguuuacccggcagugggcaaccaugaguccacaccaguuaauaguuuucccccgcccuucauugaggguaaccacuccagccguuggcucuacgaagcuauggcaaaagccugggaaccuuggcugccagcagaagcgcuccguacccuucgaaucgguggauucuacgcgcugucuccauacccgggucugcgccucaucucucuuaauaugaauuucugcucgagagagaacuucuggcuuuugauuaacucaaccgauccggccggacaauuacaauggcucguuggcgaacuucaggccgccgaggacagaggagauaaaguucacauuaucggccacauuccaccuggacauugccuuaagagcuggagcuggaacuacuaccguauuguugcuagguacgaaaauacgcuugccgcucaguuuuucggccauacucauguggacgaauucgagguauucuaugacgaggagacauuaucacggccgcucgcuguagcauuucucgccccaucugccacuacuuacaucggguugaacccaggcuaccgcguguaucagaucgacgguaauuauagcggcagcagucacgucguacuagaccacgaaacuuauauccucaaccuaacacaggcaaauauacccggggcuauaccacacuggcaguuguuauaucgcgcuagggagaccuauggacucccgaauacacuuccuacugccuggcacaaccucgucuacagaaugagaggggacaugcaguuauuucagaccuuuugguuccuuuaucacaaaggucauccucccucagaacccuguggcacacccugucgccucgcuacucugugugcccagcucuccgcccgagccgacuccccagcccugugccgacaucucaugcccgacggcagcuuaccagaagcacaaucuuuguggccacgcccccucuuuuguuag

SEQ ID NO: 22848 - protein, 364 aa, Artificial Sequence
  derived and/or modified sequence
MRLLEKLCSSAAGSSAPKPAFAKVLTPNRIPEFCIPPRLPAPCTLESPIRAAAVPRRCAAESDLWPRAADEDAGRTDWDPRSQAALSLPHLPRVRTTYGFCALLESPHTRRKESLLLGGPPAPRPRAHSCGGGGGPDAPLGTLCGPRGPGPATPAAPGGPRLPQDALAAGPRRCRLLRVPDGLLSRALRAGRSRRLARVRSVSSGNEDEERRAGSESPARAPSSSPLSSRAPLPERLEAKGTVALGRAGDALRLAAEYCPGTRRLRLRLLRAESLFGGAPGPRAVRCRLSLVLRPPGTARWQCSAVVGRSRKASFDQDFCFDGLSEDEVRRLAVRVKARDEGRGRDRGRLLGQGELSLGALLLL

SEQ ID NO: 22849 - DNA, 1095 bp, Artificial Sequence
  derived and/or modified sequence
atgcgattattagaaaagctctgtagctcagccgccggctcaagcgcccccaaaccagcctttgccaaggtgcttactcctaatcgcatcccagaattctgcattccaccccggcttccggctccttgcaccctcgaatcacctatccgagccgcagcggtccctcgccggtgcgcagcagagtcagatctctggccaagagccgccgacgaagatgccggccgcaccgattgggacccacgttctcaggccgctcttagtctgcctcaccttccacgcgtccggactacctatggtttttgcgccctgttagagagtccacacaccagacgcaaggagagcttgctgttgggaggtcccccagctcctagaccacgggctcacagctgcggtggaggcgggggacccgatgctccgttgggcacactctgtggtcctagaggcccgggcccagctaccccagcagctccggggggcccacgacttccacaagacgccttggccgccggcccccgtcgctgtaggttgctgcgggtgccagacggacttctcagcagggccttacgagctgggaggtctagaaggctagctagagttcggtcagtaagttccggtaacgaggatgaagaaagaagagccggcagcgaatctccagctcgagcgccaagtagttcgcccctgagcagccgtgcacctctgcctgagcgactcgaagcgaaagggacagtggctttgggaagggctggggatgccctccgactggccgcggagtattgtccggggacgcggagattgcggctccgccttctcagagccgagtctctgttcggcggcgcccctgggcctcgtgcagtccgctgtaggctgagcctcgtgctcaggcccccgggtaccgctcggtggcagtgtagcgccgtggtcgggcgctctagaaaagctagtttcgatcaagacttctgcttcgatggcctgtcagaagacgaagtccggaggctggccgtcagggttaaggcgcgagatgagggcagaggtcgggacagagggagactgctgggtcaaggcgagctcagtttgggggcactcctactgctttag

SEQ ID NO: 22850 - DNA, 1095 bp, Artificial Sequence
  derived and/or modified sequence
atgaggctgctggagaagctgtgcagcagcgctgctggcagcagcgcccccaagccagcctttgccaaggtgctgacccccaaccgcatccctgagttctgcatccccccccggctgcctgccccctgcaccctggagagccccatccgggctgctgctgtgccccggcgctgtgccgctgagagtgacctgtggcccagggctgctgatgaagatgctggccgcacagactgggaccccaggagccaggccgccctgagcctgccccacctgccccgggtgaggaccacctacggcttctgtgccctgctggagagcccccacaccaggaggaaggagagcctgctgctgggcggccccccagccccccggccccgggcccacagctgtggcggcggcggcggcccagatgcccccctgggcaccctgtgtggcccccggggccctggccctgccaccccagctgcccctgggggcccccggctgccccaggatgccctggccgccggcccccggcgctgccgcctgctgcgggtgcctgatggcctgctgagccgggccctgcgggccggccgcagccggcggctggcccgggtgcgctctgtgtcctctggaaatgaagatgaggagaggagagctggcagcgagagccctgcccgggcccccagcagcagccccctgagcagccgggcccccctgcctgagcggctggaggccaagggcaccgtggccctgggccgggctggagatgccctgcggctggccgctgagtactgccccggcacccggcggctgcggctgcggctgctgcgggcagagagcctgtttggaggagcccctggccccagggctgtgcgctgccgcctgagcctggtgctgcggcccccaggcacagcccgctggcagtgcagcgctgtggtgggccgcagcaggaaggccagctttgaccaggacttctgctttgatggcctgtctgaagatgaggtgcggcggctggccgtgcgggtgaaggccagagatgagggccggggccgggaccggggccgcctgctgggccagggcgagctgagcctgggcgccctgctgctgctgtag

SEQ ID NO: 22851 - DNA, 1095 bp, Artificial Sequence
  derived and/or modified sequence
atgcggctgctggagaagctgtgcagcagcgccgccggcagcagcgcccctaagccagctttcgccaaggttttaacacctaacagaatcccagagttctgcattccacctaggctccccgcgccttgcactctggagtctcctattagagctgccgctgtgcctcgaaggtgtgccgcggagtccgacctgtggccccgagctgccgatgaagacgcagggagaacagactgggacccacgctctcaagccgcgctcagcctgccccacttaccacgagtgaggaccacttatgggttctgcgccctgctggagtccccccatacaaggagaaaggaatccctgctgctgggagggcctcctgcaccacgaccccgggcacattcctgtggtgggggtggagggcccgacgcgccactgggcaccctgtgtggtccccgaggtcccgggcccgctacccccgctgctcccggtggccctaggcttccgcaggatgctctggctgctggccctcggagatgtagactactgcgtgtgcccgacggacttctgtcacgggcgctcagagctggtcgctcaagacgccttgcgagggtgcgttctgtgtcctcaggtaatgaagacgaagaaagacgagctggctccgaaagccccgctcgagctcctagcagcagtcctctgagcagtagagcacctctgcctgaacgcctggaggctaaaggaaccgtggctcttggtagggcgggcgacgcgttgagactcgccgctgaatactgtcctggtacccgcagactcagactgcgattgctccgggctgagtcgctctttggcggggccccaggcccacgtgctgtgagatgtagattatccctggttctcagaccccccggcaccgcccgttggcagtgttccgctgtcgttgggaggagtcgcaaggctagttttgatcaggatttctgctttgacggcctcagcgaggatgaggtgaggaggctcgccgtgagggttaaagcacgggatgagggcaggggacgggatagagggaggctgctgggccagggcgagctctctctaggggcccttctgctgctgtag

SEQ ID NO: 22852 - DNA, 1095 bp, Artificial Sequence
  derived and/or modified sequence
atgcgacttctggaaaaactttgtagttcagcagcgggttccagcgcaccaaaacccgctttcgcaaaggtgttgactccaaaccgcattccggaattctgcatccctcccaggctgcctgccccatgcacccttgaaagccccattagggcggctgccgtacctaggcgatgcgcagccgaatcagatttgtggcctagagccgcagacgaggacgcaggcagaactgactgggatcctagatcacaagccgcactgagcctacctcacctgcctagggtgagaacaacctatgggttttgcgccctgctggagtccccccacacccgcaggaaagaatcacttttactgggcggacccccagctcctagacctcgggctcacagctgcgggggtggtgggggacctgacgccccactgggaactttatgcggaccacggggtccaggacccgctacaccagccgcaccaggaggaccccgactgccccaggatgcactggcagctgggcctagacgctgcagactattgagagtgccagatgggctcctgtccagagcactcagggctggacgtagccgacggctcgctcgcgtcagatccgtgtcttccggcaatgaagacgaggaaagaagggctgggagcgagtctccagccagagcgccatcaagttctcccttgagtagcagagccccacttccagaacgattggaagctaaggggactgtggccctcggcagggctggcgacgcgttacgactggctgcagagtactgcccgggaacgcgcaggctgaggcttagactgctgagggccgagtcattgttcggaggcgcacccggacctcgggcagtgcggtgccgactttctctggtcctgcgcccaccaggtacagcccgatggcagtgcagcgccgtcgtagggcgtagtcgcaaagcctccttcgaccaagacttttgttttgacggactgagcgaagacgaggtgaggcgactggccgtgagagtgaaggccagggatgagggaagggggagggaccggggtagactgctgggccaaggagagctcagcttaggcgctcttctcttgctttag

SEQ ID NO: 22853 - DNA, 1579 bp, Artificial Sequence
  derived and/or modified sequence
agtactgaaggtggcgcctcggcagcgggctagaggccactggcactgagcttgcaaccagatccagagacactgaagaagagagaaaggcgcacctcttcccgccactcctagccccagcctccaaggatgcggctcctcgagaaactctgttcctcggccgcaggcagctccgcgccgaagcccgccttcgccaaagtgctcacgccgaatcgcatccccgaattctgcatcccgccgcggctgccggccccttgcacgctcgagtctccaatccgggccgccgccgtgccccggcgctgcgccgctgaaagcgacctgtggccccgcgcggcagacgaggacgccggccgcacggactgggacccgcgctcgcaggcagcgctgtcactgccgcacctgccccgtgtgcgcaccacctacggcttctgcgcgctgctcgagagcccgcacacgcgccgcaaggagtcgctcctgctcgggggcccgcccgcgccccggccccgggcccacagctgcggcggcggcggaggcccggacgcccccctggggaccctgtgcggcccgcgaggtccgggcccggccacccccgcggcccccggcggtccccgcctgccccaggacgcgctcgctgcggggccccgccgctgccgcctcctgcgcgtccccgacgggctgctgagtcgcgcgctgcgggctggaaggagtcgccgcctggcccgcgtccgctccgtctccagcgggaacgaggacgaggagcgccgcgcgggatccgagtccccggcccgggccccctcctcgagcccgctgtcatccagggccccgcttcctgagcgcctggaggccaagggcaccgtggctctgggccgcgccggcgacgccctgcgcctggctgctgagtactgtccgggaacccggcgtctccgcctccggctgctccgcgcggagagcctgttcggaggcgcccccgggccccgcgccgtccgctgccgcctcagcctcgtcctgcggccgccgggcactgcgcgttggcaatgcagcgctgtggtggggcgcagccgcaaggcctcctttgaccaggacttttgcttcgacggcctctcggaagacgaggtgcgccgcctggccgttcgcgtcaaggcccgggatgagggtcgcggccgggatcggggccgcctgctgggccagggtgagctgtccctgggcgccctcctgctgctctgagggcccagccctccccggggcgctctgccctggagactccggacactgacagccgcgtggtacagaataaacgttatttatttttttatttatgatactgctttattgacgttttacttcctcaccatccacatttgtcatcgtctattggtaaagaagaaaaagataatgactccctgttctgttcacaggacccccatatctctttccagaccatttttgcattccaaggaaaaatgggttggcttgggactgggagagaaaggaagtacacccatctgcattgtttttaattccttccggttttctatcaatgttacagtttttttttaataaagcaagttattcattcaga

SEQ ID NO: 22854 - DNA, 1095 bp, Artificial Sequence
  derived and/or modified sequence
atgagactgctggagaagctgtgcagcagcgccgccggcagcagcgcccccaagcccgccttcgccaaggtgctgacccccaacagaatccccgagttctgcatcccccccagactgcccgccccctgcaccctggagagccccatcagagccgccgccgtgcccagaagatgcgccgccgagagcgacctgtggcccagagccgccgacgaggacgccggcagaaccgactgggaccccagaagccaggccgccctgagcctgccccacctgcccagagtgagaaccacctacggcttctgcgccctgctggagagcccccacaccagaagaaaggagagcctgctgctgggcggcccccccgcccccagacccagagcccacagctgcggcggcggcggcggccccgacgcccccctgggcaccctgtgcggccccagaggccccggccccgccacccccgccgcccccggcggccccagactgccccaggacgccctggccgccggccccagaagatgcagactgctgagagtgcccgacggcctgctgagcagagccctgagagccggcagaagcagaagactggccagagtgagaagcgtgagcagcggcaacgaggacgaggagagaagagccggcagcgagagccccgccagagcccccagcagcagccccctgagcagcagagcccccctgcccgagagactggaggccaagggcaccgtggccctgggcagagccggcgacgccctgagactggccgccgagtactgccccggcaccagaagactgagactgagactgctgagagccgagagcctgttcggcggcgcccccggccccagagccgtgagatgcagactgagcctggtgctgagaccccccggcaccgccagatggcagtgcagcgccgtggtgggcagaagcagaaaggccagcttcgaccaggacttctgcttcgacggcctgagcgaggacgaggtgagaagactggccgtgagagtgaaggccagagacgagggcagaggcagagacagaggcagactgctgggccagggcgagctgagcctgggcgccctgctgctgctgtag

SEQ ID NO: 22855 - protein, 760 aa, Artificial Sequence
  derived and/or modified sequence
MKEAALICLAPSVPPILTVKSWDTMQLRAARSRCTNLLAASYIENQQHLQHLELRDLRGLGELRNLTIVKSGLRFVAPDAFHFTPRLSRLNLSFNALESLSWKTVQGLSLQELVLSGNPLHCSCALRWLQRWEEEGLGGVPEQKLQCHGQGPLAHMPNASCGVPTLKVQVPNASVDVGDDVLLRCQVEGRGLEQAGWILTELEQSATVMKSGGLPSLGLTLANVTSDLNRKNVTCWAENDVGRAEVSVQVNVSFPASVQLHTAVEMHHWCIPFSVDGQPAPSLRWLFNGSVLNETSFIFTEFLEPAANETVRHGCLRLNQPTHVNNGNYTLLAANPFGQASASIMAAFMDNPFEFNPEDPIPDTNSTSGDPVEKKDETPFGVSVAVGLAVFACLFLSTLLLVLNKCGRRNKFGINRPAVLAPEDGLAMSLHFMTLGGSSLSPTEGKGSGLQGHIIENPQYFSDACVHHIKRRDIVLKWELGEGAFGKVFLAECHNLLPEQDKMLVAVKALKEASESARQDFQREAELLTMLQHQHIVRFFGVCTEGRPLLMVFEYMRHGDLNRFLRSHGPDAKLLAGGEDVAPGPLGLGQLLAVASQVAAGMVYLAGLHFVHRDLATRNCLVGQGLVVKIGDFGMSRDIYSTDYYRVGGRTMLPIRWMPPESILYRKFTTESDVWSFGVVLWEIFTYGKQPWYQLSNTEAIDCITQGRELERPRACPPEVYAIMRGCWQREPQQRHSIKDVHARLQALAQAPPVYLDVLG

SEQ ID NO: 22856 - DNA, 2283 bp, Artificial Sequence
  derived and/or modified sequence
atgaaagaagctgcactaatctgcttggctccctccgtgcctcccattctcaccgtcaagagttgggacactatgcagctgagggctgcacggagcagatgtaccaatctccttgctgcgagttacatcgagaaccagcaacatctgcagcatctagaacttcgtgacctcagagggcttggggaacttcgaaacctgaccattgtgaaaagtggcctccgatttgttgccccagacgccttccactttactccccgactctcccggttgaacctcagcttcaatgcattggaaagcctgtcttggaaaactgtgcagggattatccctccaggaactcgtgctgtctggcaatcctcttcactgctcatgcgcgctgaggtggttacagcgatgggaggaggaggggttagggggagtgccggaacagaagctccagtgccacggccagggaccccttgcccacatgcctaacgcctcctgcggcgtgcccacactgaaggttcaggtaccaaacgcttccgtggatgtaggggacgacgtgctgcttcggtgccaggttgagggccgaggcctggaacaggcagggtggatcctgacagagctcgagcagtccgccactgtcatgaaatccggcggcctcccttctctgggtttaacattggccaacgtaacctccgacttgaaccggaagaacgttacttgctgggctgaaaatgacgtcggcagagccgaagtgtcagtccaggttaatgtgagctttccggcgagtgtgcaactgcatacagctgttgaaatgcaccactggtgcatcccttttagtgttgatggtcagccggctccctctctgagatggctgtttaacggttcagtgctgaacgagaccagctttatctttacagaatttctggaaccagctgccaatgagaccgtccggcatggctgccttaggctgaaccagcctactcatgttaacaacggcaattacactcttcttgcagccaatccattcggacaagcctctgcgtccattatggcagcattcatggataacccctttgagtttaatcctgaggatccaatcccagacacaaactccacaagtggcgaccctgtggaaaagaaagatgaaacaccctttggagtgtccgttgccgtaggtttggcggtcttcgcatgtctcttcctctctaccctgttgctcgtccttaacaagtgcggaaggcgaaataaatttgggatcaatagacccgccgtacttgctccggaggacggattagctatgtccctccacttcatgaccctcggcggcagctctctaagtccgaccgagggcaagggtagcggtctgcagggacacataatcgaaaacccgcagtatttttcagacgcttgcgtgcatcacatcaagcgaagagatatagtgctaaagtgggaactgggagagggcgcatttggcaaagtgtttcttgcagagtgccacaacctgctccccgaacaagacaagatgctggtcgctgtcaaggctctgaaagaagcctcagagtctgcccggcaggatttccagcgagaggcagagcttcttacgatgttgcaacatcagcatatcgtgaggtttttcggtgtgtgtaccgaaggacgaccactgctgatggtttttgaatatatgagacacggtgatctgaataggtttctgcggtctcacggaccagatgcgaagcttctagcaggtggtgaggatgttgctcctggccctcttggactgggccagttgctcgccgtggctagccaggttgccgctggtatggtttacctggccggattgcattttgtccacagggacttggccacacgaaactgtttagtcggccagggcttagtcgtgaagatcggtgacttcggaatgtccagggacatttactccaccgactattatagggtaggcgggcgcacgatgctgcccatcagatggatgccccctgaaagtattctgtaccgcaagtttacaacagagagtgatgtgtggtcctttggagtagtgctctgggagatcttcacttatgggaagcagccgtggtaccagctgtccaacactgaagcaatcgactgcatcacccaagggcgtgagcttgaacggcctcgagcttgtcctcccgaggtgtatgccattatgaggggatgttggcaaagggaacctcagcaaagacacagtatcaaagatgtccatgctagactccaagccctggcccaagctccacctgtgtacctggacgtcctcggttag

SEQ ID NO: 22857 - DNA, 2283 bp, Artificial Sequence
  derived and/or modified sequence
atgaaggaggccgccctgatctgcctggcccccagcgtgccccccatcctgactgtgaagtcctgggacaccatgcagctgcgggccgcccggagccgctgcaccaacctgctggccgccagctacatcgagaaccagcagcacctgcagcacctggagctgcgggacctgcggggcctgggggagctgaggaacctgaccatcgtgaagagcggcctgcgctttgtggccccagatgccttccacttcaccccccggctgagccggctgaacctgtccttcaatgccctggagagcctgtcctggaagacagtgcagggcctgagcctgcaggagctggtgctgagcggcaaccccctgcactgcagctgtgccctgcgctggctgcagcgctgggaggaggagggcctgggcggcgtgcctgagcagaagctgcagtgccacggccagggccccctggcccacatgcccaatgccagctgtggggtgcccaccctgaaggtgcaggtgcccaatgcctctgtggatgtgggagatgatgtgctgctgcgctgccaggtggagggccggggcctggagcaggccggctggatcctgacagagctggagcagagcgccaccgtgatgaagagcggcggcctgcccagcctgggcctgaccctggccaacgtgaccagtgacctgaacaggaagaatgtgacctgctgggccgagaatgatgtgggccgggcagaggtgtctgtgcaggtgaatgtgtccttccctgcctctgtgcagctgcacacagctgtggagatgcaccactggtgcatccccttctctgtggatggccagcctgcccccagcctgcgctggctgttcaacggctctgtgctgaatgagaccagcttcatcttcacagagttcctggagcctgctgccaatgagaccgtgagacatggctgcctgcggctgaaccagcccacccacgtgaacaacggcaactacaccctgctggccgccaaccccttcggccaggccagcgccagcatcatggccgccttcatggacaacccctttgagttcaaccctgaggaccccatcccagacaccaacagcaccagcggggaccctgtggagaagaaggatgagacccccttcggcgtgtctgtggccgtgggcctggccgtgtttgcctgcctcttcctgagcaccctgctgctggtgctgaacaagtgtggcagaagaaacaagtttggcatcaacagacctgctgtgctggccccagaagatggcctggccatgagcctgcacttcatgaccctgggcggcagcagcctgagccccacagagggcaagggcagcggcctgcagggccacatcatcgagaacccccagtacttcagtgatgcctgtgtgcaccacatcaagagaagagacatcgtgctgaagtgggagctgggggagggcgccttcggcaaggtgttcctggccgagtgccacaacctgctgcctgagcaggacaagatgctggtggccgtgaaggccctgaaggaggccagcgagagcgcccggcaggacttccagcgggaggccgagctgctgaccatgctgcagcaccagcacatcgtgcgcttcttcggcgtgtgcacagagggccggcccctgctgatggtgtttgagtacatgagacatggagacctgaaccgcttcctgcggagccacggcccagatgccaagctgctggccggaggagaagatgtggcccctggccccctgggcctgggccagctgctggccgtggccagccaggtggccgccggcatggtgtacctggccggcctgcactttgtgcaccgggacctggccaccaggaactgcctggtgggccagggcctggtggtgaagatcggggactttggcatgagccgggacatctacagcacagactactacagagtgggcggccgcaccatgctgcccatccgctggatgcctcctgagagcatcctgtacaggaagttcaccacagaaagtgatgtgtggagctttggagtggtgctgtgggagatcttcacctacggcaagcagccctggtaccagctgagcaacacagaggccatcgactgcatcacccagggccgggagctggagcggccccgggcctgccccccagaggtgtatgccatcatgaggggctgctggcagcgggagccccagcagaggcacagcatcaaggatgtgcacgcccggctgcaggccctggcccaggcccctcctgtgtacctggatgtgctgggctag

SEQ ID NO: 22858 - DNA, 2283 bp, Artificial Sequence
  derived and/or modified sequence
atgaaggaggccgccctgatctgcctggcccccagcgtgccccccatcctcacagttaaatcctgggatacaatgcagctgagagccgctagatctcggtgcaccaatctcttagcagcctcatatatagagaatcaacaacacctccagcacctcgagctccgggacttgagagggctgggcgagctgcgcaacctcactatcgtcaagtcaggtcttaggttcgtagctccggacgcattccacttcactccccgcctctcccggctgaatctgagctttaatgctttggagagcctttcatggaagacagtccaaggactcagtctgcaggaactggtactgagtggcaatccactccattgctcatgcgcgttgcgatggctgcaacggtgggaggaggagggcctggggggcgtgcccgaacaaaagttgcagtgccacggccagggccctttggcgcacatgcccaatgcttcctgcggggtgcctacactcaaggtacaggtcccgaacgcgagtgtggatgtgggggacgacgtcctcctgaggtgtcaggtggaaggccgcggactggagcaggccggctggatcctgactgagttggagcagtctgcaaccgtgatgaagagcggcggcctgccctccttgggcctgacccttgctaacgttacctccgacctcaacagaaaaaatgtcacttgctgggccgagaatgacgtaggacgggctgaagtctctgttcaggtgaatgtgagcttccccgcaagtgtgcaactgcataccgcagtcgagatgcaccactggtgcatcccattttcagtagacggtcaacctgcaccatcactccgatggttgttcaacgggagcgtgctgaatgaaacatcatttattttcacagaatttctggagcctgctgcgaatgagaccgttcgtcacggatgcctgagattgaaccagcccacacatgtcaataacggcaattacacgctgctcgcagccaacccgtttggacaggcctctgcatcaattatggctgctttcatggataacccctttgaatttaatcccgaggatcctattcctgacaccaacagcacgagcggcgatcctgtcgagaagaaagatgaaactccatttggcgtgtccgtggctgtcggattagcagtctttgcctgcctgttcctgtccaccctgttgctggtgctgaacaagtgcggccggcggaataagttcgggattaatagacccgcggtccttgcgccagaggatggactagcaatgagcctccattttatgacactgggagggtcaagcttgtcccctactgaaggtaaaggctccggcctccaagggcatattatcgagaatccgcaatattttagcgatgcctgcgtgcaccacattaagaggcgggacatcgtgctaaagtgggagctgggcgagggggcgtttggaaaagtgttcctggccgagtgtcataacctgttgcccgagcaggataagatgcttgtggctgtgaaagcattgaaggaagccagcgagagtgcccgtcaggactttcaacgggaggcagagttattgaccatgctgcaacatcaacatattgtcagattctttggggtgtgtactgaggggcgaccgctgctgatggtgttcgaatatatgagacacggtgacttgaaccgctttctccgaagccatggccctgacgctaagttgcttgcaggcggcgaggacgttgcccctggtcccctcggcttgggacaactgctcgccgtggcgtcccaggtcgctgctggaatggtctatttggcaggcctgcattttgtccaccgcgacctcgcaacgagaaactgcttagtgggccaagggctcgtagtgaagataggcgattttggcatgtcacgcgatatttatagcactgactactatagggttggtggtcggaccatgcttccgatcaggtggatgcccccagaaagtattttgtaccggaagtttaccaccgagagcgatgtgtggtctttcggcgtcgtgttgtgggaaattttcacttatgggaagcaaccatggtatcagttgagcaacactgaggccatcgattgcataacacagggtcgcgagctggagcggcctcgcgcctgccctccagaggtttacgcaataatgcgggggtgctggcagagagaaccacagcagcgacactcaataaaagacgtacacgctagacttcaagctctggcccaggcacctccagtttatctcgacgttctggggtag

SEQ ID NO: 22859 - DNA, 2609 bp, Artificial Sequence
  derived and/or modified sequence
caggagagaaggactgagacgggaatgtggaatgcactgggcaaatggtcactgacacagagtgcagatgcctgcttctgggactcaatgcactgcaccctggtcatctgcggactcagcctgagcttccagagggcctaggagcagtaagggagtgagtgggcaactcggcgcatgaaggaggccgccctcatctgcctggcaccctctgtacccccgatcttgacggtgaagtcctgggacaccatgcagttgcgggctgctagatctcggtgcacaaacttgttggcagcaagctacatcgagaaccagcagcatctgcagcatctggagctccgtgatctgaggggcctgggggagctgagaaacctcaccatcgtgaagagtggtctccgtttcgtggcgccagatgccttccatttcactcctcggctcagtcgcctgaatctctccttcaacgctctggagtctctctcctggaaaactgtgcagggcctctccttacaggaactggtcctgtcggggaaccctctgcactgttcttgtgccctgcgctggctacagcgctgggaggaggagggactgggcggagtgcctgaacagaagctgcagtgtcatgggcaagggcccctggcccacatgcccaatgccagctgtggtgtgcccacgctgaaggtccaggtgcccaatgcctcggtggatgtgggggacgacgtgctgctgcggtgccaggtggaggggcggggcctggagcaggccggctggatcctcacagagctggagcagtcagccacggtgatgaaatctgggggtctgccatccctggggctgaccctggccaatgtcaccagtgacctcaacaggaagaacgtgacgtgctgggcagagaacgatgtgggccgggcagaggtctctgttcaggtcaacgtctccttcccggccagtgtgcagctgcacacggcggtggagatgcaccactggtgcatccccttctctgtggatgggcagccggcaccgtctctgcgctggctcttcaatggctccgtgctcaatgagaccagcttcatcttcactgagttcctggagccggcagccaatgagaccgtgcggcacgggtgtctgcgcctcaaccagcccacccacgtcaacaacggcaactacacgctgctggctgccaaccccttcggccaggcctccgcctccatcatggctgccttcatggacaaccctttcgagttcaaccccgaggaccccatccctgacactaacagcacatctggagacccggtggagaagaaggacgaaacaccttttggggtctcggtggctgtgggcctggccgtctttgcctgcctcttcctttctacgctgctccttgtgctcaacaaatgtggacggagaaacaagtttgggatcaaccgcccggctgtgctggctccagaggatgggctggccatgtccctgcatttcatgacattgggtggcagctccctgtcccccaccgagggcaaaggctctgggctccaaggccacatcatcgagaacccacaatacttcagtgatgcctgtgttcaccacatcaagcgccgggacatcgtgctcaagtgggagctgggggagggcgcctttgggaaggtcttccttgctgagtgccacaacctcctgcctgagcaggacaagatgctggtggctgtcaaggcactgaaggaggcgtccgagagtgctcggcaggacttccagcgtgaggctgagctgctcaccatgctgcagcaccagcacatcgtgcgcttcttcggcgtctgcaccgagggccgccccctgctcatggtctttgagtatatgcggcacggggacctcaaccgcttcctccgatcccatggacctgatgccaagctgctggctggtggggaggatgtggctccaggccccctgggtctggggcagctgctggccgtggctagccaggtcgctgcggggatggtgtacctggcgggtctgcattttgtgcaccgggacctggccacacgcaactgtctagtgggccagggactggtggtcaagattggtgattttggcatgagcagggatatctacagcaccgactattaccgtgtgggaggccgcaccatgctgcccattcgctggatgccgcccgagagcatcctgtaccgtaagttcaccaccgagagcgacgtgtggagcttcggcgtggtgctctgggagatcttcacctacggcaagcagccctggtaccagctctccaacacggaggcaatcgactgcatcacgcagggacgtgagttggagcggccacgtgcctgcccaccagaggtctacgccatcatgcggggctgctggcagcgggagccccagcaacgccacagcatcaaggatgtgcacgcccggctgcaagccctggcccaggcacctcctgtctacctggatgtcctgggctagggggccggcccaggggctgggagtggttagccggaatactggggcctgccctcagcatcccccatagctcccagcagccccagggtgatctcaaagtatctaattcaccctcagcatgtgggaagggacaggtgggggctgggagtagagga

SEQ ID NO: 22860 - DNA, 2283 bp, Artificial Sequence
  derived and/or modified sequence
atgaaggaggctgctctcatatgccttgccccaagcgtgcctcctatcttgactgttaagtcgtgggacaccatgcagctacgtgcagcacgcagtagatgcacaaacttactggcggcttcatatatcgaaaaccaacagcatctgcaacacttggagctaagggacttgagggggctgggtgagctccgcaatcttactattgtcaaatcgggtctgcgcttcgtggccccagatgctttccatttcacccccaggctgagtaggttgaacctttcattcaatgctctcgagagcctgagttggaagaccgttcagggcctctccctgcaagaacttgttttgtcaggtaacccccttcactgctcttgcgctctccggtggctgcagcggtgggaagaagaaggtctaggaggagtgcccgaacagaagttgcagtgccatgggcaaggaccccttgcccacatgcccaatgcttcttgcggcgtgccgactctaaaagtgcaggtaccgaacgcctccgtagacgtgggcgacgacgttctgcttaggtgccaggtagaggggcgtgggcttgaacaagccggatggattctgactgagctggagcaatcagcgactgttatgaaaagcggcggtctcccaagcttaggcctcacactggccaatgtaactagcgatctgaaccgtaaaaacgtgacttgctgggccgaaaatgatgtgggaagagccgaagtgtctgttcaggtgaatgtgtctttccctgcgagcgttcagctgcatactgcagtagaaatgcatcattggtgcatccccttctctgttgacggacaaccagccccatcccttcgctggttgtttaatggatccgtgttaaatgagacaagttttatattcacagaattcctggagcctgctgcgaacgagacagttcggcacggctgcctccggctgaatcagcccacccacgtgaacaacggcaattacacattgctggcagcgaatcctttcggtcaggcatcggcttccattatggcagcgtttatggacaatccctttgaatttaatccagaggacccaatacctgatactaactctacgtcaggcgatcctgtcgagaagaaggatgaaacgcctttcggcgttagcgtggcggtgggtctggcggtgtttgcctgtctgtttctttccaccctcctgctggtgttgaacaagtgtggtagacggaataagtttggtattaacagaccggcagtccttgcgccagaggacggacttgctatgtcattgcactttatgactttgggtgggtcttcgctctccccaacggagggaaagggcagcgggctgcaaggtcatattatcgaaaaccctcagtacttctccgacgcctgtgtgcatcacattaagcggagggacattgtgctgaaatgggagctcggagaaggggctttcggaaaggtgttcctggccgaatgccacaatctactgccggaacaggataaaatgttggttgcggtcaaggccctaaaagaagcctcggagtctgcacgccaggattttcaacgggaggcagagctgcttacaatgttgcaacatcagcatatcgtgaggttctttggcgtatgcacagagggtcggccattactgatggtgtttgagtatatgagacacggagacctgaaccgcttcctacgttcccatggacctgacgccaagctcctggctgggggtgaagacgtggcccctggcccattggggttggggcagctgcttgcagtagcttctcaggttgccgctggtatggtgtatcttgcgggactgcatttcgtgcaccgcgatctggcaacaagaaattgtcttgtcggtcaaggtctcgtcgtgaagataggcgacttcggaatgtcacgcgatatctattctaccgattactacagggtagggggtagaaccatgctaccgatccgatggatgccaccagagtcaattctctatcggaaattcactactgagtccgacgtttggagctttggtgtggtgctatgggagatattcacatatggtaaacagccctggtatcagctttcaaacacggaggcaattgattgtattacccagggcagggagttggaacgccctcgcgcatgcccacctgaggtgtacgcaattatgaggggatgctggcaaagagagccccagcagaggcacagtattaaggacgttcatgccaggctgcaagctttggctcaggcaccaccagtgtaccttgatgtcctcggttag

SEQ ID NO: 22861 - DNA, 2283 bp, Artificial Sequence
  derived and/or modified sequence
atgaaggaggccgccctgatctgcctggcccccagcgtgccccccatcctgaccgtgaagagctgggacaccatgcagctgagagccgccagaagcagatgcaccaacctgctggccgccagctacatcgagaaccagcagcacctgcagcacctggagctgagagacctgagaggcctgggcgagctgagaaacctgaccatcgtgaagagcggcctgagattcgtggcccccgacgccttccacttcacccccagactgagcagactgaacctgagcttcaacgccctggagagcctgagctggaagaccgtgcagggcctgagcctgcaggagctggtgctgagcggcaaccccctgcactgcagctgcgccctgagatggctgcagagatgggaggaggagggcctgggcggcgtgcccgagcagaagctgcagtgccacggccagggccccctggcccacatgcccaacgccagctgcggcgtgcccaccctgaaggtgcaggtgcccaacgccagcgtggacgtgggcgacgacgtgctgctgagatgccaggtggagggcagaggcctggagcaggccggctggatcctgaccgagctggagcagagcgccaccgtgatgaagagcggcggcctgcccagcctgggcctgaccctggccaacgtgaccagcgacctgaacagaaagaacgtgacctgctgggccgagaacgacgtgggcagagccgaggtgagcgtgcaggtgaacgtgagcttccccgccagcgtgcagctgcacaccgccgtggagatgcaccactggtgcatccccttcagcgtggacggccagcccgcccccagcctgagatggctgttcaacggcagcgtgctgaacgagaccagcttcatcttcaccgagttcctggagcccgccgccaacgagaccgtgagacacggctgcctgagactgaaccagcccacccacgtgaacaacggcaactacaccctgctggccgccaaccccttcggccaggccagcgccagcatcatggccgccttcatggacaaccccttcgagttcaaccccgaggaccccatccccgacaccaacagcaccagcggcgaccccgtggagaagaaggacgagacccccttcggcgtgagcgtggccgtgggcctggccgtgttcgcctgcctgttcctgagcaccctgctgctggtgctgaacaagtgcggcagaagaaacaagttcggcatcaacagacccgccgtgctggcccccgaggacggcctggccatgagcctgcacttcatgaccctgggcggcagcagcctgagccccaccgagggcaagggcagcggcctgcagggccacatcatcgagaacccccagtacttcagcgacgcctgcgtgcaccacatcaagagaagagacatcgtgctgaagtgggagctgggcgagggcgccttcggcaaggtgttcctggccgagtgccacaacctgctgcccgagcaggacaagatgctggtggccgtgaaggccctgaaggaggccagcgagagcgccagacaggacttccagagagaggccgagctgctgaccatgctgcagcaccagcacatcgtgagattcttcggcgtgtgcaccgagggcagacccctgctgatggtgttcgagtacatgagacacggcgacctgaacagattcctgagaagccacggccccgacgccaagctgctggccggcggcgaggacgtggcccccggccccctgggcctgggccagctgctggccgtggccagccaggtggccgccggcatggtgtacctggccggcctgcacttcgtgcacagagacctggccaccagaaactgcctggtgggccagggcctggtggtgaagatcggcgacttcggcatgagcagagacatctacagcaccgactactacagagtgggcggcagaaccatgctgcccatcagatggatgccccccgagagcatcctgtacagaaagttcaccaccgagagcgacgtgtggagcttcggcgtggtgctgtgggagatcttcacctacggcaagcagccctggtaccagctgagcaacaccgaggccatcgactgcatcacccagggcagagagctggagagacccagagcctgcccccccgaggtgtacgccatcatgagaggctgctggcagagagagccccagcagagacacagcatcaaggacgtgcacgccagactgcaggccctggcccaggccccccccgtgtacctggacgtgctgggctag

SEQ ID NO: 22862 - protein, 326 aa, Artificial Sequence
  derived and/or modified sequence
MTGSNEFKLNQPPEDGISSVKFSPNTSQFLLVSSWDTSVRLYDVPANSMRLKYQHTGAVLDCAFYDPTHAWSGGLDHQLKMHDLNTDQENLVGTHDAPIRCVEYCPEVNVMVTGSWDQTVKLWDPRTPCNAGTFSQPEKVYTLSVSGDRLIVGTAGRRVLVWDLRNMGYVQQRRESSLKYQTRCIRAFPNKQGYVLSSIEGRVAVEYLDPSPEVQKKKYAFKCHRLKENNIEQIYPVNAISFHNIHNTFATGGSDGFVNIWDPFNKKRLCQFHRYPTSIASLAFSNDGTTLAIASSYMYEMDDTEHPEDGIFIRQVTDAETKPKST

SEQ ID NO: 22863 - DNA, 981 bp, Artificial Sequence
  derived and/or modified sequence
atgacaggaagtaacgagtttaaacttaatcagccccctgaggatgggatctctagtgtcaagttttcccccaatacttcacagttccttcttgtgagttcctgggatacttcggtgcggctgtacgacgttcctgcaaattccatgagattgaagtatcagcacaccggcgcagtgctggattgtgccttttacgatcccacacatgcttggtccggcggccttgatcaccagctcaagatgcatgatctgaatacagatcaggagaatcttgtgggcacacatgacgccccaatacggtgtgtggaatattgcccagaggtgaacgtgatggtaactggaagctgggaccagaccgtgaagttatgggatccaagaaccccatgcaatgcgggtacatttagtcagccagaaaaggtatacaccctgtcagtttccggcgataggctgatcgtgggcaccgcagggcggcgggtgttagtatgggatctgagaaatatggggtacgtgcagcaacggcgagaatcgtccctgaagtaccagacgcggtgtattcgggcttttcccaacaagcagggctatgtgttatctagtatagagggaagagtggcagtggaatacctggaccctagccccgaagtacaaaagaaaaaatatgcttttaaatgccatcgtctcaaagaaaataacatcgaacagatctacccggtcaacgcgatatcttttcataacatccataacacgttcgcgaccggcggatccgacgggtttgtaaacatctgggacccatttaacaaaaagcgcctgtgccagttccaccgctacccaacatctattgcctctcttgctttctccaatgacgggaccaccctggccatcgcttctagctacatgtacgaaatggatgacacggagcacccagaggatggaatcttcattcggcaggtcaccgacgccgaaaccaaaccgaaatctacttag

SEQ ID NO: 22864 - DNA, 981 bp, Artificial Sequence
  derived and/or modified sequence
atgacaggcagcaatgagttcaagctgaaccagcccccagaagatggcatcagctctgtgaagttcagccccaacaccagccagttcctgctggtgtcctcctgggacacctctgtgcggctgtatgatgtgcctgccaacagcatgaggctgaagtaccagcacactggagctgtgctggactgtgccttctatgaccccacccacgcctggagcggcggcctggaccaccagctgaagatgcatgacctgaacacagaccaggagaacctggtgggcacccatgatgcccccatccgctgtgtggagtactgcccagaggtgaatgtgatggtgacaggctcctgggaccagacagtgaagctgtgggaccccaggaccccctgcaatgccggcaccttcagccagcctgagaaggtgtacaccctgtctgtgtctggggaccggctgattgtgggcacagctggaagaagagtgctggtgtgggacctgaggaacatgggctacgtgcagcagaggcgggagagcagcctgaagtaccagacccgctgcatccgggccttccccaacaagcagggctacgtgctgagcagcattgagggccgggtggccgtggagtacctggaccccagccctgaggtgcagaagaagaagtatgccttcaagtgccaccggctgaaggagaacaacatcgagcagatctaccctgtgaatgccatctccttccacaacatccacaacacctttgccactggaggcagtgatggctttgtgaacatctgggaccccttcaacaagaagaggctgtgccagttccaccgctaccccaccagcatcgccagcctggccttcagcaatgatggcaccaccctggccatcgccagcagctacatgtatgagatggatgacacagagcacccagaagatggcatcttcatccggcaggtgacagatgctgagaccaagcccaagagcacctag

SEQ ID NO: 22865 - DNA, 981 bp, Artificial Sequence
  derived and/or modified sequence
atgaccggcagcaacgagttcaagctgaaccagccccccgaggacggcatcagctccgtgaagttttcaccaaacacaagccagttcctcctggtgagtagctgggacacatcagtgcgtctgtatgacgtgccggctaatagcatgcgccttaagtatcagcacacaggcgctgtcctggattgtgccttctacgaccctacacatgcttggtctggcggtttagaccatcaactgaagatgcacgacctcaatactgatcaggagaacctggtgggcacccatgatgctccaatccgctgcgtcgagtactgtccggaagtcaacgttatggtcacggggtcctgggatcagaccgtaaagttgtgggacccacgtaccccttgcaatgccggtaccttcagccagccagagaaagtatatactctgtctgtctcaggcgaccggctgattgtggggaccgcgggacggagggtattggtctgggaccttaggaatatgggatatgtgcagcagagacgcgagagttctctcaagtatcaaacgcgatgcatacgggcattccctaacaagcaggggtacgtactcagtagcatagagggcagggtagctgtggaatatctcgatccctcgcccgaagtccagaagaaaaaatatgcttttaaatgtcaccgactgaaagagaacaacatcgaacagatttaccccgtgaacgccatctcgttccataatatccacaatacttttgcgacgggagggtccgacggattcgttaacatctgggacccgttcaacaagaagagactttgtcagttccatcgatacccaaccagtattgcatcgttagcattttccaacgacggcaccacattggccatcgcctcaagctatatgtatgagatggatgacacagaacaccctgaagatggtatctttattaggcaggtaacagacgccgagaccaagcccaagtcgacctag

SEQ ID NO: 22866 - DNA, 981 bp, Artificial Sequence
  derived and/or modified sequence
atgaccgggtccaacgagtttaagctaaatcagcccccagaagacggcatttcatcagttaaattttccccaaatacaagccagttccttctggtgagcagctgggacacaagcgttcggctgtatgatgttcctgccaactccatgcgcctaaagtatcagcataccggcgcagtgttggactgcgcattctacgatccaacccacgcttggtccggcggactggatcaccagctgaagatgcacgacctgaacactgatcaagaaaacctggtaggaacacatgacgcacctattaggtgtgtcgagtattgtcctgaggttaacgttatggtgactggaagttgggatcagactgtgaagctttgggatccacgcactccatgtaatgccggtacatttagccagccagagaaggtttacaccctgagcgttagcggcgatcgcctcatcgttgggaccgccggacgcagggtacttgtttgggatctgcggaatatggggtatgtccagcaacggcgtgaatcatcccttaagtatcagacgaggtgcatccgcgcattcccaaataagcagggttacgtgctttcctctatagagggacgggtcgcagtggagtatctcgatccatcaccagaggttcagaagaagaaatatgccttcaaatgccaccgcctcaaggagaacaacatagaacagatctaccctgtaaacgccatcagtttccacaatatacataacaccttcgcaactggaggcagcgatggttttgtgaatatatgggacccttttaacaaaaaacgactctgccagttccacaggtaccctaccagcattgcgtccctggcattctccaatgatggcacaacactcgccatagctagctcttacatgtacgagatggacgatactgaacacccggaggacggcatctttatccgccaagtcacagacgccgagaccaaacccaagtctacctag

SEQ ID NO: 22867 - DNA, 1361 bp, Artificial Sequence
  derived and/or modified sequence
gaagcaaggaggcggcggcggccgcagcgagtggcgagtagtggaaacgttgcttctgaggggagcccaagatgaccggttctaacgagttcaagctgaaccagccacccgaggatggcatctcctccgtgaagttcagccccaacacctcccagttcctgcttgtctcctcctgggacacgtccgtgcgtctctacgatgtgccggccaactccatgcggctcaagtaccagcacaccggcgccgtcctggactgcgccttctacgatccaacgcatgcctggagtggaggactagatcatcaattgaaaatgcatgatttgaacactgatcaagaaaatcttgttgggacccatgatgcccctatcagatgtgttgaatactgtccagaagtgaatgtgatggtcactggaagttgggatcagacagttaaactgtgggatcccagaactccttgtaatgctgggaccttctctcagcctgaaaaggtatataccctctcagtgtctggagaccggctgattgtgggaacagcaggccgcagagtgttggtgtgggacttacggaacatgggttacgtgcagcagcgcagggagtccagcctgaaataccagactcgctgcatacgagcgtttccaaacaagcagggttatgtattaagctctattgaaggccgagtggcagttgagtatttggacccaagccctgaggtacagaagaagaagtatgccttcaaatgtcacagactaaaagaaaataatattgagcagatttacccagtcaatgccatttcttttcacaatatccacaatacatttgccacaggtggttctgatggctttgtaaatatttgggatccatttaacaaaaagcgactgtgccaattccatcggtaccccacgagcatcgcatcacttgccttcagtaatgatgggactacgcttgcaatagcgtcatcatatatgtatgaaatggatgacacagaacatcctgaagatggtatcttcattcgccaagtgacagatgcagaaacaaaacccaagtccacctaatcatcctgtgaaagtggtttctctatggaaagctttgtttgcttcctacaaatacatgcttattccttaagggatgtgttagagttactgtggatttctctgttttctgtcttacaagaaacttgtctatgtaccttaatactttgtttaggatgaggagtctttgtgtccctgtacagtagtctgacgtatttccccttctgtcccctagtaagcccagttgctgtatctgaacagtttgagctctttttgtaatatactctaaacctgttatttctgtgctaataaacgagatgcagaacccttgaa

SEQ ID NO: 22868 - DNA, 981 bp, Artificial Sequence
  derived and/or modified sequence
atgaccggcagcaacgagttcaagctgaaccagccccccgaggacggcatcagcagcgtgaagttcagccccaacaccagccagttcctgctggtgagcagctgggacaccagcgtgagactgtacgacgtgcccgccaacagcatgagactgaagtaccagcacaccggcgccgtgctggactgcgccttctacgaccccacccacgcctggagcggcggcctggaccaccagctgaagatgcacgacctgaacaccgaccaggagaacctggtgggcacccacgacgcccccatcagatgcgtggagtactgccccgaggtgaacgtgatggtgaccggcagctgggaccagaccgtgaagctgtgggaccccagaaccccctgcaacgccggcaccttcagccagcccgagaaggtgtacaccctgagcgtgagcggcgacagactgatcgtgggcaccgccggcagaagagtgctggtgtgggacctgagaaacatgggctacgtgcagcagagaagagagagcagcctgaagtaccagaccagatgcatcagagccttccccaacaagcagggctacgtgctgagcagcatcgagggcagagtggccgtggagtacctggaccccagccccgaggtgcagaagaagaagtacgccttcaagtgccacagactgaaggagaacaacatcgagcagatctaccccgtgaacgccatcagcttccacaacatccacaacaccttcgccaccggcggcagcgacggcttcgtgaacatctgggaccccttcaacaagaagagactgtgccagttccacagataccccaccagcatcgccagcctggccttcagcaacgacggcaccaccctggccatcgccagcagctacatgtacgagatggacgacaccgagcaccccgaggacggcatcttcatcagacaggtgaccgacgccgagaccaagcccaagagcacctag

SEQ ID NO: 22869 - protein, 577 aa, Artificial Sequence [sequence omitted]

SEQ ID NO: 22870 - DNA, 3376 bp, Artificial Sequence
  derived and/or modified sequence
ggcgcgggcagggagcggctggctgtcagctgagccgcgctgggcggggtcgccaggccgcgcatcagccctaggcaccccagtcccggctgccccctccgccaccgccgccgcccgccggcaggttccctggtcagcgtcccatcccggtcgggagttctctccaggcggcacgatgccgaggaaacagtgaccctgagcgaagccaagccgggcggcaggaacttctgcaatgtcccatcaacctctcagctgcctcactgaaaaggaggacagccccagtgaaagcacaggaaatggacccccccacctggcccacccaaacctggacacgtttaccccggaggagctgctgcagcagatgaaagagctcctgaccgagaaccaccagctgaaagaagccatgaagctaaataatcaagccatgaaagggagatttgaggagctttcggcctggacagagaaacagaaggaagaacgccagttttttgagatacagagcaaagaagcaaaagagcgtctaatggccttgagtcatgagaatgagaaattgaaggaagagcttggaaaactaaaagggaaatcagaaaggtcatctgaggaccccactgatgactccaggcttcccagggccgaagcggagcaggaaaaggaccagctcaggacccaggtggtgaggctacaagcagagaaggcagacctgttgggcatcgtgtctgaactgcagctcaagctgaactccagcggctcctcagaagattcctttgttgaaattaggatggctgaaggagaagcagaagggtcagtaaaagaaatcaagcatagtcctgggcccacgagaacagtctccactggcacggcattgtctaaatataggagcagatctgcagatggggccaagaattacttcgaacatgaggagttaactgtgagccagctcctgctgtgcctaagggaagggaatcagaaggtggagagacttgaagttgcactcaaggaggccaaagaaagagtttcagattttgaaaagaaaacaagtaatcgttctgagattgaaacccagacagaggggagcacagagaaagagaatgatgaagagaaaggcccggagactgttggaagcgaagtggaagcactgaacctccaggtgacatctctgtttaaggagcttcaagaggctcatacaaaactcagcgaagctgagctaatgaagaagagacttcaagaaaagtgtcaggcccttgaaaggaaaaattctgcaattccatcagagttgaatgaaaagcaagagcttgtttatactaacaaaaagttagagctacaagtggaaagcatgctatcagaaatcaaaatggaacaggctaaaacagaggatgaaaagtccaaattaactgtgctacagatgacacacaacaagcttcttcaagaacataataatgcattgaaaacaattgaggaactaacaagaaaagagtcagaaaaagtggacagggcagtgctgaaggaactgagtgaaaaactggaactggcagagaaggctctggcttccaaacagctgcaaatggatgaaatgaagcaaaccattgccaagcaggaagaggacctggaaaccatgaccatcctcagggctcagatggaagtttactgttctgattttcatgctgaaagagcagcgagagagaaaattcatgaggaaaaggagcaactggcattgcagctggcagttctgctgaaagagaatgatgctttcgaagacggaggcaggcagtccttgatggagatgcagagtcgtcatggggcgagaacaagtgactctgaccagcaggcttaccttgttcaaagaggagctgaggacagggactggcggcaacagcggaatattccgattcattcctgccccaagtgtggagaggttctgcctgacatagacacgttacagattcacgtgatggattgcatcatttaagtgttgatgtatcacctccccaaaactgttggtaaatgtcagattttttcctccaagagttgtgcttttgtgttatttgttttcactcaaatattttgcctcattattcttgttttaaaagaaagaaaacaggccgggcacagtggctcatgcctgtaatcccagcactttgggaggtcgaggtgggtggatcacttggggtcagggtttgagaccagcctggccaacatggcggaaccctgtctctaccaaaattacaaaaattagccgagcatggtggcgcatgcctgtagtcgcagctactcgcgaggttgaggcaggagaattgcttgaacccaggaagtggcagttgcagtgagccgagacgacaccactgcactccagcctgggtgacagagggagactctgtctcgaaagaaagaaagaaaaaaaggaaggaaggagaaggaaggaaggagaagaaaaggtacctgttctacgtagaacacctttggtggagttccatcaactcgcaaagtagaatccttacctactactcttctgataataattttaatattttttatgtttggttgatgcgagcagctgcactgctcatgcagttagctagcatgtgacatcatgtgacaaagttcatgtaattagatggaagaaacctcactgattaattttaagaaccttttagggatgcaggaacaatgaagtggccacagtatgtgctgtttttgaagcatttttaaaaacgaattgtagttgtttttcttcatttaaaatggatctgttggaggttatgtgtgtatgttgtagttttattgcagccacaataattttaccaaagttttcacataggcagttagcctttacttaatatcaagacaagtgaaaaaatattggcatcgatgaaaccgataacattggcctcattggatttctttacccattcacagtgtaaagaagttaccttcatgctttcattgtacctgcaggcctgtgggcttgtacagtagataattaatttctaaaaagaacagctgcctattttcttcctaggttaggttatatcttcataatcacaagaattagtgatggcaaaataaaattttgcttatgaatcttttacattgtttatatatgattaatatcatcatatatattttctgtattaagctcatttggcttcatttaagctgtatacttagtcatatatctttcattagttctatggatatgagcagatccctttactggagcccagtatgtgctgtgtgagttagaagtcattcttgctgagaaggtgaataggtagggatttgccttgttttgtaagtctacaatttgccaagagtaaataacactggaccagctgtaaaagtaaacagtgtgtttatgcattgagatactaaagcattt

SEQ ID NO: 22871 - DNA, 1734 bp, Artificial Sequence
  derived and/or modified sequence
atgagtcatcagcctttatcatgcttaactgagaaagaggattcgccctccgaaagcacaggcaatggtccacctcatcttgcccaccccaacctggacacctttactcccgaggagctcctgcagcagatgaaggagttacttacagagaaccatcagctgaaggaagctatgaagcttaacaaccaggcgatgaaagggcgcttcgaagaactgagtgcgtggaccgagaagcagaaagaggaacgtcagttctttgagatccaatcaaaggaagcaaaggaacgtctgatggctctttctcacgaaaatgaaaagttaaaggaagaattggggaaattgaaggggaagagcgagagaagttccgaagatcccacagatgacagtcgactgccacgggccgaagccgagcaggaaaaggaccagcttagaacgcaagtagttcggcttcaggccgagaaagccgacctcctaggaatcgttagtgaactacagctgaaactgaacagttctgggagttccgaagattctttcgttgagattcgcatggcagaaggggaggccgagggctcagtaaaagaaatcaagcactctccagggccaacacggactgtgtccaccggaacggctttgtccaaatacagatcacgcagcgctgacggggccaagaattatttcgaacacgaagagctgactgtgtctcagcttttgttgtgcctgcgcgagggtaaccagaaggtcgagcgccttgaagttgctctgaaggaggccaaagagagagtctctgactttgagaagaaaacaagcaacagaagtgaaatcgagactcagaccgagggcagcaccgagaaagagaacgatgaggagaaaggccctgaaacagtcggcagcgaagtagaggctttgaatctgcaggtgacatccctctttaaggagctccaagaggctcacacaaagctgtcgaaggctgaactgatgaaaaaacgcctgcaggaaaagtgccaggccttggaaagaaaaaactccgcgattccgtcagagctgaatgaaaaacaggagctcgtctacaccaacaagaaactggagctccaagttgagagcatgttgtctgaaattaaaatggagcaggctaagacagaggacgagaagtcgaagttaacagttcttcaaatgacccataacaaattactccaggagcacaacaatgctctcaaaaccattgaggaacttacaagaaaagaatccgagaaggtggaccgggcggtgctcaaagaactttccgagaagctggagcttgccgaaaaagctctggcctccaagcagctccagatggacgagatgaagcaaactattgcaaagcaggaagaagacttggaaactatgactattctgagggctcagatggaagtttattgtagtgactttcatgccgaacgagcggccagagagaagatccatgaggaaaaggagcagctggcactacagctggccgtgctgcttaaggagaatgatgcctttgaagatgggggacgccagtccttaatggaaatgcagtctaggcacggcgcaaggacttctgattctgatcagcaggcttatttagtgcagaggggagctgaggatcgtgattggaggcagcagcgaaacatccccatccacagctgcccaaaatgcggtgaggtactccctgatatagataccctgcaaattcatgtgatggactgcataatctag

SEQ ID NO: 22872 - DNA, 1734 bp, Artificial Sequence
  derived and/or modified sequence
atgtcacatcagcctctttcctgccttactgaaaaagaagactctccatccgaatctactggaaacgggccccctcatttagcccaccccaatctcgacacttttactccagaggagctcctacaacagatgaaagagcttctcactgaaaatcatcagctcaaagaggccatgaaactgaataaccaggctatgaagggaaggttcgaggaactttccgcgtggacagaaaaacaaaaggaggaaagacagttctttgagatccagtcaaaagaagctaaggagcgccttatggccctcagtcacgaaaatgaaaagttgaaggaagagctgggtaaattgaagggtaaatccgagcggtctagtgaggatcccaccgatgactccaggctgccacgggccgaggcagaacaggaaaaagaccagctccgaacacaagtcgtacgccttcaagctgagaaagccgacctattggggatcgtttccgaactccaattgaagctaaacagctctggcagctcagaggactcctttgttgagattcgaatggccgaaggggaagccgagggctcagtcaaggagatcaagcactcccctggacctacgaggacagtatccactggaaccgcactgtcaaaatatagatctcggtcagccgacggggcaaaaaattattttgagcacgaggagctgactgtctctcagctgcttttgtgccttcgtgagggaaatcagaaagtggagagactggaagtggcgcttaaagaggccaaagagagggtatccgattttgagaagaaaaccagcaaccggtccgagattgagacccagactgagggtagcaccgagaaggagaacgacgaagagaaagggccagaaaccgtgggtagcgaagtggaggccctgaacttacaggtcacgtcattatttaaagaactgcaagaggcgcatactaaactctcaaaggccgagctgatgaaaaagcgattacaggaaaagtgccaagccctcgaaagaaaaaacagcgccattcctagcgagctgaatgaaaaacaagagttagtctatacaaacaaaaaactagagttgcaggtagagtccatgctatcggaaatcaagatggagcaggccaaaactgaggacgagaagagtaagctgaccgttctccagatgacacataacaagctgctgcaggaacacaataacgccctgaagacgatcgaggagctgacgagaaaagagagcgagaaggttgatcgggccgtgctgaaggagctttcagagaagctagagctggcggaaaaagcgttggcaagcaagcagcttcaaatggatgaaatgaagcagacaattgccaagcaggaagaagatttagaaactatgacaattctgcgtgcccaaatggaggtgtactgttcagactttcatgcagagagagcagctcgcgagaaaattcatgaggagaaggaacagctggctctgcagttagctgtactgctgaaggagaatgacgcctttgaggacggcggacgacagtcactgatggaaatgcagtcccggcacggcgcgcgcactagcgactccgaccaacaggcataccttgttcagagaggagctgaggatcgtgactggcgccagcagcgtaacataccaatacacagctgcccaaagtgcggcgaagtgttacctgacatcgacacactgcagatacacgtaatggactgcattatttag

SEQ ID NO: 22873 - DNA, 1734 bp, Artificial Sequence
  derived and/or modified sequence
atgtcccatcagccgctgtcatgcctgacagagaaggaagactcccccagcgaatccacaggaaacggacctccgcacctggcacaccctaatctggacacattcacccccgaagagcttctccaacagatgaaggagctgctgacagagaaccatcagctaaaggaagctatgaagttaaacaaccaagcgatgaaggggcgcttcgaggagctgtctgcctggaccgagaaacagaaagaagaacggcagttctttgaaattcagtcgaaggaagcaaaggagcggctgatggctctgagccatgaaaatgaaaagctgaaagaagagctgggcaagttaaaagggaaatccgagcgtagttctgaagaccctactgatgatagccgcctgccaagagctgaagcagagcaggagaaagatcagcttagaactcaggtggtgcggttgcaggccgaaaaggccgatcttctcgggattgtttcggagctgcagctgaagcttaactcatctggctcatcagaagattcgttcgtggagattagaatggcggagggggaagccgaaggtagtgttaaggaaatcaaacactcgcccggaccaacaagaacagtatctacgggaactgcgttgtcaaagtatagatcccgcagcgctgatggcgctaagaactattttgaacacgaagaactgacggtctcccagctgctgctttgcctccgtgaaggtaaccagaaggtagagcggctggaagtggccctgaaggaggccaaggagagagtgagcgattttgaaaagaaaactagcaataggagtgagatcgagactcagacagaaggcagcacagaaaaggaaaacgatgaagagaagggcccggagacggttggctctgaggtggaggccctgaatctgcaggtcacttcgctctttaaagagctccaagaggcccacacgaagttgtccaaagctgagctcatgaaaaagcgcctgcaggagaagtgtcaggctctcgaacgaaaaaattctgccatcccgagcgagctaaatgaaaaacaagagctcgtttataccaacaagaaacttgaactccaggtggagtccatgctctccgaaattaaaatggagcaggctaagacagaagatgagaaatctaagctcactgtgcttcaaatgacccacaacaagctgttacaggaacacaataatgcacttaagacaattgaggagctgaccaggaaggagagcgagaaggtggatcgggcggtattgaaagaactatcagagaagttagaactcgctgaaaaagctttagcgtcaaaacaattgcagatggatgaaatgaagcagaccatcgctaagcaggaagaagacttagaaaccatgacgatcctcagggcacagatggaggtgtactgcagtgattttcacgctgagagagctgcacgggaaaaaattcatgaagaaaaggagcagctggcattgcagctcgctgtcctgcttaaagagaacgacgccttcgaggatggcggtcggcaaagcctgatggagatgcaatcacgccatggggcccgtacttccgactctgatcagcaggcttatttggtgcaacgcggcgcagaggatcgggattggcgacagcaaagaaatattcccatccattcctgtcccaagtgcggcgaggtattgcccgatatcgataccctgcagattcatgtgatggattgcatcatatag

SEQ ID NO: 22874 - DNA, 1734 bp, Artificial Sequence
  derived and/or modified sequence
atgtcccatcaaccactttcctgtctgactgaaaaggaagatagtccttcagaaagcacagggaatgggccaccacaccttgctcatcccaatctggatactttcacccccgaagagctgctgcaacagatgaaagagctgttgaccgagaatcaccagcttaaggaggctatgaagctgaacaatcaggcaatgaaagggcgtttcgaggaactctccgcttggaccgagaagcagaaggaggagcggcaatttttcgagattcagtcaaaggaggctaaagagcggctcatggcgttgtcccacgaaaatgagaagttgaaggaagagttagggaagctcaagggaaagagcgagagatcaagcgaagacccaactgacgattcaagattacccagagccgaggctgaacaagagaaggaccagctaagaacacaggtagtgcggctgcaggcagaaaaagcggatcttctggggatcgtttcggagctgcaattaaaattaaactcatctggtagcagtgaggactcgttcgtagagatccggatggccgaaggagaagccgagggctccgtaaaagaaattaaacactctcccggtcccacccggacagtgtccacaggcacggctctatcaaaataccgaagcaggagcgccgatggcgccaagaattacttcgagcacgaggagctgactgtgtcgcagttactgctgtgccttagagaaggcaatcagaaagttgagcgcctggaggtggcacttaaggaagcaaaggaacgcgtttccgactttgaaaaaaagacttcaaatcgatcagaaatcgagacacagacagaaggctcaaccgaaaaggagaacgatgaggaaaaaggtcctgaaactgtgggctctgaggtggaagcccttaacctacaggtaacttccctttttaaggagctgcaagaggcccataccaagctgagtaaggccgaactgatgaagaaacggctccaggaaaagtgtcaggccctcgaaagaaagaactctgccattcccagtgaactgaatgagaaacaagagctggtttataccaataagaagctggaacttcaggtagagagtatgctgtctgagattaagatggagcaggcaaagaccgaggatgaaaaatccaaactgaccgtcttgcagatgacccacaataaactattacaggagcacaataatgcactgaagacaatagaggaattgacaaggaaggaaagcgaaaaggttgatagagcagtgcttaaagagctttcggagaagctggaattggccgaaaaagcgctcgcgtccaaacagctccagatggacgaaatgaaacagaccatagcaaaacaagaagaggatttggagaccatgacaattcttagggcccagatggaggtttactgctcagatttccacgccgagcgtgccgccagggaaaaaatacacgaagagaaggaacaactcgcactccaacttgctgtcctcctgaaggaaaatgatgcttttgaggatggcggacgacagtccctcatggagatgcagtcgcgccatggcgctcgcacatctgattccgatcagcaggcatatctggtgcagagaggcgcggaagatagggactggagacagcagcggaacatccccattcactcctgcccaaaatgtggcgaagtccttcctgacatcgacaccctgcagatccacgttatggattgtatcatctag

SEQ ID NO: 22875 - DNA, 1734 bp, Artificial Sequence
  derived and/or modified sequence
atgagccaccagcccctgagctgcctgacagagaaggaggacagccccagcgagagcactggaaatggccccccccacctggcccaccccaacctggacaccttcaccccagaggagctgctgcagcagatgaaggagctgctgacagagaaccaccagctgaaggaggccatgaagctgaacaaccaggccatgaagggccgctttgaggagctgagcgcctggacagagaagcagaaggaggagcggcagttctttgagatccagagcaaggaggccaaggagcggctgatggccctgagccatgaaaatgagaagctgaaggaggagctgggcaagctgaagggcaagtctgagaggagcagcgaggaccccacagatgacagccggctgcccagggctgaggccgagcaggagaaggaccagctgcggacccaggtggtgcggctgcaggccgagaaggctgacctgctgggcatcgtgtctgagctgcagctgaagctgaacagcagcggcagcagtgaagattcttttgtggagatccgcatggccgagggggaggccgagggctctgtgaaggagatcaagcacagccctggccccaccaggacagtgtccactggaacagccctgagcaagtaccgcagccgctctgcagatggagccaagaactactttgagcacgaggagctgactgtgtcccagctgctgctgtgcctgcgggagggcaaccagaaggtggagcggctggaggtggccctgaaggaggccaaggagcgggtgtctgactttgagaagaagaccagcaacagaagtgaaattgagacccagacagagggcagcacagagaaggaaaatgatgaggagaagggccctgagaccgtgggcagcgaggtggaggccctgaacctgcaggtgaccagcctcttcaaggagctgcaggaggcccacaccaagctgagcaaggccgagctgatgaagaagaggctgcaggagaagtgccaggccctggagaggaagaacagcgccatccccagcgagctgaatgagaagcaggagctggtgtacaccaacaagaagctggagctgcaggtggagagcatgctgtctgagatcaagatggagcaggccaagacagaagatgagaagagcaagctgactgtgctgcagatgacccacaacaagctgctgcaggagcacaacaatgccctgaagaccatcgaggagctgaccaggaaggagagcgagaaggtggacagagctgtgctgaaggagctgtctgagaagctggagctggccgagaaggccctggccagcaagcagctgcagatggatgagatgaagcagaccatcgccaagcaggaggaggacctggagaccatgaccatcctgcgggcccagatggaggtgtactgcagcgacttccacgccgagcgggccgcccgggagaagatccacgaggagaaggagcagctggccctgcagctggccgtgctgctgaaggaaaatgatgcctttgaagatggcggccggcagagcctgatggagatgcagagcagacatggagcccggaccagtgacagcgaccagcaggcctacctggtgcagagaggagctgaggaccgggactggaggcagcagaggaacatccccatccacagctgccccaagtgtggggaggtgctgcctgacatcgacaccctgcagatccacgtgatggactgcatcatctag

SEQ ID NO: 22876 - DNA, 1734 bp, Artificial Sequence
  derived and/or modified sequence
atgagccaccagcccctgagctgcctgaccgagaaggaggacagcccatctgaatcgaccggtaatgggcctccgcacttagcccatccaaatctggacacgttcacccctgaggaacttctgcagcaaatgaaggagttacttaccgagaatcaccagctgaaggaggcgatgaaactgaataaccaggctatgaagggcagatttgaagagttgtctgcttggactgaaaagcaaaaggaagagcgacagttctttgaaatacaatctaaggaggccaaggagcggttgatggcattgtcccatgagaatgaaaagctcaaggaagaacttgggaaactgaaaggcaaatccgagcggagctctgaggacccgactgatgatagtcggctgccccgcgcagaagctgaacaagagaaggaccagttacgcacccaggttgtcagactacaggctgagaaggccgacttgctcggaattgtgtctgagcttcagttgaaacttaattcttctggctcttcagaggatagctttgtggaaattagaatggctgagggagaagccgaaggtagtgtgaaagagataaagcactcaccaggacccacccgcaccgtgtctaccggtactgctctgtcgaagtatcgttcaagatcagcagatggggccaagaactacttcgagcacgaagagttgactgtgagccagttactcctctgccttcgcgaaggcaaccagaaggttgagagactcgaggtggccttgaaagaagccaaggaaagggtcagcgactttgagaagaagacttcaaacaggagcgaaattgagactcagactgagggctcgaccgaaaaagagaatgatgaggaaaaagggcccgaaacagtggggtcagaggttgaggcactgaacctgcaggtcaccagcctgttcaaggaactgcaggaagcacatactaaactgagcaaggccgagctaatgaagaagagattgcaggagaaatgtcaggccctggagcggaagaactcagctatcccaagtgaactgaatgagaagcaagaactggtgtacacgaacaagaaactagagctgcaagtcgaatcaatgttgagtgagattaagatggagcaagccaagaccgaggacgagaagtctaagctcaccgttctccagatgacacataataagttgctacaggagcataataacgcattgaaaactattgaggaactgacccgaaaggagagtgaaaaggtggaccgagctgtactgaaggagttatctgagaagctggaactggccgagaaggctctcgcatccaagcagctgcaaatggatgagatgaagcagacaatcgcgaagcaggaagaggatctggaaacaatgactatcctccgagcccagatggaggtctattgcagtgatttccacgccgaacgcgcggcccgcgaaaaaattcacgaggagaaagaacaattggcattgcagttggctgtcctgctcaaagagaacgatgccttcgaggatggtgggcggcaatctctcatggaaatgcagagccgacacggggcaagaacttcagacagcgaccaacaggcctatctcgtgcaaaggggcgcagaggatcgcgactggaggcagcaaagaaatatccctattcattcatgccctaagtgcggagaagtcttgcccgatattgatactttgcagatccacgtcatggactgcatcatttag

SEQ ID NO: 22877 - DNA, 1734 bp, Artificial Sequence
  derived and/or modified sequence
atgagccaccagcccctgagctgcctgaccgagaaggaggacagcccatcagaatccaccggaaacgggcccccacatcttgcccatccaaatctggacactttcactccagaagagcttctgcagcagatgaaggaacttctcactgagaatcaccagttaaaggaggctatgaagctgaacaaccaggccatgaaggggaggttcgaagaactcagtgcatggaccgagaaacagaaggaagaaagacagttttttgaaatacagtctaaagaggccaaagaaaggcttatggcgctttcacacgaaaatgagaaattaaaagaagagttaggaaagctaaaagggaagagtgaacggtccagtgaggatccaaccgacgactcccgcttaccccgcgctgaagccgaacaggaaaaagatcagctaaggacccaagtggttaggttgcaagccgagaaggccgatctactggggatcgtcagtgagctccaattaaagctgaactcttcaggttcatcagaagattcttttgtcgagatccgcatggcagaaggcgaagctgagggaagcgtaaaagaaatcaaacactcccccggccccactagaacagtttccaccggtaccgcactttccaagtatagaagccgaagcgcagatggcgctaagaattactttgagcatgaggagcttaccgtttcacagcttctgctgtgccttagagaaggtaaccagaaggtggagcggttggaggtggccttgaaggaggccaaagaaagggtgtccgacttcgaaaaaaaaacttccaataggtctgagattgaaactcagacggagggttcaaccgagaaagagaatgacgaggagaagggccctgagactgtggggtcagaggttgaagcgctcaaccttcaggtgactagcttattcaaggagttgcaggaggcccacacaaaactgtccaaagctgaactcatgaaaaagcgactgcaggagaagtgtcaagctttggaacgcaagaacagcgctattccatcggagctcaatgagaaacaggaactagtgtataccaataagaagctggagcttcaggtggaatccatgctgtcagagatcaaaatggaacaggccaagaccgaggacgagaaaagtaagctcaccgtattgcagatgacccacaataagctgctgcaggaacacaacaatgcccttaaaacaattgaggagctcacaaggaaggagagcgaaaaggttgaccgtgccgtgctgaaagaactcagtgaaaaactggagctggccgaaaaggcactggcaagcaagcagctgcagatggacgagatgaagcagaccatagctaaacaggaagaagacctggagactatgactattctccgggctcaaatggaagtctactgtagcgatttccatgccgagagagccgcaagggaaaagatacatgaggagaaagaacagctggccctacaacttgccgttcttttgaaagaaaatgatgcattcgaggatgggggtcgccaatcactgatggagatgcagtctaggcatggcgctcgcactagtgactcggatcagcaagcgtatctggtccagcggggcgcagaggacagggactggcgccagcagagaaatattcccattcatagctgcccaaagtgtggagaagtcctgcctgacatcgacaccctgcagattcatgtcatggactgtatcatttag

SEQ ID NO: 22878 - DNA, 1734 bp, Artificial Sequence
  derived and/or modified sequence
atgagccaccagcccctgagctgcctgaccgagaaggaggacagcccatccgaatccactggcaacggccctccccatcttgcccacccaaacttggataccttcacgccagaggagctgctgcagcaaatgaaagagctactgactgaaaatcatcagctgaaagaggcaatgaaattgaacaatcaggctatgaaaggaagattcgaggagctgagtgcctggacagagaaacagaaagaagagaggcagtttttcgagatccagtctaaggaagccaaggagcggctgatggccttatcccacgagaatgagaagcttaaggaagagctgggcaaactgaagggtaagtctgaacgttcttctgaggatccaactgacgactcacgacttcctcgcgcagaggccgaacaagagaaggatcaactgcgtacccaggtggtccgtttacaggccgaaaaagcggatttactagggatcgtgagcgagctccagctgaagctgaatagtagcggcagcagcgaggatagtttcgttgaaattcgaatggcggaaggcgaggcagagggaagcgtcaaggagattaagcattctcccgggccaacccgtacagtgtcaaccggcaccgctttaagcaagtatcggtcccggtctgctgatggggctaagaattacttcgaacacgaagagctaaccgtgagtcaactgttactgtgcctgagagaagggaaccagaaggttgagaggttagaagttgctctgaaggaagctaaagagcgggtttctgatttcgagaaaaagacctccaatagaagcgaaatcgaaacccagaccgaggggtccactgaaaaagaaaacgacgaggaaaaaggacccgagaccgttggttctgaggtggaggccctcaatttacaagtcacctccctattcaaggagctgcaggaggcccacaccaagttgtccaaggctgagctgatgaagaaacggctccaggagaaatgccaggcactcgagcgcaaaaacagtgctatcccaagcgagctgaacgagaagcaagagctggtttacacaaataagaaactggagctccaagtggaatctatgttatccgagatcaaaatggaacaggccaaaactgaagacgaaaagtccaagcttactgtcctgcaaatgacccataataaactgctccaggagcataataacgccctgaagacaatcgaagaactgacacgcaaggagagtgaaaaggtagaccgggcagttttgaaggagctgagtgaaaagctggagttagctgagaaagcattagctagtaaacagttgcagatggatgaaatgaagcagaccattgccaagcaggaggaggacttagaaactatgaccattctgagagcacaaatggaggtgtattgctccgatttccacgcagagcgagccgccagagaaaaaatccacgaggaaaaagaacagttggctttgcaattggctgtattattgaaggagaacgacgcattcgaggacggaggaaggcagtctcttatggagatgcaaagcaggcacggcgctaggaccagcgacagtgatcaacaagcctatctcgtccagcggggtgctgaggacagggattggaggcagcagaggaatattcccattcactcctgccccaaatgcggtgaggtcctccctgacatcgacactctgcagattcatgtgatggattgtataatctag

SEQ ID NO: 22879 - DNA, 1734 bp, Artificial Sequence
  derived and/or modified sequence
atgagccaccagcccctgagctgcctgaccgagaaggaggacagcccgagcgaatctaccggaaatggaccaccacacctggcacaccccaacctggacactttcacccccgaggagcttctgcagcagatgaaggagcttctgaccgaaaaccatcaactcaaggaggccatgaagctcaacaatcaggcgatgaagggcagatttgaggaattgagcgcttggactgagaagcaaaaggaggaacgtcagtttttcgagatccagtccaaggaagctaaggagcggttgatggctctgtctcatgaaaacgagaaattgaaggaggaattggggaaactcaagggcaagtctgaacgcagcagcgaggatccaaccgacgacagccgcctccctagagcagaggctgagcaagagaaagaccagctgcgaacccaggtggtgcgactgcaagcagagaaggcggacttgctgggaatagtatccgaactgcaacttaagttgaattcctccggttccagtgaagacagctttgtggagatacgaatggcggaaggcgaggcagagggcagcgtgaaagaaataaaacatagccccggtccgacacgcaccgtgagtacaggcacagccctgagtaagtaccgcagcagaagtgcggatggcgcaaaaaactatttcgaacatgaagaactcacagtgtctcagttattgctgtgtctgcgagaaggtaaccagaaggtagagcggctggaggtcgcactgaaagaggccaaggaaagagtgtccgatttcgagaagaaaacttccaacaggagcgagatagagactcaaaccgagggcagtaccgaaaaggagaacgatgaagaaaaggggccggagacggtgggttccgaggtggaggcactgaatctccaggtgactagcctgtttaaggaacttcaagaagcgcacaccaagctgtccaaagcagagctcatgaagaaacggctgcaggaaaagtgccaggccctcgagcgcaagaactcagctatcccttcggagctgaacgagaaacaagaacttgtatacaccaataaaaagctggagttgcaggtcgagagcatgctgagcgagatcaagatggagcaggctaagactgaggacgagaagtcaaaactcaccgtcctgcagatgacccacaataagctacttcaggagcataataacgcgttgaagacgatcgaagagctgacacgaaaggaatcggaaaaggtagaccgggccgttctgaaggagttatcagagaagttggaattagccgagaaggctctcgcatccaaacagctgcagatggatgagatgaaacagacgatcgcaaagcaggaggaggacctggaaaccatgaccattctccgcgctcaaatggaagtctactgtagcgactttcatgccgaacgcgcggccagagagaagatccatgaggagaaggagcaactcgctctccagctggcggttctgctgaaggaaaatgacgccttcgaagacggcggcagacaatcactgatggaaatgcaatcccgccacggcgcacggaccagcgattctgaccaacaggcctatctggtgcagaggggtgccgaagatagagattggcggcagcagaggaatatccctatccatagctgcccaaagtgtggggaggtactgccggatattgacacactgcagatacatgtcatggattgtattatatag

SEQ ID NO: 22880 - DNA, 3832 bp, Artificial Sequence
  derived and/or modified sequence
atccctgcagcgctacccgggtactctggatgcacatagggcggctctcgctcctaccttgtcatcctgctgtctaatccgggggcagcttccctcctccacaccagcagaggctattcttcagcaacaagaatagccgagcctattcgtccgcaacaagagcccaagaagcatcctgcaggctttctgctttttgagtgtattttaaagcaaaaacgagtggaaagctatgtatgctcagttaactatgtctagatgttaaccttttttcaaaaaacacagatggaggcctccctccgaggatgcctggcattctcctctttctgtgggcggcagcgaccccctgcggctccagcctccactacgggatctgcgggaagacacggggaagacgaactccgcacactgcatttgattaatgatttattttgattaacgccgtcacagtgacgccttagagcagtccctgttcacccgggtcccagcctcgaccccgcacggacagcgagggtgtggctttgatagctggtggtgccacttcctggccttggatgagccgtacgcctctgtaaacccaacttcctcacctttgaaacagctgcctggttcagcattaatgaagattagtcagtgacaggcctggtgtgctgagtccgcacatagaacttctgcaatgtcccatcaacctctcagctgcctcactgaaaaggaggacagccccagtgaaagcacaggaaatggacccccccacctggcccacccaaacctggacacgtttaccccggaggagctgctgcagcagatgaaagagctcctgaccgagaaccaccagctgaaagaagccatgaagctaaataatcaagccatgaaagggagatttgaggagctttcggcctggacagagaaacagaaggaagaacgccagttttttgagatacagagcaaagaagcaaaagagcgtctaatggccttgagtcatgagaatgagaaattgaaggaagagcttggaaaactaaaagggaaatcagaaaggtcatctgaggaccccactgatgactccaggcttcccagggccgaagcggagcaggaaaaggaccagctcaggacccaggtggtgaggctacaagcagagaaggcagacctgttgggcatcgtgtctgaactgcagctcaagctgaactccagcggctcctcagaagattcctttgttgaaattaggatggctgaaggagaagcagaagggtcagtaaaagaaatcaagcatagtcctgggcccacgagaacagtctccactggcacggcattgtctaaatataggagcagatctgcagatggggccaagaattacttcgaacatgaggagttaactgtgagccagctcctgctgtgcctaagggaagggaatcagaaggtggagagacttgaagttgcactcaaggaggccaaagaaagagtttcagattttgaaaagaaaacaagtaatcgttctgagattgaaacccagacagaggggagcacagagaaagagaatgatgaagagaaaggcccggagactgttggaagcgaagtggaagcactgaacctccaggtgacatctctgtttaaggagcttcaagaggctcatacaaaactcagcaaagctgagctaatgaagaagagacttcaagaaaagtgtcaggcccttgaaaggaaaaattctgcaattccatcagagttgaatgaaaagcaagagcttgtttatactaacaaaaagttagagctacaagtggaaagcatgctatcagaaatcaaaatggaacaggctaaaacagaggatgaaaagtccaaattaactgtgctacagatgacacacaacaagcttcttcaagaacataataatgcattgaaaacaattgaggaactaacaagaaaagagtcagaaaaagtggacagggcagtgctgaaggaactgagtgaaaaactggaactggcagagaaggctctggcttccaaacagctgcaaatggatgaaatgaagcaaaccattgccaagcaggaagaggacctggaaaccatgaccatcctcagggctcagatggaagtttactgttctgattttcatgctgaaagagcagcgagagagaaaattcatgaggaaaaggagcaactggcattgcagctggcagttctgctgaaagagaatgatgctttcgaagacggaggcaggcagtccttgatggagatgcagagtcgtcatggggcgagaacaagtgactctgaccagcaggcttaccttgttcaaagaggagctgaggacagggactggcggcaacagcggaatattccgattcattcctgccccaagtgtggagaggttctgcctgacatagacacgttacagattcacgtgatggattgcatcatttaagtgttgatgtatcacctccccaaaactgttggtaaatgtcagattttttcctccaagagttgtgcttttgtgttatttgttttcactcaaatattttgcctcattattcttgttttaaaagaaagaaaacaggccgggcacagtggctcatgcctgtaatcccagcactttgggaggtcgaggtgggtggatcacttggggtcagggtttgagaccagcctggccaacatggcggaaccctgtctctaccaaaattacaaaaattagccgagcatggtggcgcatgcctgtagtcgcagctactcgcgaggttgaggcaggagaattgcttgaacccaggaagtggcagttgcagtgagccgagacgacaccactgcactccagcctgggtgacagagggagactctgtctcgaaagaaagaaagaaaaaaaggaaggaaggagaaggaaggaaggagaagaaaaggtacctgttctacgtagaacacctttggtggagttccatcaactcgcaaagtagaatccttacctactactcttctgataataattttaatattttttatgtttggttgatgcgagcagctgcactgctcatgcagttagctagcatgtgacatcatgtgacaaagttcatgtaattagatggaagaaacctcactgattaattttaagaaccttttagggatgcaggaacaatgaagtggccacagtatgtgctgtttttgaagcatttttaaaaacgaattgtagttgtttttcttcatttaaaatggatctgttggaggttatgtgtgtatgttgtagttttattgcagccacaataattttaccaaagttttcacataggcagttagcctttacttaatatcaagacaagtgaaaaaatattggcatcgatgaaaccgataacattggcctcattggatttctttacccattcacagtgtaaagaagttaccttcatgctttcattgtacctgcaggcctgtgggcttgtacagtagataattaatttctaaaaagaacagctgcctattttcttcctaggttaggttatatcttcataatcacaagaattagtgatggcaaaataaaattttgcttatgaatcttttacattgtttatatatgattaatatcatcatatatattttctgtattaagctcatttggcttcatttaagctgtatacttagtcatatatctttcattagttctatggatatgagcagatccctttactggagcccagtatgtgctgtgtgagttagaagtcattcttgctgagaaggtgaataggtagggatttgccttgttttgtaagtctacaatttgccaagagtaaataacactggaccagctgtaaaagtaaacagtgtgtttatgcattgagatactaaagcatttaagaaaaaattaaaa

SEQ ID NO: 22881 - DNA, 3400 bp, Artificial Sequence
  derived and/or modified sequence
atcccggtcgggagttctctccaggcggcacgatgccgaggaaacagtgaccctgagcgaagccaagccgggcggcaggtgtggctttgatagctggtggtgccacttcctggccttggatgagccgtacgcctctgtaaacccaacttcctcacctttgaaacagctgcctggttcagcattaatgaagattagtcagtgacaggcctggtgtgctgagtccgcacatagaacttctgcaatgtcccatcaacctctcagctgcctcactgaaaaggaggacagccccagtgaaagcacaggaaatggacccccccacctggcccacccaaacctggacacgtttaccccggaggagctgctgcagcagatgaaagagctcctgaccgagaaccaccagctgaaagaagccatgaagctaaataatcaagccatgaaagggagatttgaggagctttcggcctggacagagaaacagaaggaagaacgccagttttttgagatacagagcaaagaagcaaaagagcgtctaatggccttgagtcatgagaatgagaaattgaaggaagagcttggaaaactaaaagggaaatcagaaaggtcatctgaggaccccactgatgactccaggcttcccagggccgaagcggagcaggaaaaggaccagctcaggacccaggtggtgaggctacaagcagagaaggcagacctgttgggcatcgtgtctgaactgcagctcaagctgaactccagcggctcctcagaagattcctttgttgaaattaggatggctgaaggagaagcagaagggtcagtaaaagaaatcaagcatagtcctgggcccacgagaacagtctccactggcacggcattgtctaaatataggagcagatctgcagatggggccaagaattacttcgaacatgaggagttaactgtgagccagctcctgctgtgcctaagggaagggaatcagaaggtggagagacttgaagttgcactcaaggaggccaaagaaagagtttcagattttgaaaagaaaacaagtaatcgttctgagattgaaacccagacagaggggagcacagagaaagagaatgatgaagagaaaggcccggagactgttggaagcgaagtggaagcactgaacctccaggtgacatctctgtttaaggagcttcaagaggctcatacaaaactcagcaaagctgagctaatgaagaagagacttcaagaaaagtgtcaggcccttgaaaggaaaaattctgcaattccatcagagttgaatgaaaagcaagagcttgtttatactaacaaaaagttagagctacaagtggaaagcatgctatcagaaatcaaaatggaacaggctaaaacagaggatgaaaagtccaaattaactgtgctacagatgacacacaacaagcttcttcaagaacataataatgcattgaaaacaattgaggaactaacaagaaaagagtcagaaaaagtggacagggcagtgctgaaggaactgagtgaaaaactggaactggcagagaaggctctggcttccaaacagctgcaaatggatgaaatgaagcaaaccattgccaagcaggaagaggacctggaaaccatgaccatcctcagggctcagatggaagtttactgttctgattttcatgctgaaagagcagcgagagagaaaattcatgaggaaaaggagcaactggcattgcagctggcagttctgctgaaagagaatgatgctttcgaagacggaggcaggcagtccttgatggagatgcagagtcgtcatggggcgagaacaagtgactctgaccagcaggcttaccttgttcaaagaggagctgaggacagggactggcggcaacagcggaatattccgattcattcctgccccaagtgtggagaggttctgcctgacatagacacgttacagattcacgtgatggattgcatcatttaagtgttgatgtatcacctccccaaaactgttggtaaatgtcagattttttcctccaagagttgtgcttttgtgttatttgttttcactcaaatattttgcctcattattcttgttttaaaagaaagaaaacaggccgggcacagtggctcatgcctgtaatcccagcactttgggaggtcgaggtgggtggatcacttggggtcagggtttgagaccagcctggccaacatggcggaaccctgtctctaccaaaattacaaaaattagccgagcatggtggcgcatgcctgtagtcgcagctactcgcgaggttgaggcaggagaattgcttgaacccaggaagtggcagttgcagtgagccgagacgacaccactgcactccagcctgggtgacagagggagactctgtctcgaaagaaagaaagaaaaaaaggaaggaaggagaaggaaggaaggagaagaaaaggtacctgttctacgtagaacacctttggtggagttccatcaactcgcaaagtagaatccttacctactactcttctgataataattttaatattttttatgtttggttgatgcgagcagctgcactgctcatgcagttagctagcatgtgacatcatgtgacaaagttcatgtaattagatggaagaaacctcactgattaattttaagaaccttttagggatgcaggaacaatgaagtggccacagtatgtgctgtttttgaagcatttttaaaaacgaattgtagttgtttttcttcatttaaaatggatctgttggaggttatgtgtgtatgttgtagttttattgcagccacaataattttaccaaagttttcacataggcagttagcctttacttaatatcaagacaagtgaaaaaatattggcatcgatgaaaccgataacattggcctcattggatttctttacccattcacagtgtaaagaagttaccttcatgctttcattgtacctgcaggcctgtgggcttgtacagtagataattaatttctaaaaagaacagctgcctattttcttcctaggttaggttatatcttcataatcacaagaattagtgatggcaaaataaaattttgcttatgaatcttttacattgtttatatatgattaatatcatcatatatattttctgtattaagctcatttggcttcatttaagctgtatacttagtcatatatctttcattagttctatggatatgagcagatccctttactggagcccagtatgtgctgtgtgagttagaagtcattcttgctgagaaggtgaataggtagggatttgccttgttttgtaagtctacaatttgccaagagtaaataacactggaccagctgtaaaagtaaacagtgtgtttatgcattgagatactaaagcatttaagaaaaaattaaaa

SEQ ID NO: 22882 - DNA, 3521 bp, Artificial Sequence
  derived and/or modified sequence
gccccctccgccaccgccgccgcccgccggcaggttccctggtcagcgtcccatcccggtcgggagttctctccaggcggcacgatgccgaggaaacagtgaccctgagcgaagccaagccgggcggcaggtgtggctttgatagctggtggtgccacttcctggccttggatgagccgtacgcctctgtaaacccaacttcctcacctttgaaacagctgcctggttcagcattaatgaagattagtcagtgacaggcctggtgtgctgagtccgcacatagaagaatcaaaaatgtccaaaatgtaactggagagaaagtgggcaacttttggagtgacttttccacaggaacttctgcaatgtcccatcaacctctcagctgcctcactgaaaaggaggacagccccagtgaaagcacaggaaatggacccccccacctggcccacccaaacctggacacgtttaccccggaggagctgctgcagcagatgaaagagctcctgaccgagaaccaccagctgaaagaagccatgaagctaaataatcaagccatgaaagggagatttgaggagctttcggcctggacagagaaacagaaggaagaacgccagttttttgagatacagagcaaagaagcaaaagagcgtctaatggccttgagtcatgagaatgagaaattgaaggaagagcttggaaaactaaaagggaaatcagaaaggtcatctgaggaccccactgatgactccaggcttcccagggccgaagcggagcaggaaaaggaccagctcaggacccaggtggtgaggctacaagcagagaaggcagacctgttgggcatcgtgtctgaactgcagctcaagctgaactccagcggctcctcagaagattcctttgttgaaattaggatggctgaaggagaagcagaagggtcagtaaaagaaatcaagcatagtcctgggcccacgagaacagtctccactggcacggcattgtctaaatataggagcagatctgcagatggggccaagaattacttcgaacatgaggagttaactgtgagccagctcctgctgtgcctaagggaagggaatcagaaggtggagagacttgaagttgcactcaaggaggccaaagaaagagtttcagattttgaaaagaaaacaagtaatcgttctgagattgaaacccagacagaggggagcacagagaaagagaatgatgaagagaaaggcccggagactgttggaagcgaagtggaagcactgaacctccaggtgacatctctgtttaaggagcttcaagaggctcatacaaaactcagcaaagctgagctaatgaagaagagacttcaagaaaagtgtcaggcccttgaaaggaaaaattctgcaattccatcagagttgaatgaaaagcaagagcttgtttatactaacaaaaagttagagctacaagtggaaagcatgctatcagaaatcaaaatggaacaggctaaaacagaggatgaaaagtccaaattaactgtgctacagatgacacacaacaagcttcttcaagaacataataatgcattgaaaacaattgaggaactaacaagaaaagagtcagaaaaagtggacagggcagtgctgaaggaactgagtgaaaaactggaactggcagagaaggctctggcttccaaacagctgcaaatggatgaaatgaagcaaaccattgccaagcaggaagaggacctggaaaccatgaccatcctcagggctcagatggaagtttactgttctgattttcatgctgaaagagcagcgagagagaaaattcatgaggaaaaggagcaactggcattgcagctggcagttctgctgaaagagaatgatgctttcgaagacggaggcaggcagtccttgatggagatgcagagtcgtcatggggcgagaacaagtgactctgaccagcaggcttaccttgttcaaagaggagctgaggacagggactggcggcaacagcggaatattccgattcattcctgccccaagtgtggagaggttctgcctgacatagacacgttacagattcacgtgatggattgcatcatttaagtgttgatgtatcacctccccaaaactgttggtaaatgtcagattttttcctccaagagttgtgcttttgtgttatttgttttcactcaaatattttgcctcattattcttgttttaaaagaaagaaaacaggccgggcacagtggctcatgcctgtaatcccagcactttgggaggtcgaggtgggtggatcacttggggtcagggtttgagaccagcctggccaacatggcggaaccctgtctctaccaaaattacaaaaattagccgagcatggtggcgcatgcctgtagtcgcagctactcgcgaggttgaggcaggagaattgcttgaacccaggaagtggcagttgcagtgagccgagacgacaccactgcactccagcctgggtgacagagggagactctgtctcgaaagaaagaaagaaaaaaaggaaggaaggagaaggaaggaaggagaagaaaaggtacctgttctacgtagaacacctttggtggagttccatcaactcgcaaagtagaatccttacctactactcttctgataataattttaatattttttatgtttggttgatgcgagcagctgcactgctcatgcagttagctagcatgtgacatcatgtgacaaagttcatgtaattagatggaagaaacctcactgattaattttaagaaccttttagggatgcaggaacaatgaagtggccacagtatgtgctgtttttgaagcatttttaaaaacgaattgtagttgtttttcttcatttaaaatggatctgttggaggttatgtgtgtatgttgtagttttattgcagccacaataattttaccaaagttttcacataggcagttagcctttacttaatatcaagacaagtgaaaaaatattggcatcgatgaaaccgataacattggcctcattggatttctttacccattcacagtgtaaagaagttaccttcatgctttcattgtacctgcaggcctgtgggcttgtacagtagataattaatttctaaaaagaacagctgcctattttcttcctaggttaggttatatcttcataatcacaagaattagtgatggcaaaataaaattttgcttatgaatcttttacattgtttatatatgattaatatcatcatatatattttctgtattaagctcatttggcttcatttaagctgtatacttagtcatatatctttcattagttctatggatatgagcagatccctttactggagcccagtatgtgctgtgtgagttagaagtcattcttgctgagaaggtgaataggtagggatttgccttgttttgtaagtctacaatttgccaagagtaaataacactggaccagctgtaaaagtaaacagtgtgtttatgcattgagatactaaagcatttaagaaaaaattaaaa

SEQ ID NO: 22883 - DNA, 3304 bp, Artificial Sequence
  derived and/or modified sequence
ggctgccccctccgccaccgccgccgcccgccggcaggttccctggtcagcgtcccatcccggtcgggagttctctccaggcggcacgatgccgaggaaacagtgaccctgagcgaagccaagccgggcggcaggaacttctgcaatgtcccatcaacctctcagctgcctcactgaaaaggaggacagccccagtgaaagcacaggaaatggacccccccacctggcccacccaaacctggacacgtttaccccggaggagctgctgcagcagatgaaagagctcctgaccgagaaccaccagctgaaagaagccatgaagctaaataatcaagccatgaaagggagatttgaggagctttcggcctggacagagaaacagaaggaagaacgccagttttttgagatacagagcaaagaagcaaaagagcgtctaatggccttgagtcatgagaatgagaaattgaaggaagagcttggaaaactaaaagggaaatcagaaaggtcatctgaggaccccactgatgactccaggcttcccagggccgaagcggagcaggaaaaggaccagctcaggacccaggtggtgaggctacaagcagagaaggcagacctgttgggcatcgtgtctgaactgcagctcaagctgaactccagcggctcctcagaagattcctttgttgaaattaggatggctgaaggagaagcagaagggtcagtaaaagaaatcaagcatagtcctgggcccacgagaacagtctccactggcacggcattgtctaaatataggagcagatctgcagatggggccaagaattacttcgaacatgaggagttaactgtgagccagctcctgctgtgcctaagggaagggaatcagaaggtggagagacttgaagttgcactcaaggaggccaaagaaagagtttcagattttgaaaagaaaacaagtaatcgttctgagattgaaacccagacagaggggagcacagagaaagagaatgatgaagagaaaggcccggagactgttggaagcgaagtggaagcactgaacctccaggtgacatctctgtttaaggagcttcaagaggctcatacaaaactcagcaaagctgagctaatgaagaagagacttcaagaaaagtgtcaggcccttgaaaggaaaaattctgcaattccatcagagttgaatgaaaagcaagagcttgtttatactaacaaaaagttagagctacaagtggaaagcatgctatcagaaatcaaaatggaacaggctaaaacagaggatgaaaagtccaaattaactgtgctacagatgacacacaacaagcttcttcaagaacataataatgcattgaaaacaattgaggaactaacaagaaaagagtcagaaaaagtggacagggcagtgctgaaggaactgagtgaaaaactggaactggcagagaaggctctggcttccaaacagctgcaaatggatgaaatgaagcaaaccattgccaagcaggaagaggacctggaaaccatgaccatcctcagggctcagatggaagtttactgttctgattttcatgctgaaagagcagcgagagagaaaattcatgaggaaaaggagcaactggcattgcagctggcagttctgctgaaagagaatgatgctttcgaagacggaggcaggcagtccttgatggagatgcagagtcgtcatggggcgagaacaagtgactctgaccagcaggcttaccttgttcaaagaggagctgaggacagggactggcggcaacagcggaatattccgattcattcctgccccaagtgtggagaggttctgcctgacatagacacgttacagattcacgtgatggattgcatcatttaagtgttgatgtatcacctccccaaaactgttggtaaatgtcagattttttcctccaagagttgtgcttttgtgttatttgttttcactcaaatattttgcctcattattcttgttttaaaagaaagaaaacaggccgggcacagtggctcatgcctgtaatcccagcactttgggaggtcgaggtgggtggatcacttggggtcagggtttgagaccagcctggccaacatggcggaaccctgtctctaccaaaattacaaaaattagccgagcatggtggcgcatgcctgtagtcgcagctactcgcgaggttgaggcaggagaattgcttgaacccaggaagtggcagttgcagtgagccgagacgacaccactgcactccagcctgggtgacagagggagactctgtctcgaaagaaagaaagaaaaaaaggaaggaaggagaaggaaggaaggagaagaaaaggtacctgttctacgtagaacacctttggtggagttccatcaactcgcaaagtagaatccttacctactactcttctgataataattttaatattttttatgtttggttgatgcgagcagctgcactgctcatgcagttagctagcatgtgacatcatgtgacaaagttcatgtaattagatggaagaaacctcactgattaattttaagaaccttttagggatgcaggaacaatgaagtggccacagtatgtgctgtttttgaagcatttttaaaaacgaattgtagttgtttttcttcatttaaaatggatctgttggaggttatgtgtgtatgttgtagttttattgcagccacaataattttaccaaagttttcacataggcagttagcctttacttaatatcaagacaagtgaaaaaatattggcatcgatgaaaccgataacattggcctcattggatttctttacccattcacagtgtaaagaagttaccttcatgctttcattgtacctgcaggcctgtgggcttgtacagtagataattaatttctaaaaagaacagctgcctattttcttcctaggttaggttatatcttcataatcacaagaattagtgatggcaaaataaaattttgcttatgaatcttttacattgtttatatatgattaatatcatcatatatattttctgtattaagctcatttggcttcatttaagctgtatacttagtcatatatctttcattagttctatggatatgagcagatccctttactggagcccagtatgtgctgtgtgagttagaagtcattcttgctgagaaggtgaataggtagggatttgccttgttttgtaagtctacaatttgccaagagtaaataacactggaccagctgtaaaagtaaacagtgtgtttatgcattgagatactaaagcatttaagaaaaaattaaaa

SEQ ID NO: 22884 - DNA, 848 bp, Artificial Sequence
  derived and/or modified sequence
gccccctccgccaccgccgccgcccgccggcaggttccctggtcagcgtcccatcccggtcgggagttctctccaggcggcacgatgccgaggaaacagtgaccctgagcgaagccaagccgggcggcaggaacttctgcaatgtcccatcaacctctcagctgcctcactgaaaaggaggacagccccagtgaaagcacaggaaatggacccccccacctggcccacccaaacctggacacgtttaccccggaggagctgctgcagcagatgaaagagctcctgaccgagaaccaccagctgaaagagccatgtggtcaagtggactagagggagatttggttcatcagatcaagtccactttcctggtgtgtgactccatcactctgaacctcctgcagaagccatgaagctaaataatcaagccatgaaagggagatttgaggagctttcggcctggacagagaaacagaaggaagaacgccagttttttgagatacagagcaaagaagcaaaagagcgtctaatggccttgagtcatgagaatgagaaattgaaggaagagcttggaaaactaaaagggaaatcagaaaggtcatctgaggaccccactgatgactccaggcttcccagggccgaagcggagcaggaaaaggaccagctcaggacccaggtggtgaggctacaagcagagaaggcagacctgttgggcatcgtgtctgaactgcagctcaagctgaactccagcggctcctcagaagattcctttgttgaaattaggatggctgaaggagaagcagaagggtcagtaaaagaaatcaagcatagtcctgggcccacgagaacag

SEQ ID NO: 22885 - DNA, 1734 bp, Artificial Sequence
  derived and/or modified sequence
atgtcacaccagcccttgagctgcctcaccgagaaggaggattccccttccgagagcactggaaatggaccaccacacttagcgcaccctaacttagacacgttcacgccagaagagctgctgcagcaaatgaaggaattgctgaccgaaaatcatcagctcaaggaggcgatgaagctgaacaaccaagccatgaaagggaggttcgaagagctgtcagcctggactgaaaaacagaaagaagaaagacaatttttcgagattcaaagcaaggaagcgaaagagagactgatggccttgtctcacgaaaatgagaaattgaaggaagaactgggaaagctgaagggcaagtccgaaagaagtagtgaagaccccacagatgatagcagactgcctagagctgaagccgagcaggagaaagaccagcttcgcacccaggtggtgagactgcaggccgaaaaggccgatcttttaggcatagttagcgaacttcaactgaagctgaactctagcgggagttctgaagactccttcgtcgaaatccggatggccgagggagaggcagagggctccgtcaaggaaattaaacactcgcctggcccaacccgcaccgtgtccacgggaacagcactgagcaagtacaggagtcgttctgctgatggagctaaaaactatttcgaacatgaggaactgactgtgtcccagctactcttgtgtcttagagaaggcaatcagaaagtggaacgcctagaggttgctctgaaggaggccaaagagagagtaagtgacttcgagaaaaagacaagcaacagatccgaaattgaaacccagactgagggtagcactgaaaaggagaacgatgaggaaaagggtccagagactgtgggttccgaggtcgaagcacttaatctacaggtgacaagtctctttaaagaactgcaggaagcgcacactaaactctccaaggctgagctcatgaaaaagcgcctgcaagaaaaatgtcaagcactggaacgtaaaaactctgccatcccttctgagcttaatgagaaacaagagttggtttacaccaataaaaaactggagcttcaggtggagagcatgctgtcagaaattaagatggagcaggctaagacagaagatgaaaagagcaaactgaccgtattacagatgacccataacaagctactacaggaacataataacgccttgaagacaattgaggagctcaccaggaaggagagcgagaaggttgatagggctgtgctgaaggagctctctgagaaactcgaactggctgaaaaagccttggccagcaaacagttgcagatggatgagatgaagcagactatagccaaacaggaagaagacctcgaaacaatgacgatcctgagggctcagatggaagtgtattgcagcgatttccacgctgaacgagcagcccgagaaaaaatccatgaagaaaaggagcagctggctctgcaactcgcagtactacttaaggagaatgacgctttcgaggacggaggcagacagtccctgatggagatgcagtccagacatggcgcacggacctccgactcagaccagcaggcttatcttgtccaaaggggcgcagaggacagggactggagacagcagagaaacattccgattcacagctgtcccaagtgcggggaggtgctaccagacattgatacgctacagatacatgtaatggactgcatcatttag

SEQ ID NO: 22886 - DNA, 1734 bp, Artificial Sequence
  derived and/or modified sequence
atgagccaccaacctcttagttgcctcacagaaaaagaggactcaccatccgaatccacggggaatgggccaccacacctggcccatcctaacctcgacacattcactccagaagagctcctgcagcagatgaaggagctgctgacagagaatcatcagttaaaggaagccatgaagctgaacaaccaggctatgaaaggcaggttcgaagagctgtcagcttggaccgaaaaacagaaggaagagcgacagttttttgagatccagtctaaggaggctaaagaaagactgatggcgctatcccacgagaacgagaaactgaaggaagaacttggaaaactgaagggcaagtcagaaagatcatcagaggatcccaccgatgattcacggctccccagggctgaggcggaacaggaaaaggatcagctgcgaacacaggtggtccgcttacaggctgagaaagccgacctactaggcatcgtatctgagttgcaactgaagctcaactctagcgggtcgagtgaggactccttcgttgaaattaggatggccgagggagaagccgaaggctcagtaaaagagatcaagcactcccccggtcctacaagaacagtgtctacaggaacagcgctcagcaaatatcgatcaagatcagctgatggggcaaagaattattttgagcatgaagaactcactgtatcccagctcctcctgtgtctgagggaaggcaaccagaaagtcgaaaggctggaggtagctctgaaagaagcgaaggagcgcgtgtccgactttgagaaaaagacttccaaccggagcgagattgagactcagacagaaggcagcaccgagaaagagaatgacgaggagaagggccctgagacagtcggatcagaggtggaagctcttaatctccaggttacatctttgtttaaagagctccaggaggcccacacaaagctcagcaaggctgaactgatgaaaaagcgcctgcaggaaaagtgccaggccctggagcgaaagaacagtgctatcccatccgaactcaatgaaaagcaggagctggtctataccaacaaaaagttagaattacaagtggaatctatgctgtctgaaattaagatggaacaggccaaaacggaggacgagaaaagtaaactgacggtgttacagatgacccataacaaactcttgcaagagcacaataacgcgctgaaaacgatcgaagagttgacaaggaaggagtctgagaaagtagatagggccgtgctgaaggaactttccgaaaaattggagctggctgagaaggccctggcaagcaaacagttgcagatggatgagatgaagcagacgatagcaaagcaagaagaggatttggaaactatgaccattctgcgcgcacagatggaagtttactgcagcgacttccatgcagagcgagccgcacgcgagaaaatacacgaggagaaggaacagcttgcgctccagctagcggtgctcctaaaggagaacgacgctttcgaagatggaggaagacaatccctgatggagatgcagtcccgacacggcgcaaggacgtccgatagcgatcagcaagcatatctggtgcagcgaggtgcagaagaccgcgattggcgacagcagcgaaatataccgatccattcatgccctaagtgcggggaggtcttgccagatatcgacactctgcagatacacgtgatggactgcatcatctag

SEQ ID NO: 22887 - DNA, 1734 bp, Artificial Sequence
  derived and/or modified sequence
atgtcacaccagccattgagttgtcttactgaaaaagaggattcaccaagtgagtcaacaggcaatgggcctccccacctggctcaccccaaccttgacacctttacaccggaggaactgctgcagcagatgaaggagctgctcacagaaaaccaccaattaaaagaggccatgaaactgaataaccaggctatgaaaggacgcttcgaagaattaagcgcatggactgaaaagcagaaggaagagagacaattctttgaaatccaatctaaggaagccaaggagagactgatggcactgagtcatgagaatgaaaaattgaaagaggagctcggcaaactgaaaggaaagtcggagagatcttctgaggaccctactgacgattcccgcctcccgagggccgaggcagaacaggagaaggaccaactacggactcaagttgttcgtttgcaggcagaaaaggccgacttgctgggcatagtgagtgagctccagctcaaactgaactcttccgggtccagtgaagacagctttgtggagataagaatggcagagggagaggcagaaggctcagtcaaggagattaagcactcccccggtccaacccgcaccgtttcaaccggaaccgcgctgtccaaatatcgtagccggtctgctgatggcgcaaagaactacttcgagcacgaggagctgaccgtgtcacagcttctgttatgtctgagagaggggaaccagaaggtggaaaggttggaagtggcgctgaaggaggccaaagaaagggtgagcgatttcgagaaaaagactagcaatagaagtgaaatcgagacgcagaccgagggcagcacagaaaaagaaaatgatgaggagaagggacccgagactgtggggtcagaagttgaggcattaaatctccaagtcactagcctatttaaagagctccaggaggcccacaccaagctgtctaaagctgaactgatgaaaaagcgcttgcaggagaagtgccaggcacttgagagaaaaaatagtgctatcccctccgagctcaatgaaaagcaggaactggtctacaccaacaaaaagttggagctgcaggtggaaagcatgttgagcgaaattaagatggagcaggcaaagaccgaggatgaaaaatccaagctgacagttcttcagatgacacacaataaattgcttcaggagcacaacaatgcgctcaagaccatcgaggagttgactagaaaggaaagcgaaaaagttgatagagctgtactgaaagagctcagcgaaaaattggagcttgcagagaaggccctggctagtaaacaattgcaaatggacgaaatgaaacagactatcgctaaacaggaggaggatctcgagacaatgacaattctgcgagcgcagatggaggtatactgttcggactttcacgccgaacgggcagctcgagagaagatacacgaagagaaggaacagctcgcccttcaactggctgtcctgttgaaagaaaacgatgcctttgaagacggcggaagacagtcactgatggagatgcagtcacgtcacggggcaaggacttctgatagtgaccagcaggcatatctggtacagcgaggcgcagaggacagagattggaggcagcaaaggaatattccgattcactcatgtccgaagtgcggggaggtgctcccagatatcgataccctgcagatccatgtgatggattgtatcatctag

SEQ ID NO: 22888 - DNA, 1734 bp, Artificial Sequence
  derived and/or modified sequence
atgtcccaccagccattgtcatgcctgaccgagaaggaggactccccctcagaatcaactggcaatgggccaccacaccttgctcaccctaaccttgatacttttacaccggaagaactgctgcagcaaatgaaggaactcctgaccgagaaccaccagctgaaggaggctatgaaactgaacaatcaggctatgaagggcagatttgaagaactgtcagcctggacagagaagcaaaaggaagaacgccagttctttgaaatacagagcaaggaggctaaagagagactcatggccctctcccacgagaacgagaagcttaaagaggagttgggcaaacttaaggggaagtccgagcggtccagtgaagatccaacggacgattcccggctaccaagggccgaggccgagcaagaaaaagatcaattacggacccaggtggtccggctgcaagccgagaaggctgatctcttgggaattgtgagcgaactccaacttaagctgaactcaagtggatcttccgaagacagcttcgtggaaatccgcatggccgaaggcgaggcagagggcagcgtcaaggagatcaaacacagtccgggacctacgcgcactgtatccacaggaactgccctgagtaagtatcgctcccgatctgctgacggtgcaaaaaactatttcgagcatgaggagctcactgttagccagctgttactgtgtttgcgggagggcaatcaaaaggtcgagcgtcttgaggtggcactgaaggaagctaaagaaagggtcagcgatttcgaaaagaaaacatctaacaggtccgagattgaaactcagaccgaaggcagcactgagaaggagaatgacgaggagaaaggccctgagactgtgggctcggaggttgaggctctaaacctgcaggttactagtttattcaaagagctccaggaagcacacaccaagttgagcaaggccgagttaatgaaaaaaaggctccaggaaaaatgccaagccctcgagcggaagaattccgctataccaagtgagctgaatgagaaacaggagctggtatataccaataaaaagctcgaactacaggtggaaagcatgttgagtgaaatcaaaatggaacaggctaagactgaagatgagaagtctaaactcacagtgttgcaaatgacccataacaaacttctgcaggagcacaataatgcattgaagacgattgaggagctaacacgtaaagagagtgagaaggttgatcgggctgtcttgaaagaactgagtgaaaaactggaacttgcggaaaaggcactcgcttctaagcagctgcagatggacgagatgaagcaaactattgctaagcaggaggaggacctcgagaccatgacaatcctgagagctcaaatggaagtgtattgttcagattttcatgccgagagagctgctagagaaaagattcacgaggagaaggaacaactggccctgcaattagccgtgttactaaaagagaacgatgcttttgaggatgggggacgtcagtccctcatggaaatgcaatcgcgccatggcgcaagaacgtctgattctgatcaacaggcgtacttagtgcaacgcggagccgaggaccgagactggcgacaacaacggaacatacctatccacagctgccctaagtgcggagaggtactgccagatatcgatacactgcaaatccacgtgatggactgtattatttag

SEQ ID NO: 22889 - DNA, 1734 bp, Artificial Sequence
  derived and/or modified sequence
atgagccaccagcccctgagctgcctgaccgagaaggaggacagccccagcgagagcaccggcaacggccccccccacctggcccaccccaacctggacaccttcacccccgaggagctgctgcagcagatgaaggagctgctgaccgagaaccaccagctgaaggaggccatgaagctgaacaaccaggccatgaagggcagattcgaggagctgagcgcctggaccgagaagcagaaggaggagagacagttcttcgagatccagagcaaggaggccaaggagagactgatggccctgagccacgagaacgagaagctgaaggaggagctgggcaagctgaagggcaagagcgagagaagcagcgaggaccccaccgacgacagcagactgcccagagccgaggccgagcaggagaaggaccagctgagaacccaggtggtgagactgcaggccgagaaggccgacctgctgggcatcgtgagcgagctgcagctgaagctgaacagcagcggcagcagcgaggacagcttcgtggagatcagaatggccgagggcgaggccgagggcagcgtgaaggagatcaagcacagccccggccccaccagaaccgtgagcaccggcaccgccctgagcaagtacagaagcagaagcgccgacggcgccaagaactacttcgagcacgaggagctgaccgtgagccagctgctgctgtgcctgagagagggcaaccagaaggtggagagactggaggtggccctgaaggaggccaaggagagagtgagcgacttcgagaagaagaccagcaacagaagcgagatcgagacccagaccgagggcagcaccgagaaggagaacgacgaggagaagggccccgagaccgtgggcagcgaggtggaggccctgaacctgcaggtgaccagcctgttcaaggagctgcaggaggcccacaccaagctgagcaaggccgagctgatgaagaagagactgcaggagaagtgccaggccctggagagaaagaacagcgccatccccagcgagctgaacgagaagcaggagctggtgtacaccaacaagaagctggagctgcaggtggagagcatgctgagcgagatcaagatggagcaggccaagaccgaggacgagaagagcaagctgaccgtgctgcagatgacccacaacaagctgctgcaggagcacaacaacgccctgaagaccatcgaggagctgaccagaaaggagagcgagaaggtggacagagccgtgctgaaggagctgagcgagaagctggagctggccgagaaggccctggccagcaagcagctgcagatggacgagatgaagcagaccatcgccaagcaggaggaggacctggagaccatgaccatcctgagagcccagatggaggtgtactgcagcgacttccacgccgagagagccgccagagagaagatccacgaggagaaggagcagctggccctgcagctggccgtgctgctgaaggagaacgacgccttcgaggacggcggcagacagagcctgatggagatgcagagcagacacggcgccagaaccagcgacagcgaccagcaggcctacctggtgcagagaggcgccgaggacagagactggagacagcagagaaacatccccatccacagctgccccaagtgcggcgaggtgctgcccgacatcgacaccctgcagatccacgtgatggactgcatcatctag

SEQ ID NO: 22890 - protein, 74 aa, Artificial Sequence
  derived and/or modified sequence
MPKYYEDKPQGGACAGLKEDLGACLLQSDCVVQEGKSPRQCLKEGYCNSLKYAFFECKRSVLDNRARFRGRKGY

SEQ ID NO: 22891 - DNA, 225 bp, Artificial Sequence
  derived and/or modified sequence
atgcccaagtactacgaggacaagccccagggcggcgcctgcgccggcctgaaggaggacctgggcgcctgcctgctgcagagcgactgcgtggtgcaggagggcaagagccccagacagtgcctgaaggagggctactgcaacagcctgaagtacgccttcttcgagtgcaagagaagcgtgctggacaacagagccagattcagaggcagaaagggctactag

SEQ ID NO: 22892 - DNA, 1754 bp, Artificial Sequence
  derived and/or modified sequence
tgagactggggcctcgctcgctcccgacccggttgcaagtgttgcggtgggagaaagtcgcgtccgcatcggaggggaagcgccgtcatgcctaagtattatgaggacaagccgcagggcggcgcgtgcgcgggcctgaaggaggacctgggcgcgtgtctgctgcagtcggactgtgtggtccaggaaggaaaatcacctcggcagtgtttgaaggaaggatactgcaactctttgaagtacgcattttttgagtgtaaaagatcagtgttggataacagggcaagattcagaggaagaaaaggatattgatgcattatgttgaagccaacatggaaaacaacaaatattttccctggtcattaacacaaagaagccaaaacaggaaacatactttttactacatctgtttggttggaccagatttcccctccgtggaacactgaagaaagtggatgagttgttttcgaatatgtataaagtaaatgattctcttgatccaagttatttttagaagaaaaacctaattgaacaggtatgggttgggagcataataaatgtgttttgagaattgttctaaagcacagaaaatggaaagactgttatttgcaaacttgactcttcaattgaattacccaattagtacaggccactgatttgactgacacagtcgataacatgcagcctatccagaaggtgtctgttgggaaagtttaggataaaactttttctttagttcagtcttttcctgtctagttctaaaatgaattgtgtttgattccttagagaagaaatacttcatttgtgctctgattcactgaagtaataacctcagcactttaatagcgtccacaggcatagctgatgctaggccccagattgtgttgcccaggctctttaccatcatcttcggactgtttttgtttcctggttacattttcagtctggcccgctctacataatgggccagtgtcagctccaagtccacatccttattatccatgattcaaaagggagagagagaacttcctttttcagggtccacaaatcaaatctataaaaggactctggtcttcccaggatcacctgcccttgcattggaccagtccctgtggaagaggggatgggggcctgtgatcttggccaggcctgggctatctatctgcactgtcattgctaactcctgtcagaatcacatggatgagtagtgggctgaatcccaaaaggaaaggggtttagagcaagtggaaacaacagatgttcactatagaaagcaagaatgaaaaccatgaagtggttgaagattagccttacagtaattttattctgatcacttaatacagtagagtcaaacaggaatccaagtttccaactttattatttttggcactgaagaattacaaagaactctagcgtctttatacctccgtggttcactggagttaaagcaatcggggcgttgtacagctcacttgagtttttaaaggttctactaaaaagtgagaattccacagcaatatgggtcattgttgcagaatatcacaaaggtctgttgtgtatactccttttcaccaggaaagggacaataatagtttttttcaatgtatatatatataagtgatctaactttttattaataaaagtaaacaactctaaaatgtatattataaagccctgtcatctttgttgagtaatagctttattgagctttatttggagaaatacacataccgtaaaattcacactgaaactta

SEQ ID NO: 22893 - DNA, 225 bp, Artificial Sequence
  derived and/or modified sequence
atgccaaaatactatgaggacaagccccaggggggggcatgcgccggcttgaaagaagatcttggggcctgtttgctgcagagcgactgcgtggtgcaggagggcaagtccccccgccagtgcttgaaagaggggtactgtaattcactgaagtacgcattctttgagtgcaagaggtctgtgctggataaccgagctagattccgggggcgaaaaggctactag

SEQ ID NO: 22894 - DNA, 225 bp, Artificial Sequence
  derived and/or modified sequence
atgcccaagtactatgaggacaagccccagggcggggcctgtgccggcctgaaggaggacctgggcgcctgcctgctgcagagcgactgtgtggtgcaggagggcaagagcccccggcagtgcctgaaggagggctactgcaacagcctgaagtatgccttctttgagtgcaagaggtctgtgctggacaacagagcccgcttccggggcaggaagggctactag

SEQ ID NO: 22895 - DNA, 225 bp, Artificial Sequence
  derived and/or modified sequence
atgcccaagtactacgaggacaagccccagggcggcgcctgcgccggcctgaaagaagacctgggagcatgccttctgcagtccgactgtgtggtgcaggaaggaaagagcccgcgtcagtgcctaaaggaaggctactgtaattctttgaaatacgctttcttcgaatgcaaacgatccgtcctcgacaaccgcgcgcgctttagaggacgaaaagggtactag

SEQ ID NO: 22896 - DNA, 225 bp, Artificial Sequence
  derived and/or modified sequence
atgcctaagtattatgaagataagccacagggtggagcgtgtgcaggccttaaagaagacctgggcgcatgtctccttcagagtgattgcgtggttcaggaaggcaaatcacctcgtcagtgcctcaaagagggttactgcaactcattgaagtacgctttcttcgagtgtaagcggagtgtgctggacaacagagccagattccgaggacgcaaggggtactag

SEQ ID NO: 22897 - protein, 364 aa, Artificial Sequence
  derived and/or modified sequence
MSVMVVRKKVTRKWEKLPGRNTFCCDGRVMMARQKGIFYLTLFLILGTCTLFFAFECRYLAVQLSPAIPVFAAMLFLFSMATLLRTSFSDPGVIPRALPDEAAFIEMEIEATNGAVPQGQRPPPRIKNFQINNQIVKLKYCYTCKIFRPPRASHCSICDNCVERFDHHCPWVGNCVGKRNYRYFYLFILSLSLLTIYVFAFNIVYVALKSLKIGFLETLKETPGTVLEVLICFFTLWSVVGLTGFHTFLVALNQTTNEDIKGSWTGKNRVQNPYSHGNIVKNCCEVLCGPLPPSVLDRRGILPLEESGSRPPSTQETSSSLLPQSPAPTEHLNSNEMPEDSSTPEEMPPPEPPEPPQEAAEAEK

SEQ ID NO: 22898 - protein, 170 aa, Artificial Sequence
  derived and/or modified sequence
MSVMVVRKKVTRKWEKLPGRNTFCCDGRVMMARQKGIFYLTLFLILGTCTLFFAFECRYLAVQLSPAIPVFAAMLFLFSMATLLRTSFSDPGVIPRALPDEAAFIEMEIEATNGAVPQGQRPPPRIKNFQINNQIVKLKYCYTCKIFRPPRASHCSICDNCVERFDHHCP

SEQ ID NO: 22899 - protein, 194 aa, Artificial Sequence
  derived and/or modified sequence
  misc_feature (1)..(1): Xaa can be any naturally occurring amino acid
XLFLILGTCTLFFAFECRYLAVQLSPAIPVFAAMLFLFSMATLLRTSFSDPGVIPRALPDEAAFIEMEIEATNGAVPQGQRPPPRIKNFQINNQIVKLKYCYTCKIFRPPRASHCSICDNCVESLKIGFLETLKETPGTVLEVLICFFTLWSVVGLTGFHTFLVALNQTTNEDIKGSWTGKNRVQNPYSHGNIV

SEQ ID NO: 22900 - DNA, 1095 bp, Artificial Sequence
  derived and/or modified sequence
atgagcgtgatggtggtgagaaagaaggtgaccagaaagtgggagaagctgcccggcagaaacaccttctgctgcgacggcagagtgatgatggccagacagaagggcatcttctacctgaccctgttcctgatcctgggcacctgcaccctgttcttcgccttcgagtgcagatacctggccgtgcagctgagccccgccatccccgtgttcgccgccatgctgttcctgttcagcatggccaccctgctgagaaccagcttcagcgaccccggcgtgatccccagagccctgcccgacgaggccgccttcatcgagatggagatcgaggccaccaacggcgccgtgccccagggccagagacccccccccagaatcaagaacttccagatcaacaaccagatcgtgaagctgaagtactgctacacctgcaagatcttcagaccccccagagccagccactgcagcatctgcgacaactgcgtggagagattcgaccaccactgcccctgggtgggcaactgcgtgggcaagagaaactacagatacttctacctgttcatcctgagcctgagcctgctgaccatctacgtgttcgccttcaacatcgtgtacgtggccctgaagagcctgaagatcggcttcctggagaccctgaaggagacccccggcaccgtgctggaggtgctgatctgcttcttcaccctgtggagcgtggtgggcctgaccggcttccacaccttcctggtggccctgaaccagaccaccaacgaggacatcaagggcagctggaccggcaagaacagagtgcagaacccctacagccacggcaacatcgtgaagaactgctgcgaggtgctgtgcggccccctgccccccagcgtgctggacagaagaggcatcctgcccctggaggagagcggcagcagaccccccagcacccaggagaccagcagcagcctgctgccccagagccccgcccccaccgagcacctgaacagcaacgagatgcccgaggacagcagcacccccgaggagatgcccccccccgagccccccgagcccccccaggaggccgccgaggccgagaagtag

SEQ ID NO: 22901 - DNA, 585 bp, Artificial Sequence
  derived and/or modified sequence
tgactgttcctgatcctgggcacctgcaccctgttcttcgccttcgagtgcagatacctggccgtgcagctgagccccgccatccccgtgttcgccgccatgctgttcctgttcagcatggccaccctgctgagaaccagcttcagcgaccccggcgtgatccccagagccctgcccgacgaggccgccttcatcgagatggagatcgaggccaccaacggcgccgtgccccagggccagagacccccccccagaatcaagaacttccagatcaacaaccagatcgtgaagctgaagtactgctacacctgcaagatcttcagaccccccagagccagccactgcagcatctgcgacaactgcgtggagagcctgaagatcggcttcctggagaccctgaaggagacccccggcaccgtgctggaggtgctgatctgcttcttcaccctgtggagcgtggtgggcctgaccggcttccacaccttcctggtggccctgaaccagaccaccaacgaggacatcaagggcagctggaccggcaagaacagagtgcagaacccctacagccacggcaacatcgtgtag

SEQ ID NO: 22902 - DNA, 1095 bp, Artificial Sequence
  derived and/or modified sequence
atgtcggttatggtggtacgcaagaaagtgacgcggaaatgggagaaacttcccgggcgcaacacattctgctgtgatggcagagtcatgatggctaggcagaagggcattttctatttgaccctgtttcttattctgggaacatgcacactgttttttgcattcgagtgtcgctatttggccgtgcagctatctcccgctattcccgtgtttgcggctatgcttttcctgttctctatggctacgcttctgaggacctctttttccgatccaggcgtgatccccagagccttacccgacgaagctgcgttcatagaaatggagatcgaggccacaaatggagcggtgccccagggtcaaagaccaccgcctagaataaagaatttccagatcaacaaccagattgtcaagctgaagtattgttatacctgtaaaattttccgccctcctcgcgcttctcactgttcaatctgtgacaactgcgtggagcgctttgaccaccactgtccttgggtggggaactgtgtcggcaaacgaaactaccgatacttttacctctttatcctctccctcagcctgcttacaatctacgtgttcgcttttaatatcgtgtacgtcgccctcaaatccttgaagatcgggtttctggagacactcaaggagacgccaggcaccgttttggaagtcctcatctgttttttcaccctgtggtctgtggttggactgacagggtttcacaccttcctggtcgcgttgaaccagacaactaacgaagacatcaagggatcctggacggggaagaacagagtgcaaaatccttactcccacggtaacatcgttaagaactgctgcgaggttttgtgcgggccactgcccccaagcgttctggacaggcggggaattctgccccttgaggaaagcggaagtaggccgccctccacccaggagacatcaagcagcctgctgccccagtccccggctccaacagagcacctgaatagcaatgaaatgcccgaagacagtagcacccctgaagagatgcctccgccagaacctcctgagccaccccaagaagctgccgaagccgagaaatag

SEQ ID NO: 22903 - DNA, 1095 bp, Artificial Sequence
  derived and/or modified sequence
atgagcgtaatggtggtgagaaagaaggtgacaagaaaatgggagaaactacccgggaggaatacattctgctgcgatggacgggtgatgatggctcgacaaaaggggatattctacctcaccctgttcctgatacttggtacctgtaccctctttttcgcttttgagtgcagatatctcgctgtccaactttcccctgcaataccagtttttgctgccatgctgtttctcttcagcatggcgacccttttgaggacgtcattctcagaccctggcgttatcccccgcgccttgcccgacgaggcagcctttatagagatggaaattgaagcaaccaacggggccgttcctcaagggcagagacccccaccccggataaagaactttcagatcaataaccaaatcgtgaaactgaagtattgctatacatgtaagatctttcggccgccaagagcttcacattgctctatttgcgacaactgtgtcgagagattcgaccaccactgtccctgggtaggcaattgtgtgggcaagaggaattaccgttatttctatctgtttatcctatctctgtcactcttaaccatctacgtttttgcatttaatatcgtttacgtggccttgaaatccctgaaaatagggttcttggaaacgctgaaagagacacctggcactgtccttgaagtgctaatctgcttttttacactgtggtccgttgtgggactgacaggctttcatacatttttagtggctctcaatcagactactaacgaagatatcaaaggaagctggacggggaaaaatcgggtacagaatccttactcacacgggaacattgtgaagaattgttgtgaggtcttgtgcggacctttgcctccgagcgtgctggacaggaggggtatcctgccactcgaagagtccggctcccggccaccgagcacacaggaaacctcctcgtccctgcttccccaatcccctgctcccactgagcatttgaactccaatgagatgccagaggattcttcaactccggaggaaatgcctcctcccgaacccccagagcccccccaggaggccgccgaagcagagaagtag

SEQ ID NO: 22904 - DNA, 585 bp, Artificial Sequence
  derived and/or modified sequence
tagctttttcttattctcggtacttgcacactttttttcgctttcgaatgtagatacctcgctgtgcagctaagtcccgctatccccgtttttgctgcaatgcttttcctgttctccatggcaacccttttgcgtaccagcttctcagatccaggcgtcattccacgcgccctcccagacgaagcagcattcatagagatggagatcgaagccaccaacggggccgtgcctcaaggacagcgacctccccctagaatcaaaaactttcaaataaataaccagattgtcaagctcaaatactgttatacatgtaagattttcagaccccccagagcttcccactgcagtatttgtgataattgcgtcgaatccctgaaaattggctttctcgagaccttaaaggagacacccggcacggtgttggaggtcctgatctgcttcttcactctgtggtctgtcgtcgggctcactgggttccacaccttcttagtggcgctgaatcaaaccacaaacgaggatatcaaaggatcctggacagggaagaatagagtgcaaaatccctattcgcacggcaatattgtatag

SEQ ID NO: 22905 - DNA, 1095 bp, Artificial Sequence
  derived and/or modified sequence
atgtctgtgatggtggtgaggaagaaggtgaccaggaagtgggagaagctgcccggcaggaacaccttctgctgtgatggccgggtgatgatggcccggcagaagggcatcttctacctgaccctcttcctgatcctgggcacctgcaccctcttctttgcctttgagtgccgctacctggccgtgcagctgagccctgccatccctgtgtttgctgccatgctgttcctgttctccatggccaccctgctgcggaccagcttcagtgaccccggggtcatcccccgggccctgcctgatgaggccgccttcatcgagatggagattgaggccaccaatggagctgtgccccagggccagaggcccccaccccgcatcaagaacttccagatcaacaaccagatcgtgaagctgaagtactgctacacctgcaagatcttccggcccccccgggccagccactgcagcatctgtgacaactgtgtggagagatttgaccaccactgcccctgggtgggcaactgtgtgggcaagaggaactaccgctacttctacctgttcatcctgagcctgagcctgctgaccatctacgtgtttgccttcaacatcgtgtatgtggccctgaagagcctgaagattggcttcctggagaccctgaaggagaccccaggcaccgtgctggaggtgctgatctgcttcttcaccctgtggagcgtggtgggcctgaccggcttccacaccttcctggtggccctgaaccagaccaccaatgaagacatcaagggctcctggacaggcaagaacagagtgcagaacccctacagccacggcaacatcgtgaagaactgctgtgaggtgctgtgtggccccctgccccccagcgtgctggaccggcggggcatcctgcccctggaggagagcggcagcaggcctcccagcacccaggagaccagcagcagcctgctgccccagagccctgcccccacagagcacctgaacagcaatgagatgcctgaggacagcagcaccccagaggagatgcctcctcctgagcccccagagcccccccaggaggccgctgaggccgagaagtag

SEQ ID NO: 22906 - DNA, 585 bp, Artificial Sequence
  derived and/or modified sequence
tgactcttcctgatcctgggcacctgcaccctcttctttgcctttgagtgccgctacctggccgtgcagctgagccctgccatccctgtgtttgctgccatgctgttcctgttctccatggccaccctgctgcggaccagcttcagtgaccccggggtcatcccccgggccctgcctgatgaggccgccttcatcgagatggagattgaggccaccaatggagctgtgccccagggccagaggcccccaccccgcatcaagaacttccagatcaacaaccagatcgtgaagctgaagtactgctacacctgcaagatcttccggcccccccgggccagccactgcagcatctgtgacaactgtgtggagagcctgaagattggcttcctggagaccctgaaggagaccccaggcaccgtgctggaggtgctgatctgcttcttcaccctgtggagcgtggtgggcctgaccggcttccacaccttcctggtggccctgaaccagaccaccaatgaagacatcaagggctcctggacaggcaagaacagagtgcagaacccctacagccacggcaacatcgtgtag

SEQ ID NO: 22907 - DNA, 1095 bp, Artificial Sequence
  derived and/or modified sequence
atgagcgtgatggtggtgcggaagaaggtgacccggaagtgggagaagctccccggaagaaacacattctgctgcgatggccgcgtgatgatggcgcgacagaaaggtattttctatttaacactctttctaattctcgggacgtgcactctattctttgcatttgaatgccggtaccttgccgtgcaactttctccagcaatccccgtgttcgcagcgatgttattcctcttctcaatggcgaccctgttgcggaccagcttttcagaccccggggttatacctcgggcacttcctgatgaggcggcttttattgaaatggagattgaagccacaaacggcgcggtcccacaaggacagcgccccccacctcgcattaagaactttcagattaataatcaaattgtaaagctaaaatattgttacacttgcaagattttcagaccaccgcgggcatcccattgctctatttgcgataactgcgtggaacgctttgatcaccattgcccctgggtggggaactgtgtgggaaaaagaaactatagatacttctatctgttcatcctctcactgagcttgctgactatatacgttttcgccttcaatattgtctacgtcgctttaaagagcctgaagatagggtttctggagaccctgaaggagaccccagggacagtgctggaggtgcttatatgtttctttacattatggtcagtagttggtctgacggggttccatacatttcttgtagcactgaatcagaccacaaacgaagacatcaaggggagctggaccggcaagaaccgtgtccagaatccatacagtcatggaaacatcgtgaaaaattgctgcgaggtattgtgtggacccttaccaccgagcgtccttgatcgccgtggtatcctgcccctcgaagagtcgggaagcaggccaccctctacgcaggagacatcaagttcacttttgcctcagagtcccgctcccactgagcaccttaactcaaacgagatgccagaggattcctctacaccggaagagatgccacctcctgaacctccagaaccccctcaggaagctgccgaggccgaaaaatag

SEQ ID NO: 22908 - DNA, 1095 bp, Artificial Sequence
  derived and/or modified sequence
atgagcgtgatggtggtgcggaagaaggtgacccggaagtgggagaagcttcccggccggaatactttctgctgcgacggacgcgtaatgatggcacggcaaaagggaattttttacttgacacttttcttgattctgggaacttgcacactgtttttcgccttcgaatgtcgatatctggcagtgcaattgtcccccgccatccctgtgtttgcggcgatgctgtttctgttttctatggctacactgctccggacatccttctctgatccaggggtgattccacgagccctgcctgacgaagctgcatttatcgaaatggagatcgaagcaacaaatggcgcagtaccacaaggccagcggccacccccgaggataaagaatttccagattaataatcagatcgttaagcttaagtactgttacacatgcaaaatctttagacccccccgcgcctcgcattgttcgatctgtgataattgcgtggaaaggtttgaccaccattgcccatgggtgggaaactgcgtgggaaagaggaactatcggtatttctatttgttcattctgagcctgtccctgctaacaatttacgtttttgcgtttaacatagtatacgtggcactcaaatcacttaaaattggctttctcgagacgctgaaagagacgcctggaaccgtactggaggttcttatctgtttcttcacgctgtggtcagttgtgggactaacagggtttcataccttcctggtggctctgaaccagacaaccaatgaagacataaaaggctcttggaccggcaaaaatcgcgtgcaaaacccttacagccatggaaacattgtcaagaactgttgcgaagtgctctgcggccctctgccaccctctgtgctggaccggcgtggaattctgcctctggaagagtccggtagtagacctcctagcactcaggaaaccagctccagcctgctgccacagagcccagcacctacagagcacttaaattcaaacgaaatgcccgaagactctagcacaccagaagagatgcccccaccagagcctcctgagcctccgcaagaggcggcagaggctgaaaagtag

SEQ ID NO: 22909 - DNA, 585 bp, Artificial Sequence
  derived and/or modified sequence
tgactgttcctgatcctgggcacctgcaccctgttcttcgccttcgaatgtcgatacctcgctgtgcagttgagccccgccatcccagtgtttgctgccatgctgttcctattttctatggccacactgctccgaacttcattcagcgatccaggcgttatcccaagggctctgccagatgaggccgcttttattgagatggagattgaggccaccaatggggctgtccctcagggccaaaggccaccccctcggattaagaatttccagattaacaaccaaatcgtgaagctgaagtactgttatacatgtaaaatcttccgccccccccgtgctagtcattgtagcatttgtgacaactgtgtagaatcactgaaaattgggttcctggaaactctcaaagagacacctgggacagttttggaagtactgatctgcttctttacactttggtccgtcgttggcctaacggggtttcacacgtttcttgttgctctcaatcagactaccaatgaagacatcaaagggagctggactgggaagaacagggtgcagaacccttatagccatggtaatattgtctag

SEQ ID NO: 22910 - DNA, 1095 bp, Artificial Sequence
  derived and/or modified sequence
atgtcagttatggttgtgcggaaaaaggttacccggaaatgggagaagttgcccggaagaaatactttttgctgcgatggaagggtgatgatggcgagacagaaaggcatattctacctaacactgtttctcatcctgggaacctgcactttgttcttcgcctttgagtgtaggtatctcgccgtccagttgtcaccagccattcctgtgttcgcggctatgctgttcttgttctcaatggcaacgcttctgaggacttcattctctgaccccggagtgatccccagggcactcccagatgaggctgcctttatcgagatggaaattgaagcaaccaatggagcggtacctcaaggtcaacggccaccaccacgaatcaaaaatttccagatcaacaaccagattgtcaaactcaagtactgttatacttgtaagatctttcgtcctccccgagcatctcattgtagtatctgtgacaattgtgttgagcgcttcgaccatcattgcccctgggtaggtaactgtgtggggaagaggaattataggtatttctaccttttcatcctgtcgctgagccttctcacaatttatgtttttgcgttcaatatcgtgtatgttgctctgaaatctctgaagatcggcttcctcgaaaccttgaaagagacacccggaactgtgcttgaggtactgatctgcttttttaccctgtggtctgtagtggggctgaccgggttccacacattcttggtggcactcaatcagaccaccaatgaagacatcaagggtagttggacaggaaaaaatcgagtgcaaaacccgtacagccacggaaatatcgtcaagaattgctgcgaggttctctgtggaccattaccaccatcagttctggatcgtaggggcattctgcccctggaggaaagcggaagcagacctccttcaacacaagagactagcagctcactgcttcctcagtctcctgcaccaacggaacatttgaactccaatgaaatgccggaagacagctctacgcctgaggaaatgccaccacctgaaccccctgagccaccccaggaggcggctgaagctgaaaagtag

SEQ ID NO: 22911 - DNA, 1095 bp, Artificial Sequence
  derived and/or modified sequence
atgagcgtaatggtggtccgcaagaaggtgacgcgcaagtgggagaagctgcccggtcggaacaccttttgctgcgatggtagagtaatgatggcgcgacaaaaggggattttttacctgacgctatttttgatcctgggcacgtgcactctgttcttcgctttcgagtgtcgctacttggccgtgcagctctcacccgcaattccagtgtttgccgcaatgttgttccttttctctatggccaccctgctgagaacttcttttagcgacccaggtgtgatccctcgagccctccctgatgaagcggcatttattgagatggagatagaagcaacgaatggtgcagtccctcaaggccagcggcctcccccaaggatcaaaaattttcagattaacaatcagattgtcaagctgaagtactgctacacgtgcaagatttttcggccacccagagcatcccactgttctatctgtgataactgtgttgagcgttttgatcaccactgcccgtgggtcgggaactgcgtgggcaagcgcaattacagatatttctacctgttcatactgagcctttcccttctgacaatctacgtgtttgccttcaacattgtgtatgtggcactcaagagcttaaaaataggatttcttgagacacttaaggaaacgccgggaacagtcctggaagtcctgatttgcttctttactttgtggtccgtggttggactcacaggattccacacattccttgtggccctaaaccagacaactaacgaagatattaagggctcgtggaccggcaagaacagagtccaaaatccctattcccacgggaatattgtgaagaattgctgcgaggtgctgtgtggtccccttccaccatctgtgttggatagaagaggaattctaccactggaggagtcaggctcacggcctcctagcacccaggagacttcctcatctctgcttccacaatctccagctcctactgagcatttaaacagtaacgaaatgcccgaggactcgtctacaccagaggaaatgcctcccccagagccccctgaacccccacaagaggcggctgaggcggaaaaatag

SEQ ID NO: 22912 - DNA, 585 bp, Artificial Sequence
  derived and/or modified sequence
tagctgtttttgatcctcggtacctgcaccttattctttgccttcgaatgcaggtatctggcagtacagctgtcacccgcaatacctgtgtttgccgctatgttatttctattttcaatggccaccctccttaggacatccttttctgacccaggcgtgatccctagggctttgcctgatgaagccgctttcattgaaatggaaatcgaggcaaccaatggagctgtgccccaaggccagaggcctcctcctcgcatcaagaattttcagatcaataaccaaatagtcaaactgaaatactgctatacctgtaaaatttttcgaccacctagggcgagccattgctccatctgtgataactgtgttgagtcactcaagataggctttcttgagacactgaaagaaacccctggcactgtgctggaagtacttatttgtttcttcaccttgtggtctgtggtaggcctaaccggattccacacttttctcgttgctctgaaccaaacaaccaacgaagacattaaggggtcctggactggaaagaatcgtgtgcagaatccctactctcacggtaatatagtctag

SEQ ID NO: 22913 - DNA, 4569 bp, Artificial Sequence
  derived and/or modified sequence
atttggccagtggtgggcggttgccacagctggtttagggccccgaccactggggccccttgtcaggaggagacagcctcccggcccggggaggacaagtcgctgccacctttggctgccgacgtgattccctgggacggtccgtttcctgccgtcagctgccggccgagttgggtctccgtggttcaggccggctcccccttcctggtctcccttctcccgctgggccggtttatcgggaggagattgtcttccagggctagcaattggacttttgatgatgtttgacccagcggcaggaatagcaggcaacgtgatttcaaagctgggctcagcctctgtttcttctctcgtgtaatcgcaaaacccattttggagcaggaattccaatcatgtctgtgatggtggtgagaaagaaggtgacacggaaatgggagaaactcccaggcaggaacaccttttgctgtgatggccgcgtcatgatggcccggcaaaagggcattttctacctgacccttttcctcatcctggggacatgtacactcttcttcgcctttgagtgccgctacctggctgttcagctgtctcctgccatccctgtatttgctgccatgctcttccttttctccatggctacactgttgaggaccagcttcagtgaccctggagtgattcctcgggcgctaccagatgaagcagctttcatagaaatggagatagaagctaccaatggtgcggtgccccagggccagcgaccaccgcctcgtatcaagaatttccagataaacaaccagattgtgaaactgaaatactgttacacatgcaagatcttccggcctccccgggcctcccattgcagcatctgtgacaactgtgtggagcgcttcgaccatcactgcccctgggtggggaattgtgttggaaagaggaactaccgctacttctacctcttcatcctttctctctccctcctcacaatctatgtcttcgccttcaacatcgtctatgtggccctcaaatctttgaaaattggcttcttggagacattgaaagaaactcctggaactgttctagaagtcctcatttgcttctttacactctggtccgtcgtgggactgactggatttcatactttcctcgtggctctcaaccagacaaccaatgaagacatcaaaggatcatggacagggaagaatcgcgtccagaatccctacagccatggcaatattgtgaagaactgctgtgaagtgctgtgtggccccttgccccccagtgtgctggatcgaaggggtattttgccactggaggaaagtggaagtcgacctcccagtactcaagagaccagtagcagcctcttgccacagagcccagcccccacagaacacctgaactcaaatgagatgccggaggacagcagcactcccgaagagatgccacctccagagcccccagagccaccacaggaggcagctgaagctgagaagtagcctatctatggaagagacttttgtttgtgtttaattagggctatgagagatttcaggtgagaagttaaacctgagacagagagcaagtaagctgtcccttttaactgtttttctttggtctttagtcacccagttgcacactggcattttcttgctgcaagcttttttaaatttctgaactcaaggcagtggcagaagatgtcagtcacctctgataactggaaaaatgggtctcttgggccctggcactggttctccatggcctcagccacagggtccccttggaccccctctcttccctccagatcccagccctcctgcttggggtcactggtctcattctggggctaaaagtttttgagactggctcaaatcctcccaagctgctgcacgtgctgagtccagaggcagtcacagagacctctggccaggggatcctaactgggttcttggggtcttcaggactgaagaggagggagagtggggtcagaagattctcctggccaccaagtgccagcattgcccacaaatccttttaggaatgggacaggtaccttccacttgttgtatttattagtgtagcttctcctttgtctcccatccactctgacacctaagccccactcttttcccattagatatatgtaagtagttgtagtagagataataattgacatttctcgtagactacccagaaacttttttaatacctgtgccattctcaataagaatttatgagatgccagcggcatagcccttcacactctctgtctcatctctcctcctttctcattagccccttttaatttgtttttccttttgactcctgctcccattaggagcaggaatggcagtaataaaagtctgcactttggtcatttcttttcctcagaggaagcctgagtgctcacttaaacactatcccctcagactccctgtgtgaggcctgcagaggccctgaatgcacaaatgggaaaccaaggcacagagaggctctcctctcctctcctctcccccgatgtaccctcaaaaaaaaaaaaatgctaaccagttcttccattaagcctcggctgagtgagggaaagcccagcactgctgccctctcgggtaactcaccctaaggcctcggcccacctctggctatggtaaccacactgggggcttcctccaagccccgctcttccagcacttccaccggcagagtcccagagccacttcaccctgggggtgggctgtggcccccagtcagctctgctcaggacctgctctatttcagggaagaagatttatgtattatatgtggctatatttcctagagcacctgtgttttcctctttctaagccagggtcctgtctggatgacttatgcggtgggggagtgtaaaccagaacttttcatctatttgaaggcgattaaactgtgtctaatgcaaacttcctgcctcctccttcccccttccatttcaagaatatgtttgtgtgtagggtgggggtgggggttggaaggggttgcttgttactccccaaacttccattaaccagggcacccttgggttggagaggtagttccaaactctccattgatctatactacattctgggctgaaggttttcttattctggactatgaagaaaggactttcaaggagatatagtgtgaacaggatcaggaaggtagagggattatatttacttaagagaacaagctctatattaggatattgttttgaagcagatggatgccgttaattgctaataagtcttagttattaacgcaggctcatcagggcccccccttggaaatatttgatcagtggtcttttacaagtgatggtatatatttctttctaggtggtgtataatcaagactccctatcaattcccatctcatacttcccagttaattggaattaatgaaatttggctgctcccagacctttttccatgtcttcctttttccttttaacaggatttaagttgagcattcttgagagagagagagagagagagattggaagagagatggggagagactgactcagatccctctcctgtctgcttctttttctggttctctcagttttttttcttgaagttataaagccaaacctggagaatttgtaagttgttaggtttccccaggtaacttggcactcatatgaaccccattttaataagtactcagcccatctcctctcctgggctcagatggctctctctcctccctcaccttacctcaagtgttctcctgaggacccttaggtcagacagagaagctttctctttctgatgggaagggtcaaagtggaaatctcttatctctagtgtgaaatgattttctgctttttcatactccctgccctctttcttttccttaataaatcttccatgtttaagatgttggcctgaagatctgtcccattcataccatgcaccagctgggactgtccctatctgatcagaggggagattaaagaatcaatgttcccaggggaaaagggccttaaattgtttggtcttttcaatggctgacactgtctccaactctccccttcctccttcttcctcaagcttcctatgcaccctactttcccaggccaggatggttggcactgatcccaaacctctgggggcaggtggaaattggctgtggtgagccatttcttcatgtccattcagctctgaggccttcctggccctagctgagatcatcatctcctcctttgcttttaccccaggagtgaggttgggttagaggtggattctgattccgtagcagctaaattccattctccctgtcctgaccatcctgcctttacccataaagcacccgttcctactgaccaaatctctttactttgttggagaaaaaaagtattttgtttttaaatctattttctaatttaaatgcaatttaatatgtaaatctctgcacttttgtgtgagcctacaaatgtgtatgtgttgggggtttttcactctctggtatttcttaataaagaaatctttcttttggggggaagccaattaatgaaggagccttgaatggttttagaaatacagggctgtctgtttctttgtg

SEQ ID NO: 22914 - DNA, 2473 bp, Artificial Sequence
  derived and/or modified sequence
ggcgtggcggagtcagggcgggcctcgagaggccgcgcccgcggctcggccccggactccggcctccggcctccggccccccgctggggagccggtcgctgcttcccgacggattttgatctttgttcttccaggccggctcccccttcctggtctcccttctcccgctgggccggtttatcgggaggagattgtcttccagggctagcaattggacttttgatgatgtttgacccagcggcaggaatagcaggcaacgtgatttcaaagctgggctcagcctctgtttcttctctcgtgtaatcgcaaaacccattttggagcaggaattccaatcatgtctgtgatggtggtgagaaagaaggtgacacggaaatgggagaaactcccaggcaggaacaccttttgctgtgatggccgcgtcatgatggcccggcaaaagggcattttctacctgacccttttcctcatcctggggacatgtacactcttcttcgcctttgagtgccgctacctggctgttcagctgtctcctgccatccctgtatttgctgccatgctcttccttttctccatggctacactgttgaggaccagcttcagtgaccctggagtgattcctcgggcgctaccagatgaagcagctttcatagaaatggagatagaagctaccaatggtgcggtgccccagggccagcgaccaccgcctcgtatcaagaatttccagataaacaaccagattgtgaaactgaaatactgttacacatgcaagatcttccggcctccccgggcctcccattgcagcatctgtgacaactgtgtggagcgcttcgaccatcactgcccctgggtggggaattgtgttggaaagaggaactaccgctacttctacctcttcatcctttctctctccctcctcacaatctatgtcttcgccttcaacatcgtctatgtggccctcaaatctttgaaaattggcttcttggagacattgaaagaaactcctggaactgttctagaagtcctcatttgcttctttacactctggtccgtcgtgggactgactggatttcatactttcctcgtggctctcaaccagacaaccaatgaagacatcaaaggatcatggacagggaagaatcgcgtccagaatccctacagccatggcaatattgtgaagaactgctgtgaagtgctgtgtggccccttgccccccagtgtgctggatcgaaggggtattttgccactggaggaaagtggaagtcgacctcccagtactcaagagaccagtagcagcctcttgccacagagcccagcccccacagaacacctgaactcaaatgagatgccggaggacagcagcactcccgaagagatgccacctccagagcccccagagccaccacaggaggcagctgaagctgagaagtagcctatctatggaagagacttttgtttgtgtttaattagggctatgagagatttcaggtgagaagttaaacctgagacagagagcaagtaagctgtcccttttaactgtttttctttggtctttagtcacccagttgcacactggcattttcttgctgcaagcttttttaaatttctgaactcaaggcagtggcagaagatgtcagtcacctctgataactggaaaaatgggtctcttgggccctggcactggttctccatggcctcagccacagggtccccttggaccccctctcttccctccagatcccagccctcctgcttggggtcactggtctcattctggggctaaaagtttttgagactggctcaaatcctcccaagctgctgcacgtgctgagtccagaggcagtcacagagacctctggccaggggatcctaactgggttcttggggtcttcaggactgaagaggagggagagtggggtcagaagattctcctggccaccaagtgccagcattgcccacaaatccttttaggaatgggacaggtaccttccacttgttgtatttattagtgtagcttctcctttgtctcccatccactctgacacctaagccccactcttttcccattagatatatgtaagtagttgtagtagagataataattgacatttctcgtagactacccagaaacttttttaatacctgtgccattctcaataagaatttatgagatgccagcggcatagcccttcacactctctgtctcatctctcctcctttctcattagccccttttaatttgtttttccttttgactcctgctcccattaggagcaggaatggcagtaataaaagtctgcactttggtcatttcttttcctcagaggaagcctgagtgctcacttaaacactatcccctcagactccctgtgtgaggcctgcagaggccctgaatgcacaaatgggaaaccaaggcacagagaggctctcctctcctctcctctcccccgatgtaccctcaaaaaaaaaaaaa

SEQ ID NO: 22915 - DNA, 581 bp, Artificial Sequence
  derived and/or modified sequence
cccttttcctcatcctggggacatgtacactcttcttcgcctttgagtgccgctacctggctgttcagctgtctcctgccatccctgtatttgctgccatgctcttccttttctccatggctacactgttgaggaccagcttcagtgaccctggagtgattcctcgggcgctaccagatgaagcagctttcatagaaatggagatagaagctaccaatggtgcggtgccccagggccagcgaccaccgcctcgtatcaagaatttccagataaacaaccagattgtgaaactgaaatactgttacacatgcaagatcttccggcctccccgggcctcccattgcagcatctgtgacaactgtgtggaatctttgaaaattggcttcttggagacattgaaagaaactcctggaactgttctagaagtcctcatttgcttctttacactctggtccgtcgtgggactgactggatttcatactttcctcgtggctctcaaccagacaaccaatgaagacatcaaaggatcatggacagggaagaatcgcgtccagaatccctacagccatggcaatattgtg

SEQ ID NO: 22916 - protein, 1403 aa, Artificial Sequence
  derived and/or modified sequence
MMNCWFSCTPKNRHAADWNKYDDRLMKAAERGDVEKVTSILAKKGVNPGKLDVEGRSVFHVVTSKGNLECLNAILIHGVDITTSDTAGRNALHLAAKYGHALCLQKLLQYNCPTEHADLQGRTALHDAAMADCPSSIQLLCDHGASVNAKDVDGRTPLVLATQMSRPTICQLLIDRGADVNSRDKQNRTALMLGCEYGCRDAVEVLIKNGADISLLDALGHDSSYYARIGDNLDILTLLKTASENTNKGRELWKKGPSLQQRNLTHMQDEVNVKSHQREHQNIQDLEIENEDLKERLRKIQQEQRILLDKVNGLQLQLNEEVMVADDLESEREKLKSLLAAKEKQHEESLRTIEALKNRFKYFESDHLGSGSHFSNRKEDMLLKQGQMYMADSQCTSPGIPAHMQSRSMLRPLELSLPSQTSYSENEILKKELEAMRTFCESAKQDRLKLQNELAHKVAECKALALECERVKEDSDEQIKQLEDALKDVQKRMYESEGKVKQMQTHFLALKEHLTSEAASGNHRLTEELKDQLKDLKVKYEGASAEVGKLRNQIKQNEMIVEEFKRDEGKLIEENKRLQKELSMCEMEREKKGRKVTEMEGQAKELSAKLALSIPAEKFENMKSSLSNEVNEKAKKLVEMEREHEKSLSEIRQLKRELENVKAKLAQHVKPEEHEQVKSRLEQKSGELGKKITELTLKNQTLQKEIEKVYLDNKLLKEQAHNLTIEMKNHYVPLKVSEDMKKSHDAIIDDLNRKLLDVTQKYTEKKLEMEKLLLENDSLSKDVSRLETVFVPPEKHEKEIIALKSNIVELKKQLSELKKKCGEDQEKIHALTSENTNLKKMMSNQYVPVKTHEEVKMTLNDTLAKTNRELLDVKKKFEDINQEFVKIKDKNEILKRNLENTQNQIKAEYISLAEHEAKMSSLSQSMRKVQDSNAEILANYRKGQEEIVTLHAEIKAQKKELDTIQECIKVKYAPIVSFEECERKFKATEKELKDQLSEQTQKYSVSEEEVKKNKQENDKLKKEIFTLQKDLRDKTVLIEKSHEMERALSRKTDELNKQLKDLSQKYTEVKNVKEKLVEENAKQTSEILAVQNLLQKQHVPLEQVEALKKSLNGTIENLKEELKSMQRCYEKEQQTVTKLHQLLENQKNSSVPLAEHLQIKEAFEKEVGIIKASLREKEEESQNKMEEVSKLQSEVQNTKQALKKLETREVVDLSKYKATKSDLETQISSLNEKLANLNRKYEEVCEEVLHAKKKEISAKDEKELLHFSIEQEIKDQKERCDKSLTTITELQRRIQESAKQIEAKDNKITELLNDVERLKQALNGLSQLTYTSGNPTKRQSQLIDTLQHQVKSLEQQLADADRQHQEVIAIYRTHLLSAAQGHMDEDVQEALLQIIQMRQGLVC

SEQ ID NO: 22917 - protein, 1401 aa, Artificial Sequence
  derived and/or modified sequence
MMNCWFSCTPKNRHAADWNKYDDRLMKAAERGDVEKVTSILAKKGVNPGKLDVEGRSVFHVVTSKGNLECLNAILIHGVDITTSDTAGRNALHLAAKYGHALCLQKLLQYNCPTEHADLQGRTALHDAAMADCPSSIQLLCDHGASVNAKDVDGRTPLVLATQMSRPTICQLLIDRGADVNSRDKQNRTALMLGCEYGCRDAVEVLIKNGADISLLDALGHDSSYYARIGDNLDILTLLKTASENTNKGRELWKKGPSLQQRNLTHMQDEVNVKSHQREHQNIQDLEIENEDLKERLRKIQQEQRILLDKVNGLQLQLNEEVMVADDLESEREKLKSLLAAKEKQHEESLRTIEALKNRFKYFESDHLGSGSHFRKEDMLLKQGQMYMADSQCTSPGIPAHMQSRSMLRPLELSLPSQTSYSENEILKKELEAMRTFCESAKQDRLKLQNELAHKVAECKALALECERVKEDSDEQIKQLEDALKDVQKRMYESEGKVKQMQTHFLALKEHLTSEAASGNHRLTEELKDQLKDLKVKYEGASAEVGKLRNQIKQNEMIVEEFKRDEGKLIEENKRLQKELSMCEMEREKKGRKVTEMEGQAKELSAKLALSIPAEKFENMKSSLSNEVNEKAKKLVEMEREHEKSLSEIRQLKRELENVKAKLAQHVKPEEHEQVKSRLEQKSGELGKKITELTLKNQTLQKEIEKVYLDNKLLKEQAHNLTIEMKNHYVPLKVSEDMKKSHDAIIDDLNRKLLDVTQKYTEKKLEMEKLLLENDSLSKDVSRLETVFVPPEKHEKEIIALKSNIVELKKQLSELKKKCGEDQEKIHALTSENTNLKKMMSNQYVPVKTHEEVKMTLNDTLAKTNRELLDVKKKFEDINQEFVKIKDKNEILKRNLENTQNQIKAEYISLAEHEAKMSSLSQSMRKVQDSNAEILANYRKGQEEIVTLHAEIKAQKKELDTIQECIKVKYAPIVSFEECERKFKATEKELKDQLSEQTQKYSVSEEEVKKNKQENDKLKKEIFTLQKDLRDKTVLIEKSHEMERALSRKTDELNKQLKDLSQKYTEVKNVKEKLVEENAKQTSEILAVQNLLQKQHVPLEQVEALKKSLNGTIENLKEELKSMQRCYEKEQQTVTKLHQLLENQKNSSVPLAEHLQIKEAFEKEVGIIKASLREKEEESQNKMEEVSKLQSEVQNTKQALKKLETREVVDLSKYKATKSDLETQISSLNEKLANLNRKYEEVCEEVLHAKKKEISAKDEKELLHFSIEQEIKDQKERCDKSLTTITELQRRIQESAKQIEAKDNKITELLNDVERLKQALNGLSQLTYTSGNPTKRQSQLIDTLQHQVKSLEQQLADADRQHQEVIAIYRTHLLSAAQGHMDEDVQEALLQIIQMRQGLVC

SEQ ID NO: 22918 - DNA, 4212 bp, Artificial Sequence
  derived and/or modified sequence
atgatgaactgctggttcagctgcacccccaagaacagacacgccgccgactggaacaagtacgacgacagactgatgaaggccgccgagagaggcgacgtggagaaggtgaccagcatcctggccaagaagggcgtgaaccccggcaagctggacgtggagggcagaagcgtgttccacgtggtgaccagcaagggcaacctggagtgcctgaacgccatcctgatccacggcgtggacatcaccaccagcgacaccgccggcagaaacgccctgcacctggccgccaagtacggccacgccctgtgcctgcagaagctgctgcagtacaactgccccaccgagcacgccgacctgcagggcagaaccgccctgcacgacgccgccatggccgactgccccagcagcatccagctgctgtgcgaccacggcgccagcgtgaacgccaaggacgtggacggcagaacccccctggtgctggccacccagatgagcagacccaccatctgccagctgctgatcgacagaggcgccgacgtgaacagcagagacaagcagaacagaaccgccctgatgctgggctgcgagtacggctgcagagacgccgtggaggtgctgatcaagaacggcgccgacatcagcctgctggacgccctgggccacgacagcagctactacgccagaatcggcgacaacctggacatcctgaccctgctgaagaccgccagcgagaacaccaacaagggcagagagctgtggaagaagggccccagcctgcagcagagaaacctgacccacatgcaggacgaggtgaacgtgaagagccaccagagagagcaccagaacatccaggacctggagatcgagaacgaggacctgaaggagagactgagaaagatccagcaggagcagagaatcctgctggacaaggtgaacggcctgcagctgcagctgaacgaggaggtgatggtggccgacgacctggagagcgagagagagaagctgaagagcctgctggccgccaaggagaagcagcacgaggagagcctgagaaccatcgaggccctgaagaacagattcaagtacttcgagagcgaccacctgggcagcggcagccacttcagcaacagaaaggaggacatgctgctgaagcagggccagatgtacatggccgacagccagtgcaccagccccggcatccccgcccacatgcagagcagaagcatgctgagacccctggagctgagcctgcccagccagaccagctacagcgagaacgagatcctgaagaaggagctggaggccatgagaaccttctgcgagagcgccaagcaggacagactgaagctgcagaacgagctggcccacaaggtggccgagtgcaaggccctggccctggagtgcgagagagtgaaggaggacagcgacgagcagatcaagcagctggaggacgccctgaaggacgtgcagaagagaatgtacgagagcgagggcaaggtgaagcagatgcagacccacttcctggccctgaaggagcacctgaccagcgaggccgccagcggcaaccacagactgaccgaggagctgaaggaccagctgaaggacctgaaggtgaagtacgagggcgccagcgccgaggtgggcaagctgagaaaccagatcaagcagaacgagatgatcgtggaggagttcaagagagacgagggcaagctgatcgaggagaacaagagactgcagaaggagctgagcatgtgcgagatggagagagagaagaagggcagaaaggtgaccgagatggagggccaggccaaggagctgagcgccaagctggccctgagcatccccgccgagaagttcgagaacatgaagagcagcctgagcaacgaggtgaacgagaaggccaagaagctggtggagatggagagagagcacgagaagagcctgagcgagatcagacagctgaagagagagctggagaacgtgaaggccaagctggcccagcacgtgaagcccgaggagcacgagcaggtgaagagcagactggagcagaagagcggcgagctgggcaagaagatcaccgagctgaccctgaagaaccagaccctgcagaaggagatcgagaaggtgtacctggacaacaagctgctgaaggagcaggcccacaacctgaccatcgagatgaagaaccactacgtgcccctgaaggtgagcgaggacatgaagaagagccacgacgccatcatcgacgacctgaacagaaagctgctggacgtgacccagaagtacaccgagaagaagctggagatggagaagctgctgctggagaacgacagcctgagcaaggacgtgagcagactggagaccgtgttcgtgccccccgagaagcacgagaaggagatcatcgccctgaagagcaacatcgtggagctgaagaagcagctgagcgagctgaagaagaagtgcggcgaggaccaggagaagatccacgccctgaccagcgagaacaccaacctgaagaagatgatgagcaaccagtacgtgcccgtgaagacccacgaggaggtgaagatgaccctgaacgacaccctggccaagaccaacagagagctgctggacgtgaagaagaagttcgaggacatcaaccaggagttcgtgaagatcaaggacaagaacgagatcctgaagagaaacctggagaacacccagaaccagatcaaggccgagtacatcagcctggccgagcacgaggccaagatgagcagcctgagccagagcatgagaaaggtgcaggacagcaacgccgagatcctggccaactacagaaagggccaggaggagatcgtgaccctgcacgccgagatcaaggcccagaagaaggagctggacaccatccaggagtgcatcaaggtgaagtacgcccccatcgtgagcttcgaggagtgcgagagaaagttcaaggccaccgagaaggagctgaaggaccagctgagcgagcagacccagaagtacagcgtgagcgaggaggaggtgaagaagaacaagcaggagaacgacaagctgaagaaggagatcttcaccctgcagaaggacctgagagacaagaccgtgctgatcgagaagagccacgagatggagagagccctgagcagaaagaccgacgagctgaacaagcagctgaaggacctgagccagaagtacaccgaggtgaagaacgtgaaggagaagctggtggaggagaacgccaagcagaccagcgagatcctggccgtgcagaacctgctgcagaagcagcacgtgcccctggagcaggtggaggccctgaagaagagcctgaacggcaccatcgagaacctgaaggaggagctgaagagcatgcagagatgctacgagaaggagcagcagaccgtgaccaagctgcaccagctgctggagaaccagaagaacagcagcgtgcccctggccgagcacctgcagatcaaggaggccttcgagaaggaggtgggcatcatcaaggccagcctgagagagaaggaggaggagagccagaacaagatggaggaggtgagcaagctgcagagcgaggtgcagaacaccaagcaggccctgaagaagctggagaccagagaggtggtggacctgagcaagtacaaggccaccaagagcgacctggagacccagatcagcagcctgaacgagaagctggccaacctgaacagaaagtacgaggaggtgtgcgaggaggtgctgcacgccaagaagaaggagatcagcgccaaggacgagaaggagctgctgcacttcagcatcgagcaggagatcaaggaccagaaggagagatgcgacaagagcctgaccaccatcaccgagctgcagagaagaatccaggagagcgccaagcagatcgaggccaaggacaacaagatcaccgagctgctgaacgacgtggagagactgaagcaggccctgaacggcctgagccagctgacctacaccagcggcaaccccaccaagagacagagccagctgatcgacaccctgcagcaccaggtgaagagcctggagcagcagctggccgacgccgacagacagcaccaggaggtgatcgccatctacagaacccacctgctgagcgccgcccagggccacatggacgaggacgtgcaggaggccctgctgcagatcatccagatgagacagggcctggtgtgctag

SEQ ID NO: 22919 - DNA, 4206 bp, Artificial Sequence
  derived and/or modified sequence
atgatgaactgctggttcagctgcacccccaagaacagacacgccgccgactggaacaagtacgacgacagactgatgaaggccgccgagagaggcgacgtggagaaggtgaccagcatcctggccaagaagggcgtgaaccccggcaagctggacgtggagggcagaagcgtgttccacgtggtgaccagcaagggcaacctggagtgcctgaacgccatcctgatccacggcgtggacatcaccaccagcgacaccgccggcagaaacgccctgcacctggccgccaagtacggccacgccctgtgcctgcagaagctgctgcagtacaactgccccaccgagcacgccgacctgcagggcagaaccgccctgcacgacgccgccatggccgactgccccagcagcatccagctgctgtgcgaccacggcgccagcgtgaacgccaaggacgtggacggcagaacccccctggtgctggccacccagatgagcagacccaccatctgccagctgctgatcgacagaggcgccgacgtgaacagcagagacaagcagaacagaaccgccctgatgctgggctgcgagtacggctgcagagacgccgtggaggtgctgatcaagaacggcgccgacatcagcctgctggacgccctgggccacgacagcagctactacgccagaatcggcgacaacctggacatcctgaccctgctgaagaccgccagcgagaacaccaacaagggcagagagctgtggaagaagggccccagcctgcagcagagaaacctgacccacatgcaggacgaggtgaacgtgaagagccaccagagagagcaccagaacatccaggacctggagatcgagaacgaggacctgaaggagagactgagaaagatccagcaggagcagagaatcctgctggacaaggtgaacggcctgcagctgcagctgaacgaggaggtgatggtggccgacgacctggagagcgagagagagaagctgaagagcctgctggccgccaaggagaagcagcacgaggagagcctgagaaccatcgaggccctgaagaacagattcaagtacttcgagagcgaccacctgggcagcggcagccacttcagaaaggaggacatgctgctgaagcagggccagatgtacatggccgacagccagtgcaccagccccggcatccccgcccacatgcagagcagaagcatgctgagacccctggagctgagcctgcccagccagaccagctacagcgagaacgagatcctgaagaaggagctggaggccatgagaaccttctgcgagagcgccaagcaggacagactgaagctgcagaacgagctggcccacaaggtggccgagtgcaaggccctggccctggagtgcgagagagtgaaggaggacagcgacgagcagatcaagcagctggaggacgccctgaaggacgtgcagaagagaatgtacgagagcgagggcaaggtgaagcagatgcagacccacttcctggccctgaaggagcacctgaccagcgaggccgccagcggcaaccacagactgaccgaggagctgaaggaccagctgaaggacctgaaggtgaagtacgagggcgccagcgccgaggtgggcaagctgagaaaccagatcaagcagaacgagatgatcgtggaggagttcaagagagacgagggcaagctgatcgaggagaacaagagactgcagaaggagctgagcatgtgcgagatggagagagagaagaagggcagaaaggtgaccgagatggagggccaggccaaggagctgagcgccaagctggccctgagcatccccgccgagaagttcgagaacatgaagagcagcctgagcaacgaggtgaacgagaaggccaagaagctggtggagatggagagagagcacgagaagagcctgagcgagatcagacagctgaagagagagctggagaacgtgaaggccaagctggcccagcacgtgaagcccgaggagcacgagcaggtgaagagcagactggagcagaagagcggcgagctgggcaagaagatcaccgagctgaccctgaagaaccagaccctgcagaaggagatcgagaaggtgtacctggacaacaagctgctgaaggagcaggcccacaacctgaccatcgagatgaagaaccactacgtgcccctgaaggtgagcgaggacatgaagaagagccacgacgccatcatcgacgacctgaacagaaagctgctggacgtgacccagaagtacaccgagaagaagctggagatggagaagctgctgctggagaacgacagcctgagcaaggacgtgagcagactggagaccgtgttcgtgccccccgagaagcacgagaaggagatcatcgccctgaagagcaacatcgtggagctgaagaagcagctgagcgagctgaagaagaagtgcggcgaggaccaggagaagatccacgccctgaccagcgagaacaccaacctgaagaagatgatgagcaaccagtacgtgcccgtgaagacccacgaggaggtgaagatgaccctgaacgacaccctggccaagaccaacagagagctgctggacgtgaagaagaagttcgaggacatcaaccaggagttcgtgaagatcaaggacaagaacgagatcctgaagagaaacctggagaacacccagaaccagatcaaggccgagtacatcagcctggccgagcacgaggccaagatgagcagcctgagccagagcatgagaaaggtgcaggacagcaacgccgagatcctggccaactacagaaagggccaggaggagatcgtgaccctgcacgccgagatcaaggcccagaagaaggagctggacaccatccaggagtgcatcaaggtgaagtacgcccccatcgtgagcttcgaggagtgcgagagaaagttcaaggccaccgagaaggagctgaaggaccagctgagcgagcagacccagaagtacagcgtgagcgaggaggaggtgaagaagaacaagcaggagaacgacaagctgaagaaggagatcttcaccctgcagaaggacctgagagacaagaccgtgctgatcgagaagagccacgagatggagagagccctgagcagaaagaccgacgagctgaacaagcagctgaaggacctgagccagaagtacaccgaggtgaagaacgtgaaggagaagctggtggaggagaacgccaagcagaccagcgagatcctggccgtgcagaacctgctgcagaagcagcacgtgcccctggagcaggtggaggccctgaagaagagcctgaacggcaccatcgagaacctgaaggaggagctgaagagcatgcagagatgctacgagaaggagcagcagaccgtgaccaagctgcaccagctgctggagaaccagaagaacagcagcgtgcccctggccgagcacctgcagatcaaggaggccttcgagaaggaggtgggcatcatcaaggccagcctgagagagaaggaggaggagagccagaacaagatggaggaggtgagcaagctgcagagcgaggtgcagaacaccaagcaggccctgaagaagctggagaccagagaggtggtggacctgagcaagtacaaggccaccaagagcgacctggagacccagatcagcagcctgaacgagaagctggccaacctgaacagaaagtacgaggaggtgtgcgaggaggtgctgcacgccaagaagaaggagatcagcgccaaggacgagaaggagctgctgcacttcagcatcgagcaggagatcaaggaccagaaggagagatgcgacaagagcctgaccaccatcaccgagctgcagagaagaatccaggagagcgccaagcagatcgaggccaaggacaacaagatcaccgagctgctgaacgacgtggagagactgaagcaggccctgaacggcctgagccagctgacctacaccagcggcaaccccaccaagagacagagccagctgatcgacaccctgcagcaccaggtgaagagcctggagcagcagctggccgacgccgacagacagcaccaggaggtgatcgccatctacagaacccacctgctgagcgccgcccagggccacatggacgaggacgtgcaggaggccctgctgcagatcatccagatgagacagggcctggtgtgctag

SEQ ID NO: 22920 - DNA, 4212 bp, Artificial Sequence
  derived and/or modified sequence
atgatgaattgctggttttcttgcaccccaaaaaatcgtcatgcggcggactggaacaagtacgacgatagactgatgaaggcggccgagcgaggggacgtcgagaaagtgacatccatccttgctaagaaaggagtgaatccaggtaaacttgatgtggagggccgaagcgtttttcacgttgtgacatccaaaggaaacctcgagtgtctgaacgcgattctcattcacggggtggacatcactacatctgacacagctggcaggaatgctctgcacttagctgcaaaatacggacatgcactgtgcctacagaagctacttcagtacaactgccctaccgagcacgccgacctccaaggacgaacagctcttcacgacgcagccatggccgactgtccctccagtatacaactgttatgcgatcatggcgccagcgtgaacgctaaggacgtggatggtagaacaccgctcgtgttagcaacacagatgtcccgacccacgatttgtcaactactcatcgaccgaggcgcagatgtcaatagccgcgataagcagaacaggacggcacttatgctcggctgcgagtatggctgtcgagacgcagtggaggtgctgatcaagaacggcgcggatatctccttgctggacgctctggggcacgattccagttactacgctcgcatcggtgacaatctggacatcctgacccttctgaaaactgcctcagaaaacacgaacaaggggagggagctgtggaagaaagggccttccttacagcagaggaatctcacccatatgcaggacgaagtgaacgttaaatctcaccagcgggaacatcagaacattcaggatttagagattgaaaacgaggatctcaaggaaagattgaggaagatccagcaggaacagcggatcctcctggataaggtgaacggtttgcagctgcagttgaatgaggaggtgatggtagccgacgatctggagtccgagcgggaaaagcttaaatctctgctggctgctaaagaaaagcagcatgaggagtcattgcgaacaatagaagctctaaagaatcggttcaaatatttcgagtcagaccatctgggctccggctcacactttagcaatagaaaagaggatatgctcttgaagcaggggcagatgtacatggctgattctcagtgtacctctccgggcatacctgcgcacatgcagtcacgcagcatgcttaggccgctggagctaagcctaccctcccagaccagctactctgaaaatgaaatcctgaaaaaggaactcgaagctatgcgtacattttgcgagagtgcgaagcaagaccgcctgaagcttcagaatgagcttgcacacaaggtcgctgagtgcaaggctttagccctcgagtgcgagcgcgtcaaggaagactcagacgagcagattaagcagctggaagatgcactcaaagacgtccagaagagaatgtatgaatctgaaggcaaggtgaaacagatgcagacacacttcttggcgttgaaagagcacctgacatcagaggccgcctcaggtaatcacagattaacggaggaactcaaagaccagttaaaggatctgaaggtgaaatatgaaggcgccagtgcagaagtgggcaagctgcgcaaccaaataaaacagaatgaaatgatcgtggaggaattcaaaagagatgagggtaagctgattgaggagaataagcgactgcagaaggagctatctatgtgcgaaatggaaagagagaagaaaggccggaaggttaccgaaatggaaggccaggcaaaggagctttcagccaagctcgccctcagcatacccgcagaaaagtttgagaacatgaaatccagccttagcaacgaggtaaatgagaaagctaagaaactggtggaaatggaaagagagcatgagaagtcactgtcagaaatccggcagctgaagcgcgaacttgaaaacgttaaggctaaattggcccagcacgtgaagcccgaagaacacgagcaggtcaagagtaggcttgaacagaagtcaggagaattgggaaaaaaaattacggagctgactctcaagaatcagaccctgcagaaggagatcgagaaggtatatttggacaacaaactgctcaaagagcaagcgcacaatctcacaattgaaatgaagaatcactatgtgcctctgaaggtaagcgaggacatgaagaagtcacatgacgctatcatagatgacttaaaccgaaagctgctggacgtgacacagaaatataccgagaaaaaactcgaaatggagaagttacttcttgagaatgactccctctctaaagatgtgagccgactggaaacagtgttcgtcccccctgaaaaacacgagaaggagatcatcgccctcaagtctaacatcgtggaactgaaaaagcagctttcagaactgaagaaaaagtgcggggaagatcaagaaaaaattcacgctctgactagcgagaatactaaccttaaaaagatgatgtccaaccagtacgtgccagttaagactcacgaagaggtgaagatgaccttaaacgacactttagccaaaacaaatcgggagcttttggacgtgaaaaaaaagtttgaggacatcaaccaggaatttgtgaaaattaaagacaaaaacgaaattttgaagcgcaatctggaaaatacacagaatcagatcaaggcagaatatataagcctggccgagcatgaggctaagatgtcgagtctgtctcagtccatgagaaaggtgcaggactcaaatgccgagattttggccaattaccgaaagggccaagaggagattgtgactctgcatgccgagatcaaagcccagaaaaaagagctggatacgatccaagaatgcatcaaagttaaatatgcgccgatcgtctcctttgaggagtgtgaacggaaattcaaggctaccgaaaaggagctcaaagatcaactgtctgagcagacgcaaaaatactctgttagcgaagaggaagttaagaagaataagcaggaaaacgacaagctcaaaaaggagatcttcacgctgcagaaagacttgcgcgataagacagtccttatcgagaagagccacgagatggagcgggcactttcacgcaagaccgacgagcttaacaagcagcttaaggatctgagtcaaaagtataccgaagtaaaaaatgtcaaggaaaaactggtcgaggagaacgctaaacagacttccgaaattcttgcagtacaaaacctgctgcagaagcaacatgtgcccctggaacaggtcgaagctctcaagaagagcctgaacgggacaatcgaaaatcttaaagaagaactgaaaagcatgcagcgatgttacgagaaggagcagcagaccgtcacaaagttacaccaactcctggagaaccagaagaattcatccgtccctctggcggagcacctccagatcaaggaagcgttcgagaaggaggtgggtatcattaaagcctccctgcgagagaaagaagaggagtcccaaaacaaaatggaggaggtttctaaactgcagagtgaggtgcagaataccaagcaggccctgaagaagttggagacacgagaagtggttgacttgtctaaatacaaagccaccaagagcgacctggagacacaaatttcatccctcaatgaaaaactggctaatttgaatcggaagtacgaagaagtttgcgaagaagtgctacacgctaaaaaaaaagagatctctgccaaggacgagaaggagcttttacatttttctatcgagcaggagatcaaagaccagaaagagcgctgcgataagtctcttactactatcacagagcttcaacgcaggatccaagagagtgcgaaacagatcgaggcaaaagacaacaagattaccgaactcctgaatgacgtcgagcggcttaagcaggccctgaacggactgtcccagctcacgtatacctcagggaaccctaccaagcggcaaagccagctgattgatacacttcagcatcaggtgaaaagcctggaacagcagttggccgacgctgaccggcaacatcaggaggttattgctatttatagaactcacctgttgtctgctgctcagggccacatggacgaggacgtgcaggaggccttgctgcaaataatacagatgcgtcaggggctggtttgctag

SEQ ID NO: 22921 - DNA, 4206 bp, Artificial Sequence
  derived and/or modified sequence
atgatgaactgctggttctcttgcacaccgaagaacaggcacgcggctgactggaacaagtatgacgatcgcttgatgaaggccgcagagcgcggtgacgtggagaaggtgaccagcatcttggccaagaagggagtgaatccagggaagctcgatgtagaaggcagatcagtattccacgtggtaacatccaagggaaatctcgaatgcttgaatgccatactgatccatggtgtggacataactaccagcgacacagccggcagaaatgcactgcacttggctgcgaaatacggacacgctctgtgcctgcaaaaactcttgcagtataactgccccactgaacacgctgatctacaggggcggaccgccttacatgatgctgcaatggctgactgcccctctagcatccaactcctgtgcgatcatggcgctagcgttaacgccaaggacgtggacggccggacaccgttggtcttggccacacagatgtctagacctacgatctgtcagctgctgattgataggggtgcggatgtcaattctagagataagcagaatcggactgccctgatgctcggctgcgaatatggctgtcgcgatgccgtagaagtgctcataaaaaacggggcggacatctctttactcgacgcattgggccatgactcttcctattatgcacgaattggcgataacctagatatcttgacgttgctgaaaacagcttctgagaacacaaataaggggcgcgagctgtggaagaaaggtccatctttgcaacagaggaatctgactcatatgcaggacgaggtcaacgtgaaaagtcatcagagagaacaccaaaacatccaggatctcgagattgaaaatgaagatcttaaagagcgcttgcggaagatccagcaagagcagagaattcttctggataaagtgaacggcctccagcttcagctgaacgaggaagttatggtcgccgacgacctggagagcgaaagggagaagctgaaaagcttgctggccgcaaaggagaagcagcacgaggagtcactcaggacaattgaggcactcaagaatcggttcaaatacttcgagtccgaccacctggggtcaggttctcacttcaggaaggaagatatgttgctgaaacagggtcaaatgtatatggctgactcccagtgcacgagtccaggtataccagctcacatgcagagtaggtcaatgttgagaccattggaactttctctgccctcccagacgtcatatagcgagaacgagatcttgaagaaggagcttgaggccatgagaaccttttgcgaatcggccaaacaagatagacttaaattgcagaacgaactagcacacaaagtggcagagtgcaaagctctcgctctagagtgtgaacgcgttaaggaggactctgatgagcagattaagcaattggaggatgcacttaaggacgttcagaagaggatgtacgaatcagaagggaaggtgaagcaaatgcaaacccacttccttgcactcaaggagcatcttacgagtgaagctgcttccggtaatcacaggctgacagaagaattgaaggatcagctgaaggatctgaaagttaagtatgaaggcgcctccgcagaggtgggcaaattgcggaaccaaataaagcagaacgagatgatcgtggaggagttcaaacgggatgaaggcaaactgatcgaagaaaacaaaagactgcagaaggaactctccatgtgtgaaatggaaagggagaaaaagggcaggaaggtaactgaaatggagggtcaggctaaggaactgagtgccaaactggcactgtcgatccctgctgaaaagttcgaaaacatgaaaagctcactctctaatgaggtgaatgaaaaagccaaaaagctcgtggaaatggagcgtgagcatgaaaaatcactgtctgagatcagacagttgaagcgtgaactggagaatgtcaaggccaagctcgcacagcatgtgaaacctgaggaacatgaacaggtgaagtcgcggttggagcagaaatctggagagctcggaaagaaaattacagaactcaccctgaagaaccagacacttcagaaggaaatcgagaaggtgtatcttgataacaaattacttaaggagcaggctcataacttaactatcgagatgaagaatcattatgtacccctgaaggtgagtgaggacatgaaaaaatcccacgatgctataatcgacgacctcaatcgcaagctccttgacgtcactcagaaatataccgagaaaaaactcgagatggagaagctgttgctggagaacgattcactgtcaaaagatgtctcacgcctagagactgtcttcgtccctccggagaaacacgaaaaagagataatcgcactgaaaagtaacatcgtagagctcaagaagcaattatctgaactgaaaaagaagtgtggcgaagatcaggagaaaatccacgcgctaacctctgaaaacaccaacctgaaaaagatgatgagcaaccagtacgttcccgtgaagacccacgaagaggtgaaaatgacgttgaatgatacactcgcaaaaacgaatagggaattgctggacgtcaagaagaaatttgaagacattaaccaagagttcgtgaaaatcaaggacaagaatgaaatccttaagagaaatctcgagaacacccagaaccagatcaaagcagaatacattagcctggctgagcacgaggcaaagatgagcagcctaagccaatccatgcgcaaggtgcaggacagtaatgccgaaattttggctaactaccgaaaagggcaggaggagattgtgaccttacatgcagagattaaagctcaaaaaaaggagctggacaccatccaggaatgcatcaaagtcaagtacgctccaatagtttccttcgaagaatgtgagaggaaattcaaggctaccgagaaggagctgaaggaccagctgtcagagcagacgcagaagtattccgtttccgaggaggaagtgaagaagaacaaacaggaaaatgacaagctcaaaaaggagatctttacgttgcagaaggacctccgagacaagacggtcctgattgagaagagtcacgagatggagcgcgccctctctaggaagactgacgagctaaataagcagctcaaggacttgtcccaaaagtatacagaggtcaagaacgtgaaagagaaacttgtagaggaaaacgctaagcagaccagtgagatcttggccgttcaaaatctattacagaagcagcatgtccctttagaacaggtggaagctctaaaaaagtccctcaacggcaccatcgaaaatctcaaagaggagctcaaatcaatgcagcggtgttacgaaaaggaacagcaaacagtgaccaaactgcatcagcttctggagaaccaaaaaaacagttctgtgccactggccgagcatctccagattaaggaagccttcgaaaaagaggttgggatcatcaaagcctcactgcgagaaaaagaagaagaatcacagaataaaatggaggaggtttccaagctacagtctgaggtgcagaatactaaacaggcgctgaagaaacttgagactcgggaggtggtggacctcagtaaatataaagctaccaagagcgacctcgagacccagatctcttccctcaacgagaagctggcaaacttgaatcggaagtatgaggaggtgtgtgaggaggtgttgcacgctaaaaagaaagaaatcagcgcaaaggatgagaaagaactcctgcacttcagtatcgaacaggagatcaaggaccagaaagagcgctgcgacaagagccttaccacgataacggagcttcaaaggcggattcaggaatccgccaagcaaattgaggctaaggataataagataacggagttgctgaatgatgtggagagactgaaacaggctcttaatgggctgagtcaactgacttacacctctggaaaccctactaagaggcagtcgcagctgattgataccttgcagcatcaggtgaaaagcctcgaacagcaattggccgacgcggaccgccaacaccaagaggtgatcgctatctatcgtacccaccttctctctgccgcccagggccatatggatgaagacgtgcaggaagcattgctgcaaataattcaaatgcggcaggggctggtctgctag

SEQ ID NO: 22922 - DNA, 4212 bp, Artificial Sequence
  derived and/or modified sequence
atgatgaactgctggttcagctgcacccccaagaacagacatgctgctgactggaacaagtatgatgaccggctgatgaaggctgctgagagaggagatgtggagaaggtgaccagcatcctggccaagaagggcgtgaaccctgggaagctggatgtggagggccgctctgtgttccacgtggtgaccagcaaaggaaacctggagtgcctgaatgccatcctgattcatggagtggacatcaccaccagtgacacagctggaagaaatgccctgcacctggccgccaagtatggccacgccctgtgcctgcagaagctgctgcagtacaactgccccacagagcacgccgacctgcagggccgcacagccctgcatgatgctgccatggctgactgccccagcagcatccagctgctgtgtgaccatggagcctctgtgaatgccaaggatgtggatggccgcacccccctggtgctggccacccagatgagccggcccaccatctgccagctgctgattgacagaggagcagatgtgaacagccgggacaagcagaacagaacagccctgatgctgggctgtgaatatggctgcagagatgctgtggaggtgctgatcaagaatggagctgacatcagcctgctggatgccctgggccatgacagcagctactatgccagaattggagacaacctggacatcctgaccctgctgaagacagccagcgagaacaccaacaagggccgggagctgtggaagaagggccccagcctgcagcagaggaacctgacccacatgcaggatgaggtgaatgtgaagagccaccagcgggagcaccagaacatccaggacctggagattgaaaatgaagacctgaaggagcggctgaggaagatccagcaggagcagaggatcctgctggacaaggtgaatggcctgcagctgcagctgaatgaggaggtgatggtggctgatgacctggagagcgagcgggagaagctgaagagcctgctggccgccaaggagaagcagcacgaggagagcctgcggaccatcgaggccctgaagaaccgcttcaagtactttgaaagtgaccacctgggcagcggcagccacttcagcaacagaaaagaagacatgctgctgaagcagggccagatgtacatggctgacagccagtgcaccagccctggcatcccagcccacatgcagagccgctccatgctgcggcccctggagctgagcctgcccagccagaccagctacagtgaaaatgagatcctgaagaaggagctggaggccatgaggaccttctgtgagagcgccaagcaggaccggctgaagctgcagaatgagctggcccacaaggtggccgagtgcaaggccctggccctggagtgtgagcgggtgaaggaggacagtgatgagcagatcaagcagctggaggatgccctgaaggatgtgcagaagaggatgtatgagagcgagggcaaggtgaagcagatgcagacccacttcctggccctgaaggagcacctgaccagcgaggccgccagcggcaaccaccggctgacagaggagctgaaggaccagctgaaggacctgaaggtgaagtatgagggcgccagcgctgaggtgggcaagctgaggaaccagatcaagcagaatgagatgattgtggaggagttcaagagagatgagggcaagctgattgaggagaacaagaggctgcagaaggagctgtccatgtgtgagatggagcgggagaagaagggcaggaaggtgacagagatggagggccaggccaaggagctgagcgccaagctggccctgagcatcccagctgagaagtttgagaacatgaagagcagcctgagcaatgaggtgaatgagaaggccaagaagctggtggagatggagcgggagcacgagaagagcctgtctgagatccggcagctgaagcgggagctggagaatgtgaaggccaagctggcccagcacgtgaagccagaggagcacgagcaggtgaagagccggctggagcagaagtctggagagctgggcaagaagatcacagagctgaccctgaagaaccagaccctgcagaaggagattgagaaggtgtacctggacaacaagctgctgaaggagcaggcccacaacctgaccatcgagatgaagaaccactacgtgcccctgaaggtgtctgaggacatgaagaagagccatgatgccatcattgatgacctgaacaggaagctgctggatgtgacccagaagtacacagagaagaagctggagatggagaagctgctgctggagaatgacagcctgagcaaggatgtgtcccggctggagaccgtgtttgtgcccccagagaagcatgagaaggagatcatcgccctgaagagcaacatcgtggagctgaagaagcagctgtctgagctgaagaagaagtgtggggaggaccaggagaagatccacgccctgaccagcgagaacaccaacctgaagaagatgatgagcaaccagtatgtgcctgtgaagacccatgaggaggtgaagatgaccctgaatgacaccctggccaagaccaaccgggagctgctggatgtgaagaagaagtttgaggacatcaaccaggagtttgtgaagatcaaggacaagaatgagatcctgaagaggaacctggagaacacccagaaccagatcaaggccgagtacatcagcctggccgagcacgaggccaagatgagcagcctgagccagagcatgaggaaggtgcaggacagcaatgctgagatcctggccaactacaggaagggccaggaggagatcgtgaccctgcacgccgagatcaaggcccagaagaaggagctggacaccatccaggagtgcatcaaggtgaagtatgcccccatcgtgtcctttgaggagtgtgagaggaagttcaaggccacagagaaggagctgaaggaccagctgtctgagcagacccagaagtacagcgtgtctgaggaggaggtgaagaagaacaagcaggagaatgacaagctgaagaaggagatcttcaccctgcagaaggacctgcgggacaagacagtgctgattgagaagagccatgagatggagcgggccctgagcaggaagacagatgagctgaacaagcagctgaaggacctgagccagaagtacacagaggtgaagaatgtgaaggagaagctggtggaggagaatgccaagcagaccagcgagatcctggccgtgcagaacctgctgcagaagcagcacgtgcccctggagcaggtggaggccctgaagaagagcctgaatggcaccatcgagaacctgaaggaggagctgaagtccatgcagcgctgctatgagaaggagcagcagacagtgaccaagctgcaccagctgctggagaaccagaagaacagctctgtgcccctggccgagcacctgcagatcaaggaggcctttgagaaggaggtgggcatcatcaaggccagcctgcgggagaaggaggaggagagccagaacaagatggaggaggtgtccaagctgcagagcgaggtgcagaacaccaagcaggccctgaagaagctggagacccgggaggtggtggacctgagcaagtacaaggccaccaagagtgacctggagacccagatcagcagcctgaatgagaagctggccaacctgaacagaaaatatgaggaggtgtgtgaggaggtgctgcacgccaagaagaaggagatcagcgccaaggatgagaaggagctgctgcacttcagcattgagcaggagatcaaggaccagaaggagcgctgtgacaagagcctgaccaccatcacagagctgcagaggcgcatccaggagagcgccaagcagatcgaggccaaggacaacaagatcacagagctgctgaatgatgtggagcggctgaagcaggccctgaatggcctgagccagctgacctacaccagcggcaaccccaccaagaggcagagccagctgattgacaccctgcagcaccaggtgaagagcctggagcagcagctggctgatgctgaccggcagcaccaggaggtgattgccatctaccgcacccacctgctgtctgctgcccagggccacatggatgaagatgtgcaggaggccctgctgcagatcatccagatgaggcagggcctggtgtgctag

SEQ ID NO: 22923 - DNA, 4206 bp, Artificial Sequence
  derived and/or modified sequence
atgatgaactgctggttcagctgcacccccaagaacagacatgctgctgactggaacaagtatgatgaccggctgatgaaggctgctgagagaggagatgtggagaaggtgaccagcatcctggccaagaagggcgtgaaccctgggaagctggatgtggagggccgctctgtgttccacgtggtgaccagcaaaggaaacctggagtgcctgaatgccatcctgattcatggagtggacatcaccaccagtgacacagctggaagaaatgccctgcacctggccgccaagtatggccacgccctgtgcctgcagaagctgctgcagtacaactgccccacagagcacgccgacctgcagggccgcacagccctgcatgatgctgccatggctgactgccccagcagcatccagctgctgtgtgaccatggagcctctgtgaatgccaaggatgtggatggccgcacccccctggtgctggccacccagatgagccggcccaccatctgccagctgctgattgacagaggagcagatgtgaacagccgggacaagcagaacagaacagccctgatgctgggctgtgaatatggctgcagagatgctgtggaggtgctgatcaagaatggagctgacatcagcctgctggatgccctgggccatgacagcagctactatgccagaattggagacaacctggacatcctgaccctgctgaagacagccagcgagaacaccaacaagggccgggagctgtggaagaagggccccagcctgcagcagaggaacctgacccacatgcaggatgaggtgaatgtgaagagccaccagcgggagcaccagaacatccaggacctggagattgaaaatgaagacctgaaggagcggctgaggaagatccagcaggagcagaggatcctgctggacaaggtgaatggcctgcagctgcagctgaatgaggaggtgatggtggctgatgacctggagagcgagcgggagaagctgaagagcctgctggccgccaaggagaagcagcacgaggagagcctgcggaccatcgaggccctgaagaaccgcttcaagtactttgaaagtgaccacctgggcagcggcagccacttcagaaaagaagacatgctgctgaagcagggccagatgtacatggctgacagccagtgcaccagccctggcatcccagcccacatgcagagccgctccatgctgcggcccctggagctgagcctgcccagccagaccagctacagtgaaaatgagatcctgaagaaggagctggaggccatgaggaccttctgtgagagcgccaagcaggaccggctgaagctgcagaatgagctggcccacaaggtggccgagtgcaaggccctggccctggagtgtgagcgggtgaaggaggacagtgatgagcagatcaagcagctggaggatgccctgaaggatgtgcagaagaggatgtatgagagcgagggcaaggtgaagcagatgcagacccacttcctggccctgaaggagcacctgaccagcgaggccgccagcggcaaccaccggctgacagaggagctgaaggaccagctgaaggacctgaaggtgaagtatgagggcgccagcgctgaggtgggcaagctgaggaaccagatcaagcagaatgagatgattgtggaggagttcaagagagatgagggcaagctgattgaggagaacaagaggctgcagaaggagctgtccatgtgtgagatggagcgggagaagaagggcaggaaggtgacagagatggagggccaggccaaggagctgagcgccaagctggccctgagcatcccagctgagaagtttgagaacatgaagagcagcctgagcaatgaggtgaatgagaaggccaagaagctggtggagatggagcgggagcacgagaagagcctgtctgagatccggcagctgaagcgggagctggagaatgtgaaggccaagctggcccagcacgtgaagccagaggagcacgagcaggtgaagagccggctggagcagaagtctggagagctgggcaagaagatcacagagctgaccctgaagaaccagaccctgcagaaggagattgagaaggtgtacctggacaacaagctgctgaaggagcaggcccacaacctgaccatcgagatgaagaaccactacgtgcccctgaaggtgtctgaggacatgaagaagagccatgatgccatcattgatgacctgaacaggaagctgctggatgtgacccagaagtacacagagaagaagctggagatggagaagctgctgctggagaatgacagcctgagcaaggatgtgtcccggctggagaccgtgtttgtgcccccagagaagcatgagaaggagatcatcgccctgaagagcaacatcgtggagctgaagaagcagctgtctgagctgaagaagaagtgtggggaggaccaggagaagatccacgccctgaccagcgagaacaccaacctgaagaagatgatgagcaaccagtatgtgcctgtgaagacccatgaggaggtgaagatgaccctgaatgacaccctggccaagaccaaccgggagctgctggatgtgaagaagaagtttgaggacatcaaccaggagtttgtgaagatcaaggacaagaatgagatcctgaagaggaacctggagaacacccagaaccagatcaaggccgagtacatcagcctggccgagcacgaggccaagatgagcagcctgagccagagcatgaggaaggtgcaggacagcaatgctgagatcctggccaactacaggaagggccaggaggagatcgtgaccctgcacgccgagatcaaggcccagaagaaggagctggacaccatccaggagtgcatcaaggtgaagtatgcccccatcgtgtcctttgaggagtgtgagaggaagttcaaggccacagagaaggagctgaaggaccagctgtctgagcagacccagaagtacagcgtgtctgaggaggaggtgaagaagaacaagcaggagaatgacaagctgaagaaggagatcttcaccctgcagaaggacctgcgggacaagacagtgctgattgagaagagccatgagatggagcgggccctgagcaggaagacagatgagctgaacaagcagctgaaggacctgagccagaagtacacagaggtgaagaatgtgaaggagaagctggtggaggagaatgccaagcagaccagcgagatcctggccgtgcagaacctgctgcagaagcagcacgtgcccctggagcaggtggaggccctgaagaagagcctgaatggcaccatcgagaacctgaaggaggagctgaagtccatgcagcgctgctatgagaaggagcagcagacagtgaccaagctgcaccagctgctggagaaccagaagaacagctctgtgcccctggccgagcacctgcagatcaaggaggcctttgagaaggaggtgggcatcatcaaggccagcctgcgggagaaggaggaggagagccagaacaagatggaggaggtgtccaagctgcagagcgaggtgcagaacaccaagcaggccctgaagaagctggagacccgggaggtggtggacctgagcaagtacaaggccaccaagagtgacctggagacccagatcagcagcctgaatgagaagctggccaacctgaacagaaaatatgaggaggtgtgtgaggaggtgctgcacgccaagaagaaggagatcagcgccaaggatgagaaggagctgctgcacttcagcattgagcaggagatcaaggaccagaaggagcgctgtgacaagagcctgaccaccatcacagagctgcagaggcgcatccaggagagcgccaagcagatcgaggccaaggacaacaagatcacagagctgctgaatgatgtggagcggctgaagcaggccctgaatggcctgagccagctgacctacaccagcggcaaccccaccaagaggcagagccagctgattgacaccctgcagcaccaggtgaagagcctggagcagcagctggctgatgctgaccggcagcaccaggaggtgattgccatctaccgcacccacctgctgtctgctgcccagggccacatggatgaagatgtgcaggaggccctgctgcagatcatccagatgaggcagggcctggtgtgctag

SEQ ID NO: 22924 - DNA, 4212 bp, Artificial Sequence
  derived and/or modified sequence
atgatgaactgctggttcagctgcacccccaagaaccggcacgccgcggattggaacaagtatgacgataggctaatgaaggccgccgaacgaggcgatgtggaaaaggtaacttctatactggctaagaagggcgtgaatccaggcaagcttgacgtggaggggcgatcggtgttccacgttgtgaccagcaagggaaacctcgaatgcctcaacgcaatactgatccacggggtcgatatcaccacatccgataccgccgggaggaacgcactgcacctggctgccaagtacggccacgcgctgtgcctgcagaagctcctgcagtacaactgccctaccgaacacgctgatctccaaggacgcaccgctcttcatgatgccgccatggcagactgccccagttcaatccaattgctgtgtgaccatggcgcttctgtaaatgccaaggatgtagacgggcggacaccattagtccttgccacacagatgagtcgccctaccatttgtcagctgctgatcgatcggggggcagacgtgaatagcagggacaaacaaaatcggacggcgctcatgttgggctgtgaatatgggtgcagagatgcagttgaggtgttgattaagaatggagccgacatcagcctccttgacgctctgggacacgattcttcctactatgcccgtatcggggacaacctggacattctgacactgcttaagaccgcttccgagaatacgaacaaggggcgcgagctttggaagaagggcccttctttgcagcagcggaacctgacccatatgcaggacgaagttaacgttaaaagccaccaaagagaacaccagaatatccaagacctggaaatcgagaatgaagacctgaaggagcgactgaggaaaattcaacaggagcagcggatccttctcgataaggtcaatggtctccagctgcagttgaacgaagaggtgatggtggctgatgacctggaatcagaaagagagaagctcaaatctttacttgccgccaaggaaaaacagcacgaagagtcactaagaaccatcgaggctctaaagaatcggtttaagtactttgagagcgatcatctgggcagtggaagccatttttccaaccggaaagaagatatgctgctcaaacaaggacaaatgtacatggccgattctcagtgcaccagccctggcattccggcgcatatgcaaagcaggtcaatgctgcgtccgctggagctgagcttaccctcccagacctcatactccgaaaacgagatcctgaaaaaagagctggaggcaatgaggaccttctgcgagtccgcgaaacaagatagactgaaactgcagaatgagctcgcacataaggtggctgagtgtaaggctctggccttggaatgcgagagagttaaggaagactctgacgagcagataaaacagttagaggatgccctgaaggacgttcaaaagagaatgtacgagtcagaggggaaggtcaaacaaatgcagacacacttcctcgcactcaaggagcacctgactagtgaggctgctagcggcaatcatcggctgacagaggaattgaaggaccaattgaaggatctgaaggttaaatacgagggtgcctctgcagaagtggggaaactccgcaatcagattaagcagaatgaaatgattgtggaagagttcaagcgcgatgaagggaagctcatcgaagaaaacaagagattacaaaaggagctctcaatgtgtgagatggaacgagagaagaagggccggaaagtgactgagatggaaggtcaggctaaagaactgtccgccaaattggctctttcgattcccgccgagaagtttgagaacatgaagtcctctctctcaaatgaagttaatgagaaagccaaaaagctggtggaaatggaacgcgagcacgagaagagtctgagcgaaataaggcagctgaagcgggaattagaaaatgtcaaggctaagctggcccagcatgtaaaacctgaggaacacgaacaggtcaagagcagattagagcaaaagtcaggagagcttggcaagaaaatcacggagctgacgctcaagaatcagacattgcaaaaggagatcgagaaagtgtacctagacaataagctgttaaaggaacaggcacacaatctgacgattgaaatgaagaaccactacgttccgcttaaagtctcagaggatatgaagaaatcccacgatgccattattgatgacctaaatcgcaagctgctggacgtgactcagaagtacacggaaaaaaaactagagatggaaaagctcctgctggagaacgattcgctgtccaaggacgtctcacgcttggagactgttttcgtgcccccagaaaaacacgagaaggagatcatcgccctgaagtcaaacattgtagaactgaagaaacagctatccgaattaaagaaaaagtgtggtgaagaccaagaaaaaattcacgccctgacaagtgaaaataccaatttgaagaaaatgatgagcaatcagtatgtgccagtcaagacccatgaggaagttaaaatgacattaaacgatacattagctaaaacaaatcgggagcttcttgacgtgaagaagaagttcgaagatattaatcaggagttcgtgaaaatcaaagacaagaacgagattctgaaacggaacctggagaacacccagaatcagatcaaggccgagtacatctcactcgctgaacatgaggctaagatgtcttcgttgagtcagtctatgaggaaggtccaggacagcaacgccgaaattctggcaaattataggaaaggacaggaggaaattgtgacactgcatgcagaaataaaagcacagaagaaggaacttgacaccatccaggagtgcattaaggttaagtacgcccctatagtgagttttgaggagtgcgaaagaaaatttaaagctaccgagaaggaactgaaagaccagctcagtgagcagacccagaagtatagcgtttccgaagaggaagtgaagaagaataagcaggagaatgacaagttaaaaaaggaaatttttaccttgcagaaggatctgagagacaagactgtgctcatcgaaaaatcacacgagatggaaagagcgttatctcggaagacagacgagctgaataaacagctcaaggacctcagccagaaatacacagaagttaaaaatgtgaaagaaaaattggtggaagagaatgccaagcaaacaagtgagatactggcagtgcagaatctattgcagaaacagcatgttcccctggagcaggtcgaggcattaaagaagtccctaaatggcacgatagaaaatttgaaagaggagctaaaatctatgcagagatgctacgagaaagagcagcagaccgtcaccaaactgcatcagctcctggagaaccagaagaatagttcggtgcccctggcagaacaccttcaaatcaaggaggcttttgaaaaagaagtggggattattaaggcctcacttcgcgaaaaagaagaggagtcccagaataagatggaggaggtgtccaaactacagtctgaggtgcagaatacaaagcaggctttgaagaagttagaaaccagggaagtggtcgatctgagcaagtataaggcgacaaagagcgacctagaaacacaaattagctcgttgaacgagaagctggccaacctcaatcgaaaatatgaggaggtgtgcgaagaagttctgcacgctaagaaaaaggaaatcagcgccaaggatgaaaaagagctcttgcacttctccattgaacaggaaatcaaggatcaaaaggagagatgcgataaatctctgacaactatcaccgagctgcagcggcgcatccaagagagcgcaaaacagatcgaagccaaagacaataaaatcaccgagctcctgaacgatgtcgagcggctcaaacaagcactgaatggcctgagccagttgacgtatacttcagggaatcctacgaagcggcagagccaactcattgacaccctccagcaccaggtgaaatctctggagcagcagctggccgacgctgatcgccagcatcaggaagtgattgcaatctatagaactcaccttctgtccgccgctcaaggacacatggatgaagacgttcaagaggctttgctccagatcatccaaatgcggcagggtttagtgtgctag

SEQ ID NO: 22925 - DNA, 4206 bp, Artificial Sequence
  derived and/or modified sequence
atgatgaactgctggttcagctgcacccccaagaaccggcacgccgcagactggaacaagtatgatgacagactgatgaaagccgccgaacgaggcgacgtagagaaagtcacctccatcctggccaaaaagggcgttaatcctggcaaacttgatgtggagggacgtagtgtgttccacgttgtgacaagcaaggggaatctagagtgtctgaatgctatcctgattcatggcgtcgacattactactagtgataccgcaggcaggaatgctctgcaccttgcagccaaatacggccacgccctgtgccttcaaaaattattacagtacaattgtcctacagagcatgcagacctgcaggggcgtacagctctgcatgatgccgcaatggcggattgtccctcctccatacaactgctgtgcgatcacggagcgtcggtgaacgcaaaagacgtcgacggacggacacctctggtattggcaacccaaatgtcgcgccccacaatatgccagctgctgatcgaccggggagccgatgttaactcacgtgataagcaaaaccggacagccctcatgctgggatgtgagtacggctgtcgagacgcagtggaagtgctgatcaagaatggcgccgatatttcactgctggacgcattaggccacgacagctcatattatgcacgcatcggagacaatctcgacatactgaccctgctgaagactgcaagcgagaatacaaacaagggtagagaactgtggaaaaaagggccatccctgcagcaacggaacctgacccacatgcaggacgaggtgaatgtcaaatctcaccagcgtgaacaccaaaatatccaggatctggaaatcgaaaatgaggacctcaaagaacggcttcgtaaaatacaacaagagcagaggatcctgctggacaaggtcaacgggttgcagttacagctgaatgaggaagtgatggtcgcagatgatctcgagtcagagcgggaaaaattgaaatccttgctggccgcaaaagagaaacagcatgaagagtctttgagaacgatagaggcgcttaagaatcgcttcaaatattttgaaagcgaccacctggggtccggttcccattttaggaaggaagatatgctcctgaaacagggacagatgtatatggcagactcccagtgcacatccccaggaatacccgcacacatgcagtccagatccatgctgcggccgctggagctgtctctgccttcccagacctcgtacagcgaaaacgaaatattgaaaaaagaactggaggcgatgagaaccttttgcgagtcagcgaagcaggatcgcctaaagctgcagaatgagctggcgcacaaggtggcagagtgtaaagccctggccttggagtgcgagagagtgaaggaggatagtgacgaacagataaaacagctggaggatgctctgaaagacgtccaaaaacgtatgtacgaaagtgagggcaaggtgaagcagatgcaaactcatttcctggcactgaaggaacatttaacatccgaagccgcctctggtaatcacagactgactgaagagttgaaggatcagctcaaggatctgaaggtgaagtatgagggcgctagtgctgaggtgggcaagctgcgaaaccagattaagcagaacgagatgattgtggaggagttcaaacgtgatgaaggaaaactgatagaagagaataagcgtttgcagaaagaactgtcaatgtgcgaaatggaaagggaaaaaaagggtcgaaaagtgaccgaaatggagggacaggccaaggaactatcagccaaactagccctgtccattcccgctgaaaagtttgaaaacatgaagagctctttatccaacgaagtgaatgagaaagcaaagaaactcgttgagatggagagagagcatgagaagtccttaagcgagattagacagctcaaacgcgaacttgagaacgtgaaagctaagctcgcacagcacgtcaagcccgaggaacacgagcaggtgaaatcccgtctggagcagaaaagcggcgaactgggaaaaaaaatcactgagcttaccctgaagaaccaaaccctgcagaaggagattgaaaaagtctatctggataataagttgttgaaggaacaggcacataatctcacaattgagatgaagaatcactacgtgccactcaaagtgtccgaggacatgaaaaaatcccatgatgccattatcgatgacctcaaccgcaaattactcgacgtgactcagaaatacacagagaagaagctggagatggagaaactgctgctggaaaacgattcactgagcaaggatgtgtctcgactcgagaccgtgtttgtgccgccagaaaagcacgagaaggagataattgccctgaagagcaacatcgtggagctgaagaaacagctgtccgaactcaagaaaaaatgcggcgaggaccaggaaaagattcacgctctaacgagcgaaaataccaacctgaagaaaatgatgtctaaccagtacgtgccagtgaaaactcacgaggaggtcaagatgacactgaacgatactcttgcaaagaccaacagagaactgctggacgtgaaaaaaaaattcgaagacatcaaccaggaattcgtaaaaattaaagataaaaatgagatcctgaaacggaatctggaaaatacacaaaatcagatcaaagctgagtacatttcccttgcggagcacgaagctaagatgagctctctctcacagtcaatgcggaaggttcaagactctaatgccgagatcctggccaactacaggaaggggcaggaagagatcgtgacactgcatgccgagattaaagcgcagaaaaaagaattggatacaatccaggaatgcatcaaggtgaaatatgccccaatcgtgtccttcgaggaatgtgaacgcaaatttaaggcgacggagaaggagctgaaggaccaactgagtgagcaaacccaaaagtacagcgtgtcagaagaagaggtcaaaaagaacaagcaggaaaatgacaagctgaaaaaggaaattttcactcttcaaaaggacctacgcgacaagactgtgttgattgagaagagccacgagatggagagggcgctgtctcgaaaaactgacgaattaaataagcagcttaaggacctcagccaaaagtacaccgaggtgaagaatgttaaggaaaagcttgtggaggagaacgcaaaacagacctcagagatcctagccgtccagaatctactgcaaaagcagcacgtccctctggaacaggtggaagctcttaagaagagcctaaacggcacaatcgagaacttgaaggaggagctgaagagtatgcaacgttgctacgaaaaggaacagcagacggtcacaaaacttcatcagttgctggaaaaccaaaaaaactccagtgtacctcttgcagagcatctccagatcaaagaagcatttgaaaaggaggtcggcattattaaggcttccctacgtgaaaaagaggaggagagccaaaacaagatggaagaggtctctaaattacagtccgaagttcagaacaccaagcaggccctgaaaaagctggaaacgcgagaggtcgtcgatctgtctaaatacaaggccacaaaatctgacctggagacacagatttcttcgctgaatgaaaagctcgcaaaccttaaccgcaaatacgaagaggtgtgtgaggaagtgctgcacgctaaaaagaaggaaatctctgccaaagatgaaaaagagctgctgcacttttcaattgagcaggagattaaggaccaaaaagaacggtgtgacaagagccttacgactatcactgaactgcagcgaagaatccaggaatctgccaagcagatcgaagccaaggacaacaaaatcacggagctgttgaacgacgtggagcgtctgaaacaggccctcaacggactcagccagcttacatatacctccggtaatccgaccaagcggcagagccagttgattgataccctgcaacaccaggtgaagtcactggaacagcagctggcggacgcagatagacaacaccaggaagtgatcgccatatatagaacacatcttctgtctgccgctcagggccatatggacgaggacgtacaagaggcattgcttcagattatacagatgagacaggggcttgtgtgttag

SEQ ID NO: 22926 - DNA, 4212 bp, Artificial Sequence
  derived and/or modified sequence
atgatgaattgctggttttcttgcacccctaaaaatcggcatgctgccgactggaataaatatgatgatagactcatgaaagccgcagagcggggagacgtcgaaaaggtaactagcatcctcgcaaagaaaggcgtcaacccgggtaagttagacgtcgaggggaggagcgtcttccatgtggtgactagtaaaggcaatctcgagtgtttaaatgccatcttgatccacggggtagatataacgacatctgatactgctgggaggaatgcactacatttggccgcaaaatacgggcacgctctgtgcctgcagaagctcttgcagtacaattgtcctaccgaacacgcggacctgcaggggagaaccgccctgcacgacgcagccatggccgattgcccgtcctctatacagctgctgtgtgaccacggtgcgtctgtgaatgccaaagacgtcgacggacgaacccccttggtgctggcaacacagatgtctaggcccaccatttgccagctcctgatcgatcggggtgccgatgtgaatagccgcgataagcagaaccgcaccgccctcatgttaggatgcgagtacgggtgtagagatgcagtggaagtgctcatcaagaacggagccgacatctcattactggacgccctgggacacgattcatcctattacgctaggataggcgacaatctggatattctgaccctgctcaagaccgcatctgagaacaccaacaaaggcagagagctgtggaaaaaaggcccatctcttcagcagagaaacctaactcatatgcaggatgaagtgaatgtgaaatcgcaccagcgcgagcatcaaaatattcaagacctagagatagaaaacgaagatttaaaggagaggctgcgcaagatccaacaagagcagaggatcttgctcgacaaagtgaatggtctgcagcttcagctgaacgaggaagtgatggtggccgatgacctggagagtgagagggagaaactcaaatccttattagccgctaaggaaaaacagcatgaagagtctctgagaactatcgaagctcttaaaaaccgctttaaatattttgaatctgatcaccttggcagcggctctcactttagcaacaggaaggaggacatgttgctgaagcaaggccaaatgtatatggctgattctcagtgtacaagtcccggtattccagcccacatgcagtcaagatccatgttgaggccactggagctgtccctaccttcccagacatcctactctgagaacgaaatccttaagaaggagctggaagccatgcggaccttctgcgagtccgctaagcaggatagattaaagctccaaaatgaactggcccacaaggtcgccgaatgtaaggccctcgccttagaatgtgagcgggtcaaggaggatagcgacgagcagatcaagcagctggaggatgcactcaaggacgtacagaagcggatgtatgagtctgagggcaaagtaaaacagatgcagactcatttccttgctttgaaagagcatttgaccagtgaagcggcatctggcaatcaccgcctcacagaagagctgaaagaccaactcaaggacctgaaggtgaagtatgagggggcttccgctgaggtgggtaagctcagaaatcaaatcaagcaaaacgagatgatcgtggaggagttcaaacgcgacgaggggaaactgatcgaggagaataaaaggctccagaaagaattaagcatgtgcgagatggaaagggagaaaaagggacgtaaggtcacagaaatggagggacaggccaaagagttgtcggccaaattagctctctccatcccggcagagaagttcgagaatatgaaaagctctctctccaacgaagtgaatgagaaggccaagaaacttgttgaaatggaaagggagcacgaaaagagtctgtctgagatccgccagctaaaaagagaactggagaacgtgaaagctaagctggcccagcacgtaaagccagaggagcatgaacaggtgaagagcaggttggaacagaagtctggcgaactagggaaaaagattactgagctcactctaaagaaccaaaccctgcagaaggagatagaaaaggtctatctggataataagttgctcaaagaacaagcacataatctgacaatcgaaatgaaaaatcattatgttccacttaaagtctctgaggacatgaaaaagagccatgacgctatcatcgacgacctcaacagaaaactgttagacgtaacccagaagtataccgagaaaaagctggagatggaaaaacttttgctggagaacgacagcctgagcaaggacgttagcagattagagaccgtcttcgtgcccccagagaaacacgaaaaggagatcatcgccttgaagtctaatattgtcgagcttaagaagcagctgagcgagcttaagaagaaatgcggagaggaccaggagaaaattcacgctcttactagtgaaaatacaaacttgaagaaaatgatgtcaaaccagtacgtgcctgtcaagacccatgaagaagtgaagatgaccctcaacgatacgctagcgaaaacgaaccgtgagttgctcgacgtgaagaagaaatttgaggatatcaaccaggagttcgtcaagataaaggataaaaacgagattcttaaacgcaacctagaaaacacgcagaatcaaatcaaagcagagtacatttccctggccgagcatgaagccaaaatgtccagcctgtcccaaagcatgcggaaggtgcaggactctaatgctgaaatcttggccaactatcggaagggtcaggaagagatagtcaccctgcacgcagagataaaagcccagaagaaggagctggacacgatccaggaatgtataaaggttaaatacgcacccatcgtgtctttcgaagagtgcgaacggaagttcaaagcaacagagaaggagctcaaagatcagcttagcgagcagacacagaagtactcagtatccgaagaggaggtaaaaaagaacaaacaggagaatgataaactgaaaaaagagatctttacactgcagaaggatctgcgggataagacagtgctcatcgaaaaatcccatgagatggaacgggcattgtcgcgaaagacggacgaattgaacaaacagctcaaggacctgtcccagaagtatacagaagtcaaaaatgtaaaagagaagttggtcgaagaaaatgcgaagcagacttcagaaatcctggccgtacagaacttgctgcagaaacaacacgttcccctggagcaggtggaggcgcttaaaaaatctctgaacggcacaatcgaaaatttaaaagaagaactaaagtctatgcagcggtgttatgaaaaggagcagcaaactgttactaaactgcatcagctccttgaaaaccagaagaactcaagcgtcccactcgccgaacacctacagatcaaggaggccttcgagaaggaggtaggcatcataaaggccagtctgcgcgagaaagaagaggagagtcagaacaaaatggaagaagtcagcaagttgcagtctgaggtgcagaatactaagcaggcccttaaaaaacttgagactagggaggtggtcgacctgtctaaatataaagccaccaagtcagatctggagactcagattagcagcttgaatgaaaaattggcaaatttgaatcggaaatacgaagaggtgtgcgaggaggtcctccatgctaagaagaaggaaatttcagcaaaggatgaaaaggaactccttcacttcagtattgaacaggagatcaaggaccaaaaggagcggtgtgataaaagcctcaccacaatcaccgaactccagcgcaggattcaagaaagtgctaagcagatagaagccaaagacaacaaaatcaccgaactgctgaatgacgtagagagactgaagcaagctctgaacggactgtctcagctcacctacacgagcggcaatccaacgaaaaggcagagccagctaatcgacaccctgcaacaccaggtgaagtcgcttgagcagcagcttgctgacgcggatagacaacaccaggaagtcatagccatctataggacgcacctgctgtcagctgcccagggacacatggatgaagatgtgcaggaggcccttctgcaaatcatccagatgcgccagggtctggtatgctag

SEQ ID NO: 22927 - DNA, 4206 bp, Artificial Sequence
  derived and/or modified sequence
atgatgaactgttggttctcatgtacgcctaaaaatcgacatgctgccgactggaacaagtatgacgaccggttaatgaaagctgcagaacgtggagacgttgaaaaagtaaccagtatcctcgccaaaaaaggagtgaacccgggtaaactggacgtggagggtcgatctgtgttccatgtggtgacttctaaaggcaacctagaatgtctcaatgccatcctcattcacggagtggacatcacaacaagtgacaccgccggacgaaacgccctgcacttagctgcgaagtatgggcatgccctctgtctgcagaagctgttacagtacaactgtcccaccgagcatgctgacctccagggcagaaccgcactgcacgatgcagctatggcggactgccctagctccatacagttgctttgtgatcatggagccagcgtcaacgcaaaggacgtggacggcaggacacccttggtccttgcaacccaaatgtcacggcctacaatctgtcagttgctgatcgacaggggggctgatgtgaattcccgagacaaacagaataggaccgctcttatgctcgggtgcgagtacggatgcagggatgcagtcgaggtgctgattaaaaatggagcagacatatccctccttgatgctctgggacatgatagcagttattacgcccgaatcggagataaccttgatattttgactctgctgaagacggcatctgagaacaccaacaaagggagagagttgtggaaaaaaggaccttccctgcaacagagaaacctgacacacatgcaggacgaagttaacgtcaagtcccatcagcgcgagcaccagaacatccaggatctggagatcgagaacgaagacctgaaagagagactaagaaagattcaacaggagcaacggattctgttagataaggtcaatggactgcagcttcagctgaatgaggaggtcatggtggccgacgatctggagtctgagcgcgagaagctgaaaagtctgctggcagccaaggagaagcagcacgaggagtctctgcggaccattgaggccctcaaaaatagatttaagtattttgaaagtgaccacctcggctcaggatcccactttagaaaagaggatatgttactgaaacaagggcagatgtacatggcggacagccagtgtacctctccgggaattcccgcacacatgcagagccgcagtatgcttaggccgttggagttatccctgccatcacagacctcctacagcgagaacgagatcttgaaaaaggaattggaggcaatgcggactttctgcgagagcgccaaacaggacagattaaagttgcaaaatgagctggcccacaaagtggccgaatgcaaggcacttgcactggagtgtgagcgagtgaaggaggactcagacgagcagataaagcagcttgaggacgcattaaaggacgtacagaaacgcatgtacgaatcagagggcaaggtcaagcagatgcagacccattttctggccctgaaagaacacctcaccagtgaggcggcatcggggaaccaccgcctgacagaagaattaaaagatcagcttaaagacttgaaggtgaagtatgagggagcatcagctgaggtcgggaagcttaggaaccagatcaaacaaaatgagatgatcgtcgaagagtttaagcgcgacgaaggaaaacttattgaggagaacaagcgtctccagaaagaattatccatgtgtgagatggagagggagaaaaaggggcgaaaggtcaccgaaatggagggacaggccaaggaactgtcagctaagttagccttatctatccctgccgaaaaatttgaaaatatgaagtcatctctgagtaatgaagtaaacgaaaaggccaaaaagctcgttgagatggagagggaacacgagaagagcctgtctgaaattcgtcagctgaagagagaactcgaaaacgttaaagccaaactcgctcagcatgttaagccggaagagcacgagcaggttaagtctcgacttgaacagaaatcaggcgaactcggcaagaagataaccgagttgacactgaaaaaccaaacattgcagaaagagattgagaaggtgtatctagacaacaaactcctaaaagaacaggcccacaacctgactattgaaatgaagaaccactacgttccccttaaagtgtctgaagatatgaagaaaagccacgacgctattattgatgacttaaatcgcaaactcctggacgtcacacagaagtataccgagaaaaagttggagatggagaagctgctgctggaaaacgatagcctttccaaagatgtttcgcgcctggaaaccgtgttcgtgccacctgagaaacacgaaaaggagattatagcgctgaaaagcaatatcgtcgagttgaaaaagcagctgagtgagctgaaaaaaaaatgcggagaggaccaggagaagattcatgctttaacatcagagaatactaatcttaaaaagatgatgagtaatcagtatgtgccagttaaaactcatgaagaagtgaagatgaccctgaacgatacattagctaaaaccaatcgggagctgctggatgtgaagaaaaagtttgaagatatcaatcaggagtttgtaaagataaaggacaagaacgagattctgaagagaaacctcgagaacacccagaatcagattaaggctgagtatataagtctcgcagaacacgaggcgaagatgtcctcactcagtcaaagcatgaggaaggtgcaagactcaaacgccgagatccttgccaactatcggaagggccaggaagagatcgtgaccctgcacgcagagataaaggcccagaagaaagagttggacacaatacaagaatgcatcaaggtgaaatacgctcccattgtgagctttgaggaatgtgagcgaaaattcaaggccaccgaaaaagaacttaaggatcagctttccgaacagacacaaaagtattctgtttccgaagaagaagtgaaaaaaaataagcaggagaacgataagctcaagaaggaaatattcacactacaaaaggatctcagagataagactgtcctgatcgaaaaatcccatgagatggaacgcgctctgtccaggaaaactgacgagctgaataagcagcttaaggatttaagtcagaaatacaccgaagtcaaaaatgtaaaagagaaattggtggaggagaatgcaaaacagacatccgaaatcctagctgttcagaacttacttcagaagcagcacgttccactggaacaggtggaggctctgaaaaagtccctgaatggcaccatcgagaacttgaaagaagaacttaaaagtatgcagcgatgttacgaaaaggagcagcagacagttacgaaactgcatcaactcctcgaaaaccagaagaattctagcgtgccattagcagaacatctgcagataaaggaggcctttgaaaaagaagtcggtattatcaaagcatccctcagagagaaagaagaggagtcccagaataaaatggaggaagtatcaaagctgcagtccgaagtccagaatacaaaacaggcgctgaagaagcttgaaacaagagaagtagttgacttgtctaagtataaggcaactaaatctgacttggaaacccagatatctagcctgaatgagaagctggccaacctgaatcgcaaatacgaggaggtgtgtgaagaagtgctgcacgccaagaaaaaagagatatcagccaaagatgagaaagaactactccatttttcaattgagcaggagatcaaggaccagaaggagcgctgcgacaagtcattgacgactatcactgaactgcagcgacggatccaggagtccgccaagcaaattgaggctaaagataacaaaatcactgaacttctgaatgacgtggaaaggctgaaacaagcactgaacggactttcacagcttacctacacgtccggcaacccgactaagcgtcagtcccaactaatcgatacgctccagcaccaagtgaaatccctggagcaacagctagctgatgctgaccgccagcatcaggaggtgatagctatataccgtactcacctgctttcggccgctcaaggccatatggacgaggatgtccaggaggccttgctgcagattatacaaatgcgtcagggcttggtttgttag

SEQ ID NO: 22928 - DNA, 7078 bp, Artificial Sequence
  derived and/or modified sequence
gtgttgaggcagcaggatgcagagtgctgttcaagttttccagtggggtccctcaaagggacaactttgaaagatagctagcttccaaagaataagaaatagatagagttactgtacctgacttggggctgctcttaatcaagttctgcattgcaaggaagataatattcgagcgttatgaaggcggagaaggatcctgaagacgaagaaaatatcgttagagatccaagctaagtgtagcacagcatgtgagggactgagtcacttgtcaggagtttgtctgagagtttgctttgtgagcttacagagatttgtaacttaatgcaaagtagtttgccattagcaacaagaaactaaatcctgtctatgatgaactgttggttttcttgtactcctaagaacagacatgcagcagattggaataaatatgatgaccgattgatgaaagcagcagaaaggggggatgtagaaaaagtgacctcaatccttgctaaaaagggggtcaatccaggcaaactagatgtggaaggcagatctgtcttccatgttgtgacctcaaaggggaatcttgagtgtttgaatgccatccttatacatggagttgatattacaaccagtgacactgcagggagaaatgctcttcacctggctgctaagtatggacatgcattgtgcctacaaaaacttctacagtacaattgtcccactgagcatgcagacctgcagggaagaactgcacttcacgatgccgcaatggcagattgtccttctagcatacagctgctttgtgaccatggggcctctgtgaatgccaaagatgtagacgggcggacaccacttgttctggctactcagatgagtaggccaacaatatgtcaactgctgatagatagaggagcggatgttaattccagagacaaacaaaacagaactgccctcatgctaggttgcgaatatggttgcagagatgcagtagaagtcttaattaaaaatggtgctgatataagcttgctggatgcgcttggccatgatagttcttactatgcaagaattggtgacaatctggacattctaaccttgttgaagactgcatcggaaaataccaacaaagggagagaactttggaagaaagggccatctttgcaacagcgaaatttgacacacatgcaagatgaagtaaatgtgaagtcacatcagagggagcatcaaaatattcaggatttggagattgaaaatgaagatttgaaagagaggttgagaaaaattcagcaagaacaaagaatacttttggataaagtcaatggtttacagttacagctgaatgaggaagttatggttgctgatgatctggaaagcgagagagaaaagctgaagtcccttttggcagctaaagaaaagcaacatgaagaaagcttaaggactattgaggctctgaaaaatagatttaaatattttgagagtgatcatttaggatcaggaagtcatttcagtaaccgaaaagaagatatgcttcttaaacaaggtcagatgtatatggcagactcacagtgtacttccccaggtataccagcccatatgcaaagcagatctatgttaagacctctggaactatctttacccagtcaaacgtcatactctgaaaatgaaattttaaagaaagagttagaagcaatgcgaactttctgtgagtcagcaaaacaagaccgactgaagctccaaaatgaactggcacacaaagtggcagaatgcaaagctttagcattagaatgtgaaagggtcaaggaggattcagatgaacagataaagcaattagaagatgcattaaaagatgtgcagaagaggatgtatgagtcagaaggtaaagttaaacaaatgcagacccattttcttgcccttaaagaacacttaacaagtgaagcagcctcagggaatcacagactaaccgaggaactgaaggatcagttgaaagacttgaaagtaaaatatgaaggtgcttcagcagaagtggggaaattaagaaaccaaatcaaacaaaatgagatgatagtagaagagtttaagagggatgaaggcaagctgatagaagaaaataagcgattacagaaggaacttagtatgtgtgaaatggagcgagagaagaaaggaagaaaggtcacagagatggaaggccaggcaaaagaattgtcagcgaagttggccctttccattccagctgaaaaatttgaaaacatgaagagctcattatcaaatgaagtgaatgagaaagcaaaaaaattagtagaaatggaaagagaacatgaaaaatcacttagtgaaattagacagttaaagagagaacttgagaatgttaaggccaagcttgctcagcacgtcaaaccagaggaacatgaacaggttaagagcagattagaacagaaatcaggagaacttgggaagaagatcactgagttaacattgaaaaatcagacactacaaaaggaaattgaaaaagtttatttggataataagctcctcaaggagcaagcacataacttaacaattgaaatgaaaaatcattatgttcctttaaaagtaagtgaagacatgaaaaagtcacatgatgcaattattgatgatcttaatagaaagcttttagatgtaacacaaaaatatacagaaaagaagttggaaatggagaaattgctactggaaaatgacagcttaagtaaggatgtaagccgcctagaaactgtgtttgtacctcctgagaaacatgaaaaagagataatagctctgaaatccaatattgttgaacttaagaaacagctgtctgaacttaagaaaaaatgtggtgaagaccaggagaaaatacacgctctcacatctgaaaacactaacttgaagaagatgatgagtaatcagtatgtgccagttaaaacccatgaagaggttaaaatgacactgaatgacacgttagccaaaactaacagagaattattagatgtgaagaaaaaatttgaagatataaatcaggaatttgtaaaaataaaagataagaatgaaatattaaaaagaaacctggaaaacactcagaaccaaataaaagctgagtacatcagcctggcagagcacgaggcaaagatgagctcgctaagtcagagcatgagaaaggtgcaggatagtaatgctgaaatcttggccaactacagaaaaggccaagaagagattgtgacactgcatgccgaaattaaagcccagaagaaggagctcgacacaatacaagaatgcattaaggtaaaatacgccccaattgtcagctttgaggagtgcgagagaaaatttaaagcaacagagaaagaactaaaagaccagttatcagagcagacacaaaagtatagtgtcagtgaagaagaagtcaagaaaaacaagcaagagaatgacaagttaaagaaggagatttttacccttcagaaagatttgagagataagacagttctcattgagaagtctcatgaaatggaaagagcattaagcagaaaaacagacgagctaaacaaacagttaaaagacttgtcacagaaatacacggaagtaaagaatgtgaaagagaagctagtagaagaaaatgccaaacagacttctgagatacttgcagtgcaaaatcttttgcaaaaacaacatgttccattggaacaggttgaggctctgaaaaaatctcttaatggcacaattgaaaatctaaaggaagaactgaagagtatgcaaaggtgttacgagaaagagcagcagacagtgaccaaactgcatcaattgttggagaatcaaaagaactcttctgtacccctggcagagcatttgcagattaaagaagcatttgagaaagaagttggaatcataaaagccagcttgagagaaaaggaagaagaaagccaaaacaaaatggaagaagtctccaaacttcagtcggaggttcagaatactaaacaagcattaaaaaaattagagactagagaggtagttgacttgtctaaatataaagcaacaaaaagtgatttggagacacagatttctagcttaaatgaaaaattggccaatctgaatagaaagtatgaggaagtatgtgaggaagttttgcatgccaaaaagaaggaaatatctgcaaaagatgagaaggaattactgcatttcagcattgagcaagaaattaaggatcagaaggaacgatgtgataagtccttaacaacaatcacagagttacaaagaagaatacaagaatctgctaaacaaatagaagcaaaagataataagataactgaactgcttaatgatgtggaaagattaaaacaggcactcaatggcctttcccaactcacctacacaagtgggaaccccaccaagaggcagagccagctgattgacactctgcagcaccaagtgaaatctctggagcaacagctggccgatgctgacagacagcaccaagaagtaattgcaatttatcggacacaccttcttagtgctgcacagggtcacatggatgaagatgttcaggaggctctgctccagatcatacaaatgcggcaggggcttgtgtgctagccgttagcactgactgccagtatctgttttatcttgctggtgctgaacattctttgtgcaactccatggtctttctgggccttactgtgctggtataattaaaataaaatatattttgttctattggtaggtttttttttaaaattagatgaatatgttagtctttttcaatatcagtttgaatcttattttctgtatgtgttaattttacaaataggcaaacaacataactttgccctggattgactacatatttttaaaccttcaagtccctaataaaacatgagccatctgagtgagtccatatgaagcgaggttaggctgaaataattgcttaaagatgtctttcagagaaattaatttggttggtggccacttttaggtggatcaaaagacctttcagatcctcagaaccttgagacataatacagttgtgaggaatgtgttgtaacttggctggccaagttacatgttacagtatctttactgaggtaacttcattagtgtctttggccttttttgtaggtatagatattttttctttttacactaataacttttatgccttttaaaataaatttattttcataaatggtttgcagtgctaaattacatttagattaagaacaggcaggggtggaatatatcaggaatttataataaaattgccttaatctctacaacagtatcttaatttttacttgcggtgactattcttgccacaatattggagaataatgatagatgatatactagatttttcaaagtgtgaaaacctttagactttttttagcaattagtttgacattcgctactatagtaaccaagcactcattatatatgcatcctccaaatgtttcatgcttatttataggaaagttatattaatgagattaataatgtgaaatacagttttcctgcaaaattagcattagagaattgattttagataacagatttttaaagttttagagaaaagtacagtaatacagtaaactgaaagagtatatagatagcaataaaataacataagtggacatgtttatagtaaatactctgaagtaaacaaccgtttttattaactgcatctcattagggaaagtttatatgtcttgttattttttattaacattttatttaccattcagagtgaaaattactaatttgagtattaacaaataactgaataaatggatcattacagttaggttttctcaaattgcaaaatttgccttagcaattatctttgaacatcccgaaccagatttttaaatcccatttttgtttaatagggtaaaaataccatcaaaatgacttctcataccaaagaataagccatcatattttttcggtgttgaaacaacattgaaagtcagaattggatttgtttttaattctttatacggtttacataagcaatatctgtctctttaattattatgattaatgtcgtccttcagcatgagttctgtttcacaagttttgggccacctatttcaataaaaaataaaatataaattaaaaaagttgccgggggtggtggctcatgcctgtaatcccagcactttgggaggctgagggaggtagatcacctgaggtcagaagttcgagaccagccttaccaatatggtgaagccccatctctactaaaaatacaaaaattagccctgcatggtggcaggtgcctgtagtcccaggtactcgggaggctgagacaggagaatcgcttgaacctgggaggcggaggttgcagtgagccaagatctcgccactgcactccagcttgggcaatagcaagactccatctcaaaataaaataaaataaaacttagagcaaagtttaaaactgagtattcatattaagtgttttattttccatattagagatgggaagggaaccttatgtgtattttattttgttttcaaccatcaataaagttttctctagaatattgttttgaacatccttgtaaaagatttgcgagttaaactattttatttactgtctgtgagagcattgggagtaggaaacgatggactccaaagtacaagggagaatacccattttcattcagctatctggagtaaaatatcaagtacttccttcaactaatcttgtctcattcactcaccttttgatatcgaaggcagaaattgcgtttacaacactgaagaccaaagctttttaattagtaaacaagcggaacatagataatggacaatgctggccactgccattctgtgttcagaaagactatgagacctgaacatatggccaagaggaaagaagagtgacgttgtctaagatgtaatgagtgctctctgagagaatcactcaattcctattggagtgcaatccttacttgagaactttattactcttgttctgtgtagttttttttttttgtcacttccccatcagaaaagcatattctttttgatagagggtcagtgttataaataattgtcttttgaaataaaatcaaatattcatgcattg

SEQ ID NO: 22929 - DNA, 4723 bp, Artificial Sequence
  derived and/or modified sequence
atcatgcactgcagcgtctgtgttgcagtgttgaggcagcaggatgcagagtgctgttcaagttttccagtggggtccctcaaagggacaactttgaaagatagctagcttccaaagaataagaaatagatagagttactgtacctgacttggggctgctcttaatcaagttctgcattgcaaggaagataatattcgagcgttatgaaggcggagaaggatcctgaagacgaagaaaatatcgttagagatccaagctaagtgtagcacagcatgtgagggactgagtcacttgtcaggagtttgtctgagagtttgctttgtgagcttacagagatttgtaacttaatgcaaagtagtttgccattagcaacaagaaactaaatcctgtctatgatgaactgttggttttcttgtactcctaagaacagacatgcagcagattggaataaatatgatgaccgattgatgaaagcagcagaaaggggggatgtagaaaaagtgacctcaatccttgctaaaaagggggtcaatccaggcaaactagatgtggaaggcagatctgtcttccatgttgtgacctcaaaggggaatcttgagtgtttgaatgccatccttatacatggagttgatattacaaccagtgacactgcagggagaaatgctcttcacctggctgctaagtatggacatgcattgtgcctacaaaaacttctacagtacaattgtcccactgagcatgcagacctgcagggaagaactgcacttcacgatgccgcaatggcagattgtccttctagcatacagctgctttgtgaccatggggcctctgtgaatgccaaagatgtagacgggcggacaccacttgttctggctactcagatgagtaggccaacaatatgtcaactgctgatagatagaggagcggatgttaattccagagacaaacaaaacagaactgccctcatgctaggttgcgaatatggttgcagagatgcagtagaagtcttaattaaaaatggtgctgatataagcttgctggatgcgcttggccatgatagttcttactatgcaagaattggtgacaatctggacattctaaccttgttgaagactgcatcggaaaataccaacaaagggagagaactttggaagaaagggccatctttgcaacagcgaaatttgacacacatgcaagatgaagtaaatgtgaagtcacatcagagggagcatcaaaatattcaggatttggagattgaaaatgaagatttgaaagagaggttgagaaaaattcagcaagaacaaagaatacttttggataaagtcaatggtttacagttacagctgaatgaggaagttatggttgctgatgatctggaaagcgagagagaaaagctgaagtcccttttggcagctaaagaaaagcaacatgaagaaagcttaaggactattgaggctctgaaaaatagatttaaatattttgagagtgatcatttaggatcaggaagtcatttcagaaaagaagatatgcttcttaaacaaggtcagatgtatatggcagactcacagtgtacttccccaggtataccagcccatatgcaaagcagatctatgttaagacctctggaactatctttacccagtcaaacgtcatactctgaaaatgaaattttaaagaaagagttagaagcaatgcgaactttctgtgagtcagcaaaacaagaccgactgaagctccaaaatgaactggcacacaaagtggcagaatgcaaagctttagcattagaatgtgaaagggtcaaggaggattcagatgaacagataaagcaattagaagatgcattaaaagatgtgcagaagaggatgtatgagtcagaaggtaaagttaaacaaatgcagacccattttcttgcccttaaagaacacttaacaagtgaagcagcctcagggaatcacagactaaccgaggaactgaaggatcagttgaaagacttgaaagtaaaatatgaaggtgcttcagcagaagtggggaaattaagaaaccaaatcaaacaaaatgagatgatagtagaagagtttaagagggatgaaggcaagctgatagaagaaaataagcgattacagaaggaacttagtatgtgtgaaatggagcgagagaagaaaggaagaaaggtcacagagatggaaggccaggcaaaagaattgtcagcgaagttggccctttccattccagctgaaaaatttgaaaacatgaagagctcattatcaaatgaagtgaatgagaaagcaaaaaaattagtagaaatggaaagagaacatgaaaaatcacttagtgaaattagacagttaaagagagaacttgagaatgttaaggccaagcttgctcagcacgtcaaaccagaggaacatgaacaggttaagagcagattagaacagaaatcaggagaacttgggaagaagatcactgagttaacattgaaaaatcagacactacaaaaggaaattgaaaaagtttatttggataataagctcctcaaggagcaagcacataacttaacaattgaaatgaaaaatcattatgttcctttaaaagtaagtgaagacatgaaaaagtcacatgatgcaattattgatgatcttaatagaaagcttttagatgtaacacaaaaatatacagaaaagaagttggaaatggagaaattgctactggaaaatgacagcttaagtaaggatgtaagccgcctagaaactgtgtttgtacctcctgagaaacatgaaaaagagataatagctctgaaatccaatattgttgaacttaagaaacagctgtctgaacttaagaaaaaatgtggtgaagaccaggagaaaatacacgctctcacatctgaaaacactaacttgaagaagatgatgagtaatcagtatgtgccagttaaaacccatgaagaggttaaaatgacactgaatgacacgttagccaaaactaacagagaattattagatgtgaagaaaaaatttgaagatataaatcaggaatttgtaaaaataaaagataagaatgaaatattaaaaagaaacctggaaaacactcagaaccaaataaaagctgagtacatcagcctggcagagcacgaggcaaagatgagctcgctaagtcagagcatgagaaaggtgcaggatagtaatgctgaaatcttggccaactacagaaaaggccaagaagagattgtgacactgcatgccgaaattaaagcccagaagaaggagctcgacacaatacaagaatgcattaaggtaaaatacgccccaattgtcagctttgaggagtgcgagagaaaatttaaagcaacagagaaagaactaaaagaccagttatcagagcagacacaaaagtatagtgtcagtgaagaagaagtcaagaaaaacaagcaagagaatgacaagttaaagaaggagatttttacccttcagaaagatttgagagataagacagttctcattgagaagtctcatgaaatggaaagagcattaagcagaaaaacagacgagctaaacaaacagttaaaagacttgtcacagaaatacacggaagtaaagaatgtgaaagagaagctagtagaagaaaatgccaaacagacttctgagatacttgcagtgcaaaatcttttgcaaaaacaacatgttccattggaacaggttgaggctctgaaaaaatctcttaatggcacaattgaaaatctaaaggaagaactgaagagtatgcaaaggtgttacgagaaagagcagcagacagtgaccaaactgcatcaattgttggagaatcaaaagaactcttctgtacccctggcagagcatttgcagattaaagaagcatttgagaaagaagttggaatcataaaagccagcttgagagaaaaggaagaagaaagccaaaacaaaatggaagaagtctccaaacttcagtcggaggttcagaatactaaacaagcattaaaaaaattagagactagagaggtagttgacttgtctaaatataaagcaacaaaaagtgatttggagacacagatttctagcttaaatgaaaaattggccaatctgaatagaaagtatgaggaagtatgtgaggaagttttgcatgccaaaaagaaggaaatatctgcaaaagatgagaaggaattactgcatttcagcattgagcaagaaattaaggatcagaaggaacgatgtgataagtccttaacaacaatcacagagttacaaagaagaatacaagaatctgctaaacaaatagaagcaaaagataataagataactgaactgcttaatgatgtggaaagattaaaacaggcactcaatggcctttcccaactcacctacacaagtgggaaccccaccaagaggcagagccagctgattgacactctgcagcaccaagtgaaatctctggagcaacagctggccgatgctgacagacagcaccaagaagtaattgcaatttatcggacacaccttcttagtgctgcacagggtcacatggatgaagatgttcaggaggctctgctccagatcatacaaatgcggcaggggcttgtgtgctagccgttagcactgactgccagtatctgttttatcttgctggtgctgaacattctttgtgcaactccatggtctttctgggccttactgtgctggtataattaaaataaaatatattttgttctat

SEQ ID NO: 22930 - protein, 572 aa, Artificial Sequence
  derived and/or modified sequence
MSRSPDAKEDPVECPLCMEPLEIDDINFFPCTCGYQICRFCWHRIRTDENGLCPACRKPYPEDPAVYKPLSQEELQRIKNEKKQKQNERKQKISENRKHLASVRVVQKNLVFVVGLSQRLADPEVLKRPEYFGKFGKIHKVVINNSTSYAGSQGPSASAYVTYIRSEDALRAIQCVNNVVVDGRTLKASLGTTKYCSYFLKNMQCPKPDCMYLHELGDEAASFTKEEMQAGKHQEYEQKLLQELYKLNPNFLQLSTGSVDKNKNKVTPLQSPIDKPSDSLSIGNGDNSQQISNSDTPSPPPGLSKSNPVIPISSSNHSARSPFEGAVTESQSLFSDNFRHPNPIPSGLPPFPSSPQTSSDWPTAPEPQSLFTSETIPVSSSTDWQAAFGFGSSKQPEDDLGFDPFDVTRKALADLIEKELSVQDQPSLSPTSLQNSSSHTTTAKGPGSGFLHPAAATNANSLNSTFSVLPQRFPQFQQHRAVYNSFSFPGQAARYPWMAFPRNSIMHLNHTANPTSNSNFLDLNLPPQHNTGLGGIPVAGEEEVKVSTMPLSTSSHSLQQGQQPTSLHTTVA

SEQ ID NO: 22931 - DNA, 1719 bp, Artificial Sequence
  derived and/or modified sequence
atgagcagaagccccgacgccaaagaggatcctgtggagtgccctctctgcatggaaccattggagatcgacgacattaatttctttccatgcacttgtggctatcagatatgtcgcttctgctggcatcgtatccgcaccgatgagaacggcctctgtccagcctgccgtaagccataccccgaagatcctgcggtctataaacccctttcacaggaggaattgcaacgcattaaaaacgaaaagaagcaaaagcagaatgagcggaagcaaaaaattagcgagaaccgcaagcacctcgcatcagtgcgcgtggtgcaaaagaatctggtattcgtcgtcggtctgagtcagcggctcgccgatcccgaggtcctcaaacgaccggaatattttggaaagtttgggaaaattcacaaggtggtaataaacaactccaccagctatgccgggtctcagggcccctctgctagtgcctacgttacgtacattaggtcagaagatgctttgcgtgcaattcaatgcgtcaataacgtggtggtcgatgggcgaactctgaaagcatccttaggcactacaaaatactgctcctactttctgaaaaatatgcagtgcccgaaaccggattgtatgtacctccacgaactcggagatgaggctgccagctttactaaagaggagatgcaggctggaaaacaccaggaatatgagcagaaactcctgcaagagctatataagttgaaccctaattttttacagctgtctactggctctgtggacaagaataagaacaaggtaacaccgctccagtcccccattgacaaaccttccgactcactaagtatcggaaatggcgataactcccagcagatcagcaatagtgataccccgtctcccccccccggcctgtctaagagcaacccagtcatccctattagctccagtaaccattcggccagatcaccttttgagggtgctgtcaccgagtcccagtccctcttctcagacaactttcgccatcctaaccctatacctagtggcctacctcccttcccgtcatccccccagacatcttctgattggcccaccgctccagaaccccagtccctgttcacgtcagagaccattccagttagctctagtactgattggcaggcagctttcggctttggcagttcaaaacaacccgaagatgacctggggttcgacccatttgatgttacccggaaggcacttgccgatctgatcgagaaagagctttcagtacaggatcagccatcgctgagtcctacatccctacagaattctagctctcacacgacgactgccaagggacctggcagtggttttctgcacccagccgcggctaccaatgctaactcgctcaactctacattcagtgtcttaccccaacggttcccacagtttcagcagcaccgggctgtttataactcttttagttttccggggcaagcagcccgctatccctggatggccttcccccgaaattccattatgcacctaaatcacacagccaatccaacctccaactcaaactttttggacttgaaccttcctccccaacataacacaggcctcggtggcattccagtggctggtgaggaagaagtgaaggtgtcgaccatgcctctgtcaaccagcagtcactcactgcaacagggccaacagcccacttctctccataccacagtggcttag

SEQ ID NO: 22932 - DNA, 1719 bp, Artificial Sequence
  derived and/or modified sequence
atgagccgcagcccagatgccaaggaggaccctgtggagtgccccctgtgcatggagcccctggagattgatgacatcaacttcttcccctgcacctgtggctaccagatctgccgcttctgctggcaccgcatcagaacagatgaaaatggcctgtgcccagcctgcaggaagccctacccagaggaccctgctgtgtacaagcccctgagccaggaggagctgcagaggatcaagaatgagaagaagcagaagcagaatgaaaggaagcagaagatcagtgaaaataggaagcacctggcctctgtgcgggtggtgcagaagaacctggtgtttgtggtgggcctgagccagaggctggccgaccctgaggtgctgaagaggcctgagtactttgggaagtttgggaagatccacaaggtggtgatcaacaacagcaccagctatgccggcagccagggccccagcgccagcgcctacgtgacctacatccgctcagaagatgccctgcgggccatccagtgtgtgaacaacgtggtggtggatggccgcaccctgaaggccagcctgggcaccaccaagtactgcagctacttcctgaagaacatgcagtgccccaagccagactgcatgtacctgcacgagctgggagatgaggccgccagcttcaccaaggaggagatgcaggccggcaagcaccaggagtatgagcagaagctgctgcaggagctgtacaagctgaaccccaacttcctgcagctgagcacaggctctgtggacaagaacaagaacaaggtgacccccctgcagagccccatcgacaagcccagcgacagcctgagcattggaaatggagacaacagccagcagatcagcaacagcgacacccccagccccccacctggcctgagcaagagcaaccctgtgatccccatcagcagcagcaaccacagcgcccggagcccctttgaaggagctgtgacagagagccagagcctcttcagtgacaacttccgccaccccaaccccatccccagcggcctgccccccttccccagcagcccccagaccagcagtgactggcccacagcccctgagccccagagcctcttcaccagcgagaccatccctgtgagcagcagcacagactggcaggccgccttcggcttcggcagcagcaagcagccagaagatgacctgggctttgacccctttgatgtgaccaggaaggccctggccgacctgattgagaaggagctgtctgtgcaggaccagcccagcctgagccccaccagcctgcagaacagcagcagccacaccaccacagccaagggccctggcagcggcttcctgcaccctgctgctgccaccaatgccaacagcctgaacagcaccttctctgtgctgccccagcgcttcccccagttccagcagcacagagctgtgtacaacagcttctccttccctggccaggccgcccgctacccctggatggccttccccaggaacagcatcatgcacctgaaccacacagccaaccccaccagcaacagcaacttcctggacctgaacctgcccccccagcacaacacaggcctgggcggcatccctgtggccggggaggaggaggtgaaggtgtccaccatgcccctgagcaccagcagccacagcctgcagcagggccagcagcccaccagcctgcacaccaccgtggcctag

SEQ ID NO: 22933 - DNA, 1719 bp, Artificial Sequence
  derived and/or modified sequence
atgagccggagccccgacgccaaggaggaccccgtggagtgccccctgtgcatggagccactggaaatcgacgacattaatttttttccatgcacgtgcggatatcagatatgccgcttttgctggcaccggattcgcaccgacgagaatgggctgtgccctgcttgccgcaaaccttacccagaggatcccgcagtttataaacccctgagtcaggaggagctccaacgcataaaaaacgagaagaagcaaaagcagaacgagcgaaaacagaagatctctgagaaccgcaagcatttagccagcgtgcgcgtggtccagaaaaacttggtgtttgtcgtggggctgagccaacggctcgccgaccccgaagtcctgaagagaccagagtatttcggaaagttcggtaagatacacaaggttgtgattaacaactctaccagctatgcgggtagtcagggtcctagcgccagtgcctatgttacatatattaggtccgaagacgcacttcgagctattcagtgtgtgaataatgtagtggtggatggccgcaccttaaaggcctcgctaggaaccacaaagtattgttcttactttttgaagaacatgcagtgtccgaagcctgattgtatgtacctgcacgagctaggggatgaagctgcaagctttacgaaggaggaaatgcaggccgggaagcaccaagaatatgaacagaaattgctgcaagaactgtacaaattgaatccgaatttccttcagctctccactgggtccgtggacaaaaacaagaataaggtcaccccgttacagagccccatcgacaagccttcagactcactctctattggcaacggtgataactcccaacagatcagcaacagtgacactcctagtccacctcccggcctgtccaaatcgaaccccgtaattccaatcagctcgagcaatcatagtgctagatctccatttgagggtgcagtcacggaatcccagtcattattcagcgataatttccggcatcccaaccctatcccatctggcttgcctccgtttccctcgtcgcctcagacaagcagcgattggcctacagcccccgagcctcagtccctttttacttctgagactattcctgtctcttccagcaccgactggcaggcggcctttgggtttggctcctctaaacaaccagaagacgatcttggatttgacccatttgacgtgactaggaaggccctagccgacctgattgaaaaggagttgagtgtgcaagaccagccaagcctgtcgcctacatccctgcagaacagttcctcccatacgacaactgctaagggacccggctcgggcttcctccatccagctgccgctactaacgcgaattccctgaactccacgttctctgtactacctcagagatttccacaatttcagcagcaccgcgccgtgtacaattctttttcatttcctgggcaggccgcccggtatccctggatggcatttccaaggaattcgatcatgcacttgaatcataccgccaatcccacctctaattccaactttctcgacctgaatctgcctcctcagcataacacaggccttggcggaattccggtcgccggggaagaagaggtcaaagtttctaccatgcccctttcaacatcctcacactccttgcagcaggggcaacagcctacatccctgcatactaccgttgcgtag

SEQ ID NO: 22934 - DNA, 1719 bp, Artificial Sequence
  derived and/or modified sequence
atgagtagaagtcctgacgccaaggaagatccggtggaatgtccattgtgtatggagcctctggagattgacgatataaacttcttcccgtgcacatgtggctaccagatttgtaggttctgctggcaccggatccggacggatgagaatggcctctgcccagcttgtagaaaaccctacccagaagaccctgcagtgtacaagcctctgagccaggaagaactccaaagaatcaagaacgaaaagaaacagaagcaaaacgaacgcaaacaaaaaatcagcgagaaccgtaaacacctggcgagtgttcgcgtggtgcagaaaaacttggtgttcgtggtgggactaagccaacgcctggccgatccagaggtgttgaaacgccctgaatactttggtaagtttggcaagattcacaaagtggtcatcaacaactctacttcctatgcgggaagccagggacccagtgcgagcgcttatgtgacatacatccggtcagaggatgctttgcgagccatacagtgcgttaacaacgtagtcgtagacggccgaactttgaaggcttcactagggaccaccaagtactgtagctatttcctgaagaatatgcagtgccccaagcctgactgtatgtatctccatgagcttggggatgaggctgcttcctttaccaaggaagaaatgcaagctggcaagcaccaggagtacgagcagaaactgcttcaggaactgtataagctgaatcctaattttctgcagctttcaacgggttcagtggacaaaaacaagaacaaggtgactccccttcaaagccccattgacaaaccgagtgacagtctgagcattggcaacggcgataattcacagcagatcagcaactccgatacaccctctccccctcctggccttagtaagtccaatccggtgattcctatctcctcctctaatcatagtgcccgttcgccatttgaaggcgcagtgacggagtctcagtccctcttctcagataattttaggcacccaaaccccattcccagcggtcttcctccatttccatcatctccccagacaagctctgactggccaaccgctcccgagccccaaagcctgttcacctccgagactatccccgtctcaagctccacagattggcaggccgcatttggctttggatcctcgaagcaaccggaggacgacctgggatttgaccctttcgatgtgacccgaaaagccttggccgacctaatcgaaaaggaactgtctgtgcaagaccagccgtctttaagtccaacctccctacaaaactccagtagtcatactaccacagccaaaggtcctgggtctggattcttacaccccgcagccgcaacaaatgccaattctctgaattcgactttctcggtcctgcctcaacgtttcccccaattccagcagcatcgagccgtctacaattcttttagttttcccggacaggcagcacggtatccctggatggcttttccacggaactccatcatgcacttgaatcacaccgctaatcccacctctaactccaattttctcgacctgaatctgccccctcagcacaataccggcctcggcggaatccccgtcgctggtgaggaagaagtaaaggtcagcaccatgccactttctacctcttcacactctctccagcagggccagcagcctaccagtctccatacaacagtcgcctag

SEQ ID NO: 22935 - DNA, 4642 bp, Artificial Sequence
  derived and/or modified sequence
ggtggcccgtctggctgtggaacccaccgaaagctgagagtctctctctcagccgtaaaggtcggactcgctgaagcaatcaggcccggttctgaagagttttttccccgacgctcgttcggtggtttcttgtgaggacgcggcagcccgtggagtcggctgagggaaaagcgaggcaaggcaggcgggtcgtcaaagtcctacattttagctttcagtgctgaacttccttctcccttaaattattataaacttttgctgctgtttaataaacgtgaagatgtctcgcagtcctgatgcgaaggaagaccctgtggagtgccctctttgcatggagcccttggagatagatgatatcaactttttcccttgcacctgtggctaccagatttgccgattttgttggcatcgaattcgcactgatgaaaatgggctttgtcctgcatgtagaaagccatatccagaagacccagcagtttataaaccactctcccaggaagagctgcaaaggataaagaatgagaaaaaacagaaacaaaatgagagaaaacagaaaatatcagaaaatcgcaaacatttggctagtgtacgtgtcgtacaaaaaaacctcgtctttgttgtaggtttatctcagcgcctagcagacccagaggttttaaaacgaccagaatattttgggaagtttggtaaaatacataaagttgtcatcaataatagcacatcatatgcaggctcacagggtccaagtgccagtgcttatgtaacctatatccggtcagaagacgctctcagagccatacagtgtgtcaacaatgtggtagtagatggcagaacacttaaggcatctctaggtacaacaaaatactgcagttacttcttaaagaatatgcagtgtccaaaacctgactgcatgtatcttcatgaattgggggatgaggcggccagcttcacaaaagaggaaatgcaggcgggtaaacaccaagaatatgaacagaagctacttcaagaattatataaattaaatcccaattttcttcagctatctacgggttcagttgataaaaataagaacaaagtgacaccactgcagagccccattgacaaaccttcagattctctcagtatagggaacggtgataattcccagcagatatctaacagtgatacgccttcaccaccacctggtttgtcaaaatccaatccagtcatccccatcagttcatccaatcacagtgcacggtccccttttgaaggggcagtaacagagtcacagtcgttattctcagacaattttcgccatcccaaccctatcccaagtgggcttcctcctttccccagctccccacagacatccagtgactggcctacagcaccagaaccacagagcctcttcacatcagaaacaatcccagtatcatcctctacagactggcaagcagcttttggctttggttcttctaaacaaccagaggatgacttgggttttgatcccttcgatgtcactcgaaaagccttagcagacctgattgagaaggaactgtccgttcaagaccaaccttccctttcgcccacatctcttcagaactcctcttcacacactacaaccgccaaaggtccaggctctggattcctgcatcctgctgcagctacaaatgccaattctctcaatagtaccttttcagtcttgccccagaggttccctcaatttcagcagcaccgagcggtttataattcattcagttttccaggccaggcagcccgctatccttggatggcctttccacgcaatagcatcatgcacttgaaccacacagcaaaccccacctcaaatagtaatttcttggacttgaatctcccgccacagcacaacacaggtctgggagggatccctgtagcaggggaagaagaggtgaaggtttcgaccatgccactgtcaacctcttcccattcattacaacaaggacagcagcctacaagtctccacactactgtggcctgacaacagaactgagaggagaggattagactctggggtgcttgcatgggcaactggatttttgcatgattcctttatgattttgcttttaatgtatacacccagaagagccaatataaacgttcctcatgcctacagctagcgtgttacctcatagttgttgaagtatttcttcattaggcctttaacataatttattagtgtaataattttggcattgtttctcatgagtgatactatttctaactcataaaaataaacttgtagtactaagatcccaggtgagattagctagaattgttgttattttggctctattattgaaaaattatacaaaggtaatggtagtatcttgttttctggtttgtgaaaaaataatatcctaatctcctgaaaaatttgcaaattaacaagataatgtctattgcattctttgaatacttgagaagaaagaatacatataaaacaaaattggtggtgtcatttaatgctcagaaggatattgttggcgattgtttttagttgtctagatttatatcctataatatgcattacatgtgtagaaactgttttgttctctctcttttgcacttttgcactttctttttgaatggttgttaattatgcatagatggttaaaagataattattgtagcctaaatgcaatataatctcttttctaatgcactgcctagtataccaggaaatgcctcaaaaacagaacttcagtttatagttgacttatctgaaacttgaatacggagtaaacattgtatgtgaaaagcaaccatagtagtgtaacattgttactgaacaaacagtaattctgtgggatattgttttggaaatttcattgtttaataattaaaatgtgataataagataatattataagtacctgaccagaatgagactaaggcagaagagaagagattggatgtcctctaaaattaggccacctaaattgtaacagataattttaatcaagagaatagtggagtactttattaggacataatgtgaagtgatatttctgaaaacacatttcttgaaatagttttaaaactgataataaaggaaaagaaactgtacttagtttggagcagtggacaaaagctgattcagaaaacatgaccatattctgcctacatgaagcatctgggaagaaagggaaagtcacacctcctcttgagattttaaccattatgataaaaggtatgctttaatttgttaaaaaaaaaagtatgaaaggggataatgtgaatacaaaaaagaagcctagagattgaaaataataataatagaacatgttattaggagatggtacttaatgtcatgttggagttggagttttcaaggttacctctatataaaattggattattttctgttagatataatgtgacaaattaaatgactttatcccaaggtacagtgaggtaaacaaaaatctattcttagatatccttagatttggttaactgaggctgtagaagcagcgaattgtctagccatttaagttatttttgtaaaattcagcataaacatcaatctctaatttctatctagaagtgactttaagacattacaagaacattgccaatttggaaaatgccaataaaatactgtagacttattaatattgtagacttattatcagtcttttactatagcttaatttaattatggttttcatttttactgtaagaggccaagacttcacttatgtctcctgtggagctgaggctcctgggccttgttattataacaaactctggctccttgtaatgatgcttactagctcaaagccttctccagcattcagtgttagcctttcattgcctggatcttcttacaaagccatagcaagtggttagtgccatttgctccttggtgttgagagatatacctgttaaatgaggcttctttcctttctcattcatagccagcgtggaaaaatcatcaggtagtttgcccagatttgccagagccctaaataaaatggcaaaacgatctccctgcctgcttctcctccccacccccacttacatgcacaccgtaaatcaagaaatgctttttgggcaattagactttatcttctaaatttttgcatagaatggctaaacatgatcttttgcctcactttgtaattcctacaccttccttgtaagcttcaccttttgcttacctaatattttatttaaacatggttttttaaaaaacctgaagctttaaaatcatagtcataattaattttacactaaaggacagaagaaattatacaacacataaaagaagccactacttcacatagcaagcaaattgaaatcaaaatgacagaagaatgagaaattctttaaaagcttcaggttttttttgttgttgttgttaaattcctgcatgatgcatcatgtgcaagggaaacttaatatacttttacacccttaacctttataaagtgactagcttttcccttaacataggaatttttaacctggagcccagatttttgagagtacacacaaaattgtgggtttgtgtgcatgtacatatgtccatttttttctagggagaagatccatagttattagatttgtgaaggatttggtgatccccttctcccatcaaaaaaaaaaaaaaaaagaa

SEQ ID NO: 22936 - DNA, 1719 bp, Artificial Sequence
  derived and/or modified sequence
atgagcagaagccccgacgccaaggaggaccccgtggagtgccccctgtgcatggagcccctggagatcgacgacatcaacttcttcccctgcacctgcggctaccagatctgcagattctgctggcacagaatcagaaccgacgagaacggcctgtgccccgcctgcagaaagccctaccccgaggaccccgccgtgtacaagcccctgagccaggaggagctgcagagaatcaagaacgagaagaagcagaagcagaacgagagaaagcagaagatcagcgagaacagaaagcacctggccagcgtgagagtggtgcagaagaacctggtgttcgtggtgggcctgagccagagactggccgaccccgaggtgctgaagagacccgagtacttcggcaagttcggcaagatccacaaggtggtgatcaacaacagcaccagctacgccggcagccagggccccagcgccagcgcctacgtgacctacatcagaagcgaggacgccctgagagccatccagtgcgtgaacaacgtggtggtggacggcagaaccctgaaggccagcctgggcaccaccaagtactgcagctacttcctgaagaacatgcagtgccccaagcccgactgcatgtacctgcacgagctgggcgacgaggccgccagcttcaccaaggaggagatgcaggccggcaagcaccaggagtacgagcagaagctgctgcaggagctgtacaagctgaaccccaacttcctgcagctgagcaccggcagcgtggacaagaacaagaacaaggtgacccccctgcagagccccatcgacaagcccagcgacagcctgagcatcggcaacggcgacaacagccagcagatcagcaacagcgacacccccagccccccccccggcctgagcaagagcaaccccgtgatccccatcagcagcagcaaccacagcgccagaagccccttcgagggcgccgtgaccgagagccagagcctgttcagcgacaacttcagacaccccaaccccatccccagcggcctgccccccttccccagcagcccccagaccagcagcgactggcccaccgcccccgagccccagagcctgttcaccagcgagaccatccccgtgagcagcagcaccgactggcaggccgccttcggcttcggcagcagcaagcagcccgaggacgacctgggcttcgaccccttcgacgtgaccagaaaggccctggccgacctgatcgagaaggagctgagcgtgcaggaccagcccagcctgagccccaccagcctgcagaacagcagcagccacaccaccaccgccaagggccccggcagcggcttcctgcaccccgccgccgccaccaacgccaacagcctgaacagcaccttcagcgtgctgccccagagattcccccagttccagcagcacagagccgtgtacaacagcttcagcttccccggccaggccgccagatacccctggatggccttccccagaaacagcatcatgcacctgaaccacaccgccaaccccaccagcaacagcaacttcctggacctgaacctgcccccccagcacaacaccggcctgggcggcatccccgtggccggcgaggaggaggtgaaggtgagcaccatgcccctgagcaccagcagccacagcctgcagcagggccagcagcccaccagcctgcacaccaccgtggcctag

SEQ ID NO: 22937 - protein, 224 aa, Artificial Sequence
  derived and/or modified sequence
MASLSRPSLPSCLCSFLLLLLLQVSSSYAGQFRVIGPRHPIRALVGDEVELPCRISPGKNATGMEVGWYRPPFSRVVHLYRNGKDQDGDQAPEYRGRTELLKDAIGEGKVTLRIRNVRFSDEGGFTCFFRDHSYQEEAAMELKVEDPFYWVSPGVLVLLAVLPVLLLQITVGLIFLCLQYRLRGKLRAEIENLHRTFESFGVLGPQVKEPKKTGQFLEELRNPF

SEQ ID NO: 22938 - protein, 224 aa, Artificial Sequence
  derived and/or modified sequence
MASLSRPSLPSCLCSFLLLLLLQVSSSYAGQFRVIGPRHPIRALVGDEVELPCRISPGKNATGMEVGWYRPPFSRVVHLYRNGKDQDGDQAPEYRGRTELLKDAIGEGKVTLRIRNVRFSDEGGFTCFFRDHSYQEEAAMELKVEDPFYWVSPGVLVLLAVLPVLLLQITLGLVFLCLQYRLRGKLRAEIENLHRTFESFGVLGPQVKEPKKTGQFLEELRNPF

SEQ ID NO: 22939 - protein, 224 aa, Artificial Sequence [sequence omitted]

SEQ ID NO: 22940 - DNA, 690 bp, Artificial Sequence
  derived and/or modified sequence
atggctagcctgagtcgcccctccctgccaagctgtttgtgtagcttcctgctgctgctactgctgcaggtgagcagcagttacgcaggtcagtttagggttattggccctaggcatcctatccgagcgctcgtgggtgacgaagtggagctcccctgtagaatctctcctgggaagaatgccactggaatggaggtcgggtggtataggcccccgttcagtcgagttgtgcatctttacagaaacggcaaggaccaagatggagaccaggcaccagagtatcgggggcgtacagagctcctaaaggacgccattggagagggcaaggtcactttacgaatcagaaatgtcagattttcagatgagggaggatttacgtgctttttccgcgaccactcctaccaagaggaggccgcaatggaactgaaagttgaggatcctttttactgggttagcccgggcgtccttgtccttttggcggtactgcccgtgttgttgcttcagattaccgtggggctggtcttcctctgtcttcagtatagactccgcggtaagctgcgggcggagatcgaaaatttacaccgtactttcgagtctttcggggtcctgggaccacaggtaaaagaacccaaaaagaccggacaatttctggaggagctgctgtttcatcttgaggcactttcagggtag

SEQ ID NO: 22941 - DNA, 675 bp, Artificial Sequence
  derived and/or modified sequence
atggctagtctgagcagaccgagtctgccaagttgcctatgctcatttctcctcctgttgctcctccaggtcagctcctcctacgcggggcagttccgggtgataggtccccggcaccccattagagctctggtcggggatgaggttgaattgccttgccggatatcgcccggcaagaatgccacagggatggaggtgggatggtacaggcctccgttctctcgggttgtccacctgtacaggaatggaaaggaccaggatggcgaccaggcccctgaataccgtggacgtacagaattacttaaggacgcaattggggaagggaaggttacgctgcgaatccgtaatgtccgtttttctgatgagggcggttttacatgttttttccgggaccactcttaccaggaagaggctgcgatggagctgaaggtagaggaccctttctattgggtctctcctggggttctggtcctactcgctgtcctgcccgtcctcctgctgcagataactgtgggactaatcttcttgtgcctccagtacaggcttcgagggaaactcagggctgagatcgaaaacctacacaggacctttgaatccttcggagtgctgggaccccaagtgaaggagccgaaaaagacaggacaatttctcgaagagcttcggaaccccttctag

SEQ ID NO: 22942 - DNA, 675 bp, Artificial Sequence
  derived and/or modified sequence
atggcctcgctatcacgtcccagcctccccagctgcctctgtagtttcctgctgcttctcctgcttcaggtgtcttcttcctacgctggccagttccgtgtgatcggaccgaggcaccctattcgggccttggtcggtgacgaggtggagttaccttgtcggatttctcccggcaagaatgcaactggaatggaggttggatggtataggccccctttctccagggttgtccacctgtatcggaacggcaaggatcaggatggtgatcaggcccctgaatatagagggaggactgagttactgaaggacgccatcggcgaaggcaaagtgacactgaggatccgaaacgtgcggttcagcgacgaaggtgggttcacatgcttcttccgggatcactcctaccaagaggaggctgcgatggagttaaaagtggaggacccattctattgggtaagccccggggtgctggttctcctggcggttctgcccgtgctgcttctacagatcaccttgggcttagtgtttttgtgcttgcagtaccggctgcggggcaagctgcgcgccgagatcgaaaacctccaccgaacatttgagtcatttggggtgctgggacctcaagtaaaggaaccaaagaaaacaggccaatttctagaggaactaaggaacccattttag

SEQ ID NO: 22943 - DNA, 690 bp, Artificial Sequence
  derived and/or modified sequence
atggcaagcctcagccgaccctccctcccttcatgtctgtgcagttttctgttgcttctgctgctgcaggtttcatcatcctacgccggacaattccgcgtgatcggtcctcgccaccctatcagggcactcgtcggagacgaagttgaactgccatgtcgaatcagccctggaaagaacgccactggtatggaggttggctggtatagacccccgttctccagagtggtgcacctttaccgaaacggaaaagaccaggacggggaccaggctcctgaatatcgcggacggactgagctcctaaaggacgcaattggggagggcaaagtgacactcagaatcaggaacgttagattcagcgatgaaggcggtttcacatgtttttttcgcgatcactcctaccaggaggaagccgcaatggagctgaaagttgaggacccattctactgggtgtctcctggggtgcttgttttactcgccgtcctgcccgtgctcctgctgcaaatcaccgtggggctggtgttcctgtgtctacagtaccgcctgcgtggcaagcttagagctgagattgaaaacttacatagaacatttgagtcattcggcgtgctgggtccgcaggtcaaagagcctaagaagaccggacaattcctggaggagttgctcttccacctggaagcactgagcgggtag

SEQ ID NO: 22944 - DNA, 675 bp, Artificial Sequence
  derived and/or modified sequence
atggcctctctatctagaccaagcctgccctcatgtttatgctcattcctccttctgttactactccaggtttcgtcctcgtatgccggtcagttccgcgtgattggcccaaggcatccgataagagcgttagtcggagatgaggtggagctgccctgtcgcatctcccccgggaagaatgccaccggcatggaagtcggttggtatcgtccccctttctcccgggtagtccacctgtaccgcaacggtaaggatcaagatggggatcaagcccccgaatatagaggacgtacagaattgctgaaggatgctatcggggagggcaaggtaaccctgagaatcaggaatgtgaggttcagcgacgaagggggatttacatgctttttcagagaccactcttatcaggaggaagcggctatggaattaaaagtggaagatccattctactgggttagtcccggagtacttgtcctgttagccgtgttgccagtgctcctgctccagattacagtgggcttagtcttcctgtgcctccagtatagactgaggggtaagttgagagctgaaatcgaaaaccttcatcgcacatttgagagcttcggcgtgctagggccccaagtgaaggagccgaagaaaaccggtcaatttctcgaagaattgaggaaccctttctag

SEQ ID NO: 22945 - DNA, 675 bp, Artificial Sequence
  derived and/or modified sequence
atggcttcactatctcgtccctctttgccttcttgtctatgttccttcttgcttctgctgctgctccaggtgagttcgtcctatgctggccaatttagagtgataggccctaggcaccctatccgggcacttgtgggtgatgaggtggagctgccttgtcgcataagccctggcaagaatgctaccggaatggaggtagggtggtacaggcctcccttctctcgtgtggtccacctctaccgcaacggcaaggaccaggacggcgatcaggccccagagtatcgtggcagaacggaactgctgaaagacgcaataggggagggcaaggtgaccttaaggattcgaaatgtcaggttctctgacgagggcggctttacatgcttttttcgggatcactcttatcaagaggaggcggctatggaactgaaagtggaagacccattttactgggtatcaccaggagtgctcgtcttgctggctgtcctgccagtcctgctgttacaaatcacagtaggcctggtcttcctttgcctgcagtacaggttgcgcggaaagctaagggctgagattgagaacctgcatcggacctttgagtcctttggagtgttgggccctcaggtcaaagagcctaagaaaactggccagtttcttgaggagctccggaacccgttctag

SEQ ID NO: 22946 - DNA, 675 bp, Artificial Sequence
  derived and/or modified sequence
atggcatccttgtcacgccccagccttccatcttgcttgtgtagctttctcctgttgctgcttctccaggtctccagctcatatgctggacagttccgcgtgatcggaccacgtcatccaatcagggcgcttgtgggcgacgaggtagaactgccttgtcggattagcccgggcaagaatgctaccggaatggaagttggctggtatagacctccctttagtagggtggtccacctgtatcggaacgggaaagatcaggacggtgaccaggcaccagaatatagagggcgaaccgagctgctgaaagatgccatcggggagggtaaagtaacacttcgaattcgaaacgtgagattcagtgacgagggtggcttcacatgtttcttccgggatcattcctaccaggaagaagccgccatggaactcaaggtggaggaccccttctactgggtctccccaggagtgctggtgttactggccgtacttccggtgctgctgttacagattactgtcggactggtgtttttgtgtcttcagtaccgcctgagagggaagctcagggccgagatagagaacctgcacagaacatttgaatcattcggtgtgctgggccctcaagtgaaggagccgaaaaaaacggggcagttcctggaggagctgaggaacccattttag

SEQ ID NO: 22947 - DNA, 690 bp, Artificial Sequence
  derived and/or modified sequence
atggcatcactgagcaggcccagcttgccaagttgcctgtgttctttccttctgcttctgctcctgcaggtcagcagcagttatgctgggcagttccgtgtaatcgggcctagacacccaatccgagccctcgtcggggacgaggtggaacttccctgtagaatctccccaggaaaaaacgccactggtatggaagtggggtggtaccgcccaccttttagccgcgtggtccatctgtataggaacggcaaggaccaggacggcgaccaggctcctgagtacagaggacgcacagaactgctgaaagacgccatcggggaggggaaggtcacattacgtattaggaacgtacggtttagtgatgaaggtggattcacatgttttttcagggaccacagctaccaggaggaggctgcgatggaactgaaagtggaggatcccttctactgggtgtccccaggggtgctggtcctcctcgccgtgctcccagtgcttctgctgcagattacagtggggttggtattcctctgtctgcaatacaggctgcgcggcaagctgagagctgaaatcgagaatttgcacaggacctttgagagcttcggtgtcctaggcccacaggtgaaagagcccaaaaaaactggacagtttctggaagaactcctgttccatctggaagccctctccgggtag

SEQ ID NO: 22948 - DNA, 690 bp, Artificial Sequence
  derived and/or modified sequence
atggcttctctgagcagaccatccctcccctcgtgcctgtgcagctttctgcttctcctgcttctacaggtctctagtagttacgcggggcaatttagagtaatcggtccccgccacccaatccgcgcactcgttggcgatgaagttgagttgccttgtagaatttcaccgggaaaaaacgccactgggatggaggtgggatggtaccgcccaccattttcacgcgtggttcatctctatcggaacggaaaggaccaagatggggatcaggccccagaatatcgagggcggaccgagctgctcaaggacgccataggtgaggggaaagtaaccctcaggatccgcaatgtgagattcagcgacgagggggggttcacttgtttctttcgcgatcacagctatcaggaagaggccgctatggaactgaaagtggaggaccccttttactgggtgtcacctggcgttctagtgcttctcgccgtcctgcctgtcctgctgctccaaattacagtgggcctggtcttcttatgtctacaatataggctgcgggggaagctgcgcgccgaaatagagaacctacatcgcacgttcgaatcgtttggggtgttgggacctcaagtgaaagagcctaagaaaaccggccagttcctggaggaattacttttccatcttgaggctctctccggttag

SEQ ID NO: 22949 - DNA, 675 bp, Artificial Sequence
  derived and/or modified sequence
atggctagcctttccagaccttctttgcctagttgcctgtgcagctttcttctgctgcttctgttgcaggtttcatctagctacgcaggccagttcagagtcatcggcccgcggcaccctattcgcgcactggtgggggacgaggtcgaactgccatgcagaatctctcccggaaaaaatgccactggcatggaggtgggatggtataggcctccattcagccgcgtggtccatctttaccgcaatggcaaggaccaagatggagatcaggcacctgaatatagagggaggacagaactgctgaaagacgccatcggtgaaggtaaggtgacacttcgaatcagaaatgttcgattttccgacgagggcggctttacatgcttcttccgggatcacagttaccaggaggaagccgccatggaacttaaggtggaggatccgttctactgggtgagcccgggagtgctggtccttcttgcggtgctccccgtacttctgctacagatcaccgtggggttggtcttcttgtgcctccagtacaggctgagaggcaaactgcgagccgagatcgaaaatctgcaccggacttttgagtctttcggcgtgctgggcccccaggtaaaggagcctaagaaaactgggcagttcttggaagagctccggaaccctttctag

SEQ ID NO: 22950 - DNA, 690 bp, Artificial Sequence
  derived and/or modified sequence
atggccagcctgtccagaccttcactaccctcatgcctttgcagctttctattgcttttgctactgcaggtctcttctagttatgccggtcagtttcgggtgatcggtcctcggcacccaattagagccctcgtaggggatgaggttgaattaccgtgccgtatctctccaggtaagaatgcaactggaatggaggtgggatggtataggccaccattcagccgtgtggtacatctttatagaaatggcaaagaccaggatggagatcaagctccagagtatcgggggaggaccgaactgctcaaagatgccattggcgagggaaaggttacccttcggattaggaatgtgaggttttcagacgagggaggctttacatgtttctttagagaccacagttaccaagaggaggccgctatggaactaaaggttgaggatcccttctactgggttagccccggagtgttagtacttttagctgtgctgcccgttctgcttctgcagattaccgtagggctggtgtttctgtgtttacaatatcgcttgcgggggaagctacgggccgaaatcgaaaacctccatcgaacattcgagtctttcggcgtgctcggcccccaggttaaggagcctaaaaaaaccggccagtttctggaagaactcttatttcatctcgaagctctctctggctag

SEQ ID NO: 22951 - DNA, 675 bp, Artificial Sequence
  derived and/or modified sequence
atggcctccctgtcaaggcccagcctgcccagttgtctgtgcagttttttgctgctgctgctgctgcaggtctcttcgtcatatgcagggcagttccgagtcattggtcctcggcaccccatcagggctctggtgggtgatgaggtagagcttccatgtagaattagtcccggcaagaatgcaactgggatggaggtggggtggtatcgtccgcccttctcaagggtggttcatctctatcgcaacggaaaagaccaggatggcgatcaggctccggagtataggggccgcacagaactgctcaaggacgctatcggggagggtaaggttacactgcgcatcagaaacgttcggttcagtgatgaaggtgggtttacatgcttttttagagaccatagttatcaagaggaggcagccatggagctgaaggttgaggaccccttttattgggtgtccccaggagtccttgtcctcctcgccgtactgccagtgctactactccagattaccgtcggattggtatttctgtgtctacagtatcgccttaggggaaagctgcgagctgaaatagaaaaccttcaccgtaccttcgagtccttcggtgtgctgggcccccaagtgaaggagccgaaaaagaccggccagttcctggaggaattgagaaacccattttag

SEQ ID NO: 22952 - DNA, 675 bp, Artificial Sequence
  derived and/or modified sequence
atggcaagtttatccagaccatccctgccatcttgcctatgcagtttcttactactgctcctgctgcaggtaagttcttcctacgcgggtcaattcagagtgatagggcctcgccatccaatccgggccctggtcggagacgaagtggagctcccgtgccgcattagcccagggaagaatgcaaccgggatggaagtgggctggtaccgaccccccttctccagggtagtgcacctttaccgcaatggaaaagatcaggacggtgatcaggccccagagtatagggggcgcaccgagctactgaaggatgctattggggagggaaaggtgactctgaggatcagaaacgttagattctcggatgagggaggctttacatgcttcttcagagaccacagttaccaggaggaagctgctatggagctaaaagtggaagatccgttttattgggtttccccaggagtgctcgtgctgttagctgtgctgcctgtccttctactgcagattaccgtcggtctcgtgttcctgtgcttacagtaccgcctacgcggcaagcttagggcggagatagagaacctgcacagaacgttcgaaagcttcggtgtgttaggtccgcaagtgaaggagcctaagaagacaggacagttcctcgaagagctgcggaaccccttttag

SEQ ID NO: 22953 - DNA, 690 bp, Artificial Sequence
  derived and/or modified sequence
atggcgtctctgagccggccatcacttccctcgtgcctgtgctctttcctgctgctgctgctgctccaggtgtcgtcatcctacgccgggcaattcagagttatcggaccccgacatccaatcagggcacttgtgggggatgaagtggaactcccttgcagaatttcgcccggcaagaacgctacaggcatggaggtagggtggtaccgtccacccttttctcgggtagtgcacctctatcgcaatggtaaggaccaggacggagaccaggcccccgagtaccgggggagaacagagcttcttaaggacgccataggggaggggaaggttaccctgcggattcgcaacgtacgattctccgacgagggcggttttacttgcttcttccgcgaccactcttaccaagaggaagccgctatggaacttaaagtggaggatccattctattgggtctcgcctggtgtgctagtgctcctggcagtcctgcccgttctcctacttcagataaccgtgggcctagttttcctgtgcctgcagtacaggctccggggcaagttacgcgccgaaatcgagaacttgcacagaacattcgagtcctttggggtgctcgggccccaggtgaaggagcctaagaagacaggccaatttctcgaggagctgttattccacctggaggctctgagtgggtag

SEQ ID NO: 22954 - DNA, 690 bp, Artificial Sequence
  derived and/or modified sequence
atggcgtcactctctcgcccatctctcccctcgtgtctgtgctcctttctcctgctgcttcttctacaggttagctcctcctatgcgggtcaattccgggtcattggaccaaggcatccaattcgtgctttggtgggagacgaggtggagctgccctgtaggatctctcccggcaaaaacgcaactggcatggaggttggctggtatcgtccacctttttcgcgagtcgtgcatttgtatcggaatggcaaggaccaggatggagaccaggccccagagtaccgcgggcggactgaactgctgaaggacgcaataggggaggggaaggtgactctgcgcatacgtaacgtgcggttctcagacgaaggcggattcacgtgtttcttccgtgaccattcttatcaagaggaagcagctatggagttaaaagtcgaagacccattctactgggtttctccaggcgtgcttgtactgctagccgtgctacccgtgctgcttctgcagataactctaggtctagtgtttctgtgtctccagtaccgcctgcgagggaagctccgagcagaaattgagaaccttcacaggaccttcgaatcatttggtgttctcggtcctcaggtgaaggaaccgaagaagactggacagttcctcgaagaactgctatttcacttggaagctctctccgggtag

SEQ ID NO: 22955 - DNA, 690 bp, Artificial Sequence
  derived and/or modified sequence
atggcttccttgagccgaccctcactgccatcttgcctgtgctctttcctcctgctgctgctcctgcaggtgagcagctcctatgcggggcaatttcgggtgatcggtccacgtcacccaattagggcattagtgggggacgaggtagaactcccctgtagaatctcgcctgggaagaacgcaacaggcatggaggtgggatggtaccggccccctttcagccgcgtggtccatctgtataggaatggcaaagaccaagatggagatcaagctccggagtacaggggccggaccgagctcctcaaggatgcaatcggcgaggggaaagttaccctgcgtatacgcaacgttagatttagtgatgagggggggttcacctgttttttccgggatcactcttaccaagaggaagcagccatggaattaaaagtggaggaccccttttattgggtgtcacccggcgtcttggtgttgttggcagtgctgcccgtcttactgctgcagatcacagtcggactgatcttcctttgccttcagtaccgcctgagaggtaagctgagagccgaaatcgaaaacctgcatagaaccttcgagtcttttggtgtcctgggtccacaggtcaaggagccaaaaaagacaggccagtttttggaagaattgctctttcacttggaggcactcagcgggtag

SEQ ID NO: 22956 - DNA, 690 bp, Artificial Sequence
  derived and/or modified sequence
atggccagcctgagccggcccagcctgcccagctgcctgtgcagcttcctgctgctgctgctgctgcaggtgagcagcagctatgccggccagttccgggtgattggccccaggcaccccatccgggccctggtgggagatgaggtggagctgccctgccgcatcagccctgggaagaatgccaccggcatggaggtgggctggtacagaccacccttcagccgggtggtgcacctgtacagaaatggcaaggaccaggatggagaccaggcccctgagtaccggggccgcacagagctgctgaaggatgccatcggggagggcaaggtgaccctgcgcatcagaaatgtgcgcttcagtgatgaaggaggcttcacctgcttcttccgggaccacagctaccaggaggaggccgccatggagctgaaggtggaggaccccttctactgggtgtccccaggagtgctggtgctgctggccgtgctgcctgtgctgctgctgcagatcaccgtgggcctggtgttcctgtgcctgcagtaccgcctgcggggcaagctgcgggcagaaattgagaacctgcacaggacctttgagagctttggagtgctgggcccccaggtgaaggagcccaagaagacaggccagttcctggaggagctgctcttccacctggaggccctgagcggctag

SEQ ID NO: 22957 - DNA, 675 bp, Artificial Sequence
  derived and/or modified sequence
atggccagcctgagccggcccagcctgcccagctgcctgtgcagcttcctgctgctgctgctgctgcaggtgagcagcagctatgccggccagttccgggtgattggccccaggcaccccatccgggccctggtgggagatgaggtggagctgccctgccgcatcagccctgggaagaatgccaccggcatggaggtgggctggtacagaccacccttcagccgggtggtgcacctgtacagaaatggcaaggaccaggatggagaccaggcccctgagtaccggggccgcacagagctgctgaaggatgccatcggggagggcaaggtgaccctgcgcatcagaaatgtgcgcttcagtgatgaaggaggcttcacctgcttcttccgggaccacagctaccaggaggaggccgccatggagctgaaggtggaggaccccttctactgggtgtccccaggagtgctggtgctgctggccgtgctgcctgtgctgctgctgcagatcaccgtgggcctcatcttcctgtgcctgcagtaccgcctgcggggcaagctgcgggcagaaattgagaacctgcacaggacctttgagagctttggagtgctgggcccccaggtgaaggagcccaagaagacaggccagttcctggaggagctgaggaaccccttctag

SEQ ID NO: 22958 - DNA, 675 bp, Artificial Sequence
  derived and/or modified sequence
atggccagcctgagccggcccagcctgcccagctgcctgtgcagcttcctgctgctgctgctgctgcaggtgagcagcagctatgccggccagttccgggtgattggccccaggcaccccatccgggccctggtgggagatgaggtggagctgccctgccgcatcagccctgggaagaatgccaccggcatggaggtgggctggtacagaccacccttcagccgggtggtgcacctgtacagaaatggcaaggaccaggatggagaccaggcccctgagtaccggggccgcacagagctgctgaaggatgccatcggggagggcaaggtgaccctgcgcatcagaaatgtgcgcttcagtgatgaaggaggcttcacctgcttcttccgggaccacagctaccaggaggaggccgccatggagctgaaggtggaggaccccttctactgggtgtccccaggagtgctggtgctgctggccgtgctgcctgtgctgctgctgcagatcaccctgggcctggtgttcctgtgcctgcagtaccgcctgcggggcaagctgcgggcagaaattgagaacctgcacaggacctttgagagctttggagtgctgggcccccaggtgaaggagcccaagaagacaggccagttcctggaggagctgaggaaccccttctag

SEQ ID NO: 22959 - DNA, 675 bp, Artificial Sequence
  derived and/or modified sequence
atggccagcctgagccggcccagcctgcccagctgcctgtgcagcttcctgctgctgctgctgctgcaggtgagcagcagctatgccggccagttccgggtgattggccccaggcaccccatccgggccctggtgggagatgaggtggagctgccctgccgcatcagccctgggaagaatgccaccggcatggaggtgggctggtacagaccacccttcagccgggtggtgcacctgtacagaaatggcaaggaccaggatggagaccaggcccctgagtaccggggccgcacagagctgctgaaggatgccatcggggagggcaaggtgaccctgcgcatcagaaatgtgcgcttcagtgatgaaggaggcttcacctgcttcttccgggaccacagctaccaggaggaggccgccatggagctgaaggtggaggaccccttctactgggtgtccccaggagtgctggtgctgctggccgtgctgcctgtgctgctgctgcagatcaccgtgggcctggtgttcctgtgcctgcagtaccgcctgcggggcaagctgcgggcagaaattgagaacctgcacaggacctttgagagctttggagtgctgggcccccaggtgaaggagcccaagaagacaggccagttcctggaggagctgaggaaccccttctag

SEQ ID NO: 22960 - DNA, 690 bp, Artificial Sequence
  derived and/or modified sequence
atggccagcctgagccggcccagcctgcccagctgcctgtgcagcttcctgctgctgctgctgctgcaggtgagcagcagctatgccggccagttccgggtgattggccccaggcaccccatccgggccctggtgggagatgaggtggagctgccctgccgcatcagccctgggaagaatgccaccggcatggaggtgggctggtacagaccacccttcagccgggtggtgcacctgtacagaaatggcaaggaccaggatggagaccaggcccctgagtaccggggccgcacagagctgctgaaggatgccatcggggagggcaaggtgaccctgcgcatcagaaatgtgcgcttcagtgatgaaggaggcttcacctgcttcttccgggaccacagctaccaggaggaggccgccatggagctgaaggtggaggaccccttctactgggtgtccccaggagtgctggtgctgctggccgtgctgcctgtgctgctgctgcagatcaccctgggcctggtgttcctgtgcctgcagtaccgcctgcggggcaagctgcgggcagaaattgagaacctgcacaggacctttgagagctttggagtgctgggcccccaggtgaaggagcccaagaagacaggccagttcctggaggagctgctcttccacctggaggccctgagcggctag

SEQ ID NO: 22961 - DNA, 690 bp, Artificial Sequence
  derived and/or modified sequence
atggccagcctgagccggcccagcctgcccagctgcctgtgcagcttcctgctgctgctgctgctgcaggtgagcagcagctatgccggccagttccgggtgattggccccaggcaccccatccgggccctggtgggagatgaggtggagctgccctgccgcatcagccctgggaagaatgccaccggcatggaggtgggctggtacagaccacccttcagccgggtggtgcacctgtacagaaatggcaaggaccaggatggagaccaggcccctgagtaccggggccgcacagagctgctgaaggatgccatcggggagggcaaggtgaccctgcgcatcagaaatgtgcgcttcagtgatgaaggaggcttcacctgcttcttccgggaccacagctaccaggaggaggccgccatggagctgaaggtggaggaccccttctactgggtgtccccaggagtgctggtgctgctggccgtgctgcctgtgctgctgctgcagatcaccgtgggcctcatcttcctgtgcctgcagtaccgcctgcggggcaagctgcgggcagaaattgagaacctgcacaggacctttgagagctttggagtgctgggcccccaggtgaaggagcccaagaagacaggccagttcctggaggagctgctcttccacctggaggccctgagcggctag

SEQ ID NO: 22962 - DNA, 1616 bp, Artificial Sequence
  derived and/or modified sequence
atggcaagcttatcgagaccctctctgcccagctgcctctgctccttcctcctcctcctcctcctccaagtgtcttccagctatgcagggcagttcagagtgataggaccaagacaccctatccgggctctggtcggggatgaagtggaattgccatgtcgcatatctcctgggaagaacgctacaggcatggaggtggggtggtaccgcccccccttctctagggtggttcatctctacagaaatggcaaggaccaagatggagaccaggcacctgaatatcggggccggacagagctgctgaaagatgctattggtgagggaaaggtgactctcaggatccggaatgtaaggttctcagatgaaggaggtttcacctgcttcttccgagatcattcttaccaagaggaggcagcaatggaattgaaagtagaagatcctttctactgggtgagccctggagtgctggttctcctcgcggtgctgcctgtgctcctcctgcagatcactgttggcctcgtcttcctctgcctgcagtacagactgagaggaaaacttcgagcagagatagagaatctccaccggacttttgagtcctttggtgttctaggaccccaggttaaggaaccaaaaaagacagggcaattccttgaagagctactcttccacctggaagccctctctggctaaggacaggcaggtgcccctctctccatcagaggacacctgtactggagagcaacacaggatggtctctgccatgaactggaggccaggaatctcctcactgaaaattacagtatggtaactttgcaaatggtggttgtttcttccaagactccagccctgattgcgcaaaactgaaaggcatgtgaagggaaggaagaggaagagtgcaaaacattgaagagagagctgagtgagctgaagagtgaggatatgagtagccccaacccaaacctggagatggggagaaacctacagaatactagccagagctcctccttgtcttggcagcctactagggacctggggaagcaaaaacgaaagctgggcaacatgcctgctttagaatgttttccttctacttacacatcttccacaggtctcagaatctttccttcctctcatccttttctcctatcttcatatctatcagagtatccactgtttattcaacaactactacttgatggtcagacacaaacaaacaagctaggtgctaattaataaagatatgagttttggccgggtgcggtggctcacgcctgtaatcccagcactttgggaggccgaggcgggcgaatcacgaggtcaggagttcgagaccagcctggccaacatggtgaaaccccatctctactaaaaatacaaacaattaactgagcatagtggtgggcacctataataccagctactccggaggctgaggcaggagaatcgcttgaacccaggaggcagaggttgcagtgagctgagatcgcgccactgcactctagccagagtgacagagtaagactctgtctcaaaaataaataaataaataaataaataaataaataaataaataaataaataaaaaataataatacaagttttcataagcacacttctaa

SEQ ID NO: 22963 - DNA, 675 bp, Artificial Sequence
  derived and/or modified sequence
atggcaagcttatcaagaccctctctgcccagctgcctctgctccttcctcctcctcctcctcctccaagtgtcttccagctatgcagggcagttcagagtgataggaccaagacaccctatccgggctctggtcggggatgaagtggaattgccatgtcgcatatctcctgggaagaacgctacaggcatggaggtggggtggtaccgcccccccttctctagggtggttcatctctacagaaatggcaaggaccaagatggagaccaggcacctgaatatcggggccggacagagctgctgaaagatgctattggtgagggaaaggtgactctcaggatccggaatgtaaggttctcagatgaaggaggtttcacctgcttcttccgagatcattcttaccaagaggaggcagcaatggaattgaaagtagaagatcctttctactgggtgagccctggagtgctggttctcctcgcggtgctgcctgtgctcctcctgcagatcactgttggcctcatcttcctctgcctgcagtacagactgagaggaaaacttcgagcagagatagagaatctccaccggacttttgagtcctttggtgttctaggaccccaggttaaggaaccaaaaaagacagggcaattccttgaagagctacgaaatcccttctga

SEQ ID NO: 22964 - DNA, 1858 bp, Artificial Sequence
  derived and/or modified sequence
atggcaagcttatcgagaccctctctgcccagctgcctctgctccttcctcctcctcctcctcctccaagtgtcttccagctatgcagggcagttcagagtgataggaccaagacaccctatccgggctctggtcggggatgaagtggaattgccatgtcgcatatctcctgggaagaacgctacaggcatggaggtggggtggtaccgcccccccttctctagggtggttcatctctacagaaatggcaaggaccaagatggagaccaggcacctgaatatcggggccggacagagctgctgaaagatgctattggtgagggaaaggtgactctcaggatccggaatgtaaggttctcagatgaaggaggtttcacctgcttcttccgagatcattcttaccaagaggaggcagcaatggaattgaaagtagaagatcctttctactgggtgagccctggagtgctggttctcctcgcggtgctgcctgtgctcctcctgcagatcactcttggcctcgtcttcctctgcctgcagtacagactgagaggaaaacttcgagcagagatagagaatctccaccggacttttgagtcctttggtgttctaggaccccaggttaaggaaccaaaaaagacagggcaattccttgaagagctacgaaatcccttctgagtgatgtcacatcttggcaggggtggaggagagcctggttgcccagggatttgtccttggggacatctcatccatcaagttgcacactcactggcatctttgctatggggacattccaatttgcactttcaggaacactctgaattccaagtagaattgatttcccttcttctgtcatctaccttttctcttcattttcccatttttattacccttctttccatttctctctccagtcttccacctggaagccctctctggctaaggacaggcaggtgcccctctctccatcagaggacacctgtactggagagcaacacaggatggtctctgccatgaactggaggccaggaatctcctcactgaaaattacagtatggtaactttgcaaatggtggttgtttcttccaagactccagccctgattgcgcaaaactgaaaggcatgtgaagggaaggaagaggaagagtgcaaaacattgaagagagagctgagtgagctgaagagtgaggatatgagtagccccaacccaaacctggagatggggagaaacctacagaatactagccagagctcctccttgtcttggcagcctactagggacctggggaagcaaaaacgaaagctgggcaacatgcctgctttagaatgttttccttctacttacacatcttccacaggtctcagaatctttccttcctctcatccttttctcctatcttcatatctatcagagtatccactgtttattcaacaactactacttgatggtcagacacaaacaaacaagctaggtgctaattaataaagatacgagttttggccgggtgcggtggctcacgcctgtaatcccagcactttgggaggccgaggcgggcgaatcacgaggtcaggagttcaagaccagcctggccaacatggtgaaaccccatctctactaaaaatacaaacaattaactgagcatagtggtgggcacctataataccagctactccggaggctgaggcaggagaatcgcttgaacccaggaggcagaggttgcagtgagctgagatcgcgccactgcactctagccggagtgacagagtaagactctgtctcaaaaataaataaataaataaataaataaataaataaataaataaaaaataataatacaagttttcataagcacacttctaa

SEQ ID NO: 22965 - DNA, 1620 bp, Artificial Sequence
  derived and/or modified sequence
atggcaagcttatcgagaccctctctgcccagctgcctctgctccttcctcctcctcctcctcctccaagtgtcttccagctatgcagggcagttcagagtgataggaccaagacaccctatccgggctctggtcggggatgaagtggaattgccatgtcgcatatctcctgggaagaacgctacaggcatggaggtggggtggtaccgcccccccttctctagggtggttcatctctacagaaatggcaaggaccaagatggagaccaggcacctgaatatcggggccggacagagctgctgaaagatgctattggtgagggaaaggtgactctcaggatccggaatgtaaggttctcagatgaaggaggtttcacctgcttcttccgagatcattcttaccaagaggaggcagcaatggaattgaaagtagaagatcctttctactgggtgagccctggagtgctggttctcctcgcggtgctgcctgtgctcctcctgcagatcactgttggcctcgtcttcctctgcctgcagtacagactgagaggaaaacttcgagcagagatagagaatctccaccggacttttgagtcctttggtgttctaggaccccaggttaaggaaccaaaaaagacagggcaattccttgaagagctactcttccacctggaagccctctctggctaaggacaggcaggtgcccctctctccatcagaggacacctgtactggagagcaacacaggatggtctctgccatgaactggaggccaggaatctcctcactgaaaattacagtatggtaactttgcaaatggtggttgtttcttccaagactccagccctgattgcgcaaaactgaaaggcatgtgaagggaaggaagaggaagagtgcaaaacattgaagagagagctgagtgagctgaagagtgaggatatgagtagccccaacccaaacctggagatggggagaaacctacagaatactagccagagctcctccttgtcttggcagcctactagggacctggggaagcaaaaacgaaagctgggcaacatgcctgctttagaatgttttccttctacttacacatcttccacaggtctcagaatctttccttcctctcatccttttctcctatcttcatatctatcagagtatccactgtttattcaacaactactacttgatggtcagacacaaacaaacaagctaggtgctaattaataaagatacgagttttggccgggtgcggtggctcacgcctgtaatcccagcactttgggaggccgaggcgggcgaatcacgaggtcaggagttcaagaccagcctggccaacatggtgaaaccccatctctactaaaaatacaaacaattaactgagcatagtggtgggcacctataataccagctactccggaggctgaggcaggagaatcgcttgaacccaggaggcagaggttgcagtgagctgagatcgcgccactgcactctagccggagtgacagagtaagactctgtctcaaaaataaataaataaataaataaataaataaataaataaataaataaataaataaaaaataataatacaagttttcataagcacacttctaa

SEQ ID NO: 22966 - DNA, 1870 bp, Artificial Sequence
  derived and/or modified sequence
atggcaagcttatcgagaccctctctgcccagctgcctctgctccttcctcctcctcctcctcctccaagtgtcttccagctatgcagggcagttcagagtgataggaccaagacaccctatccgggctctggtcggggatgaagtggaattgccatgtcgcatatctcctgggaagaacgctacaggcatggaggtggggtggtaccgcccccccttctctagggtggttcatctctacagaaatggcaaggaccaagatggagaccaggcacctgaatatcggggccggacagagctgctgaaagatgctattggtgagggaaaggtgactctcaggatccggaatgtaaggttctcagatgaaggaggtttcacctgcttcttccgagatcattcttaccaagaggaggcagcaatggaattgaaagtagaagatcctttctactgggtgagccctggagtgctggttctcctcgcggtgctgcctgtgctcctcctgcagatcactgttggcctcgtcttcctctgcctgcagtacagactgagaggaaaacttcgagcagagatagagaatctccaccggacttttgagtcctttggtgttctaggaccccaggttaaggaaccaaaaaagacagggcaattccttgaagagctacgaaatcccttctgagtgatgtcacatcttggcaggggtggaggagagcctggttgcccagggatttgtccttggggacatctcatccatcaagttgcacactcactggcatctttgctatggggacattccaatttgcactttcaggaacactctgaattccaagtagaattgatttcccttcttctgtcatctaccttttctcttcattttcccatttttattacccttctttccatttctctctccagtcttccacctggaagccctctctggctaaggacaggcaggtgcccctctctccatcagaggacacctgtactggagagcaacacaggatggtctctgccatgaactggaggccaggaatctcctcactgaaaattacagtatggtaactttgcaaatggtggttgtttcttccaagactccagccctgattgcgcaaaactgaaaggcatgtgaagggaaggaagaggaagagtgcaaaacattgaagagagagctgagtgagctgaagagtgaggatatgagtagccccaacccaaacctggagatggggagaaacctacagaatactagccagagctcctccttgtcttggcagcctactagggacctggggaagcaaaaacgaaagctgggcaacatgcctgctttagaatgttttccttctacttacacatcttccacaggtctcagaatctttccttcctctcatccttttctcctatcttcatatctatcagagtatccactgtttattcaacaactactacttgatggtcagacacaaacaaacaagctaggtgctaattaataaagatacgagttttggccgggtgcggtggctcacgcctgtaatcccagcactttgggaggccgaggcgggcgaatcacgaggtcaggagttcaagaccagcctggccaacatggtgaaaccccatctctactaaaaatacaaacaattaactgagcatagtggtgggcacctataataccagctactccggaggctgaggcaggagaatcgcttgaacccaggaggcagaggttgcagtgagctgagatcgcgccactgcactctagccggagtgacagagtaagactctgtctcaaaaataaataaataaataaataaataaataaataaataaataaataaataaataaaaaataataatacaagttttcataagcacacttctaa

SEQ ID NO: 22967 - DNA, 1866 bp, Artificial Sequence
  derived and/or modified sequence
atggcaagcttatcgagaccctctctgcccagctgcctctgctccttcctcctcctcctcctcctccaagtgtcttccagctatgcagggcagttcagagtgataggaccaagacaccctatccgggctctggtcggggatgaagtggaattgccatgtcgcatatctcctgggaagaacgctacaggcatggaggtggggtggtaccgcccccccttctctagggtggttcatctctacagaaatggcaaggaccaagatggagaccaggcacctgaatatcggggccggacagagctgctgaaagatgctattggtgagggaaaggtgactctcaggatccggaatgtaaggttctcagatgaaggaggtttcacctgcttcttccgagatcattcttaccaagaggaggcagcaatggaattgaaagtagaagatcctttctactgggtgagccctggagtgctggttctcctcgcggtgctgcctgtgctcctcctgcagatcactgttggcctcgtcttcctctgcctgcagtacagactgagaggaaaacttcgagcagagatagagaatctccaccggacttttgagtcctttggtgttctaggaccccaggttaaggaaccaaaaaagacagggcaattccttgaagagctacgaaatcccttctgagtgatgtcacatcttggcaggggtggaggagagcctggttgcccagggatttgtccttggggacatctcatccatcaagttgcacactcactggcatctttgctatggggacattccaatttgcactttcaggaacactctgaattccaagtagaattgatttcccttcttctgtcatctaccttttctcttcattttcccatttttattacccttctttccatttctctctccagtcttccacctggaagccctctctggctaaggacaggcaggtgcccctctctccatcagaggacacctgtactggagagcaacacaggatggtctctgccatgaactggaggccaggaatctcctcactgaaaattacagtatggtaactttgcaaatggtggttgtttcttccaagactccagccctgattgcgcaaaactgaaaggcatgtgaagggaaggaagaggaagagtgcaaaacattgaagagagagctgagtgagctgaagagtgaggatatgagtagccccaacccaaacctggagatggggagaaacctacagaatactagccagagctcctccttgtcttggcagcctactagggacctggggaagcaaaaacgaaagctgggcaacatgcctgctttagaatgttttccttctacttacacatcttccacaggtctcagaatctttccttcctctcatccttttctcctatcttcatatctatcagagtatccactgtttattcaacaactactacttgatggtcagacacaaacaaacaagctaggtgctaattaataaagatatgagttttggccgggtgcggtggctcacgcctgtaatcccagcactttgggaggccgaggcgggcgaatcacgaggtcaggagttcgagaccagcctggccaacatggtgaaaccccatctctactaaaaatacaaacaattaactgagcatagtggtgggcacctataataccagctactccggaggctgaggcaggagaatcgcttgaacccaggaggcagaggttgcagtgagctgagatcgcgccactgcactctagccagagtgacagagtaagactctgtctcaaaaataaataaataaataaataaataaataaataaataaataaataaataaaaaataataatacaagttttcataagcacacttctaa

SEQ ID NO: 22968 - DNA, 1866 bp, Artificial Sequence
  derived and/or modified sequence
atggcaagcttatcgagaccctctctgcccagctgcctctgctccttcctcctcctcctcctcctccaagtgtcttccagctatgcagggcagttcagagtgataggaccaagacaccctatccgggctctggtcggggatgaagtggaattgccatgtcgcatatctcctgggaagaacgctacaggcatggaggtggggtggtaccgcccccccttctctagggtggttcatctctacagaaatggcaaggaccaagatggagaccaggcacctgaatatcggggccggacagagctgctgaaagatgctattggtgagggaaaggtgactctcaggatccggaatgtaaggttctcagatgaaggaggtttcacctgcttcttccgagatcattcttaccaagaggaggcagcaatggaattgaaagtagaagatcctttctactgggtgagccctggagtgctggttctcctcgcggtgctgcctgtgctcctcctgcagatcactgttggcctcgtcttcctctgcctgcagtacagactgagaggaaaacttcgagcagagatagagaatctccaccggacttttgagtcctttggtgttctaggaccccaggttaaggaaccaaaaaagacagggcaattccttgaagagctacgaaatcccttctgagtgatgtcacatcttggcaggggtggaggagagcctggttgcccagggatttgtccttggggacatctcatccatcaagttgcacactcactggcatctttgctatggggacattccaatttgcactttcaggaacactctgaattccaagtagaattgatttcccttcttctgtcatctaccttttctcttcattttcccatttttattacccttctttccatttctctctccagtcttccacctggaagccctctctggctaaggacaggcaggtgcccctctctccatcagaggacacctgtactggagagcaacacaggatggtctctgccatgaactggaggccaggaatctcctcactgaaaattacagtatggtaactttgcaaatggtggttgtttcttccaagactccagccctgattgcgcaaaactgaaaggcatgtgaagggaaggaagaggaagagtgcaaaacattgaagagagagctgagtgagctgaagagtgaggatatgagtagccccaacccaaacctggagatggggagaaacctacagaatactagccagagctcctccttgtcttggcagcctactagggacctggggaagcaaaaacgaaagctgggcaacatgcctgctttagaatgttttccttctacttacacatcttccacaggtctcagaatctttccttcctctcatccttttctcctatcttcatatctatcagagtatccactgtttattcaacaactactacttgatggtcagacacaaacaaacaagctaggtgctaattaataaagatacgagttttggccgggtgcggtggctcacgcctgtaatcccagcactttgggaggccgaggcgggcgaatcacgaggtcaggagttcaagaccagcctggccaacatggtgaaaccccatctctactaaaaatacaaacaattaactgagcatagtggtgggcacctataataccagctactccggaggctgaggcaggagaatcgcttgaacccaggaggcagaggttgcagtgagctgagatcgcgccactgcactctagccggagtgacagagtaagactctgtctcaaaaataaataaataaataaataaataaataaataaataaataaataaataaaaaataataatacaagttttcataagcacacttctaa

SEQ ID NO: 22969 - DNA, 1612 bp, Artificial Sequence
  derived and/or modified sequence
atggcaagcttatcgagaccctctctgcccagctgcctctgctccttcctcctcctcctcctcctccaagtgtcttccagctatgcagggcagttcagagtgataggaccaagacaccctatccgggctctggtcggggatgaagtggaattgccatgtcgcatatctcctgggaagaacgctacaggcatggaggtggggtggtaccgcccccccttctctagggtggttcatctctacagaaatggcaaggaccaagatggagaccaggcacctgaatatcggggccggacagagctgctgaaagatgctattggtgagggaaaggtgactctcaggatccggaatgtaaggttctcagatgaaggaggtttcacctgcttcttccgagatcattcttaccaagaggaggcagcaatggaattgaaagtagaagatcctttctactgggtgagccctggagtgctggttctcctcgcggtgctgcctgtgctcctcctgcagatcactgttggcctcgtcttcctctgcctgcagtacagactgagaggaaaacttcgagcagagatagagaatctccaccggacttttgagtcctttggtgttctaggaccccaggttaaggaaccaaaaaagacagggcaattccttgaagagctactcttccacctggaagccctctctggctaaggacaggcaggtgcccctctctccatcagaggacacctgtactggagagcaacacaggatggtctctgccatgaactggaggccaggaatctcctcactgaaaattacagtatggtaactttgcaaatggtggttgtttcttccaagactccagccctgattgcgcaaaactgaaaggcatgtgaagggaaggaagaggaagagtgcaaaacattgaagagagagctgagtgagctgaagagtgaggatatgagtagccccaacccaaacctggagatggggagaaacctacagaatactagccagagctcctccttgtcttggcagcctactagggacctggggaagcaaaaacgaaagctgggcaacatgcctgctttagaatgttttccttctacttacacatcttccacaggtctcagaatctttccttcctctcatccttttctcctatcttcatatctatcagagtatccactgtttattcaacaactactacttgatggtcagacacaaacaaacaagctaggtgctaattaataaagatacgagttttggccgggtgcggtggctcacgcctgtaatcccagcactttgggaggccgaggcgggcgaatcacgaggtcaggagttcaagaccagcctggccaacatggtgaaaccccatctctactaaaaatacaaacaattaactgagcatagtggtgggcacctataataccagctactccggaggctgaggcaggagaatcgcttgaacccaggaggcagaggttgcagtgagctgagatcgcgccactgcactctagccggagtgacagagtaagactctgtctcaaaaataaataaataaataaataaataaataaataaataaataaataaaaaataataatacaagttttcataagcacacttctaa

SEQ ID NO: 22970 - DNA, 1862 bp, Artificial Sequence
  derived and/or modified sequence
atggcaagcttatcgagaccctctctgcccagctgcctctgctccttcctcctcctcctcctcctccaagtgtcttccagctatgcagggcagttcagagtgataggaccaagacaccctatccgggctctggtcggggatgaagtggaattgccatgtcgcatatctcctgggaagaacgctacaggcatggaggtggggtggtaccgcccccccttctctagggtggttcatctctacagaaatggcaaggaccaagatggagaccaggcacctgaatatcggggccggacagagctgctgaaagatgctattggtgagggaaaggtgactctcaggatccggaatgtaaggttctcagatgaaggaggtttcacctgcttcttccgagatcattcttaccaagaggaggcagcaatggaattgaaagtagaagatcctttctactgggtgagccctggagtgctggttctcctcgcggtgctgcctgtgctcctcctgcagatcactgttggcctcgtcttcctctgcctgcagtacagactgagaggaaaacttcgagcagagatagagaatctccaccggacttttgagtcctttggtgttctaggaccccaggttaaggaaccaaaaaagacagggcaattccttgaagagctacgaaatcccttctgagtgatgtcacatcttggcaggggtggaggagagcctggttgcccagggatttgtccttggggacatctcatccatcaagttgcacactcactggcatctttgctatggggacattccaatttgcactttcaggaacactctgaattccaagtagaattgatttcccttcttctgtcatctaccttttctcttcattttcccatttttattacccttctttccatttctctctccagtcttccacctggaagccctctctggctaaggacaggcaggtgcccctctctccatcagaggacacctgtactggagagcaacacaggatggtctctgccatgaactggaggccaggaatctcctcactgaaaattacagtatggtaactttgcaaatggtggttgtttcttccaagactccagccctgattgcgcaaaactgaaaggcatgtgaagggaaggaagaggaagagtgcaaaacattgaagagagagctgagtgagctgaagagtgaggatatgagtagccccaacccaaacctggagatggggagaaacctacagaatactagccagagctcctccttgtcttggcagcctactagggacctggggaagcaaaaacgaaagctgggcaacatgcctgctttagaatgttttccttctacttacacatcttccacaggtctcagaatctttccttcctctcatccttttctcctatcttcatatctatcagagtatccactgtttattcaacaactactacttgatggtcagacacaaacaaacaagctaggtgctaattaataaagatacgagttttggccgggtgcggtggctcacgcctgtaatcccagcactttgggaggccgaggcgggcgaatcacgaggtcaggagttcaagaccagcctggccaacatggtgaaaccccatctctactaaaaatacaaacaattaactgagcatagtggtgggcacctataataccagctactccggaggctgaggcaggagaatcgcttgaacccaggaggcagaggttgcagtgagctgagatcgcgccactgcactctagccggagtgacagagtaagactctgtctcaaaaataaataaataaataaataaataaataaataaataaataaataaaaaataataatacaagttttcataagcacacttctaa

SEQ ID NO: 22971 - DNA, 1616 bp, Artificial Sequence
  derived and/or modified sequence
atggcaagcttatcgagaccctctctgcccagctgcctctgctccttcctcctcctcctcctcctccaagtgtcttccagctatgcagggcagttcagagtgataggaccaagacaccctatccgggctctggtcggggatgaagtggaattgccatgtcgcatatctcctgggaagaacgctacaggcatggaggtggggtggtaccgcccccccttctctagggtggttcatctctacagaaatggcaaggaccaagatggagaccaggcacctgaatatcggggccggacagagctgctgaaagatgctattggtgagggaaaggtgactctcaggatccggaatgtaaggttctcagatgaaggaggtttcacctgcttcttccgagatcattcttaccaagaggaggcagcaatggaattgaaagtagaagatcctttctactgggtgagccctggagtgctggttctcctcgcggtgctgcctgtgctcctcctgcagatcactgttggcctcgtcttcctctgcctgcagtacagactgagaggaaaacttcgagcagagatagagaatctccaccggacttttgagtcctttggtgttctaggaccccaggttaaggaaccaaaaaagacagggcaattccttgaagagctactcttccacctggaagccctctctggctaaggacaggcaggtgcccctctctccatcagaggacacctgtactggagagcaacacaggatggtctctgccatgaactggaggccaggaatctcctcactgaaaattacagtatggtaactttgcaaatggtggttgtttcttccaagactccagccctgattgcgcaaaactgaaaggcatgtgaagggaaggaagaggaagagtgcaaaacattgaagagagagctgagtgagctgaagagtgaggatatgagtagccccaacccaaacctggagatggggagaaacctacagaatactagccagagctcctccttgtcttggcagcctactagggacctggggaagcaaaaacgaaagctgggcaacatgcctgctttagaatgttttccttctacttacacatcttccacaggtctcagaatctttccttcctctcatccttttctcctatcttcatatctatcagagtatccactgtttattcaacaactactacttgatggtcagacacaaacaaacaagctaggtgctaattaataaagatacgagttttggccgggtgcggtggctcacgcctgtaatcccagcactttgggaggccgaggcgggcgaatcacgaggtcaggagttcaagaccagcctggccaacatggtgaaaccccatctctactaaaaatacaaacaattaactgagcatagtggtgggcacctataataccagctactccggaggctgaggcaggagaatcgcttgaacccaggaggcagaggttgcagtgagctgagatcgcgccactgcactctagccggagtgacagagtaagactctgtctcaaaaataaataaataaataaataaataaataaataaataaataaataaataaaaaataataatacaagttttcataagcacacttctaa

SEQ ID NO: 22972 - DNA, 1862 bp, Artificial Sequence
  derived and/or modified sequence
atggcaagcttatcgagaccctctctgcccagctgcctctgctccttcctcctcctcctcctcctccaagtgtcttccagctatgcagggcagttcagagtgataggaccaagacaccctatccgggctctggtcggggatgaagtggaattgccatgtcgcatatctcctgggaagaacgctacaggcatggaggtggggtggtaccgcccccccttctctagggtggttcatctctacagaaatggcaaggaccaagatggagaccaggcacctgaatatcggggccggacagagctgctgaaagatgctattggtgagggaaaggtgactctcaggatccggaatgtaaggttctcagatgaaggaggtttcacctgcttcttccgagatcattcttaccaagaggaggcagcaatggaattgaaagtagaagatcctttctactgggtgagccctggagtgctggttctcctcgcggtgctgcctgtgctcctcctgcagatcactgttggcctcgtcttcctctgcctgcagtacagactgagaggaaaacttcgagcagagatagagaatctccaccggacttttgagtcctttggtgttctaggaccccaggttaaggaaccaaaaaagacagggcaattccttgaagagctacgaaatcccttctgagtgatgtcacatcttggcaggggtggaggagagcctggttgcccagggatttgtccttggggacatctcatccatcaagttgcacactcactggcatctttgctatggggacattccaatttgcactttcaggaacactctgaattccaagtagaattgatttcccttcttctgtcatctaccttttctcttcattttcccatttttattacccttctttccatttctctctccagtcttccacctggaagccctctctggctaaggacaggcaggtgcccctctctccatcagaggacacctgtactggagagcaacacaggatggtctctgccatgaactggaggccaggaatctcctcactgaaaattacagtatggtaactttgcaaatggtggttgtttcttccaagactccagccctgattgcgcaaaactgaaaggcatgtgaagggaaggaagaggaagagtgcaaaacattgaagagagagctgagtgagctgaagagtgaggatatgagtagccccaacccaaacctggagatggggagaaacctacagaatactagccagagctcctccttgtcttggcagcctactagggacctggggaagcaaaaacgaaagctgggcaacatgcctgctttagaatgttttccttctacttacacatcttccacaggtctcagaatctttccttcctctcatccttttctcctatcttcatatctatcagagtatccactgtttattcaacaactactacttgatggtcagacacaaacaaacaagctaggtgctaattaataaagatacgagttttggccgggtgcggtggctcacgcctgtaatcccagcactttgggaggccgaggcgggcgaatcacgaggtcaggagttcgagaccagcctggccaacatggtgaaaccccatctctactaaaaatacaaacaattaactgagcatagtggtgggcacctataataccagctactccggaggctgaggcaggagaatcgcttgaacccaggaggcagaggttgcagtgagctgagatcgcgccactgcactctagccagagtgacagagtaagactctgtctcaaaaataaataaataaataaataaataaataaataaataaataaataaaaaataataatacaagttttcataagcacacttctaa

SEQ ID NO: 22973 - DNA, 1612 bp, Artificial Sequence
  derived and/or modified sequence
atggcaagcttatcgagaccctctctgcccagctgcctctgctccttcctcctcctcctcctcctccaagtgtcttccagctatgcagggcagttcagagtgataggaccaagacaccctatccgggctctggtcggggatgaagtggaattgccatgtcgcatatctcctgggaagaacgctacaggcatggaggtggggtggtaccgcccccccttctctagggtggttcatctctacagaaatggcaaggaccaagatggagaccaggcacctgaatatcggggccggacagagctgctgaaagatgctattggtgagggaaaggtgactctcaggatccggaatgtaaggttctcagatgaaggaggtttcacctgcttcttccgagatcattcttaccaagaggaggcagcaatggaattgaaagtagaagatcctttctactgggtgagccctggagtgctggttctcctcgcggtgctgcctgtgctcctcctgcagatcactgttggcctcgtcttcctctgcctgcagtacagactgagaggaaaacttcgagcagagatagagaatctccaccggacttttgagtcctttggtgttctaggaccccaggttaaggaaccaaaaaagacagggcaattccttgaagagctactcttccacctggaagccctctctggctaaggacaggcaggtgcccctctctccatcagaggacacctgtactggagagcaacacaggatggtctctgccatgaactggaggccaggaatctcctcactgaaaattacagtatggtaactttgcaaatggtggttgtttcttccaagactccagccctgattgcgcaaaactgaaaggcatgtgaagggaaggaagaggaagagtgcaaaacattgaagagagagctgagtgagctgaagagtgaggatatgagtagccccaacccaaacctggagatggggagaaacctacagaatactagccagagctcctccttgtcttggcagcctactagggacctggggaagcaaaaacgaaagctgggcaacatgcctgctttagaatgttttccttctacttacacatcttccacaggtctcagaatctttccttcctctcatccttttctcctatcttcatatctatcagagtatccactgtttattcaacaactactacttgatggtcagacacaaacaaacaagctaggtgctaattaataaagatacgagttttggccgggtgcggtggctcacgcctgtaatcccagcactttgggaggccgaggcgggcgaatcacgaggtcaggagttcgagaccagcctggccaacatggtgaaaccccatctctactaaaaatacaaacaattaactgagcatagtggtgggcacctataataccagctactccggaggctgaggcaggagaatcgcttgaacccaggaggcagaggttgcagtgagctgagatcgcgccactgcactctagccagagtgacagagtaagactctgtctcaaaaataaataaataaataaataaataaataaataaataaataaataaaaaataataatacaagttttcataagcacacttctaa

SEQ ID NO: 22974 - DNA, 1608 bp, Artificial Sequence
  derived and/or modified sequence
atggcaagcttatcgagaccctctctgcccagctgcctctgctccttcctcctcctcctcctcctccaagtgtcttccagctatgcagggcagttcagagtgataggaccaagacaccctatccgggctctggtcggggatgaagtggaattgccatgtcgcatatctcctgggaagaacgctacaggcatggaggtggggtggtaccgcccccccttctctagggtggttcatctctacagaaatggcaaggaccaagatggagaccaggcacctgaatatcggggccggacagagctgctgaaagatgctattggtgagggaaaggtgactctcaggatccggaatgtaaggttctcagatgaaggaggtttcacctgcttcttccgagatcattcttaccaagaggaggcagcaatggaattgaaagtagaagatcctttctactgggtgagccctggagtgctggttctcctcgcggtgctgcctgtgctcctcctgcagatcactcttggcctcgtcttcctctgcctgcagtacagactgagaggaaaacttcgagcagagatagagaatctccaccggacttttgagtcctttggtgttctaggaccccaggttaaggaaccaaaaaagacagggcaattccttgaagagctactcttccacctggaagccctctctggctaaggacaggcaggtgcccctctctccatcagaggacacctgtactggagagcaacacaggatggtctctgccatgaactggaggccaggaatctcctcactgaaaattacagtatggtaactttgcaaatggtggttgtttcttccaagactccagccctgattgcgcaaaactgaaaggcatgtgaagggaaggaagaggaagagtgcaaaacattgaagagagagctgagtgagctgaagagtgaggatatgagtagccccaacccaaacctggagatggggagaaacctacagaatactagccagagctcctccttgtcttggcagcctactagggacctggggaagcaaaaacgaaagctgggcaacatgcctgctttagaatgttttccttctacttacacatcttccacaggtctcagaatctttccttcctctcatccttttctcctatcttcatatctatcagagtatccactgtttattcaacaactactacttgatggtcagacacaaacaaacaagctaggtgctaattaataaagatacgagttttggccgggtgcggtggctcacgcctgtaatcccagcactttgggaggccgaggcgggcgaatcacgaggtcaggagttcaagaccagcctggccaacatggtgaaaccccatctctactaaaaatacaaacaattaactgagcatagtggtgggcacctataataccagctactccggaggctgaggcaggagaatcgcttgaacccaggaggcagaggttgcagtgagctgagatcgcgccactgcactctagccggagtgacagagtaagactctgtctcaaaaataaataaataaataaataaataaataaataaataaataaaaaataataatacaagttttcataagcacacttctaa

SEQ ID NO: 22975 - DNA, 958 bp, Artificial Sequence
  derived and/or modified sequence
atggcaagcttatcaagaccctctctgcccagctgcctctgctccttcctcctcctcctcctcctccaagtgtcttccagctatgcagggcagttcagagtgataggaccaagacaccctatccgggctctggtcggggatgaagtggaattgccatgtcgcatatctcctgggaagaacgctacaggcatggaggtggggtggtaccgcccccccttctctagggtggttcatctctacagaaatggcaaggaccaagatggagaccaggcacctgaatatcggggccggacagagctgctgaaagatgctattggtgagggaaaggtgactctcaggatccggaatgtaaggttctcagatgaaggaggtttcacctgcttcttccgagatcattcttaccaagaggaggcagcaatggaattgaaagtagaagatcctttctactgggtgagccctggagtgctggttctcctcgcggtgctgcctgtgctcctcctgcagatcactgttggcctcatcttcctctgcctgcagtacagactgagaggaaaacttcgagcagagatagagaatctccaccggacttttgagtcctttggtgttctaggaccccaggttaaggaaccaaaaaagacagggcaattccttgaagagctactcttccacctggaagccctctctggctaaggacaggcaggtgcccctctctccatcagaggacacctgtactggagagcaacacaggatggtctctgccatgaactggaggccaggaatctcctcactgaaaattacagtatggtaactttgcaaatggtggttgtttcttccaagactccagccctgattgcgcaaaactgaaaggcatgtgaagggaaggaagaggaagagtgcaaaacattgaagagagagctgagtgagctgaagagtgaggatatgagtagccccaacccaa

SEQ ID NO: 22976 - DNA, 690 bp, Artificial Sequence
  derived and/or modified sequence
atggccagcctgagccggcccagcctgcccagctgcctgtgcagctttctccttcttcttttgctgcaggtaagtagctcatacgctggccagttccgcgtgattggccctcggcacccaattcgagcactggtgggggacgaagttgaactgccttgtaggatttcacccggaaagaatgcaacggggatggaggtcggctggtatcgccctcctttctctcgagttgtgcatttatatcgaaatgggaaggaccaggacggggaccaggctccggagtaccgcggacggaccgagttgttaaaggacgccattggcgaaggtaaggttaccttacggattcggaatgtgagattcagcgatgagggaggcttcacctgcttttttcgcgaccattcttaccaagaagaagcagccatggaattaaaagtggaagaccccttttattgggtcagccccggcgtcctggtgctgctggccgtgctcccagtgctgcttctgcagattacggtcggattggtgttcctttgtctgcagtaccgtctgagaggcaagctccgtgcggagattgagaacctgcaccgtactttcgagtctttcggagtgctggggccacaggtaaaagagccaaagaagaccgggcagtttcttgaagaactgctgttccatctagaagcactctccggctag

SEQ ID NO: 22977 - DNA, 675 bp, Artificial Sequence
  derived and/or modified sequence
atggccagcctgagccggcccagcctgcccagctgcctgtgcagcttcctgctgttgctgttgctgcaggtgagtagttcctacgccggacagtttagggtgatcgggcctcggcatccaattcgtgctcttgtcggagatgaagtggagctcccttgccggatttctcccgggaagaatgccactggtatggaagtgggatggtatagaccgccatttagtagagtggtgcacttgtaccgtaacggaaaagaccaggacggagaccaggcgccagagtacagagggaggactgagctcttaaaggacgctataggggagggcaaggttaccctgagaattcggaatgtgagattcagtgacgagggaggcttcacatgcttcttcagggaccactcttaccaggaggaagcggccatggaactgaaggtcgaagatccgttttattgggttagcccgggagtgctcgttctgttagccgtgctgccggtcctgttgttgcagataactgtcggacttatttttctgtgccttcagtaccgccttcgcggtaagctgcgagctgaaatcgagaaccttcatcggacatttgagtccttcggcgtgctcggcccacaggtgaaggagccgaagaagactggacagttcttggaagaactgcggaatcctttctag

SEQ ID NO: 22978 - DNA, 675 bp, Artificial Sequence
  derived and/or modified sequence
atggccagcctgagccggcccagcctgcccagctgcctgtgcagcttccttcttcttctcctgctccaagtcagctccagctatgcaggtcaattccgcgtgataggtccaaggcatcccattcgagccctggttggcgatgaagttgaattaccgtgccggatctctcctgggaagaatgccaccgggatggaggtagggtggtaccgccccccattttcccgtgtggtgcacctgtatcggaatggaaaggatcaggatggggatcaggcccccgagtaccgtgggcgaaccgaactccttaaggacgctatcggggaggggaaagtgacattgcgcattcgcaacgtcagattttccgatgaggggggatttacctgttttttcagggaccatagttatcaagaagaggccgccatggaactgaaggtggaagatccattctattgggtctctccaggggtcttggtattgctggctgttctccctgtcctactcctacagattacactcgggcttgtgtttctgtgcttacagtacagattaagaggaaagcttcgagcagaaattgagaacttacaccggacattcgaatcctttggcgttctcggtccccaggtgaaagagcctaaaaagacggggcagttcctcgaagagctgagaaaccccttctag

SEQ ID NO: 22979 - DNA, 690 bp, Artificial Sequence
  derived and/or modified sequence
atggccagcctgagccggcccagcctgcccagctgcctgtgcagcttccttttacttcttctcttacaagtgagctcttcctatgcaggacagtttcgagttatcggtccccggcatcccataagagctctcgtcggggacgaggtggaactcccatgtagaatcagccccggtaaaaacgctaccgggatggaagtcgggtggtaccgaccacccttctccagggtcgtgcacctatatagaaatggaaaggaccaggatggcgaccaggctcctgaatatcgggggcgaaccgagttgctgaaggatgcaattggtgagggtaaggtgacgttgaggattcgcaacgtcagattcagtgatgaaggtggcttcacttgcttcttccgggaccacagctaccaagaagaagcagccatggaacttaaggtcgaggacccattttattgggtatcccctggcgtcctggtgcttcttgcggtcctacctgtactccttctgcaaattaccgttggattagtgttcctgtgcctgcagtatcgactgagaggaaagttgcgcgccgaaatagagaaccttcaccgcacattcgagagctttggcgtcctgggacctcaagttaaagaacccaagaaaaccggacagtttttggaggaacttttgttccacctggaggccttatccggctag

SEQ ID NO: 22980 - DNA, 675 bp, Artificial Sequence
  derived and/or modified sequence
atggccagcctgagccggcccagcctgcccagctgcctgtgcagcttcctccttctgctcttgctgcaggtttctagcagttacgctggccaatttagggtgattgggcctcggcaccccattcgtgctctggtgggagacgaggtggaattaccctgccgcatctctcctgggaagaatgcaacggggatggaggtcggttggtatcgcccacctttcagcagggtggtgcatctgtataggaatggaaaggaccaggatggggatcaagccccagagtaccgcggccgcactgagctgctgaaagatgccattggcgagggcaaagtgacacttagaattcgcaacgtgcgattctctgacgagggggggttcacctgcttctttcgggaccactcctaccaggaagaagcggcaatggaactcaaagtagaagatcctttctattgggtgtcacctggcgttctggttctgcttgccgtgttgccagtgctactcctgcaaataactgttggactggtgttcctatgtctccagtacagattgagagggaagctgcgcgccgaaatagagaatctccatcgcacctttgaatctttcggagtcctcggtcctcaagttaaggagcccaagaaaacgggacagttcttggaggagttacggaatcccttctag

SEQ ID NO: 22981 - DNA, 675 bp, Artificial Sequence
  derived and/or modified sequence
atggccagcctgagccggcccagcctgcccagctgcctgtgcagctttctgctgctcttattactgcaggtgagtagcagttacgcgggtcagtttcgtgtgatcggacctagacatcccatacgtgctctggttggagatgaagtagagctcccttgccgaatttccccaggtaaaaacgccacaggaatggaagtggggtggtacagaccccctttttcaagagttgttcacctgtatagaaacgggaaagatcaggacggggaccaggcccctgagtaccgcggtagaacggaactccttaaggacgccatcggggagggcaaagtgacattaagaatccggaacgtccgattctcagatgagggaggatttacctgcttttttagagatcactcctaccaggaagaagccgcaatggagctgaaggtggaagacccgttttattgggtctctcctggcgtcctggtactcctcgcggttctccccgtacttttgttgcagattactgtcggactagtgttcttatgtttgcagtacaggctccggggaaagttgcgcgcagagatcgagaatctccaccggacatttgaaagtttcggggtgctaggcccccaggtgaaggagccaaagaagactgggcagtttctggaagaactcagaaatccattctag

SEQ ID NO: 22982 - DNA, 675 bp, Artificial Sequence
  derived and/or modified sequence
atggccagcctgagccggcccagcctgcccagctgcctgtgcagctttctcctacttctgctgctccaagtatcaagctcatatgccggacaattcagagtaattggaccgaggcaccctattagggctctggtaggcgatgaagtggagctaccttgtaggataagtccaggcaagaacgccacgggcatggaagtggggtggtaccgcccccccttctcccgagtggtgcacctgtacagaaatggcaaggaccaagacggtgaccaggcccccgagtatcgtggtcgcaccgagctgctgaaggacgctattggtgagggaaaggtcacactaagaattcggaacgtcagattttctgacgagggcggattcacatgctttttccgagatcattcctatcaggaggaggcagccatggagctgaaggttgaggatcccttctactgggtcagtccgggggtgctggtactcctggcagtacttcctgtgttgctcctgcaaatcaccgtggggctggttttcttgtgcctgcagtacagattacgcggaaagctgcgcgcggagatcgagaaccttcatcgaacattcgagtccttcggcgtgctggggcctcaggtgaaagaaccaaagaagaccggccagtttctggaagagctgaggaatcccttttag

SEQ ID NO: 22983 - DNA, 690 bp, Artificial Sequence
  derived and/or modified sequence
atggccagcctgagccggcccagcctgcccagctgcctgtgcagcttcttgctactgttattgctccaggtgagctcttcatatgcaggtcaattcagagtgatcggcccgcgacatcccattagagcactggtcggagatgaggtggaacttccgtgcaggataagcccgggcaagaacgccacgggaatggaagtaggttggtaccgacctccgttcagcagagttgtgcatttatatcgaaacggcaaggaccaagatggtgatcaagcccctgagtacagagggagaactgaacttctaaaggatgccataggggaagggaaagtgacgctgagaattcgaaatgtccgattctcggacgaaggcggatttacatgtttttttcgcgatcattcgtatcaggaggaggccgctatggaactgaaggttgaagaccctttttattgggtctctcctggggtacttgtgctgctcgctgttttgcctgtgctgctactgcagatcaccgtgggcttagtcttcctttgccttcagtaccgcctcagaggaaaactgagggccgagattgagaaccttcatcggacgtttgaatcatttggagtgctagggccacaggtgaaagaaccaaagaagacgggtcagttcctcgaagaactactgttccacttggaggctttatctgggtag

SEQ ID NO: 22984 - DNA, 690 bp, Artificial Sequence
  derived and/or modified sequence
atggccagcctgagccggcccagcctgcccagctgcctgtgcagcttcctgctgctgctcctgctgcaggtctctagctcctacgctggccagttccgcgttatcggaccacgccacccaatccgcgcactagttggcgacgaagtggaactgccttgcagaataagccctggcaagaacgccacaggtatggaggtcggctggtatcgacctccttttagcagagtcgtgcatctgtacagaaatgggaaagaccaagatggcgatcaggcccccgagtacagaggtcgcactgagctgctcaaggacgcgattggcgagggcaaagtgactctaaggattaggaatgttaggttttccgacgaaggcgggtttacttgtttcttccgggaccattcatatcaggaagaggcagcgatggaactaaaagttgaagatcctttctactgggtatcccctggcgtactcgtcctgctcgcagtcttgcccgtgctactgttacagatcactgttggtctggtctttttatgcctccagtatcggctgagaggaaagctacgcgccgagattgaaaatctacataggaccttcgagtcttttggagtgttagggcctcaggtaaaagaacccaagaagaccggccaatttctcgaagagctgctgttccacctggaggccctgtcgggctag

SEQ ID NO: 22985 - DNA, 675 bp, Artificial Sequence
  derived and/or modified sequence
atggccagcctgagccggcccagcctgcccagctgcctgtgcagcttcctgcttttgttactccttcaggtctcaagttcctatgcgggacagtttagggttatcggcccccgacaccccattcgggcactcgttggcgatgaggtggagctgccatgccggatttcccctgggaaaaacgccactggaatggaggtggggtggtatcgcccccccttttctagagttgtgcacttgtatcgtaatgggaaggaccaagacggggaccaggcccccgaataccgggggagaactgaactgttgaaggatgctattggcgaaggaaaggtcacccttcgaatccgaaacgttcggttctcagacgaagggggattcacgtgctttttcagagaccattcctaccaagaggaggcagctatggagctgaaagtcgaagatcccttttactgggttagtcccggggttctggtcctgctggcagtactgcccgtcttgctgctgcagatcacagtaggactggtttttctttgtctgcagtacaggctgcggggaaaactgcgcgctgaaatagagaatctgcatagaactttcgaatccttcggggtactcggaccccaggtgaaagagcctaagaagacagggcaattcctcgaggaactgcggaatcctttctag

SEQ ID NO: 22986 - DNA, 690 bp, Artificial Sequence
  derived and/or modified sequence
atggccagcctgagccggcccagcctgcccagctgcctgtgcagctttctgctccttctcctccttcaggtgtcttcctcatacgcagggcagttcagggtcatcggaccccgccacccaatcagggccctggtaggagatgaggtggaacttccctgtaggatatctccagggaagaatgcaaccggaatggaagtaggctggtacaggcctcccttctcacgcgtggtccacctgtacagaaatggcaaggatcaagatggcgaccaggcccccgagtatcgagggagaacagagcttctgaaggatgcgatcggggaggggaaggtaaccctgcgaataaggaacgtcaggttctccgatgagggcggcttcacctgtttttttcgcgatcactcgtatcaggaggaggcagcaatggagctgaaggttgaagatcctttctattgggttagcccaggcgtgctggtgctgctggcagtgctccccgtcctgctattgcagatcaccgtcgggctcgtttttttatgcttgcagtatcgtttgcgtgggaaactgcgcgctgaaatcgagaacctgcatcgtacgtttgaaagcttcggggtgcttggcccacaagtcaaagaaccgaagaaaaccgggcagtttcttgaagaacttctttttcacttggaggcgctgagcggctag

SEQ ID NO: 22987 - DNA, 675 bp, Artificial Sequence
  derived and/or modified sequence
atggccagcctgagccggcccagcctgcccagctgcctgtgcagcttcctgctgctgctgctgcttcaagtgagtagctcatatgctgggcagtttagggtgattgggccccggcatccgatccgagccctcgtgggcgacgaggtggaactaccatgccgaatatctccgggaaagaatgctaccggaatggaggtgggttggtataggcccccgttcagtagagtcgtgcatctgtatagaaacggaaaagaccaggatggagaccaagcacctgagtaccgaggccgcacagagttactgaaggatgcaatcggagaaggtaaagtcaccctccgtattagaaatgtaagattctctgatgagggaggatttacctgcttttttagagatcactcctaccaggaggaggccgccatggagctgaaagtcgaagaccctttttactgggtcagccccggcgtactggtcttgctggctgttttgccagtactcttattacagattaccgtaggtctggtttttttatgtctgcagtataggttgaggggtaagctgagggccgagatcgagaatctccaccgaaccttcgaatccttcggggtgttggggccccaggtgaaggagccgaagaagactggccagttcctggaggaacttcggaaccccttttag

SEQ ID NO: 22988 - DNA, 675 bp, Artificial Sequence
  derived and/or modified sequence
atggccagcctgagccggcccagcctgcccagctgcctgtgcagctttttactgttactgctgctgcaggtatcatcttcatacgctgggcagtttcgcgtcatcggtccacggcatccaattcgggcccttgtcggcgatgaggtggagttaccatgccgaatctcgccgggtaagaatgcgacagggatggaagtaggatggtaccggccaccattctcacgcgtggtccacctgtatcgaaatggaaaagaccaggatggtgaccaggcacccgagtataggggccgcacggagctgttaaaggacgccattggcgagggaaaggttactctgaggatccgaaacgtcagattttccgacgaaggcggattcacttgttttttcagagaccactcttaccaggaggaagccgctatggagctgaaagtcgaggatccattttactgggtgagcccgggagtgctagttctgcttgccgttttgcccgtgctgctgctgcagattacggtcgggctggtgtttctatgcctccagtaccggttgcggggtaaactgcgcgccgaaatagaaaatctgcaccgcacattcgagtcattcggggtgctgggcccgcaagtaaaggaaccaaagaagactggccaattcctggaggaactgcgtaaccctttctag

SEQ ID NO: 22989 - DNA, 690 bp, Artificial Sequence
  derived and/or modified sequence
atggccagcctgagccggcccagcctgcccagctgcctgtgcagcttcctgctgctcttattactgcaagtgtcgtcttcttacgccgggcagttcagagtgatcgggccccgtcaccccatcagggccctggtcggcgacgaggtggaattaccatgtcggatctctccaggcaaaaacgctaccggaatggaggtggggtggtatcggccgccatttagccgcgtagtacatctgtatagaaatggcaaagatcaggatggggaccaggctccggagtaccgcgggcgcaccgaactactgaaagacgccatcggcgaaggaaaggttactttgagaatcagaaacgtgaggttctcagacgaaggggggttcacctgcttttttcgcgaccactcctaccaggaagaagctgccatggagcttaaagtggaggaccccttctactgggtgtccccaggagttttagtcttgctggcggttctccctgtcttgcttctgcagatcacagtcggccttgtttttttgtgcctccagtaccgcctgagaggcaaactgcgggccgaaatcgagaatctgcacaggacgtttgagagttttggcgtcttaggtccacaggtaaaggaacctaagaagaccggccagttccttgaggagctgttgttccatttggaagccttaagcggctag

SEQ ID NO: 22990 - DNA, 690 bp, Artificial Sequence
  derived and/or modified sequence
atggccagcctgagccggcccagcctgcccagctgcctgtgcagctttctcttgctgctcctgctgcaggttagttccagttacgccggtcaattccgcgtgatcgggccccggcacccaatccgggctctagtcggggacgaggtggagctgccttgccgcatcagtccaggaaagaacgctactggaatggaagtgggttggtaccgaccgcctttcagtcgggtggttcatctttatagaaacggaaaggaccaggatggggaccaagcgccagaataccggggccggacagagctcctcaaggatgccatcggcgagggcaaagtgactctgcgcatcaggaacgtccggttttctgatgagggcggcttcacatgctttttccgcgaccactcgtaccaggaagaggccgcaatggaactgaaagtggaggaccccttttactgggttagtccaggagtgcttgtgctattggccgtgctgccagtcctcttactgcagataacactgggactcgttttcctgtgtttacaatatagacttagaggtaaactccgagccgaaattgaaaacttacataggacctttgaatcttttggagtactcggcccacaggtcaaggaacctaagaagacaggccaattcctggaggagctgctatttcaccttgaggctctgagtggctag

SEQ ID NO: 22991 - DNA, 690 bp, Artificial Sequence
  derived and/or modified sequence
atggccagcctgagccggcccagcctgcccagctgcctgtgcagcttcttattattgttactacttcaagtgagctccagttatgctggccagttccgcgtcatcggtccaaggcatcctattagagccctcgtaggagatgaggttgagctgccctgtcgcatctctccagggaaaaacgccacggggatggaggttggctggtatcggccaccattctctagagtggtgcacctgtacagaaatgggaaggatcaggatggcgaccaggcccctgaatacagaggccggaccgagcttctgaaggacgccattggagagggtaaagtgactctccggataagaaacgtacgattctctgatgaaggaggtttcacctgcttttttcgcgatcattcctatcaagaagaggcagctatggagctcaaggtcgaagatcccttctattgggtcagcccgggagttctggtactcctcgctgtgctccccgttttactgttacagatcactgtggggctaatttttctctgcctacagtatcggcttaggggaaagctacgcgccgagatcgagaacctgcacagaacatttgaatctttcggcgtacttgggcctcaggtaaaagaaccaaagaagacaggtcaatttcttgaggagttgttgtttcaccttgaagctcttagtggatag

SEQ ID NO: 22992 - DNA, 690 bp, Artificial Sequence
  derived and/or modified sequence
atggctagtctgagcaggccttcgctacctagctgcctgtgctcttttttgctgttgctcttgctccaggtctcctccagctacgctggccagttcagggtgatcgggcctcgtcacccaatccgagccctggtaggcgacgaggtggagctcccctgccgaatttctcctggcaagaatgctaccggaatggaggttgggtggtatcggccaccctttagtcgggtagtgcacctgtatagaaacggaaaagaccaggacggcgatcaggccccagaatatcgcggaagaacagagctattgaaggacgcaatcggtgagggaaaagttacactgcgcattaggaacgtgcgatttagcgacgaggggggtttcacatgcttctttcgcgaccattcctaccaggaggaagccgcaatggagctgaaggtggaggacccattctattgggtgagcccgggagtgcttgttttgcttgcggtcctgcccgtcctgctgcttcaaatcaccgttgggctggtctttctctgcctgcaatataggcttagggggaagctccgcgcagaaatagaaaatttgcatcgcaccttcgagtcgttcggcgtactgggaccacaggtgaaagaaccaaagaagactggacagttcctggaagaacttttattccacctggaagcgctatctgggtag

SEQ ID NO: 22993 - DNA, 675 bp, Artificial Sequence
  derived and/or modified sequence
atggcctcactgtcacgtcccagcctaccttcttgcctttgttcatttctactgcttctgctcctgcaggtctcttcctcctacgccggtcagttcagggtgattggacctcggcacccaattcgcgcattagttggggacgaagttgagctgccttgcagaatctcccccggaaaaaacgcaactgggatggaggtgggttggtacagaccccctttctcacgagtggttcatctgtaccgaaatggcaaggaccaggacggagaccaagcccctgagtacagagggagaactgagctcttgaaggatgcaatcggagagggaaaagtcacgcttcgtatccggaacgttcgcttctcggacgaaggcggattcacctgctttttccgcgaccactcgtaccaggaggaggccgcaatggaactaaaagtggaagacccattctattgggtgtcacccggagtgctcgtcctcctagctgtgctcccagtcttattgctgcagatcaccgtcgggctaatcttcctttgtttgcagtatcgactgcgtggcaaactccgcgcagaaatagaaaacctgcatagaacattcgagagttttggagtgctggggccacaggtcaaggaacccaagaagaccggacagttcctcgaagagttgcgcaatcctttttag

SEQ ID NO: 22994 - DNA, 675 bp, Artificial Sequence
  derived and/or modified sequence
atggcgtctttgagtcgcccttcgcttccttcttgtctctgtagcttcctcttgcttctcctgctgcaagtgtcaagctcatacgctggccagttccgggtaattggcccacggcacccaattagggcacttgtgggcgatgaagtggaactgccatgcaggatctcaccgggaaagaatgctacaggcatggaggtgggctggtatagacccccttttagcagagtggtgcatttatacaggaatgggaaggatcaggatggggatcaggcaccagagtataggggcaggaccgaattgttaaaagatgcgattggcgagggaaaggtcaccctgcgcatccggaacgtgcggttcagcgacgagggaggtttcacttgttttttccgggaccactcttatcaggaggaggccgctatggaacttaaggtggaagatccattttactgggtgtctcctggcgtgctggtactgctagccgttctacctgtcctgttgctgcaaataaccctaggcttggtctttctctgcctccagtacaggctgcggggtaagctgagagccgagatcgagaaccttcaccgcaccttcgagtcatttggggtcttaggccctcaggttaaagagcctaaaaaaacaggtcaattcctggaggaacttagaaaccccttctag

SEQ ID NO: 22995 - DNA, 690 bp, Artificial Sequence
  derived and/or modified sequence
atggccagcctgagccgcccaagcctccccagttgtctgtgctcatttctcctcctactgctgctgcaggtctctagctcatatgccggacaatttcgggtgattggtcctcggcatcctattagggccctggtaggagacgaagtcgagttgccatgtcgcatcagtcccggaaagaatgcaacaggaatggaggtcggctggtataggcctcccttctcaagagtcgtgcacctctatagaaacggtaaggaccaggacggcgaccaggcccctgaatacagaggcaggacggaactcctgaaggatgcaattggcgaggggaaggtaacgctgaggattcgcaacgttcggttctctgacgagggaggttttacctgtttctttcgggaccactcttatcaggaggaggctgcgatggaactgaaagtggaggatcctttttactgggtaagtccaggggtgctagtgctcctcgccgtcctgcccgttctcctcctgcagattactgtgggtttagtttttctgtgtctccaataccgtctgcggggaaaactgcgcgctgagatagagaatcttcatcggaccttcgaatcatttggtgtgcttggtcctcaggtcaaagagcctaagaagacaggccagttcttggaggagttgctctttcatctggaggccttaagtggctag

SEQ ID NO: 22996 - DNA, 675 bp, Artificial Sequence
  derived and/or modified sequence
atggcgtccctctctcgcccatcactcccgagctgtctatgttctttcctgttgctgttattgctccaagtgtccagctcttacgcaggacagttccgagtcataggacccaggcaccctattcgcgcattggtaggagacgaagtggagctcccatgccgtatctccccaggaaagaacgccaccgggatggaggtaggctggtatcggccaccattctcaagagtggtccacttataccgcaatggcaaagaccaggatggcgaccaggcgcctgaatatcgaggtagaaccgaactgttgaaggatgcaattggtgaaggtaaagtgactcttcgcatccgaaacgtcagattttctgacgaaggtgggtttacctgtttcttccgtgaccactcttaccaagaggaagccgctatggaattaaaagtggaagacccattctactgggtttcccccggagtcctcgtactgctggcagtgctgcccgtcttgctcctgcagattacagtgggtctggtgtttctttgccttcaatacagactgagaggcaagcttagagccgaaatagagaacctccatagaacttttgagtccttcggcgttctgggcccacaggttaaggaaccaaaaaaaaccggtcaatttttagaagagctccggaaccctttttag

SEQ ID NO: 22997 - DNA, 675 bp, Artificial Sequence
  derived and/or modified sequence
atggcctccctgtcgaggccaagtctccctagctgcctatgcagttttttgttgttgctgctgttacaagtttcttcttcttatgctggccagttcagagttattggccctcggcatcctattagagccttagtgggagacgaggtagagctcccgtgtcggattagtcccggaaaaaacgcaaccggcatggaagtcgggtggtacagacctcccttcagtagagtcgttcacctctaccggaatggtaaggaccaggacggggatcaggcacccgaatatcgaggacgtactgagctcctgaaggacgcgatcggcgaaggcaaggttaccctccgcattcgaaatgtcagattcagcgatgaaggtggctttacatgcttctttagggaccattcctatcaagaggaggcggctatggaactcaaggttgaggaccctttctactgggttagcccaggggtcctggtgctgctggcagttcttcccgtgctacttctccagataaccgttggcctggtgttcctgtgcctgcagtatagactcagaggcaagctccgggcagaaatagaaaatctgcatcggaccttcgagtctttcggagtacttggtccacaggtgaaggagcccaagaaaaccggtcaattccttgaggagctcaggaacccattttag

SEQ ID NO: 22998 - DNA, 675 bp, Artificial Sequence
  derived and/or modified sequence
atggcgtcactttccagaccttccctcccctcctgcctgtgctcttttctcctccttttactgctgcaagtgtccagctcctacgccggacaatttcgggtgattggacccagacatccaatccgcgctctggtaggagacgaagttgagctgccttgccggatttccccaggaaagaatgctacaggcatggaagtcggttggtaccgaccacccttctctcgcgtggtgcacctgtaccgcaacggtaaagatcaggacggtgaccaggcccctgaatacaggggtagaacagagcttctgaaggacgcaatcggagaaggcaaggttaccctgcgcatcaggaatgtccgattcagtgacgaggggggattcacctgcttcttccgcgatcacagttaccaggaagaggctgccatggagctgaaggtcgaagacccattctactgggtttctcctggggtactggtcctgctggcagtgctgcccgttctccttctacagattacagttgggctggtgtttctgtgcttgcagtatcgtctccggggaaagctgcgcgctgagattgagaacctgcacagaacctttgagagttttggagtcctaggccctcaggtgaaagaaccaaagaagactggccagtttttggaggagctgagaaaccctttttag

SEQ ID NO: 22999 - DNA, 690 bp, Artificial Sequence
  derived and/or modified sequence
atggcttccctcagtagaccttccttaccatcatgtttatgcagtttcctcttgctgctcttgctgcaagtttcgtcctcctatgcaggccaatttcgcgtaattggtcctcggcatccaataagagcactggtgggcgacgaagtagagttgccctgtagaatttcgcctggtaagaacgccacggggatggaagtcggatggtaccgcccaccattctctcgagtggtgcatctctacagaaatggcaaagaccaagacggcgatcaggcacctgagtaccgtggtagaacagaactgctaaaagatgcaattggagaggggaaggtcaccctgagaattcggaacgttcgcttttccgacgaagggggttttacttgcttctttcgtgatcactcctaccaggaagaagctgctatggagctaaaggtggaagatccgttttactgggtcagtcctggggtactcgtgctgctggccgtcctaccagtcctcctactccagattactgtggggctggtgtttctgtgcttgcagtaccgcctgcggggtaagttgcgtgcagagatcgaaaatctccatcgaacgttcgagagctttggcgtcctgggaccgcaggtaaaggagcccaagaagacaggacagtttctcgaagaactcttgtttcacctggaggcgctatcaggctag

SEQ ID NO: 23000 - DNA, 690 bp, Artificial Sequence
  derived and/or modified sequence
atggcaagtctcagccggccttccctgccgtcatgcctgtgttccttcttgctcctgcttttactccaagtctcttcatcttacgctggacagtttagggttattggacccagacacccaatacgagctctcgtaggagacgaggtcgagttaccctgtcggatctctcccggaaaaaatgcaaccgggatggaggtcggttggtatcggcctcctttcagccgagtagtgcacctatacagaaacggcaaggatcaggacggggatcaggctcccgagtaccggggacgcaccgagctgctcaaagatgccattggggaagggaaggtcacgctccgaatccggaacgtgcgtttctccgacgaaggagggttcacatgtttttttagagatcatagctaccaagaggaagcggcaatggagctaaaggtagaggatccgttctactgggtgagcccgggagtgctcgtgctactcgcggtcctccctgtccttctccttcagatcacagttggtttggtgttcctatgtctacagtatagattgaggggcaaactgcgcgctgagatcgaaaaccttcatcggaccttcgagtcttttggtgtgctgggtccacaagtgaaagaacccaaaaaaactggccagttccttgaggagttgctgttccatcttgaggcactgagcggatag

SEQ ID NO: 23001 - DNA, 675 bp, Artificial Sequence
  derived and/or modified sequence
atggctagcctaagcaggcccagtctgcctagttgcttatgctcatttcttcttttactgttgctccaggtgtcgagctcctatgctggacagttcagggtcatcgggcctaggcacccaattagggccctggttggcgacgaagtggaactaccctgccggattagtccgggaaagaacgctactggcatggaggttggatggtaccgaccgccattctcaagagtcgtacacctgtaccgcaatggaaaagaccaagacggtgatcaggcccctgagtacagaggcagaacagagctgttgaaggacgcgatcggagaaggtaaggtcacactcaggataagaaatgtccgcttcagtgacgagggcggattcacatgcttcttccgggaccactcatatcaagaagaggccgcaatggaactgaaggtggaagatccattttactgggtaagccccggagtcctcgtgctgttggccgtactgcccgtgctgctgctgcaaatcacagtgggcctcgtatttctatgcctccaatacagattgcggggaaagctcagagcagagatagagaacctccaccggacgttcgaaagcttcggagtccttggaccacaggtgaaggaacccaagaaaactggccagtttcttgaagaactgcgcaatccattctag

SEQ ID NO: 23002 - DNA, 690 bp, Artificial Sequence
  derived and/or modified sequence
atggcgtccctctcccggccttcccttccaagttgtctctgtagcttcctgctgctgctgctgctgcaggtaagcagcagttacgctgggcagttcagggtaatcgggccaaggcatccaatccgagctcttgtgggagatgaagtggaactaccatgtcgtattagtccgggaaaaaatgctacagggatggaagtggggtggtataggccccctttttcacgagtcgttcacctgtataggaacgggaaagatcaggatggagaccaggctcccgagtacagaggcaggacggaactgctaaaggatgccatcggagaaggaaaagtcaccctacgcatccgcaatgtgcggtttagtgatgaagggggtttcacttgcttcttccgtgatcatagttaccaggaggaagctgctatggaattgaaagttgaggaccccttctactgggtgagccccggagtgctggtccttctggccgtactccccgtgctgcttctgcagataactgtcgggttagtgtttctgtgtcttcagtacaggcttcgcggaaaacttagagccgagatcgagaacctgcaccgcactttcgagagtttcggcgtcctgggtccacaagtgaaggagccaaagaaaactgggcaatttttggaggagctcctctttcacctggaggccttaagcgggtag

SEQ ID NO: 23003 - DNA, 675 bp, Artificial Sequence
  derived and/or modified sequence
atggctagcttatccaggccttctttgccatcttgcctttgttctttcctccttctgctccttctgcaagtgtcatcgagttatgctggacaattccgtgtgataggaccacgccaccccattcgcgcacttgtgggggacgaagttgagctgccctgcagaatatcaccgggaaagaacgccacagggatggaagtaggatggtatagacccccttttagcagagtcgtacatctctaccgtaatggcaaagatcaggatggtgaccaggctcccgagtaccgcggacgcaccgaactgctgaaagatgccattggagaaggcaaggttaccctgaggatccgtaatgttcgattctccgacgagggtgggttcacttgttttttcagagatcatagctatcaggaggaagcagccatggagttgaaggtggaggacccgttctactgggtgtcccctggggttctggtcctactggcagtcttgcccgtgctactgctgcagatcactgtcgggctggtctttctctgtctgcagtacaggttgcgaggaaagctgcgggcagagatcgaaaaccttcacaggacgttcgaatcttttggagtactaggaccgcaggtcaaggaacctaaaaagactggacaattcttagaggagctgagaaatccgttttag

SEQ ID NO: 23004 - DNA, 675 bp, Artificial Sequence
  derived and/or modified sequence
atggcgagcctatctagaccttcattaccctcgtgtctctgtagcttcctgctccttctgttgttgcaagtaagcagttcctatgccggtcagttcagggtgatcgggcctcgtcaccccataagagcacttgtgggagatgaagtggaactgccatgccgcatcagccctggaaaaaatgcaaccggtatggaagtcgggtggtatcgccctccgttctcccgagtggtccatctgtacagaaatggcaaagatcaggacggcgaccaggcccctgagtatcgcggacgaaccgagcttctgaaagacgctattggcgaggggaaggtgactctgaggatcagaaatgtgcgctttagtgatgagggcggatttacatgctttttccgtgaccattcctatcaagaggaagccgctatggagctaaaagttgaagacccattctactgggtttccccgggagtccttgtccttctcgcagtgttacctgtgctactgcttcagatcacggtcggcctggtgttcctctgcctgcagtaccgcttgcggggtaaactgcgcgctgaaatcgaaaacctgcaccgcacctttgagtcctttggggttctcggaccgcaggttaaagagcctaaaaaaactgggcagttccttgaagagctgcgcaatccgttttag

SEQ ID NO: 23005 - DNA, 690 bp, Artificial Sequence
  derived and/or modified sequence
atggcctccctgagtagacccagcctcccatcttgtctgtgcagctttctgctgctgctcctcctgcaggtgtcctcctcttacgctggccaatttcgggttatcggcccaagacaccctatcagagctctggtgggagacgaggttgaactgccgtgtaggatctcacccggaaaaaacgctacagggatggaggtgggatggtacagacctccttttagtcgtgtggtccacctctacaggaatgggaaagaccaggacggagaccaggcccctgagtacagagggcgtaccgagttgctgaaggatgccatcggggaaggtaaggtgaccttacggatacggaatgtcaggttttcagatgaagggggtttcacctgcttcttcagggaccatagttaccaagaggaggctgcaatggagctgaaggttgaggatcctttttattgggtgtccccaggtgtattggtgctgctcgccgttctgcccgtgctcttgctgcagatcacggtcggtctcgtctttctgtgccttcagtacaggctgagagggaagctgcgcgcagaaatcgaaaacctccatagaaccttcgaatccttcggtgtgctaggccctcaggtcaaggaaccgaaaaagactggacagttcttggaggagctcctgttccacctagaggccctgtctgggtag

SEQ ID NO: 23006 - DNA, 690 bp, Artificial Sequence
  derived and/or modified sequence
atggcatcactgtctaggccttcgcttccttcttgtctctgtagttttttgcttcttttgctgttgcaggtgtccagcagctatgccggtcagttcagagtgataggtcctagacaccccatcagagccctggtgggagacgaggtggagctcccatgccggatttcccctgggaagaatgccaccggtatggaggtgggctggtacagaccccctttttcaagagttgtgcacctttaccggaatggaaaggatcaggatggtgaccaggctcccgaatataggggaaggacggagttactgaaggatgctattggggaggggaaggtaactttacgcattcggaacgtgagattcagcgatgaagggggattcacgtgcttcttcagagaccattcatatcaagaggaggctgctatggagctgaaggtcgaggatccgttctattgggtctcaccaggagtcttagtcctcctggcagtgctgccagtcctcctgctgcaaataacgctcgggctggtctttctttgtctccagtaccggttgcgtggaaaactgagagcggagatcgagaacctacacagaacctttgagagctttggagtcctgggccctcaagtgaaagaacccaaaaagactgggcagttccttgaggagctactgtttcacctggaggccctgtctggatag

SEQ ID NO: 23007 - DNA, 690 bp, Artificial Sequence
  derived and/or modified sequence
atggcaagtttatcaaggccctccctgccttcctgcctgtgttcctttctccttttgctgctgctacaggtaagctcgtcgtacgccggtcagtttagagtcatcgggccacggcatccaatcagggcattggttggcgacgaggtggagctgccctgtcggatttcaccaggcaaaaacgccaccggcatggaagtcggatggtaccggcctcctttttctagggtggtccatctctatagaaatggcaaggaccaggatggcgatcaggccccagagtatagggggcgtacagaactgctgaaggatgccatcggagagggtaaagtgacactgcggattcggaatgttaggttttccgacgaagggggattcacttgcttctttcgggaccatagctatcaggaagaagctgcaatggagttgaaggtagaggaccctttttattgggttagccccggagtactcgtcctcttggccgttctgccagtccttttgctccagattactgttggcctgatattcttatgtctccaatacagattaagaggtaaactaagggccgaaattgaaaacctgcacagaacgtttgagtcattcggtgtgctcggtccccaggtaaaggaaccaaaaaaaacggggcaattcttggaagagctgctgtttcatctggaagcattgtccggttag

SEQ ID NO: 23008 - DNA, 690 bp, Artificial Sequence
  derived and/or modified sequence
atggccagcctgagcagacccagcctgcccagctgcctgtgcagcttcctgctgctgctgctgctgcaggtgagcagcagctacgccggccagttcagagtgatcggccccagacaccccatcagagccctggtgggcgacgaggtggagctgccctgcagaatcagccccggcaagaacgccaccggcatggaggtgggctggtacagaccccccttcagcagagtggtgcacctgtacagaaacggcaaggaccaggacggcgaccaggcccccgagtacagaggcagaaccgagctgctgaaggacgccatcggcgagggcaaggtgaccctgagaatcagaaacgtgagattcagcgacgagggcggcttcacctgcttcttcagagaccacagctaccaggaggaggccgccatggagctgaaggtggaggaccccttctactgggtgagccccggcgtgctggtgctgctggccgtgctgcccgtgctgctgctgcagatcaccgtgggcctggtgttcctgtgcctgcagtacagactgagaggcaagctgagagccgagatcgagaacctgcacagaaccttcgagagcttcggcgtgctgggcccccaggtgaaggagcccaagaagaccggccagttcctggaggagctgctgttccacctggaggccctgagcggctag

SEQ ID NO: 23009 - DNA, 675 bp, Artificial Sequence
  derived and/or modified sequence
atggccagcctgagcagacccagcctgcccagctgcctgtgcagcttcctgctgctgctgctgctgcaggtgagcagcagctacgccggccagttcagagtgatcggccccagacaccccatcagagccctggtgggcgacgaggtggagctgccctgcagaatcagccccggcaagaacgccaccggcatggaggtgggctggtacagaccccccttcagcagagtggtgcacctgtacagaaacggcaaggaccaggacggcgaccaggcccccgagtacagaggcagaaccgagctgctgaaggacgccatcggcgagggcaaggtgaccctgagaatcagaaacgtgagattcagcgacgagggcggcttcacctgcttcttcagagaccacagctaccaggaggaggccgccatggagctgaaggtggaggaccccttctactgggtgagccccggcgtgctggtgctgctggccgtgctgcccgtgctgctgctgcagatcaccgtgggcctgatcttcctgtgcctgcagtacagactgagaggcaagctgagagccgagatcgagaacctgcacagaaccttcgagagcttcggcgtgctgggcccccaggtgaaggagcccaagaagaccggccagttcctggaggagctgagaaaccccttctag

SEQ ID NO: 23010 - DNA, 675 bp, Artificial Sequence
  derived and/or modified sequence
atggccagcctgagcagacccagcctgcccagctgcctgtgcagcttcctgctgctgctgctgctgcaggtgagcagcagctacgccggccagttcagagtgatcggccccagacaccccatcagagccctggtgggcgacgaggtggagctgccctgcagaatcagccccggcaagaacgccaccggcatggaggtgggctggtacagaccccccttcagcagagtggtgcacctgtacagaaacggcaaggaccaggacggcgaccaggcccccgagtacagaggcagaaccgagctgctgaaggacgccatcggcgagggcaaggtgaccctgagaatcagaaacgtgagattcagcgacgagggcggcttcacctgcttcttcagagaccacagctaccaggaggaggccgccatggagctgaaggtggaggaccccttctactgggtgagccccggcgtgctggtgctgctggccgtgctgcccgtgctgctgctgcagatcaccctgggcctggtgttcctgtgcctgcagtacagactgagaggcaagctgagagccgagatcgagaacctgcacagaaccttcgagagcttcggcgtgctgggcccccaggtgaaggagcccaagaagaccggccagttcctggaggagctgagaaaccccttctag

SEQ ID NO: 23011 - DNA, 675 bp, Artificial Sequence
  derived and/or modified sequence
atggccagcctgagcagacccagcctgcccagctgcctgtgcagcttcctgctgctgctgctgctgcaggtgagcagcagctacgccggccagttcagagtgatcggccccagacaccccatcagagccctggtgggcgacgaggtggagctgccctgcagaatcagccccggcaagaacgccaccggcatggaggtgggctggtacagaccccccttcagcagagtggtgcacctgtacagaaacggcaaggaccaggacggcgaccaggcccccgagtacagaggcagaaccgagctgctgaaggacgccatcggcgagggcaaggtgaccctgagaatcagaaacgtgagattcagcgacgagggcggcttcacctgcttcttcagagaccacagctaccaggaggaggccgccatggagctgaaggtggaggaccccttctactgggtgagccccggcgtgctggtgctgctggccgtgctgcccgtgctgctgctgcagatcaccgtgggcctggtgttcctgtgcctgcagtacagactgagaggcaagctgagagccgagatcgagaacctgcacagaaccttcgagagcttcggcgtgctgggcccccaggtgaaggagcccaagaagaccggccagttcctggaggagctgagaaaccccttctag

SEQ ID NO: 23012 - DNA, 690 bp, Artificial Sequence
  derived and/or modified sequence
atggccagcctgagcagacccagcctgcccagctgcctgtgcagcttcctgctgctgctgctgctgcaggtgagcagcagctacgccggccagttcagagtgatcggccccagacaccccatcagagccctggtgggcgacgaggtggagctgccctgcagaatcagccccggcaagaacgccaccggcatggaggtgggctggtacagaccccccttcagcagagtggtgcacctgtacagaaacggcaaggaccaggacggcgaccaggcccccgagtacagaggcagaaccgagctgctgaaggacgccatcggcgagggcaaggtgaccctgagaatcagaaacgtgagattcagcgacgagggcggcttcacctgcttcttcagagaccacagctaccaggaggaggccgccatggagctgaaggtggaggaccccttctactgggtgagccccggcgtgctggtgctgctggccgtgctgcccgtgctgctgctgcagatcaccctgggcctggtgttcctgtgcctgcagtacagactgagaggcaagctgagagccgagatcgagaacctgcacagaaccttcgagagcttcggcgtgctgggcccccaggtgaaggagcccaagaagaccggccagttcctggaggagctgctgttccacctggaggccctgagcggctag

SEQ ID NO: 23013 - DNA, 690 bp, Artificial Sequence
  derived and/or modified sequence
atggccagcctgagcagacccagcctgcccagctgcctgtgcagcttcctgctgctgctgctgctgcaggtgagcagcagctacgccggccagttcagagtgatcggccccagacaccccatcagagccctggtgggcgacgaggtggagctgccctgcagaatcagccccggcaagaacgccaccggcatggaggtgggctggtacagaccccccttcagcagagtggtgcacctgtacagaaacggcaaggaccaggacggcgaccaggcccccgagtacagaggcagaaccgagctgctgaaggacgccatcggcgagggcaaggtgaccctgagaatcagaaacgtgagattcagcgacgagggcggcttcacctgcttcttcagagaccacagctaccaggaggaggccgccatggagctgaaggtggaggaccccttctactgggtgagccccggcgtgctggtgctgctggccgtgctgcccgtgctgctgctgcagatcaccgtgggcctgatcttcctgtgcctgcagtacagactgagaggcaagctgagagccgagatcgagaacctgcacagaaccttcgagagcttcggcgtgctgggcccccaggtgaaggagcccaagaagaccggccagttcctggaggagctgctgttccacctggaggccctgagcggctag

SEQ ID NO: 23014 - protein, 206 aa, Artificial Sequence
  derived and/or modified sequence
MASLSRPSLPSCLCSFLLLLLLQVSSSYAGQFRVIGPRHPIRALVGDEVELPCRISPGKNATGMEVGWYRPPFSRVVHLYRNGKDQDGDQAPEYRGRTELLKDAIGEGKVTLRIRNVRFSDEGGFTCFFRDHSYQEEAAMELKVEDPFYWVSPGVLVLLAVLPVLLLQITVGLIFLCLQYRLRGKLRAEIENLHRTFVFHLEALSG

SEQ ID NO: 23015 - protein, 204 aa, Artificial Sequence
  derived and/or modified sequence
SLSRPSLPSCLCSFLLLLLLQVSSSYAGQFRVIGPRHPIRALVGDEVELPCRISPGKNATGMEVGWYRPPFSRVVHLYRNGKDQDGDQAPEYRGRTELLKDAIGEGKVTLRIRNVRFSDEGGFTCFFRDHSYQEEAAMELKVEDPFYWVSPGVLVLLAVLPVLLLQITVGLVFLCLQYRLRGKLRAEIENLHRTFVFHLEALSG

SEQ ID NO: 23016 - protein, 204 aa, Artificial Sequence
  derived and/or modified sequence
SLSRPSLPSCLCSFLLLLLLQVSSSYAGQFRVIGPRHPIRALVGDEVELPCRISPGKNATGMEVGWYRPPFSRVVHLYRNGKDQDGDQAPEYRGRTELLKDAIGEGKVTLRIRNVRFSDEGGFTCFFRDHSYQEEAAMELKVEDPFYWVSPGVLVLLAVLPVLLLQITLGLVFLCLQYRLRGKLRAEIENLHRTFVFHLEALSG

SEQ ID NO: 23017 - protein, 206 aa, Artificial Sequence [sequence omitted]

SEQ ID NO: 23018 - protein, 206 aa, Artificial Sequence
  derived and/or modified sequence
MASLSRPSLPSCLCSFLLLLLLQVSSSYAGQFRVIGPRHPIRALVGDEVELPCRISPGKNATGMEVGWYRPPFSRVVHLYRNGKDQDGDQAPEYRGRTELLKDAIGEGKVTLRIRNVRFSDEGGFTCFFRDHSYQEEAAMELKVEDPFYWVSPGVLVLLAVLPVLLLQITLGLVFLCLQYRLRGKLRAEIENLHRTFVFHLEALSG

SEQ ID NO: 23019 - DNA, 642 bp, Artificial Sequence
  derived and/or modified sequence
atggcctctctgtcccgcccaagcttaccctcatgcctgtgtagttttttgctgctgctgctgctccaagtgagcagctcgtacgcgggtcagttccgggtgataggaccaaggcatcccattcgggccctggtcggtgacgaagttgagctgccatgcagaataagcccaggcaagaacgcaacaggcatggaggttgggtggtatcgccctcccttcagccgggtggttcatttgtatcgcaatgggaaggaccaggacggagaccaggccccagaatatcgaggacggactgaattgctgaaagatgccattggtgagggaaaggttacgctgcgaatcaggaacgtgcggttttccgacgagggcgggtttacctgctttttcagggatcacagttaccaggaagaagcagcgatggaactgaaagtggaagatcccttttactgggtgtccccaggggtgcttgttctgctcgctgtgctcccggtgctccttctgcagataacggtgggactggtgtttctgtgtctccagtatcggttgaggggcaagctccgagccgagattgaaaacttacacaggacgtttggtcagttcttggaagagctcctgttccacctcgaggctttgtccggctag

SEQ ID NO: 23020 - DNA, 621 bp, Artificial Sequence
  derived and/or modified sequence
atggcttccctgtctagaccgagcctcccaagctgtctgtgttccttcttgctgctgctattactgcaggtttcaagctcttatgctggacagtttagagtgattggacctcgccaccctataagggctctcgttggggacgaggtggagctgccatgtcgaatcagccctggcaaaaacgctaccggaatggaagtaggctggtatagacccccctttagcagggtcgtgcatctctataggaatggtaaagaccaggatggagaccaagcgcctgaatatcgaggacgtaccgaactgctgaaagatgccattggggaaggcaaggtaaccctgcgcatccgcaatgtacggttcagcgacgaaggtggcttcacatgctttttcagggatcatagctaccaagaagaggctgctatggagctgaaggttgaagatcccttctattgggtgtcccctggtgtgctggtcctcttggctgtgctgccagtgctccttctccagataaccgtggggctgattttcctctgccttcagtacaggctccgaggaaagctcagggccgaaattgaaaacctgcatagaaccttcgtgttccacctggaggcgctgtctgggtag

SEQ ID NO: 23021 - DNA, 642 bp, Artificial Sequence
  derived and/or modified sequence
atggcttccctctctagaccatccctaccgtcttgtctgtgttcctttttactgttgttgctgttgcaggtcagctcctcttacgccggacagttcagagtcatcggacccaggcatcccattcgcgccctggtaggagacgaggtggaactgccctgtaggatctcccctggaaaaaatgccacagggatggaggttgggtggtaccgacctcctttttcacgcgtagtgcacctgtacagaaatgggaaggaccaagatggagatcaggctccagaatataggggcaggactgagctcctgaaggacgccatcggagagggcaaggtaaccttaaggatcagaaatgtcaggtttagcgatgaaggagggttcacatgtttttttcgggatcactcctaccaagaggaggccgcgatggagctgaaggtggaggatccattctactgggtctcccctggagttcttgttcttttagccgttctgcctgtgttgctcttgcagatcacggtcgggctgatttttctgtgccttcaataccgactgcgcggtaaactccgcgcagagattgaaaatttgcacagaaccttcgggcagttccttgaagagcttctgtttcacctggaagctctgagcggatag

SEQ ID NO: 23022 - DNA, 642 bp, Artificial Sequence
  derived and/or modified sequence
atggcttccctgtccagacctagtttgccctcatgcctgtgctcttttctattgctgcttctgcttcaggtctcttctagctacgctgggcagttcagagtgatcggtccgagacatccgatccgtgccctagttggcgacgaagttgagctgccctgtcgaatttctcccggcaagaacgcgaccgggatggaagtgggatggtacagaccaccattttcaagggtggtccacttataccgcaacgggaaggatcaggatggggatcaagccccagaataccgcgggcggactgaactgctgaaagacgccatcggcgaaggcaaggtgaccctgcgcattcggaatgtgcgcttcagcgacgagggcgggttcacgtgttttttccgcgaccattcttatcaggaggaagcggccatggagttgaaggtggaagacccattctattgggtgtcacctggtgttctcgtactcctagccgtcctgccagtcctgctgctgcagatcacagtgggattagtcttcctatgtctgcagtataggctccgagggaaactgcgcgctgagattgaaaatcttcataggacctttggtcagtttctggaggagctgctgtttcatctggaagcgctctcaggctag

SEQ ID NO: 23023 - DNA, 615 bp, Artificial Sequence
  derived and/or modified sequence
agcttaagtaggccatcactgcccagctgcctgtgctccttccttttgctcttattgcttcaggtcagttccagctacgcagggcagtttagggttatcgggccacgacaccctataagggcccttgtaggcgatgaggttgaattaccatgccgcatttcacccgggaaaaacgctacaggcatggaggttgggtggtatagacccccgttttcccgcgttgtgcatttatatcgcaatggaaaggaccaagatggtgaccaggccccggaatataggggccggacagagctgttgaaggatgccattggtgaggggaaggtcactctaagaatccggaacgtccggttctctgatgagggcggttttacctgtttttttagggaccattcatatcaagaggaagctgcaatggagctcaaagtggaggatccattctattgggtgagtcctggagtgctggtgctactagctgtactccccgtgctgctcctccagatcacagttggactggttttcctgtgcctacagtacaggctgcgcggaaagctgcgggctgagattgagaatctgcatagaacttttgtgtttcacctcgaagctctgtctggctag

SEQ ID NO: 23024 - DNA, 642 bp, Artificial Sequence
  derived and/or modified sequence
atggcttctctgagtcggccgagcctgccgagctgcctgtgctccttccttctcctccttctcctgcaagtgtcctcatcatacgcagggcagttccgagtgatcggcccgcggcacccgataagagctctcgtgggcgacgaagtagaattgccctgccgcatcagcccaggaaaaaatgctactggcatggaagtaggctggtatcgcccaccatttagtagagttgtccacctatacaggaatggcaaggaccaggacggagaccaggccccagaataccgcggaaggactgaactgttaaaggatgctattggcgaaggtaaggttactctccgaattaggaacgtaaggttctccgacgaggggggattcacctgttttttccgagaccactcctaccaggaagaggccgccatggaactgaaagtcgaggatccattctattgggtgtctccaggcgtccttgttctgttagccgtgctgcccgtgctgcttctgcaaattacagtggggctggtattcctgtgtctccagtaccgattgcgaggaaagcttagagccgagatcgagaatctccatcgaacctttgggcagttcctggaggaactgctcttccatcttgaggctctctccggctag

SEQ ID NO: 23025 - DNA, 615 bp, Artificial Sequence
  derived and/or modified sequence
tccctgtccaggccttcgttaccttcatgcctgtgcagtttcctgctgttactgctcctgcaagtctcatcttcgtacgctgggcagtttcgagtgattggcccgagacatcctatccgggctcttgtgggggacgaggtggagctgccgtgccgcatttctccaggaaagaacgccactgggatggaggtgggatggtaccgaccccccttcagtagggttgttcatctctacagaaatggtaaggatcaggatggcgaccaggcacctgaatatcgtggaagaactgaactgctcaaggatgcgatcggcgaaggcaaggttacgcttagaatcaggaacgtacggttctcagacgaaggcggctttacatgcttttttagggatcactcctaccaagaggaggccgcaatggaactcaaggtggaggatccattctactgggtgtcaccaggcgtgcttgtcctacttgctgtgctgcctgtgctcttactacagattactgtcgggttggtgtttctgtgcctgcagtatcgactccgcggcaaactgagagcggagatcgagaacctacataggactttcgtgtttcacttggaagccctgtccgggtag

SEQ ID NO: 23026 - DNA, 642 bp, Artificial Sequence
  derived and/or modified sequence
atggcaagcttgtcacgaccttccctgccgtcgtgcctttgcagttttctgctgctgctgctgctgcaagtcagctcatcttatgcaggccagtttagagtgatcggccctcgccaccccatccgggcccttgtgggcgatgaagtcgagcttccctgccgtatatctccaggaaagaacgcgacagggatggaagttggatggtaccgaccacctttctcccgggtggtccacctctacaggaatggtaaagaccaagatggagaccaggctcccgagtaccggggacgcaccgaactactgaaggacgccatcggggaaggaaaggttacacttaggattcggaacgtacgcttcagcgacgagggaggttttacatgttttttccgggaccacagctatcaggaagaagccgctatggaactcaaggtagaggatccattttattgggtctctcctggtgtacttgtgttgcttgccgtactgccagtgctcctccttcagataaccgtcggattagtttttctgtgcctacagtatcggctgcgcggaaaactgagagcagaaattgagaatctgcaccggacttttggccaattcttggaggaactcttgtttcaccttgaggcactgagtggatag

SEQ ID NO: 23027 - DNA, 615 bp, Artificial Sequence
  derived and/or modified sequence
tctctgtcccggccctctctgccatcctgtctctgttcctttctacttctgctgctcctgcaggtgtcgagtagctacgccgggcagtttagggtgatcggtccaaggcaccctatccgtgccctggtcggggacgaagtggagctcccctgcagaattagccccggaaaaaatgctacagggatggaagtaggttggtataggcctccattctccagagtagtacatctgtatcggaatggaaaagaccaggacggcgatcaagctccggaataccggggaaggacagagcttctgaaggatgcgatcggcgaaggcaaggttacactgcggatccgaaacgtgagattttccgatgagggaggcttcacctgcttcttcagagatcattcttatcaggaggaagcggccatggagctgaaggttgaagacccattttactgggtgagcccgggggttctggtactcctggctgtcttgccagtgctgctgctccagattacactgggtctggtttttctctgccttcagtatcgtctcagggggaaactgcgcgcagagatcgaaaatctgcacagaaccttcgtcttccatctggaggctctctctggctag

SEQ ID NO: 23028 - DNA, 642 bp, Artificial Sequence
  derived and/or modified sequence
atggctagcctgtcccgaccaagccttccgtcttgtctgtgctcgtttcttttgctgttgttactacaggtgagttccagctacgcaggacagtttcgggtcatcggaccgagacacccgatccgggccctcgtcggagatgaagtggaactgccatgccgaatttccccaggtaaaaatgcgaccggaatggaagtgggatggtacaggccgccctttagccgagttgtccatctgtacaggaatgggaaggaccaggatggagatcaggcgccggagtatcggggacgcacggaacttctgaaggatgccattggagagggaaaagtgactctccgtatcaggaatgttaggttctctgatgaaggcggattcacctgtttttttcgcgaccactcctatcaggaagaggctgccatggagctgaaagtggaagatccattctattgggtctcccccggagtcctcgtgctactagcagttctacccgtactcctgcttcagatcacagtcggtctagtcttcctgtgtcttcagtatcggttgagaggcaaactgagagccgagatcgagaacctgcatcgaacctttggccaattcctcgaagagctgcttttccatctggaggcactgtctggatag

SEQ ID NO: 23029 - DNA, 642 bp, Artificial Sequence
  derived and/or modified sequence
atggcaagtttaagccgccctagtctcccgagctgcctgtgcagctttttgctgttactgctcctccaggtgtctagcagttacgccgggcagtttcgcgtcatcggccctcgacaccccattcgcgcactggtgggggacgaagtagagctgccctgcaggatctcccctggaaagaacgccaccggtatggaagtcggttggtataggcctcccttttcaagggtggtgcacctgtaccggaacggaaaggatcaggacggtgatcaggcacccgagtaccgcggtcgaaccgaattattgaaggacgcaataggagaaggcaaggtgacgctacggattcgcaacgtgagattttctgacgagggaggcttcacatgcttctttagggatcacagttaccaggaggaggctgcgatggagctgaaagtagaagaccccttctactgggtttcaccgggcgtgcttgttcttctcgccgtcctgcccgtgcttttgctccaaatcacggtgggactcgtgtttttatgtctccagtaccgcttgagagggaagctcagagcagaaatcgaaaacttacatcggacattcggccaattcctagaggagcttctgttccatctggaagcactgtcaggttag

SEQ ID NO: 23030 - DNA, 615 bp, Artificial Sequence
  derived and/or modified sequence
agtttgtcgcgtccatcactgccctcctgtctctgcagctttctgctactgctgctgcttcaagtgtcttcctcctacgctgggcaatttcgcgtcattggcccacgacatccaatcagagctctcgtgggggatgaggtagaactgccctgccgcatatcacctgggaaaaatgctactgggatggaggtcggttggtaccgccctccctttagtagggtcgtccatctgtacagaaatggtaaggaccaggatggagatcaggcacccgagtaccgtggcagaactgaacttctgaaagacgccatcggggagggaaaggtgacactgcgcattagaaacgtgcgcttctccgatgaagggggattcacctgtttcttccgggaccactcttaccaagaggaggcagccatggaactgaaagtggaggaccctttctactgggtttccccaggagtgttggtcctgctggcagtcttaccagtcctgctgcttcaaataacggttggactcgtgttcctgtgcctccaataccgcctgcgcggaaaattgagagcggagatagagaacctccaccgtacatttgttttccaccttgaggctctgtctggctag

SEQ ID NO: 23031 - DNA, 615 bp, Artificial Sequence
  derived and/or modified sequence
agcctaagcaggccatctcttccaagttgcctgtgctcattcctgctcctgcttctgctgcaggtatctagttcctacgccggtcagttccgcgtgatcggccctcgacaccccatcagggctctcgtcggggatgaagtggagcttccctgtaggatcagtcctggaaaaaatgccaccggaatggaggttggctggtatcggcctcctttcagtagggtggtgcacctgtaccgcaacggaaaagaccaggacggggatcaggctcctgagtaccgcggccgaacagaactccttaaagatgctatcggagagggcaaagtaaccctgcgaatacgcaacgttaggttcagtgatgagggcggcttcacctgcttttttagagaccattcttaccaggaagaggccgctatggagctgaaggtggaggaccctttttattgggttagccctggggtccttgtacttcttgctgtcctgccagtgctgctcctgcagatcacagtaggtctggtcttcctgtgccttcaataccgtctccgaggaaagctacgggctgaaattgagaatttacatcgaaccttcgtctttcacctggaagctctgagcggatag

SEQ ID NO: 23032 - DNA, 642 bp, Artificial Sequence
  derived and/or modified sequence
atggcatccctgtcacgtccaagtttgccctcttgcctgtgttccttcctgcttttactgctactccaggtgtcttccagctatgccggacagtttcgggtaatagggcctcgtcatcccatccgcgccctcgtgggtgacgaagtagagctgccgtgccgtatttcgcccggaaagaacgctaccggcatggaggtggggtggtaccgccctccattcagccgggtggtacatttatatcgaaacggcaaagatcaggacggagaccaagctccagagtaccgagggcggactgagctacttaaggatgccatcggggagggaaaagtgacactccggatccggaacgtgcgtttttccgacgaggggggattcacatgcttctttcgggatcatagctatcaggaagaggcagcgatggagctgaaagtggaagaccctttctattgggtgtctcccggagtcttagtcttgctggcagtgctgcctgtgctgctcctgcagatcaccctcggactggtgttcttgtgtctgcagtatcgtctgcgcggcaaactcagggcagaaattgaaaatctccaccggacatttgggcagtttttggaagagctgctgttccatttggaagcactgtcaggctag

SEQ ID NO: 23033 - DNA, 615 bp, Artificial Sequence
  derived and/or modified sequence
tcactgtctaggccatctcttcccagctgtctttgtagcttcctgctgctacttcttctgcaagtgtcttcaagttatgccggccagtttcgtgttataggccctcgccacccaatacgagcgttggtaggggatgaggtcgaactcccatgcagaatttcccccggaaaaaacgcaacggggatggaagtcggctggtaccgaccgcctttttcaagagtggtgcacctgtaccggaacggcaaagatcaggacggcgatcaggctcctgagtatagggggcggaccgagctgctgaaagatgctatcggtgaggggaaggtgacacttcgcatcaggaatgttagattctcggacgagggcggatttacctgcttcttccgggatcatagctaccaggaggaggccgccatggagctcaaggtggaagacccattctactgggtgagcccaggagtgctggtgctccttgccgtgcttccagtgctcctgctccaaattacagtggggttggtttttctttgtctgcagtatcgattgcgtggtaagctgcgggcagagatcgaaaaccttcaccggactttcgtgtttcatctggaggccttaagcggttag

SEQ ID NO: 23034 - DNA, 615 bp, Artificial Sequence
  derived and/or modified sequence
tctctgtctaggccttccctcccttcctgtctctgctcatttctgctgctcctcctcctgcaggtctcatccagctacgccggccagttcagggtgatcggaccaagacatcctattcgcgcacttgttggagatgaggttgaactcccctgcaggattagtccgggaaaaaatgcaaccggaatggaggtggggtggtatcgcccacctttttctagagtggtgcacctgtatagaaatggaaaggaccaggatggggaccaggcccctgagtacagaggaagaactgagctgctgaaggacgcaatcggagaagggaaggtgaccttgaggatacgaaatgtgagattctcagacgaaggtggcttcacttgttttttccgggaccactcttaccaggaagaggcagctatggaactgaaagtcgaagacccattttattgggtttcccccggggttcttgtgcttctggccgttctccccgtcctccttctccagattaccgtgggccttgtgtttctgtgtcttcagtaccgtctccggggcaagttaagagccgaaatcgagaacctccatcggacttttgttttccatctcgaggccctttcaggatag

SEQ ID NO: 23035 - DNA, 621 bp, Artificial Sequence
  derived and/or modified sequence
atggcctcactgtctaggcccagcttgccatcatgcctttgctcttttctgctgttattgctgttgcaagtgtcctcgagttatgcaggccaatttagagtcatagggccacggcatcccatcagagccctggtgggcgacgaagtagagctaccatgccgtattagtcccggaaaaaatgccaccggcatggaagtgggctggtaccgaccccccttctcacgagtggtccatctttacagaaacggcaaggaccaggatggggatcaagctccagagtaccgggggaggacagagctgctcaaggatgctatcggcgaagggaaggtgaccttaaggataaggaacgtccgtttttccgatgagggcggctttacctgcttctttcgtgatcacagttatcaggaggaagctgctatggaattgaaggtcgaggatcccttctattgggtgtcacctggagtgctcgtgctactggccgtcttgccagtgcttctcttacagattaccgttggtcttgttttcctgtgtctgcagtatcgactgagggggaagctgagggcagagatcgagaatctacacagaacctttgtgtttcacctcgaggccctatctggctag

SEQ ID NO: 23036 - DNA, 621 bp, Artificial Sequence
  derived and/or modified sequence
atggcatctctctcccgcccctcgctaccctcctgcctctgctcatttctgttgctgctattactccaagtatcaagttcctatgccggacagtttcgtgtgatcggcccaagacatcctatacgcgcgcttgtcggggacgaagtagaactgccatgtcgtatatcacccgggaagaatgccaccggcatggaggtgggctggtatcgcccaccattttcaagagtggtgcatttatatcgaaacggcaaggaccaggatggcgatcaggctcccgaatatcgcggtagaacagagctgcttaaggacgctatcggggaagggaaagtgaccctccggatcaggaacgtgaggtttagcgacgagggtggcttcacttgttttttccgagatcacagctaccaagaggaagccgccatggagttgaaggtcgaggaccctttttattgggtttctcctggggtgctggttctgctggctgtgcttcccgtccttctccttcagatcacagtaggcctcgtttttttgtgccttcagtacagattacggggtaagctccgggcagaaatagagaacctccaccgtacctttgtgtttcatctagaagccctttccggatag

SEQ ID NO: 23037 - DNA, 621 bp, Artificial Sequence
  derived and/or modified sequence
atggcttccctgtctcgcccaagcctcccgagttgtctctgtagcttcctgctgctgctgttgctgcaggtgtcgagtagctatgctggtcagttcagagtgataggcccccgccatcccatcagagcattagtcggcgacgaggtagagcttccttgtagaatcagccctggaaaaaacgcaactggtatggaggttggctggtaccgcccccccttctcccgggttgtacatctgtaccgtaacggcaaggaccaggatggagatcaggctcctgagtatcgaggaagaacagagcttttgaaggacgccatcggagaggggaaagtcaccttgcgtattcgcaacgtccgcttctcagatgaaggtggttttacctgttttttccgggaccattcttatcaggaagaggccgccatggagctaaaggtcgaggacccattttactgggtctcccctggagttctggttctgctagctgtgcttccggtgcttcttctccagatcactgtggggcttgtatttctgtgtctccaataccgcctgcgggggaaattacgtgctgagattgaaaaccttcatcgcacctttgtgttccatttagaggccctgtccggatag

SEQ ID NO: 23038 - DNA, 621 bp, Artificial Sequence
  derived and/or modified sequence
atggcctcgctcagtcggccctcactccccagttgcctgtgctctttcctgttgctactgcttctccaggtaagctcaagctacgcagggcaatttcgggtcataggtcctagacaccctatccgagccctcgtcggtgacgaggtggagttgccttgccgcatcagccccggcaaaaacgctaccggaatggaagtagggtggtatcggccaccgttttcccgagtggtccatctctatagaaatggaaaagaccaggatggtgaccaagctccagagtacagagggcggaccgaactgctcaaggacgcgattggcgaaggtaaggtgaccctgaggatacggaacgttaggttcagcgacgaaggcggcttcacatgcttcttccgagaccacagctatcaagaagaagcagcaatggagttgaaggtagaggatccgttttactgggtgtctcctggcgtgctcgtgcttctggcagttctgcccgtgctcctgcttcaaatcacggtgggactggtatttctgtgcctgcagtatcgcctgcggggcaaactgagagccgagattgagaacttgcacagaacattcgtatttcacctggaagcactgagcggttag

SEQ ID NO: 23039 - DNA, 621 bp, Artificial Sequence
  derived and/or modified sequence
atggcttctttatccaggccatccttgcctagttgtctgtgttccttcctcttactcctgctcctgcaagtaagttctagctatgccgggcaatttagggtgataggccctcgtcacccgatccgcgccctggtcggtgatgaagtcgagttgccttgcagaatatctcctggcaaaaatgcaactggaatggaagtcggatggtaccgccccccattttcaagggtggtacacctgtaccgcaatggcaaggaccaggatggcgaccaggccccggaataccgtggtagaacagaattgctaaaggacgccataggggaaggcaaggtaacactgcggatacggaatgtgagattttctgatgaggggggtttcacgtgctttttccgtgaccactcttatcaagaagaagctgctatggaactgaaggtcgaagatcccttctactgggtgtcacctggcgttctggtgctactggcagtgttgcccgtgcttctgctgcagatcacagtcggcctcgtgtttctttgtcttcagtacagactgcggggaaagctgcgggctgaaattgaaaatttgcacagaacattcgtgtttcacctggaggcactcagcggctag

SEQ ID NO: 23040 - DNA, 621 bp, Artificial Sequence
  derived and/or modified sequence
atggcttccctgagcaggccttcccttccatcttgtctgtgctcattcctccttctgctgttgctgcaggtgtccagcagttatgcaggccaattcagagtaattggcccgagacatcctatccgggccctggtaggcgatgaggtagagctgccctgtaggatcagcccaggcaagaacgccactggaatggaagtcggatggtaccgtcccccgttttcaagggttgtgcacctgtatcgaaatggaaaggatcaggacggagaccaggctccagaatatagaggcaggaccgagctcctgaaagacgccataggcgaaggaaaagtcacattgaggatcagaaacgtgaggttttctgacgagggcggatttacttgctttttcagagatcacagttaccaggaggaagccgctatggagctgaaagtcgaagaccccttttactgggtgagtccgggcgtcctggtgctgctcgcagttcttccagttttactgctgcagatcactgttggattagtgtttctgtgcctccaatatagactgagagggaagctgcgagctgagatcgaaaacctgcataggaccttcgtgttccatctggaagcattgtccggatag

SEQ ID NO: 23041 - DNA, 621 bp, Artificial Sequence
  derived and/or modified sequence
atggcttctcttagtagacccagtctgccatcatgcttgtgtagcttcctattactgttgttgttgcaggtatccagcagctacgccggacaattccgggtgattggacctaggcacccaataagggcccttgtaggagatgaggtcgaacttccctgccggatctctcccgggaagaacgccaccggcatggaggttggctggtataggccaccattcagtcgcgttgtgcatctgtatcgaaacggcaaagatcaggatggcgaccaagccccggagtatcgaggccggacagaacttctgaaggatgcaataggcgagggtaaggtcaccctgcgcattagaaacgtgcggttttctgacgaaggcggattcacctgcttttttcgcgatcattcataccaggaggaggccgctatggaacttaaagtcgaggacccgttctactgggtgagccccggcgtgctagttctgcttgcagtcctgccagtcctcctgctccagattacccttggactcgtcttcttgtgccttcagtatcgtctcaggggcaagctgcgtgccgagatcgagaacctacacagaacatttgtatttcatttagaggccctgagcggatag

SEQ ID NO: 23042 - DNA, 642 bp, Artificial Sequence
  derived and/or modified sequence
atggccagcctgagccggcccagcctgcccagctgcctgtgcagcttcctgctgctgctgctgctgcaggtgagcagcagctatgccggccagttccgggtgattggccccaggcaccccatccgggccctggtgggagatgaggtggagctgccctgccgcatcagccctgggaagaatgccaccggcatggaggtgggctggtacagaccacccttcagccgggtggtgcacctgtacagaaatggcaaggaccaggatggagaccaggcccctgagtaccggggccgcacagagctgctgaaggatgccatcggggagggcaaggtgaccctgcgcatcagaaatgtgcgcttcagtgatgaaggaggcttcacctgcttcttccgggaccacagctaccaggaggaggccgccatggagctgaaggtggaggaccccttctactgggtgtccccaggagtgctggtgctgctggccgtgctgcctgtgctgctgctgcagatcaccgtgggcctggtgttcctgtgcctgcagtaccgcctgcggggcaagctgcgggcagaaattgagaacctgcacaggaccttcggccagttcctggaggagctgctcttccacctggaggccctgagcggctag

SEQ ID NO: 23043 - DNA, 621 bp, Artificial Sequence
  derived and/or modified sequence
atggccagcctgagccggcccagcctgcccagctgcctgtgcagcttcctgctgctgctgctgctgcaggtgagcagcagctatgccggccagttccgggtgattggccccaggcaccccatccgggccctggtgggagatgaggtggagctgccctgccgcatcagccctgggaagaatgccaccggcatggaggtgggctggtacagaccacccttcagccgggtggtgcacctgtacagaaatggcaaggaccaggatggagaccaggcccctgagtaccggggccgcacagagctgctgaaggatgccatcggggagggcaaggtgaccctgcgcatcagaaatgtgcgcttcagtgatgaaggaggcttcacctgcttcttccgggaccacagctaccaggaggaggccgccatggagctgaaggtggaggaccccttctactgggtgtccccaggagtgctggtgctgctggccgtgctgcctgtgctgctgctgcagatcaccgtgggcctcatcttcctgtgcctgcagtaccgcctgcggggcaagctgcgggcagaaattgagaacctgcacaggacctttgtgttccacctggaggccctgtctggatag

SEQ ID NO: 23044 - DNA, 642 bp, Artificial Sequence
  derived and/or modified sequence
atggccagcctgagccggcccagcctgcccagctgcctgtgcagcttcctgctgctgctgctgctgcaggtgagcagcagctatgccggccagttccgggtgattggccccaggcaccccatccgggccctggtgggagatgaggtggagctgccctgccgcatcagccctgggaagaatgccaccggcatggaggtgggctggtacagaccacccttcagccgggtggtgcacctgtacagaaatggcaaggaccaggatggagaccaggcccctgagtaccggggccgcacagagctgctgaaggatgccatcggggagggcaaggtgaccctgcgcatcagaaatgtgcgcttcagtgatgaaggaggcttcacctgcttcttccgggaccacagctaccaggaggaggccgccatggagctgaaggtggaggaccccttctactgggtgtccccaggagtgctggtgctgctggccgtgctgcctgtgctgctgctgcagatcaccgtgggcctcatcttcctgtgcctgcagtaccgcctgcggggcaagctgcgggcagaaattgagaacctgcacaggaccttcggccagttcctggaggagctgctcttccacctggaggccctgagcggctag

SEQ ID NO: 23045 - DNA, 615 bp, Artificial Sequence
  derived and/or modified sequence
agcctgagccggcccagcctgcccagctgcctgtgcagcttcctgctgctgctgctgctgcaggtgagcagcagctatgccggccagttccgggtgattggccccaggcaccccatccgggccctggtgggagatgaggtggagctgccctgccgcatcagccctgggaagaatgccaccggcatggaggtgggctggtacagaccacccttcagccgggtggtgcacctgtacagaaatggcaaggaccaggatggagaccaggcccctgagtaccggggccgcacagagctgctgaaggatgccatcggggagggcaaggtgaccctgcgcatcagaaatgtgcgcttcagtgatgaaggaggcttcacctgcttcttccgggaccacagctaccaggaggaggccgccatggagctgaaggtggaggaccccttctactgggtgtccccaggagtgctggtgctgctggccgtgctgcctgtgctgctgctgcagatcaccgtgggcctggtgttcctgtgcctgcagtaccgcctgcggggcaagctgcgggcagaaattgagaacctgcacaggacctttgtgttccacctggaggccctgtctggatag

SEQ ID NO: 23046 - DNA, 615 bp, Artificial Sequence
  derived and/or modified sequence
agcctgagccggcccagcctgcccagctgcctgtgcagcttcctgctgctgctgctgctgcaggtgagcagcagctatgccggccagttccgggtgattggccccaggcaccccatccgggccctggtgggagatgaggtggagctgccctgccgcatcagccctgggaagaatgccaccggcatggaggtgggctggtacagaccacccttcagccgggtggtgcacctgtacagaaatggcaaggaccaggatggagaccaggcccctgagtaccggggccgcacagagctgctgaaggatgccatcggggagggcaaggtgaccctgcgcatcagaaatgtgcgcttcagtgatgaaggaggcttcacctgcttcttccgggaccacagctaccaggaggaggccgccatggagctgaaggtggaggaccccttctactgggtgtccccaggagtgctggtgctgctggccgtgctgcctgtgctgctgctgcagatcaccctgggcctggtgttcctgtgcctgcagtaccgcctgcggggcaagctgcgggcagaaattgagaacctgcacaggacctttgtgttccacctggaggccctgtctggatag

SEQ ID NO: 23047 - DNA, 642 bp, Artificial Sequence
  derived and/or modified sequence
atggccagcctgagccggcccagcctgcccagctgcctgtgcagcttcctgctgctgctgctgctgcaggtgagcagcagctatgccggccagttccgggtgattggccccaggcaccccatccgggccctggtgggagatgaggtggagctgccctgccgcatcagccctgggaagaatgccaccggcatggaggtgggctggtacagaccacccttcagccgggtggtgcacctgtacagaaatggcaaggaccaggatggagaccaggcccctgagtaccggggccgcacagagctgctgaaggatgccatcggggagggcaaggtgaccctgcgcatcagaaatgtgcgcttcagtgatgaaggaggcttcacctgcttcttccgggaccacagctaccaggaggaggccgccatggagctgaaggtggaggaccccttctactgggtgtccccaggagtgctggtgctgctggccgtgctgcctgtgctgctgctgcagatcaccctgggcctggtgttcctgtgcctgcagtaccgcctgcggggcaagctgcgggcagaaattgagaacctgcacaggaccttcggccagttcctggaggagctgctcttccacctggaggccctgagcggctag

SEQ ID NO: 23048 - DNA, 621 bp, Artificial Sequence
  derived and/or modified sequence
atggccagcctgagccggcccagcctgcccagctgcctgtgcagcttcctgctgctgctgctgctgcaggtgagcagcagctatgccggccagttccgggtgattggccccaggcaccccatccgggccctggtgggagatgaggtggagctgccctgccgcatcagccctgggaagaatgccaccggcatggaggtgggctggtacagaccacccttcagccgggtggtgcacctgtacagaaatggcaaggaccaggatggagaccaggcccctgagtaccggggccgcacagagctgctgaaggatgccatcggggagggcaaggtgaccctgcgcatcagaaatgtgcgcttcagtgatgaaggaggcttcacctgcttcttccgggaccacagctaccaggaggaggccgccatggagctgaaggtggaggaccccttctactgggtgtccccaggagtgctggtgctgctggccgtgctgcctgtgctgctgctgcagatcaccgtgggcctggtgttcctgtgcctgcagtaccgcctgcggggcaagctgcgggcagaaattgagaacctgcacaggacctttgtgttccacctggaggccctgtctggatag

SEQ ID NO: 23049 - DNA, 621 bp, Artificial Sequence
  derived and/or modified sequence
atggccagcctgagccggcccagcctgcccagctgcctgtgcagcttcctgctgctgctgctgctgcaggtgagcagcagctatgccggccagttccgggtgattggccccaggcaccccatccgggccctggtgggagatgaggtggagctgccctgccgcatcagccctgggaagaatgccaccggcatggaggtgggctggtacagaccacccttcagccgggtggtgcacctgtacagaaatggcaaggaccaggatggagaccaggcccctgagtaccggggccgcacagagctgctgaaggatgccatcggggagggcaaggtgaccctgcgcatcagaaatgtgcgcttcagtgatgaaggaggcttcacctgcttcttccgggaccacagctaccaggaggaggccgccatggagctgaaggtggaggaccccttctactgggtgtccccaggagtgctggtgctgctggccgtgctgcctgtgctgctgctgcagatcaccctgggcctggtgttcctgtgcctgcagtaccgcctgcggggcaagctgcgggcagaaattgagaacctgcacaggacctttgtgttccacctggaggccctgtctggatag

SEQ ID NO: 23050 - DNA, 1568 bp, Artificial Sequence
  derived and/or modified sequence
atggcaagcttatcgagaccctctctgcccagctgcctctgctccttcctcctcctcctcctcctccaagtgtcttccagctatgcagggcagttcagagtgataggaccaagacaccctatccgggctctggtcggggatgaagtggaattgccatgtcgcatatctcctgggaagaacgctacaggcatggaggtggggtggtaccgcccccccttctctagggtggttcatctctacagaaatggcaaggaccaagatggagaccaggcacctgaatatcggggccggacagagctgctgaaagatgctattggtgagggaaaggtgactctcaggatccggaatgtaaggttctcagatgaaggaggtttcacctgcttcttccgagatcattcttaccaagaggaggcagcaatggaattgaaagtagaagatcctttctactgggtgagccctggagtgctggttctcctcgcggtgctgcctgtgctcctcctgcagatcactgttggcctcgtcttcctctgcctgcagtacagactgagaggaaaacttcgagcagagatagagaatctccaccggacttttgggcaattccttgaagagctactcttccacctggaagccctctctggctaaggacaggcaggtgcccctctctccatcagaggacacctgtactggagagcaacacaggatggtctctgccatgaactggaggccaggaatctcctcactgaaaattacagtatggtaactttgcaaatggtggttgtttcttccaagactccagccctgattgcgcaaaactgaaaggcatgtgaagggaaggaagaggaagagtgcaaaacattgaagagagagctgagtgagctgaagagtgaggatatgagtagccccaacccaaacctggagatggggagaaacctacagaatactagccagagctcctccttgtcttggcagcctactagggacctggggaagcaaaaacgaaagctgggcaacatgcctgctttagaatgttttccttctacttacacatcttccacaggtctcagaatctttccttcctctcatccttttctcctatcttcatatctatcagagtatccactgtttattcaacaactactacttgatggtcagacacaaacaaacaagctaggtgctaattaataaagatatgagttttggccgggtgcggtggctcacgcctgtaatcccagcactttgggaggccgaggcgggcgaatcacgaggtcaggagttcgagaccagcctggccaacatggtgaaaccccatctctactaaaaatacaaacaattaactgagcatagtggtgggcacctataataccagctactccggaggctgaggcaggagaatcgcttgaacccaggaggcagaggttgcagtgagctgagatcgcgccactgcactctagccagagtgacagagtaagactctgtctcaaaaataaataaataaataaataaataaataaataaataaataaataaataaaaaataataatacaagttttcataagcacacttctaa

SEQ ID NO: 23051 - DNA, 889 bp, Artificial Sequence
  derived and/or modified sequence
atggcaagcttatcaagaccctctctgcccagctgcctctgctccttcctcctcctcctcctcctccaagtgtcttccagctatgcagggcagttcagagtgataggaccaagacaccctatccgggctctggtcggggatgaagtggaattgccatgtcgcatatctcctgggaagaacgctacaggcatggaggtggggtggtaccgcccccccttctctagggtggttcatctctacagaaatggcaaggaccaagatggagaccaggcacctgaatatcggggccggacagagctgctgaaagatgctattggtgagggaaaggtgactctcaggatccggaatgtaaggttctcagatgaaggaggtttcacctgcttcttccgagatcattcttaccaagaggaggcagcaatggaattgaaagtagaagatcctttctactgggtgagccctggagtgctggttctcctcgcggtgctgcctgtgctcctcctgcagatcactgttggcctcatcttcctctgcctgcagtacagactgagaggaaaacttcgagcagagatagagaatctccaccggacttttgtcttccacctggaagccctctctggctaaggacaggcaggtgcccctctctccatcagaggacacctgtactggagagcaacacaggatggtctctgccatgaactggaggccaggaatctcctcactgaaaattacagtatggtaactttgcaaatggtggttgtttcttccaagactccagccctgattgcgcaaaactgaaaggcatgtgaagggaaggaagaggaagagtgcaaaacattgaagagagagctgagtgagctgaagagtgaggatatgagtagccccaacccaa

SEQ ID NO: 23052 - DNA, 910 bp, Artificial Sequence
  derived and/or modified sequence
atggcaagcttatcaagaccctctctgcccagctgcctctgctccttcctcctcctcctcctcctccaagtgtcttccagctatgcagggcagttcagagtgataggaccaagacaccctatccgggctctggtcggggatgaagtggaattgccatgtcgcatatctcctgggaagaacgctacaggcatggaggtggggtggtaccgcccccccttctctagggtggttcatctctacagaaatggcaaggaccaagatggagaccaggcacctgaatatcggggccggacagagctgctgaaagatgctattggtgagggaaaggtgactctcaggatccggaatgtaaggttctcagatgaaggaggtttcacctgcttcttccgagatcattcttaccaagaggaggcagcaatggaattgaaagtagaagatcctttctactgggtgagccctggagtgctggttctcctcgcggtgctgcctgtgctcctcctgcagatcactgttggcctcatcttcctctgcctgcagtacagactgagaggaaaacttcgagcagagatagagaatctccaccggacttttgggcaattccttgaagagctactcttccacctggaagccctctctggctaaggacaggcaggtgcccctctctccatcagaggacacctgtactggagagcaacacaggatggtctctgccatgaactggaggccaggaatctcctcactgaaaattacagtatggtaactttgcaaatggtggttgtttcttccaagactccagccctgattgcgcaaaactgaaaggcatgtgaagggaaggaagaggaagagtgcaaaacattgaagagagagctgagtgagctgaagagtgaggatatgagtagccccaacccaa

SEQ ID NO: 23053 - DNA, 1572 bp, Artificial Sequence
  derived and/or modified sequence
atggcaagcttatcgagaccctctctgcccagctgcctctgctccttcctcctcctcctcctcctccaagtgtcttccagctatgcagggcagttcagagtgataggaccaagacaccctatccgggctctggtcggggatgaagtggaattgccatgtcgcatatctcctgggaagaacgctacaggcatggaggtggggtggtaccgcccccccttctctagggtggttcatctctacagaaatggcaaggaccaagatggagaccaggcacctgaatatcggggccggacagagctgctgaaagatgctattggtgagggaaaggtgactctcaggatccggaatgtaaggttctcagatgaaggaggtttcacctgcttcttccgagatcattcttaccaagaggaggcagcaatggaattgaaagtagaagatcctttctactgggtgagccctggagtgctggttctcctcgcggtgctgcctgtgctcctcctgcagatcactgttggcctcgtcttcctctgcctgcagtacagactgagaggaaaacttcgagcagagatagagaatctccaccggacttttgggcaattccttgaagagctactcttccacctggaagccctctctggctaaggacaggcaggtgcccctctctccatcagaggacacctgtactggagagcaacacaggatggtctctgccatgaactggaggccaggaatctcctcactgaaaattacagtatggtaactttgcaaatggtggttgtttcttccaagactccagccctgattgcgcaaaactgaaaggcatgtgaagggaaggaagaggaagagtgcaaaacattgaagagagagctgagtgagctgaagagtgaggatatgagtagccccaacccaaacctggagatggggagaaacctacagaatactagccagagctcctccttgtcttggcagcctactagggacctggggaagcaaaaacgaaagctgggcaacatgcctgctttagaatgttttccttctacttacacatcttccacaggtctcagaatctttccttcctctcatccttttctcctatcttcatatctatcagagtatccactgtttattcaacaactactacttgatggtcagacacaaacaaacaagctaggtgctaattaataaagatacgagttttggccgggtgcggtggctcacgcctgtaatcccagcactttgggaggccgaggcgggcgaatcacgaggtcaggagttcaagaccagcctggccaacatggtgaaaccccatctctactaaaaatacaaacaattaactgagcatagtggtgggcacctataataccagctactccggaggctgaggcaggagaatcgcttgaacccaggaggcagaggttgcagtgagctgagatcgcgccactgcactctagccggagtgacagagtaagactctgtctcaaaaataaataaataaataaataaataaataaataaataaataaataaataaataaaaaataataatacaagttttcataagcacacttctaa

SEQ ID NO: 23054 - DNA, 1541 bp, Artificial Sequence
  derived and/or modified sequence
agcttatcgagaccctctctgcccagctgcctctgctccttcctcctcctcctcctcctccaagtgtcttccagctatgcagggcagttcagagtgataggaccaagacaccctatccgggctctggtcggggatgaagtggaattgccatgtcgcatatctcctgggaagaacgctacaggcatggaggtggggtggtaccgcccccccttctctagggtggttcatctctacagaaatggcaaggaccaagatggagaccaggcacctgaatatcggggccggacagagctgctgaaagatgctattggtgagggaaaggtgactctcaggatccggaatgtaaggttctcagatgaaggaggtttcacctgcttcttccgagatcattcttaccaagaggaggcagcaatggaattgaaagtagaagatcctttctactgggtgagccctggagtgctggttctcctcgcggtgctgcctgtgctcctcctgcagatcactgttggcctcgtcttcctctgcctgcagtacagactgagaggaaaacttcgagcagagatagagaatctccaccggacttttgtcttccacctggaagccctctctggctaaggacaggcaggtgcccctctctccatcagaggacacctgtactggagagcaacacaggatggtctctgccatgaactggaggccaggaatctcctcactgaaaattacagtatggtaactttgcaaatggtggttgtttcttccaagactccagccctgattgcgcaaaactgaaaggcatgtgaagggaaggaagaggaagagtgcaaaacattgaagagagagctgagtgagctgaagagtgaggatatgagtagccccaacccaaacctggagatggggagaaacctacagaatactagccagagctcctccttgtcttggcagcctactagggacctggggaagcaaaaacgaaagctgggcaacatgcctgctttagaatgttttccttctacttacacatcttccacaggtctcagaatctttccttcctctcatccttttctcctatcttcatatctatcagagtatccactgtttattcaacaactactacttgatggtcagacacaaacaaacaagctaggtgctaattaataaagatatgagttttggccgggtgcggtggctcacgcctgtaatcccagcactttgggaggccgaggcgggcgaatcacgaggtcaggagttcgagaccagcctggccaacatggtgaaaccccatctctactaaaaatacaaacaattaactgagcatagtggtgggcacctataataccagctactccggaggctgaggcaggagaatcgcttgaacccaggaggcagaggttgcagtgagctgagatcgcgccactgcactctagccagagtgacagagtaagactctgtctcaaaaataaataaataaataaataaataaataaataaataaataaataaataaaaaataataatacaagttttcataagcacacttctaa

SEQ ID NO: 23055 - DNA, 1568 bp, Artificial Sequence
  derived and/or modified sequence
atggcaagcttatcgagaccctctctgcccagctgcctctgctccttcctcctcctcctcctcctccaagtgtcttccagctatgcagggcagttcagagtgataggaccaagacaccctatccgggctctggtcggggatgaagtggaattgccatgtcgcatatctcctgggaagaacgctacaggcatggaggtggggtggtaccgcccccccttctctagggtggttcatctctacagaaatggcaaggaccaagatggagaccaggcacctgaatatcggggccggacagagctgctgaaagatgctattggtgagggaaaggtgactctcaggatccggaatgtaaggttctcagatgaaggaggtttcacctgcttcttccgagatcattcttaccaagaggaggcagcaatggaattgaaagtagaagatcctttctactgggtgagccctggagtgctggttctcctcgcggtgctgcctgtgctcctcctgcagatcactgttggcctcgtcttcctctgcctgcagtacagactgagaggaaaacttcgagcagagatagagaatctccaccggacttttgggcaattccttgaagagctactcttccacctggaagccctctctggctaaggacaggcaggtgcccctctctccatcagaggacacctgtactggagagcaacacaggatggtctctgccatgaactggaggccaggaatctcctcactgaaaattacagtatggtaactttgcaaatggtggttgtttcttccaagactccagccctgattgcgcaaaactgaaaggcatgtgaagggaaggaagaggaagagtgcaaaacattgaagagagagctgagtgagctgaagagtgaggatatgagtagccccaacccaaacctggagatggggagaaacctacagaatactagccagagctcctccttgtcttggcagcctactagggacctggggaagcaaaaacgaaagctgggcaacatgcctgctttagaatgttttccttctacttacacatcttccacaggtctcagaatctttccttcctctcatccttttctcctatcttcatatctatcagagtatccactgtttattcaacaactactacttgatggtcagacacaaacaaacaagctaggtgctaattaataaagatacgagttttggccgggtgcggtggctcacgcctgtaatcccagcactttgggaggccgaggcgggcgaatcacgaggtcaggagttcaagaccagcctggccaacatggtgaaaccccatctctactaaaaatacaaacaattaactgagcatagtggtgggcacctataataccagctactccggaggctgaggcaggagaatcgcttgaacccaggaggcagaggttgcagtgagctgagatcgcgccactgcactctagccggagtgacagagtaagactctgtctcaaaaataaataaataaataaataaataaataaataaataaataaataaataaaaaataataatacaagttttcataagcacacttctaa

SEQ ID NO: 23056 - DNA, 1541 bp, Artificial Sequence
  derived and/or modified sequence
agcttatcgagaccctctctgcccagctgcctctgctccttcctcctcctcctcctcctccaagtgtcttccagctatgcagggcagttcagagtgataggaccaagacaccctatccgggctctggtcggggatgaagtggaattgccatgtcgcatatctcctgggaagaacgctacaggcatggaggtggggtggtaccgcccccccttctctagggtggttcatctctacagaaatggcaaggaccaagatggagaccaggcacctgaatatcggggccggacagagctgctgaaagatgctattggtgagggaaaggtgactctcaggatccggaatgtaaggttctcagatgaaggaggtttcacctgcttcttccgagatcattcttaccaagaggaggcagcaatggaattgaaagtagaagatcctttctactgggtgagccctggagtgctggttctcctcgcggtgctgcctgtgctcctcctgcagatcactgttggcctcgtcttcctctgcctgcagtacagactgagaggaaaacttcgagcagagatagagaatctccaccggacttttgtcttccacctggaagccctctctggctaaggacaggcaggtgcccctctctccatcagaggacacctgtactggagagcaacacaggatggtctctgccatgaactggaggccaggaatctcctcactgaaaattacagtatggtaactttgcaaatggtggttgtttcttccaagactccagccctgattgcgcaaaactgaaaggcatgtgaagggaaggaagaggaagagtgcaaaacattgaagagagagctgagtgagctgaagagtgaggatatgagtagccccaacccaaacctggagatggggagaaacctacagaatactagccagagctcctccttgtcttggcagcctactagggacctggggaagcaaaaacgaaagctgggcaacatgcctgctttagaatgttttccttctacttacacatcttccacaggtctcagaatctttccttcctctcatccttttctcctatcttcatatctatcagagtatccactgtttattcaacaactactacttgatggtcagacacaaacaaacaagctaggtgctaattaataaagatacgagttttggccgggtgcggtggctcacgcctgtaatcccagcactttgggaggccgaggcgggcgaatcacgaggtcaggagttcaagaccagcctggccaacatggtgaaaccccatctctactaaaaatacaaacaattaactgagcatagtggtgggcacctataataccagctactccggaggctgaggcaggagaatcgcttgaacccaggaggcagaggttgcagtgagctgagatcgcgccactgcactctagccggagtgacagagtaagactctgtctcaaaaataaataaataaataaataaataaataaataaataaataaataaataaaaaataataatacaagttttcataagcacacttctaa

SEQ ID NO: 23057 - DNA, 1533 bp, Artificial Sequence
  derived and/or modified sequence
agcttatcgagaccctctctgcccagctgcctctgctccttcctcctcctcctcctcctccaagtgtcttccagctatgcagggcagttcagagtgataggaccaagacaccctatccgggctctggtcggggatgaagtggaattgccatgtcgcatatctcctgggaagaacgctacaggcatggaggtggggtggtaccgcccccccttctctagggtggttcatctctacagaaatggcaaggaccaagatggagaccaggcacctgaatatcggggccggacagagctgctgaaagatgctattggtgagggaaaggtgactctcaggatccggaatgtaaggttctcagatgaaggaggtttcacctgcttcttccgagatcattcttaccaagaggaggcagcaatggaattgaaagtagaagatcctttctactgggtgagccctggagtgctggttctcctcgcggtgctgcctgtgctcctcctgcagatcactcttggcctcgtcttcctctgcctgcagtacagactgagaggaaaacttcgagcagagatagagaatctccaccggacttttgtcttccacctggaagccctctctggctaaggacaggcaggtgcccctctctccatcagaggacacctgtactggagagcaacacaggatggtctctgccatgaactggaggccaggaatctcctcactgaaaattacagtatggtaactttgcaaatggtggttgtttcttccaagactccagccctgattgcgcaaaactgaaaggcatgtgaagggaaggaagaggaagagtgcaaaacattgaagagagagctgagtgagctgaagagtgaggatatgagtagccccaacccaaacctggagatggggagaaacctacagaatactagccagagctcctccttgtcttggcagcctactagggacctggggaagcaaaaacgaaagctgggcaacatgcctgctttagaatgttttccttctacttacacatcttccacaggtctcagaatctttccttcctctcatccttttctcctatcttcatatctatcagagtatccactgtttattcaacaactactacttgatggtcagacacaaacaaacaagctaggtgctaattaataaagatacgagttttggccgggtgcggtggctcacgcctgtaatcccagcactttgggaggccgaggcgggcgaatcacgaggtcaggagttcaagaccagcctggccaacatggtgaaaccccatctctactaaaaatacaaacaattaactgagcatagtggtgggcacctataataccagctactccggaggctgaggcaggagaatcgcttgaacccaggaggcagaggttgcagtgagctgagatcgcgccactgcactctagccggagtgacagagtaagactctgtctcaaaaataaataaataaataaataaataaataaataaataaataaaaaataataatacaagttttcataagcacacttctaa

SEQ ID NO: 23058 - DNA, 1564 bp, Artificial Sequence
  derived and/or modified sequence
atggcaagcttatcgagaccctctctgcccagctgcctctgctccttcctcctcctcctcctcctccaagtgtcttccagctatgcagggcagttcagagtgataggaccaagacaccctatccgggctctggtcggggatgaagtggaattgccatgtcgcatatctcctgggaagaacgctacaggcatggaggtggggtggtaccgcccccccttctctagggtggttcatctctacagaaatggcaaggaccaagatggagaccaggcacctgaatatcggggccggacagagctgctgaaagatgctattggtgagggaaaggtgactctcaggatccggaatgtaaggttctcagatgaaggaggtttcacctgcttcttccgagatcattcttaccaagaggaggcagcaatggaattgaaagtagaagatcctttctactgggtgagccctggagtgctggttctcctcgcggtgctgcctgtgctcctcctgcagatcactgttggcctcgtcttcctctgcctgcagtacagactgagaggaaaacttcgagcagagatagagaatctccaccggacttttgggcaattccttgaagagctactcttccacctggaagccctctctggctaaggacaggcaggtgcccctctctccatcagaggacacctgtactggagagcaacacaggatggtctctgccatgaactggaggccaggaatctcctcactgaaaattacagtatggtaactttgcaaatggtggttgtttcttccaagactccagccctgattgcgcaaaactgaaaggcatgtgaagggaaggaagaggaagagtgcaaaacattgaagagagagctgagtgagctgaagagtgaggatatgagtagccccaacccaaacctggagatggggagaaacctacagaatactagccagagctcctccttgtcttggcagcctactagggacctggggaagcaaaaacgaaagctgggcaacatgcctgctttagaatgttttccttctacttacacatcttccacaggtctcagaatctttccttcctctcatccttttctcctatcttcatatctatcagagtatccactgtttattcaacaactactacttgatggtcagacacaaacaaacaagctaggtgctaattaataaagatacgagttttggccgggtgcggtggctcacgcctgtaatcccagcactttgggaggccgaggcgggcgaatcacgaggtcaggagttcgagaccagcctggccaacatggtgaaaccccatctctactaaaaatacaaacaattaactgagcatagtggtgggcacctataataccagctactccggaggctgaggcaggagaatcgcttgaacccaggaggcagaggttgcagtgagctgagatcgcgccactgcactctagccagagtgacagagtaagactctgtctcaaaaataaataaataaataaataaataaataaataaataaataaataaaaaataataatacaagttttcataagcacacttctaa

SEQ ID NO: 23059 - DNA, 1564 bp, Artificial Sequence
  derived and/or modified sequence
atggcaagcttatcgagaccctctctgcccagctgcctctgctccttcctcctcctcctcctcctccaagtgtcttccagctatgcagggcagttcagagtgataggaccaagacaccctatccgggctctggtcggggatgaagtggaattgccatgtcgcatatctcctgggaagaacgctacaggcatggaggtggggtggtaccgcccccccttctctagggtggttcatctctacagaaatggcaaggaccaagatggagaccaggcacctgaatatcggggccggacagagctgctgaaagatgctattggtgagggaaaggtgactctcaggatccggaatgtaaggttctcagatgaaggaggtttcacctgcttcttccgagatcattcttaccaagaggaggcagcaatggaattgaaagtagaagatcctttctactgggtgagccctggagtgctggttctcctcgcggtgctgcctgtgctcctcctgcagatcactgttggcctcgtcttcctctgcctgcagtacagactgagaggaaaacttcgagcagagatagagaatctccaccggacttttgggcaattccttgaagagctactcttccacctggaagccctctctggctaaggacaggcaggtgcccctctctccatcagaggacacctgtactggagagcaacacaggatggtctctgccatgaactggaggccaggaatctcctcactgaaaattacagtatggtaactttgcaaatggtggttgtttcttccaagactccagccctgattgcgcaaaactgaaaggcatgtgaagggaaggaagaggaagagtgcaaaacattgaagagagagctgagtgagctgaagagtgaggatatgagtagccccaacccaaacctggagatggggagaaacctacagaatactagccagagctcctccttgtcttggcagcctactagggacctggggaagcaaaaacgaaagctgggcaacatgcctgctttagaatgttttccttctacttacacatcttccacaggtctcagaatctttccttcctctcatccttttctcctatcttcatatctatcagagtatccactgtttattcaacaactactacttgatggtcagacacaaacaaacaagctaggtgctaattaataaagatacgagttttggccgggtgcggtggctcacgcctgtaatcccagcactttgggaggccgaggcgggcgaatcacgaggtcaggagttcaagaccagcctggccaacatggtgaaaccccatctctactaaaaatacaaacaattaactgagcatagtggtgggcacctataataccagctactccggaggctgaggcaggagaatcgcttgaacccaggaggcagaggttgcagtgagctgagatcgcgccactgcactctagccggagtgacagagtaagactctgtctcaaaaataaataaataaataaataaataaataaataaataaataaataaaaaataataatacaagttttcataagcacacttctaa

SEQ ID NO: 23060 - DNA, 1545 bp, Artificial Sequence
  derived and/or modified sequence
agcttatcgagaccctctctgcccagctgcctctgctccttcctcctcctcctcctcctccaagtgtcttccagctatgcagggcagttcagagtgataggaccaagacaccctatccgggctctggtcggggatgaagtggaattgccatgtcgcatatctcctgggaagaacgctacaggcatggaggtggggtggtaccgcccccccttctctagggtggttcatctctacagaaatggcaaggaccaagatggagaccaggcacctgaatatcggggccggacagagctgctgaaagatgctattggtgagggaaaggtgactctcaggatccggaatgtaaggttctcagatgaaggaggtttcacctgcttcttccgagatcattcttaccaagaggaggcagcaatggaattgaaagtagaagatcctttctactgggtgagccctggagtgctggttctcctcgcggtgctgcctgtgctcctcctgcagatcactgttggcctcgtcttcctctgcctgcagtacagactgagaggaaaacttcgagcagagatagagaatctccaccggacttttgtcttccacctggaagccctctctggctaaggacaggcaggtgcccctctctccatcagaggacacctgtactggagagcaacacaggatggtctctgccatgaactggaggccaggaatctcctcactgaaaattacagtatggtaactttgcaaatggtggttgtttcttccaagactccagccctgattgcgcaaaactgaaaggcatgtgaagggaaggaagaggaagagtgcaaaacattgaagagagagctgagtgagctgaagagtgaggatatgagtagccccaacccaaacctggagatggggagaaacctacagaatactagccagagctcctccttgtcttggcagcctactagggacctggggaagcaaaaacgaaagctgggcaacatgcctgctttagaatgttttccttctacttacacatcttccacaggtctcagaatctttccttcctctcatccttttctcctatcttcatatctatcagagtatccactgtttattcaacaactactacttgatggtcagacacaaacaaacaagctaggtgctaattaataaagatacgagttttggccgggtgcggtggctcacgcctgtaatcccagcactttgggaggccgaggcgggcgaatcacgaggtcaggagttcaagaccagcctggccaacatggtgaaaccccatctctactaaaaatacaaacaattaactgagcatagtggtgggcacctataataccagctactccggaggctgaggcaggagaatcgcttgaacccaggaggcagaggttgcagtgagctgagatcgcgccactgcactctagccggagtgacagagtaagactctgtctcaaaaataaataaataaataaataaataaataaataaataaataaataaataaataaaaaataataatacaagttttcataagcacacttctaa

SEQ ID NO: 23061 - DNA, 1560 bp, Artificial Sequence
  derived and/or modified sequence
atggcaagcttatcgagaccctctctgcccagctgcctctgctccttcctcctcctcctcctcctccaagtgtcttccagctatgcagggcagttcagagtgataggaccaagacaccctatccgggctctggtcggggatgaagtggaattgccatgtcgcatatctcctgggaagaacgctacaggcatggaggtggggtggtaccgcccccccttctctagggtggttcatctctacagaaatggcaaggaccaagatggagaccaggcacctgaatatcggggccggacagagctgctgaaagatgctattggtgagggaaaggtgactctcaggatccggaatgtaaggttctcagatgaaggaggtttcacctgcttcttccgagatcattcttaccaagaggaggcagcaatggaattgaaagtagaagatcctttctactgggtgagccctggagtgctggttctcctcgcggtgctgcctgtgctcctcctgcagatcactcttggcctcgtcttcctctgcctgcagtacagactgagaggaaaacttcgagcagagatagagaatctccaccggacttttgggcaattccttgaagagctactcttccacctggaagccctctctggctaaggacaggcaggtgcccctctctccatcagaggacacctgtactggagagcaacacaggatggtctctgccatgaactggaggccaggaatctcctcactgaaaattacagtatggtaactttgcaaatggtggttgtttcttccaagactccagccctgattgcgcaaaactgaaaggcatgtgaagggaaggaagaggaagagtgcaaaacattgaagagagagctgagtgagctgaagagtgaggatatgagtagccccaacccaaacctggagatggggagaaacctacagaatactagccagagctcctccttgtcttggcagcctactagggacctggggaagcaaaaacgaaagctgggcaacatgcctgctttagaatgttttccttctacttacacatcttccacaggtctcagaatctttccttcctctcatccttttctcctatcttcatatctatcagagtatccactgtttattcaacaactactacttgatggtcagacacaaacaaacaagctaggtgctaattaataaagatacgagttttggccgggtgcggtggctcacgcctgtaatcccagcactttgggaggccgaggcgggcgaatcacgaggtcaggagttcaagaccagcctggccaacatggtgaaaccccatctctactaaaaatacaaacaattaactgagcatagtggtgggcacctataataccagctactccggaggctgaggcaggagaatcgcttgaacccaggaggcagaggttgcagtgagctgagatcgcgccactgcactctagccggagtgacagagtaagactctgtctcaaaaataaataaataaataaataaataaataaataaataaataaaaaataataatacaagttttcataagcacacttctaa

SEQ ID NO: 23062 - DNA, 1537 bp, Artificial Sequence
  derived and/or modified sequence
agcttatcgagaccctctctgcccagctgcctctgctccttcctcctcctcctcctcctccaagtgtcttccagctatgcagggcagttcagagtgataggaccaagacaccctatccgggctctggtcggggatgaagtggaattgccatgtcgcatatctcctgggaagaacgctacaggcatggaggtggggtggtaccgcccccccttctctagggtggttcatctctacagaaatggcaaggaccaagatggagaccaggcacctgaatatcggggccggacagagctgctgaaagatgctattggtgagggaaaggtgactctcaggatccggaatgtaaggttctcagatgaaggaggtttcacctgcttcttccgagatcattcttaccaagaggaggcagcaatggaattgaaagtagaagatcctttctactgggtgagccctggagtgctggttctcctcgcggtgctgcctgtgctcctcctgcagatcactgttggcctcgtcttcctctgcctgcagtacagactgagaggaaaacttcgagcagagatagagaatctccaccggacttttgtcttccacctggaagccctctctggctaaggacaggcaggtgcccctctctccatcagaggacacctgtactggagagcaacacaggatggtctctgccatgaactggaggccaggaatctcctcactgaaaattacagtatggtaactttgcaaatggtggttgtttcttccaagactccagccctgattgcgcaaaactgaaaggcatgtgaagggaaggaagaggaagagtgcaaaacattgaagagagagctgagtgagctgaagagtgaggatatgagtagccccaacccaaacctggagatggggagaaacctacagaatactagccagagctcctccttgtcttggcagcctactagggacctggggaagcaaaaacgaaagctgggcaacatgcctgctttagaatgttttccttctacttacacatcttccacaggtctcagaatctttccttcctctcatccttttctcctatcttcatatctatcagagtatccactgtttattcaacaactactacttgatggtcagacacaaacaaacaagctaggtgctaattaataaagatacgagttttggccgggtgcggtggctcacgcctgtaatcccagcactttgggaggccgaggcgggcgaatcacgaggtcaggagttcaagaccagcctggccaacatggtgaaaccccatctctactaaaaatacaaacaattaactgagcatagtggtgggcacctataataccagctactccggaggctgaggcaggagaatcgcttgaacccaggaggcagaggttgcagtgagctgagatcgcgccactgcactctagccggagtgacagagtaagactctgtctcaaaaataaataaataaataaataaataaataaataaataaataaataaaaaataataatacaagttttcataagcacacttctaa

SEQ ID NO: 23063 - DNA, 1537 bp, Artificial Sequence
  derived and/or modified sequence
agcttatcgagaccctctctgcccagctgcctctgctccttcctcctcctcctcctcctccaagtgtcttccagctatgcagggcagttcagagtgataggaccaagacaccctatccgggctctggtcggggatgaagtggaattgccatgtcgcatatctcctgggaagaacgctacaggcatggaggtggggtggtaccgcccccccttctctagggtggttcatctctacagaaatggcaaggaccaagatggagaccaggcacctgaatatcggggccggacagagctgctgaaagatgctattggtgagggaaaggtgactctcaggatccggaatgtaaggttctcagatgaaggaggtttcacctgcttcttccgagatcattcttaccaagaggaggcagcaatggaattgaaagtagaagatcctttctactgggtgagccctggagtgctggttctcctcgcggtgctgcctgtgctcctcctgcagatcactgttggcctcgtcttcctctgcctgcagtacagactgagaggaaaacttcgagcagagatagagaatctccaccggacttttgtcttccacctggaagccctctctggctaaggacaggcaggtgcccctctctccatcagaggacacctgtactggagagcaacacaggatggtctctgccatgaactggaggccaggaatctcctcactgaaaattacagtatggtaactttgcaaatggtggttgtttcttccaagactccagccctgattgcgcaaaactgaaaggcatgtgaagggaaggaagaggaagagtgcaaaacattgaagagagagctgagtgagctgaagagtgaggatatgagtagccccaacccaaacctggagatggggagaaacctacagaatactagccagagctcctccttgtcttggcagcctactagggacctggggaagcaaaaacgaaagctgggcaacatgcctgctttagaatgttttccttctacttacacatcttccacaggtctcagaatctttccttcctctcatccttttctcctatcttcatatctatcagagtatccactgtttattcaacaactactacttgatggtcagacacaaacaaacaagctaggtgctaattaataaagatacgagttttggccgggtgcggtggctcacgcctgtaatcccagcactttgggaggccgaggcgggcgaatcacgaggtcaggagttcgagaccagcctggccaacatggtgaaaccccatctctactaaaaatacaaacaattaactgagcatagtggtgggcacctataataccagctactccggaggctgaggcaggagaatcgcttgaacccaggaggcagaggttgcagtgagctgagatcgcgccactgcactctagccagagtgacagagtaagactctgtctcaaaaataaataaataaataaataaataaataaataaataaataaataaaaaataataatacaagttttcataagcacacttctaa

SEQ ID NO: 23064 - DNA, 1774 bp, Artificial Sequence
  derived and/or modified sequence
gtcatcccctcagtctgtagcccttttgtgtgagtgcctggcaagggtgacgtggggctgtttctgcgggcacagctgcagcaattaccggagtggaggcagggcccaggcagcactgccctccaagatcttcccttgggcttttcagcagtaaggggacatgcaccccaagggcctccacttggcctgaccttgctgcgggggctctctgtccccaggaacagtagagatggcaagcttatcgagaccctctctgcccagctgcctctgctccttcctcctcctcctcctcctccaagtgtcttccagctatgcagggcagttcagagtgataggaccaagacaccctatccgggctctggtcggggatgaagtggaattgccatgtcgcatatctcctgggaagaacgctacaggcatggaggtggggtggtaccgcccccccttctctagggtggttcatctctacagaaatggcaaggaccaagatggagaccaggcacctgaatatcggggccggacagagctgctgaaagatgctattggtgagggaaaggtgactctcaggatccggaatgtaaggttctcagatgaaggaggtttcacctgcttcttccgagatcattcttaccaagaggaggcagcaatggaattgaaagtagaagatcctttctactgggtgagccctggagtgctggttctcctcgcggtgctgcctgtgctcctcctgcagatcactgttggcctcgtcttcctctgcctgcagtacagactgagaggaaaacttcgagcagagatagagaatctccaccggacttttgtcttccacctggaagccctctctggctaaggacaggcaggtgcccctctctccatcagaggacacctgtactggagagcaacacaggatggtctctgccatgaactggaggccaggaatctcctcactgaaaattacagtatggtaactttgcaaatggtggttgtttcttccaagactccagccctgattgcgcaaaactgaaaggcatgtgaagggaaggaagaggaagagtgcaaaacattgaagagagagctgagtgagctgaagagtgaggatatgagtagccccaacccaaacctggagatggggagaaacctacagaatactagccagagctcctccttgtcttggcagcctactagggacctggggaagcaaaaacgaaagctgggcaacatgcctgctttagaatgttttccttctacttacacatcttccacaggtctcagaatctttccttcctctcatccttttctcctatcttcatatctatcagagtatccactgtttattcaacaactactacttgatggtcagacacaaacaaacaagctaggtgctaattaataaagatacgagttttggccgggtgcggtggctcacgcctgtaatcccagcactttgggaggccgaggcgggcgaatcacgaggtcaggagttcaagaccagcctggccaacatggtgaaaccccatctctactaaaaatacaaacaattaactgagcatagtggtgggcacctataataccagctactccggaggctgaggcaggagaatcgcttgaacccaggaggcagaggttgcagtgagctgagatcgcgccactgcactctagccggagtgacagagtaagactctgtctcaaaaataaataaataaataaataaataaataaataaataaataaataaataaaaaataataatacaagttttcataagcacacttct

SEQ ID NO: 23065 - DNA, 1774 bp, Artificial Sequence
  derived and/or modified sequence
gtcatcccctcagtctgtagcccttttgtgtgagtgcctggcaagggtgacgtggggctgtttctgcgggcacagctgcagcaattaccggagtggaggcagggcccaggcagcactgccctccaagatcttcccttgggcttttcagcagtaaggggacatgcaccccaagggcctccacttggcctgaccttgctgcgggggctctctgtccccaggaacagtagagatggcaagcttatcgagaccctctctgcccagctgcctctgctccttcctcctcctcctcctcctccaagtgtcttccagctatgcagggcagttcagagtgataggaccaagacaccctatccgggctctggtcggggatgaagtggaattgccatgtcgcatatctcctgggaagaacgctacaggcatggaggtggggtggtaccgcccccccttctctagggtggttcatctctacagaaatggcaaggaccaagatggagaccaggcacctgaatatcggggccggacagagctgctgaaagatgctattggtgagggaaaggtgactctcaggatccggaatgtaaggttctcagatgaaggaggtttcacctgcttcttccgagatcattcttaccaagaggaggcagcaatggaattgaaagtagaagatcctttctactgggtgagccctggagtgctggttctcctcgcggtgctgcctgtgctcctcctgcagatcactgttggcctcgtcttcctctgcctgcagtacagactgagaggaaaacttcgagcagagatagagaatctccaccggacttttgtcttccacctggaagccctctctggctaaggacaggcaggtgcccctctctccatcagaggacacctgtactggagagcaacacaggatggtctctgccatgaactggaggccaggaatctcctcactgaaaattacagtatggtaactttgcaaatggtggttgtttcttccaagactccagccctgattgcgcaaaactgaaaggcatgtgaagggaaggaagaggaagagtgcaaaacattgaagagagagctgagtgagctgaagagtgaggatatgagtagccccaacccaaacctggagatggggagaaacctacagaatactagccagagctcctccttgtcttggcagcctactagggacctggggaagcaaaaacgaaagctgggcaacatgcctgctttagaatgttttccttctacttacacatcttccacaggtctcagaatctttccttcctctcatccttttctcctatcttcatatctatcagagtatccactgtttattcaacaactactacttgatggtcagacacaaacaaacaagctaggtgctaattaataaagatatgagttttggccgggtgcggtggctcacgcctgtaatcccagcactttgggaggccgaggcgggcgaatcacgaggtcaggagttcgagaccagcctggccaacatggtgaaaccccatctctactaaaaatacaaacaattaactgagcatagtggtgggcacctataataccagctactccggaggctgaggcaggagaatcgcttgaacccaggaggcagaggttgcagtgagctgagatcgcgccactgcactctagccagagtgacagagtaagactctgtctcaaaaataaataaataaataaataaataaataaataaataaataaataaataaaaaataataatacaagttttcataagcacacttct

SEQ ID NO: 23066 - DNA, 1770 bp, Artificial Sequence
  derived and/or modified sequence
gtcatcccctcagtctgtagcccttttgtgtgagtgcctggcaagggtgacgtggggctgtttctgcgggcacagctgcagcaattaccggagtggaggcagggcccaggcagcactgccctccaagatcttcccttgggcttttcagcagtaaggggacatgcaccccaagggcctccacttggcctgaccttgctgcgggggctctctgtccccaggaacagtagagatggcaagcttatcgagaccctctctgcccagctgcctctgctccttcctcctcctcctcctcctccaagtgtcttccagctatgcagggcagttcagagtgataggaccaagacaccctatccgggctctggtcggggatgaagtggaattgccatgtcgcatatctcctgggaagaacgctacaggcatggaggtggggtggtaccgcccccccttctctagggtggttcatctctacagaaatggcaaggaccaagatggagaccaggcacctgaatatcggggccggacagagctgctgaaagatgctattggtgagggaaaggtgactctcaggatccggaatgtaaggttctcagatgaaggaggtttcacctgcttcttccgagatcattcttaccaagaggaggcagcaatggaattgaaagtagaagatcctttctactgggtgagccctggagtgctggttctcctcgcggtgctgcctgtgctcctcctgcagatcactgttggcctcgtcttcctctgcctgcagtacagactgagaggaaaacttcgagcagagatagagaatctccaccggacttttgtcttccacctggaagccctctctggctaaggacaggcaggtgcccctctctccatcagaggacacctgtactggagagcaacacaggatggtctctgccatgaactggaggccaggaatctcctcactgaaaattacagtatggtaactttgcaaatggtggttgtttcttccaagactccagccctgattgcgcaaaactgaaaggcatgtgaagggaaggaagaggaagagtgcaaaacattgaagagagagctgagtgagctgaagagtgaggatatgagtagccccaacccaaacctggagatggggagaaacctacagaatactagccagagctcctccttgtcttggcagcctactagggacctggggaagcaaaaacgaaagctgggcaacatgcctgctttagaatgttttccttctacttacacatcttccacaggtctcagaatctttccttcctctcatccttttctcctatcttcatatctatcagagtatccactgtttattcaacaactactacttgatggtcagacacaaacaaacaagctaggtgctaattaataaagatacgagttttggccgggtgcggtggctcacgcctgtaatcccagcactttgggaggccgaggcgggcgaatcacgaggtcaggagttcgagaccagcctggccaacatggtgaaaccccatctctactaaaaatacaaacaattaactgagcatagtggtgggcacctataataccagctactccggaggctgaggcaggagaatcgcttgaacccaggaggcagaggttgcagtgagctgagatcgcgccactgcactctagccagagtgacagagtaagactctgtctcaaaaataaataaataaataaataaataaataaataaataaataaataaaaaataataatacaagttttcataagcacacttct

SEQ ID NO: 23067 - DNA, 1770 bp, Artificial Sequence
  derived and/or modified sequence
gtcatcccctcagtctgtagcccttttgtgtgagtgcctggcaagggtgacgtggggctgtttctgcgggcacagctgcagcaattaccggagtggaggcagggcccaggcagcactgccctccaagatcttcccttgggcttttcagcagtaaggggacatgcaccccaagggcctccacttggcctgaccttgctgcgggggctctctgtccccaggaacagtagagatggcaagcttatcgagaccctctctgcccagctgcctctgctccttcctcctcctcctcctcctccaagtgtcttccagctatgcagggcagttcagagtgataggaccaagacaccctatccgggctctggtcggggatgaagtggaattgccatgtcgcatatctcctgggaagaacgctacaggcatggaggtggggtggtaccgcccccccttctctagggtggttcatctctacagaaatggcaaggaccaagatggagaccaggcacctgaatatcggggccggacagagctgctgaaagatgctattggtgagggaaaggtgactctcaggatccggaatgtaaggttctcagatgaaggaggtttcacctgcttcttccgagatcattcttaccaagaggaggcagcaatggaattgaaagtagaagatcctttctactgggtgagccctggagtgctggttctcctcgcggtgctgcctgtgctcctcctgcagatcactgttggcctcgtcttcctctgcctgcagtacagactgagaggaaaacttcgagcagagatagagaatctccaccggacttttgtcttccacctggaagccctctctggctaaggacaggcaggtgcccctctctccatcagaggacacctgtactggagagcaacacaggatggtctctgccatgaactggaggccaggaatctcctcactgaaaattacagtatggtaactttgcaaatggtggttgtttcttccaagactccagccctgattgcgcaaaactgaaaggcatgtgaagggaaggaagaggaagagtgcaaaacattgaagagagagctgagtgagctgaagagtgaggatatgagtagccccaacccaaacctggagatggggagaaacctacagaatactagccagagctcctccttgtcttggcagcctactagggacctggggaagcaaaaacgaaagctgggcaacatgcctgctttagaatgttttccttctacttacacatcttccacaggtctcagaatctttccttcctctcatccttttctcctatcttcatatctatcagagtatccactgtttattcaacaactactacttgatggtcagacacaaacaaacaagctaggtgctaattaataaagatacgagttttggccgggtgcggtggctcacgcctgtaatcccagcactttgggaggccgaggcgggcgaatcacgaggtcaggagttcaagaccagcctggccaacatggtgaaaccccatctctactaaaaatacaaacaattaactgagcatagtggtgggcacctataataccagctactccggaggctgaggcaggagaatcgcttgaacccaggaggcagaggttgcagtgagctgagatcgcgccactgcactctagccggagtgacagagtaagactctgtctcaaaaataaataaataaataaataaataaataaataaataaataaataaaaaataataatacaagttttcataagcacacttct

SEQ ID NO: 23068 - DNA, 1778 bp, Artificial Sequence
  derived and/or modified sequence
gtcatcccctcagtctgtagcccttttgtgtgagtgcctggcaagggtgacgtggggctgtttctgcgggcacagctgcagcaattaccggagtggaggcagggcccaggcagcactgccctccaagatcttcccttgggcttttcagcagtaaggggacatgcaccccaagggcctccacttggcctgaccttgctgcgggggctctctgtccccaggaacagtagagatggcaagcttatcgagaccctctctgcccagctgcctctgctccttcctcctcctcctcctcctccaagtgtcttccagctatgcagggcagttcagagtgataggaccaagacaccctatccgggctctggtcggggatgaagtggaattgccatgtcgcatatctcctgggaagaacgctacaggcatggaggtggggtggtaccgcccccccttctctagggtggttcatctctacagaaatggcaaggaccaagatggagaccaggcacctgaatatcggggccggacagagctgctgaaagatgctattggtgagggaaaggtgactctcaggatccggaatgtaaggttctcagatgaaggaggtttcacctgcttcttccgagatcattcttaccaagaggaggcagcaatggaattgaaagtagaagatcctttctactgggtgagccctggagtgctggttctcctcgcggtgctgcctgtgctcctcctgcagatcactgttggcctcgtcttcctctgcctgcagtacagactgagaggaaaacttcgagcagagatagagaatctccaccggacttttgtcttccacctggaagccctctctggctaaggacaggcaggtgcccctctctccatcagaggacacctgtactggagagcaacacaggatggtctctgccatgaactggaggccaggaatctcctcactgaaaattacagtatggtaactttgcaaatggtggttgtttcttccaagactccagccctgattgcgcaaaactgaaaggcatgtgaagggaaggaagaggaagagtgcaaaacattgaagagagagctgagtgagctgaagagtgaggatatgagtagccccaacccaaacctggagatggggagaaacctacagaatactagccagagctcctccttgtcttggcagcctactagggacctggggaagcaaaaacgaaagctgggcaacatgcctgctttagaatgttttccttctacttacacatcttccacaggtctcagaatctttccttcctctcatccttttctcctatcttcatatctatcagagtatccactgtttattcaacaactactacttgatggtcagacacaaacaaacaagctaggtgctaattaataaagatacgagttttggccgggtgcggtggctcacgcctgtaatcccagcactttgggaggccgaggcgggcgaatcacgaggtcaggagttcaagaccagcctggccaacatggtgaaaccccatctctactaaaaatacaaacaattaactgagcatagtggtgggcacctataataccagctactccggaggctgaggcaggagaatcgcttgaacccaggaggcagaggttgcagtgagctgagatcgcgccactgcactctagccggagtgacagagtaagactctgtctcaaaaataaataaataaataaataaataaataaataaataaataaataaataaataaaaaataataatacaagttttcataagcacacttct

SEQ ID NO: 23069 - DNA, 769 bp, Artificial Sequence
  derived and/or modified sequence
caattaccggagtggaggcagggcccaggcagcactgccctccaagatcttcccttgggcttttcagcagtaaggggacatgcaccccaagggcctccacttggcctgaccttgctgcgggggctctctgtccccaggaacagtagagatggcaagcttatcgagaccctctctgcccagctgcctctgctccttcctcctcctcctcctcctccaagtgtcttccagctatgcagggcagttcagagtgataggaccaagacaccctatccgggctctggtcggggatgaagtggaattgccatgtcgcatatctcctgggaagaacgctacaggcatggaggtggggtggtaccgcccccccttctctagggtggttcatctctacagaaatggcaaggaccaagatggagaccaggcacctgaatatcggggccggacagagctgctgaaagatgctattggtgagggaaaggtgactctcaggatccggaatgtaaggttctcagatgaaggaggtttcacctgcttcttccgagatcattcttaccaagaggaggcagcaatggaattgaaagtagaagatcctttctactgggtgagccctggagtgctggttctcctcgcggtgctgcctgtgctcctcctgcagatcactcttggcctcgtcttcctctgcctgcagtacagactgagaggaaaacttcgagcagagatagagaatctccaccggacttttgtcttccacctggaagccctctctggctaa

SEQ ID NO: 23070 - DNA, 642 bp, Artificial Sequence
  derived and/or modified sequence
atggccagcctgagccggcccagcctgcccagctgcctgtgcagctttctgctattattactactgcaagtgagttcgagctacgccggacagtttcgagtcatcgggcccaggcacccaatccgggccttggtgggcgacgaggtcgagcttccttgccgaatcagccctgggaagaacgccacgggcatggaggtcggttggtatcggccacccttctccagagttgttcatctataccggaatggcaaggaccaggacggcgaccaggcgcctgagtatagggggaggactgagctactcaaggacgctatcggagagggtaaagtgactcttaggattcgaaacgttcgcttctcagacgaagggggttttacatgcttcttcagggatcattcataccaagaggaggccgccatggaattgaaggtggaagatccattctattgggtgtcacctggagtgctggttctgttggctgtgcttccagtgctgctcctccagatcacagttggcctcgtgttcctgtgcctccagtaccggctccgaggtaagttacgcgcagaaattgagaacctccataggacatttggacaatttctagaggaacttctcttccatctcgaggccctgtccggttag

SEQ ID NO: 23071 - DNA, 621 bp, Artificial Sequence
  derived and/or modified sequence
atggccagcctgagccggcccagcctgcccagctgcctgtgcagcttcctcctgttacttttactgcaagtttccagctcctatgcgggacagttccgcgtaatagggcctaggcacccaatccgtgcgctggtgggcgacgaagtcgaactcccttgtaggatcagccctggaaagaacgcaactggtatggaggtggggtggtatcggccccctttttctagggtggtacacctttacaggaacggtaaggatcaggacggggatcaagcccctgaatatagggggcggacagagctgctcaaagatgccatcggtgagggcaaagtcactctgcggatccgaaatgttagattttctgacgaaggagggtttacttgcttctttcgcgatcacagttatcaggaggaggctgccatggagttgaaggtggaggatcctttctactgggtgtctcccggagttctcgtactgctggctgtgctccccgtccttctgctccagataaccgtggggcttatcttcctgtgtctgcagtacaggttaaggggcaagcttagggccgaaattgaaaatctccaccgcacctttgtctttcatctcgaggccctctccggttag

SEQ ID NO: 23072 - DNA, 642 bp, Artificial Sequence
  derived and/or modified sequence
atggccagcctgagccggcccagcctgcccagctgcctgtgcagctttctgttgctcctgctgctacaagtgtcaagttcatacgccggccagttccgtgtcatcggtccgcgacaccccattcgggcgttggttggagatgaggtggagctgccttgtcggatcagcccaggcaaaaacgctaccggtatggaggtaggctggtacaggcctcccttctcccgcgtggtgcatctttaccgaaacggtaaagatcaggacggcgaccaagctccagagtacagaggcagaactgagctgctcaaagatgccattggcgaggggaaggttaccctgaggatccggaacgttcgattttcagacgaaggcggtttcacatgtttctttcgtgaccattcttatcaggaagaggccgccatggagctgaaagtggaggacccattttattgggtttcacccggggtgctcgtactattagcagtgctccccgtcctgctgttgcagattacagtcggcctgatcttcctgtgtctgcagtacaggctgcgtgggaaactgagggccgagatcgaaaatctacatagaacctttgggcagttccttgaggaactgttgttccatctggaggccctttccgggtag

SEQ ID NO: 23073 - DNA, 642 bp, Artificial Sequence
  derived and/or modified sequence
atggccagcctgagccggcccagcctgcccagctgcctgtgcagcttcctcctgcttttactgctccaggtttccagttcgtacgctgggcagtttagggtgatcggccccaggcatcctatcagagctttggtgggggatgaggtagaattgccctgtcgaatttcaccaggcaaaaacgcaactgggatggaggtcggctggtataggccccctttttctcgcgtggtgcatctttaccgcaacgggaaggaccaggatggagaccaggctcccgaatacaggggacgcaccgaactgctgaaagacgcaatcggggagggcaaagtgactctgcgaattcgcaacgttcgtttcagcgacgaagggggcttcacatgtttcttcagggaccacagttaccaggaagaagcagcaatggaattgaaagtagaagatcccttttactgggtgagtccaggggtgctggtcctactggctgttctgcccgtgctcctcttacagatcacggtgggactggtgtttttatgtcttcagtatcggctgagagggaaactgagggccgaaatcgagaatctgcacaggactttcggtcagtttctcgaggagttgctgttccatctggaggccctctccggatag

SEQ ID NO: 23074 - DNA, 615 bp, Artificial Sequence
  derived and/or modified sequence
agcctgagccggcccagcctgcccagctgcctgtgcagcttcctgctgctgctgttgctgcaggtgtcatcatcctacgcgggccagttcagggtgatcgggccccgacaccctattcgggctctcgtcggcgacgaagtggagctcccatgtcgaattagtcccggcaagaacgccaccggaatggaggttggctggtaccggccaccattctcaagagtggttcacctgtatcggaatgggaaagatcaggacggtgaccaagctcctgagtataggggccgaaccgaacttctcaaagatgccatcggggaagggaaagtgactcttcgaattcgcaacgttcggttctccgatgaaggcggctttacctgttttttcagagaccactcctaccaagaagaggccgcgatggagctgaaagtggaagaccccttctattgggtctcgccaggcgtgctggtgttactggccgtgctgccagtcctcctgctgcagattacggtggggctggtgtttttgtgcctgcagtataggttgcgcgggaaactgcgcgcagaaattgagaatctgcatcggacattcgtattccacctcgaagctctgtcgggatag

SEQ ID NO: 23075 - DNA, 642 bp, Artificial Sequence
  derived and/or modified sequence
atggccagcctgagccggcccagcctgcccagctgcctgtgcagctttctgctgcttctcttactgcaggttagctcctcatatgcaggacagtttagagttatcggcccacgacacccgattagagccttggtaggcgacgaagtggagctgccttgtcgaatcagtccagggaagaacgctactgggatggaggttgggtggtaccgccccccattctcacgggtggtgcatttgtatagaaacggcaaggaccaagatggagatcaggcaccagagtataggggtcggacagagttgcttaaggacgccatcggcgaaggcaaggtgacgttgagaatccgcaacgtgcgcttttccgacgaaggggggtttacgtgtttcttcagggatcacagttaccaggaggaggctgctatggagttgaaggtcgaggacccgttttattgggtgagcccaggagtgctggtgctattggccgttttgcccgtgctcctcctacagatcactgtagggctcgtgtttctgtgtttgcagtatagattgcgggggaaattacgagccgaaatcgagaatctgcatcggacttttgggcaattcctcgaggaactcctcttccatctggaggcactcagtggatag

SEQ ID NO: 23076 - DNA, 615 bp, Artificial Sequence
  derived and/or modified sequence
agcctgagccggcccagcctgcccagctgcctgtgcagcttcctgctgttgctactgctgcaagtttcatcctcctacgctggacagttccgcgtaatcggacctcgccaccctatccgtgcgttagtgggagacgaggtagagttgccctgtcggatttccccgggaaagaacgccactggtatggaagtaggttggtatcgtcctcccttcagccgagtagtgcatctttaccgtaatggaaaggatcaggacggagaccaggcccccgagtatcggggtcgaacggagctgctgaaagacgcaatcggggaggggaaagttactctccggattcgaaacgtccggttttccgacgagggggggttcacatgcttcttcagagatcactcttatcaggaggaagctgccatggagctgaaagtcgaggaccccttttactgggtcagtcctggcgttttggtgctgctagccgtactcccagtccttttgctgcaaattacagttggccttgtattcttatgcctgcaatatcggttgaggggaaaattgcgcgccgagatagaaaacctccaccgcacttttgtgtttcacctcgaggcacttagcggttag

SEQ ID NO: 23077 - DNA, 642 bp, Artificial Sequence
  derived and/or modified sequence
atggccagcctgagccggcccagcctgcccagctgcctgtgcagcttccttctcctgctcttactgcaggtgagctcctcatatgcagggcagttccgggtcattggcccccgtcatcccattcgcgcccttgtgggcgacgaagtcgagctcccctgtagaatatcacctggcaagaatgccactggaatggaggtgggatggtacaggccacctttcagccgtgtcgtgcatctctataggaatggaaaagatcaggacggagatcaggcaccagaataccgaggtcgcaccgagttgctgaaggatgcgataggcgagggcaaagttactctacggatacgcaacgtgcgcttctcagacgagggtgggtttacttgtttttttcgagaccattcatatcaggaagaagcagctatggaactgaaggttgaagatcccttttactgggtcagccccggtgtgctggttcttctggcagtgctgcccgttctgctcctgcagatcacagtcggactcgtttttttgtgtctgcagtataggttgcgcggcaaattacgagcagagattgaaaatctgcacagaacttttggccaattcttagaggagctgctgtttcacctagaggctctgtccggatag

SEQ ID NO: 23078 - DNA, 615 bp, Artificial Sequence
  derived and/or modified sequence
agcctgagccggcccagcctgcccagctgcctgtgcagcttcctgctgctgctgcttctccaggtttcatcatcctacgctggccagtttcgcgttatcggcccccggcatcccatccgagctctggtcggggacgaggttgagctgccatgccgcatcagtccagggaagaacgcaacggggatggaggtgggttggtaccggcccccctttagtagagtggttcatctgtacaggaatggcaaggaccaagatggtgatcaggccccagagtacagaggtcggacagaactcctgaaggatgctatcggggaggggaaagtcacactgcgtatccggaatgtcagattttccgacgaggggggcttcacctgttttttcagggaccactcttaccaggaagaagctgctatggaactgaaggttgaggatccgttttattgggtgtccccaggcgtgctcgtcctgttggctgtgctgcctgtactcttactacagattacccttggcttggtctttctctgtctgcagtacaggctgcgcggcaaactccgagccgagatagaaaatttgcacagaacgtttgtgtttcatcttgaggccctgtcaggatag

SEQ ID NO: 23079 - DNA, 642 bp, Artificial Sequence
  derived and/or modified sequence
atggccagcctgagccggcccagcctgcccagctgcctgtgcagctttttgctcttgctactgttgcaggttagttcttcatacgcgggacagttccgggtgatcgggcccagacatccaattcgagctcttgtaggagacgaggtggaacttccatgcaggatttcccctggaaaaaacgcaacagggatggaagtggggtggtataggcctccatttagtcgagtcgtgcacctctacagaaatggaaaagatcaggacggcgatcaggccccagagtatagaggcaggacagagctgttgaaagacgctatcggcgagggaaaagtcaccttacgcattcggaacgtgaggttcagcgatgaaggcggcttcacgtgtttttttcgagatcactcctaccaggaggaggccgcgatggagctcaaagtggaggatcccttttactgggtgtcccctggagtactcgtccttttggccgtacttcccgtgctccttctgcagattaccgtgggcctagtgtttctgtgtctgcagtaccggttgcggggaaagctgagagctgaaatcgaaaatctccacagaaccttcggccagttccttgaggagttgcttttccatcttgaagcgctttcaggctag

SEQ ID NO: 23080 - DNA, 642 bp, Artificial Sequence
  derived and/or modified sequence
atggccagcctgagccggcccagcctgcccagctgcctgtgcagcttcctgctgctgctactgctgcaggtctctagctcgtacgcgggacaatttcgtgtgattgggccacgacaccccattagagcccttgtgggggatgaggtggaactgccttgtaggatcagtcccggcaaaaacgcgaccggcatggaagttggatggtaccgacctcccttctcccgggtggtgcacctgtatcgaaacggtaaggaccaggacggtgaccaggcccctgaataccgtggcaggactgagcttctaaaggacgccattggcgaaggaaaggttaccctgcgaatcagaaatgtgagattctctgatgagggcggctttacatgtttttttagagaccactcttaccaggaagaggccgctatggagctcaaagtggaggaccctttttattgggtgtcccccggagtgctagtgctacttgccgtgctgccagtgctattgcttcagatcaccgttgggctagtgtttctctgcttgcaatataggctccggggcaagctcagagccgaaatcgaaaacctccaccgaacattcgggcagttcctggaagaactgctgtttcatcttgaagctctgagcggctag

SEQ ID NO: 23081 - DNA, 615 bp, Artificial Sequence
  derived and/or modified sequence
agcctgagccggcccagcctgcccagctgcctgtgcagcttcctgctcttactcttgctccaagtcagcagctcttatgctggacaatttagggtcatcgggcccagacatcccatccgggcactggtcggagacgaggtagagctgccctgtaggatctctccaggtaagaatgccactggcatggaagttgggtggtatcggccaccgttcagtcgggtcgtgcacctatatcggaacggcaaggaccaggacggtgaccaagcacccgagtaccgaggacggactgagctcctcaaggacgctataggagaggggaaggttaccctgaggatcagaaatgtgcggttttccgatgaaggcgggttcacctgcttctttagggatcacagttaccaagaggaggctgcgatggagcttaaagtggaggatcctttctattgggtgtcgcctggcgtgctggtgctcctcgccgtattgccagtgctgctgctgcagatcaccgttgggttggtgttcctatgcttgcagtacagactccgggggaaattaagagctgaaatcgagaacctgcaccggacatttgtatttcatttggaggccttaagcggctag

SEQ ID NO: 23082 - DNA, 615 bp, Artificial Sequence
  derived and/or modified sequence
agcctgagccggcccagcctgcccagctgcctgtgcagcttcctgcttttgctgctgctgcaggtgtcgagcagctacgcgggccagtttagggtgatagggccgaggcatcctattagggccttggtgggagacgaggtcgagctgccgtgtaggatttcacctggcaaaaatgcaacgggaatggaggtgggttggtaccgtccaccattcagccgagtagttcacctctatcgaaatggaaaggatcaggacggcgaccaggcccccgaatatagaggtcgtactgagctactgaaggacgctattggtgaggggaaagtcaccctcagaattaggaatgtgcgtttttctgacgagggcggatttacctgtttctttcgggaccacagctatcaggaagaggccgcaatggagctcaaagttgaagaccccttttattgggtgtcccccggggtcctagtgctacttgccgtgttgcctgtactgctcctgcagattactgtgggcttggtgttcctgtgcctgcagtaccgcctaaggggcaaattaagagcagagatcgaaaatttacaccgcaccttcgtattccatttagaggccctgagtggatag

SEQ ID NO: 23083 - DNA, 642 bp, Artificial Sequence
  derived and/or modified sequence
atggccagcctgagccggcccagcctgcccagctgcctgtgcagctttttattgctcctgctgctgcaagtgtcaagcagctatgccggacagttccgagtcatcggcccccggcatccgatcagagcactggtaggcgatgaggtcgaactgccatgtcggatttcccctggcaagaacgcaacagggatggaggtgggttggtatagacctcccttttccagggtggttcatctctaccgtaacggaaaggaccaggacggggatcaggcccccgaatatcgaggtaggactgaactgttgaaagatgccataggagaagggaaggttaccctgaggatccggaatgtgcgcttttccgatgaaggaggcttcacttgcttctttcgtgatcacagctaccaggaggaggctgcaatggagctcaaggtggaagacccattttattgggtgtcccccggcgtgctggtgctgctcgcggtgctgccagttttattgcttcagataacgctgggcttggtgttcctgtgcctccagtaccgactgcggggtaagctccgcgccgagatcgaaaatcttcaccgcactttcggtcaattcctggaagaactgctttttcacctcgaggcccttagtggctag

SEQ ID NO: 23084 - DNA, 615 bp, Artificial Sequence
  derived and/or modified sequence
agcctgagccggcccagcctgcccagctgcctgtgcagcttcctgctgttgctactgttgcaagtatcgagtagttatgccgggcagttcagggttattggcccgcggcatcccatacgggcccttgtcggggatgaggtcgagttgccatgtagaatttcgccaggaaagaacgccacagggatggaagttggctggtatcgcccccccttcagccgagtggttcacctttaccgtaacggaaaagaccaagatggcgatcaagcccctgaatatcgcggaagaacagaactcctcaaggatgcaatcggcgagggtaaggtcacactgcgaatccgtaatgtgcgcttctctgacgaaggtggattcacctgcttcttccgagatcatagttatcaggaggaggcagccatggagctgaaagttgaagaccccttttactgggtgagccccggagtgctggtgttgctggccgtgctgccagtcctgcttctccagattacagtcggcctggtttttctctgcttgcaataccggctccggggcaagctgcgcgccgaaattgagaatctccatagaactttcgttttccatctagaggccctctctgggtag

SEQ ID NO: 23085 - DNA, 615 bp, Artificial Sequence
  derived and/or modified sequence
agcctgagccggcccagcctgcccagctgcctgtgcagcttcctgctgctgctcctgctccaggtctccagctcgtacgcaggccagtttagagttattggccccaggcaccctatcagagcactggtgggggacgaggtggagctgccgtgtcgcatcagtcctggaaaaaacgccacaggtatggaggtagggtggtacagacccccttttagccgggtagtgcatctttacaggaacgggaaagatcaggatggtgaccaggcacctgagtaccgagggaggaccgagctccttaaagatgccattggagaggggaaggtgactctgcggattcgcaacgtgcgattttccgatgaggggggtttcacatgtttttttagagaccatagctatcaagaggaggctgccatggagctgaaagtcgaagatccattttactgggtaagtcctggagtactggtgctcctggccgtactgccggtgttactgctgcagattacagtgggcctagtgttcctgtgcttgcaataccgactgcgggggaaactgcgcgctgagattgagaacttacacaggacttttgtgttccacctagaggctctgtcaggatag

SEQ ID NO: 23086 - DNA, 621 bp, Artificial Sequence
  derived and/or modified sequence
atggccagcctgagccggcccagcctgcccagctgcctgtgcagctttctgttgctgttactgctgcaggttagctcttcctacgccggacagttccgagtgatcggccccagacatccaatccgggccctcgtgggggatgaagtggaactcccttgcagaatctcccctgggaagaacgctaccggcatggaggtgggttggtaccgcccccccttttcccgcgtggtgcacctgtaccggaacggcaaggaccaggatggggatcaggccccagagtaccgcggtaggactgaattgctgaaggacgccatcggagagggcaaggttacactgcgtattcgcaatgtacgcttttcagacgagggggggttcacttgcttttttcgcgatcacagctatcaggaggaggcagccatggaattaaaggttgaagaccccttctactgggtgagtcctggggttttggttctgctggcagttttaccagtgcttctcctgcagattacagtggggctggtatttctgtgtctgcagtaccgtctacgcggtaagttgagggccgagatcgagaacctgcataggacattcgtgtttcacctcgaagcactgagcggctag

SEQ ID NO: 23087 - DNA, 621 bp, Artificial Sequence
  derived and/or modified sequence
atggccagcctgagccggcccagcctgcccagctgcctgtgcagcttcctgctgttgctgctgctccaggtcagttcctcctacgccgggcagtttcgggttattggtcctaggcacccaatcagagctttggtgggtgatgaggtggaactgccttgtcggatctcccctggaaaaaatgccaccggaatggaggtgggctggtatagaccccctttctcacgggttgttcacctttacagaaacgggaaggaccaggacggagatcaggctcccgaataccgagggaggaccgagttgctcaaagacgctataggggaaggaaaggtgactctcagaatcagaaacgttaggttcagcgacgagggaggattcacctgttttttcagggaccacagctaccaggaagaggccgccatggagctcaaggtcgaggatcctttttattgggttagtcccggtgtcttggtcctcctggccgtcctccctgttctgctgttacaaataacagtgggactggtctttctgtgcctgcagtacaggctgcgcggtaaattgagagccgaaatagagaatctccacagaacctttgtgtttcatctggaagctctttccggctag

SEQ ID NO: 23088 - DNA, 621 bp, Artificial Sequence
  derived and/or modified sequence
atggccagcctgagccggcccagcctgcccagctgcctgtgcagcttcttgctgctgctgttactgcaggtcagttcttcttacgccgggcagtttagagtgatcggacccagacaccctatacgggctctggtgggagatgaggtcgagctgccctgtagaatttctccaggaaagaatgccaccgggatggaggttgggtggtatcggcctcctttttctagagtggtccacctataccggaatggcaaagaccaagacggagatcaagcgccggaatatcggggacgaacagagcttctgaaggatgctatcggcgagggcaaggttaccctgagaattcgaaatgttcggttctcagacgaggggggctttacttgtttcttccgcgaccacagctatcaggaggaggcggccatggagctaaaggtcgaggatcctttctattgggtatcccctggagtcctggtgctgcttgccgtgctacccgttctgctactgcaaattaccgttggtcttgtctttttgtgcctgcaataccggcttagaggaaaactgcgggctgaaatcgagaacctgcacagaacctttgtattccatctggaggctctcagcggatag

SEQ ID NO: 23089 - DNA, 621 bp, Artificial Sequence
  derived and/or modified sequence
atggccagcctgagccggcccagcctgcccagctgcctgtgcagcttcctgttgctcctgctgttacaggttagctccagttatgctggtcaatttagggtgatcggtccccgccatccaatacgcgctctggttggtgacgaagttgagctgccttgccggatttcgccaggcaagaatgccaccggaatggaggtgggatggtaccgacccccttttagcagggtagtgcatctttatcggaatgggaaggaccaagacggcgaccaagcgcctgagtataggggaaggacggaactgctgaaagacgccatcggcgagggaaaagtcactctaagaatccggaacgtgcggtttagcgacgagggcgggtttacgtgctttttcagggatcatagctaccaggaggaggccgcaatggagctgaaggttgaggacccattctactgggtgtcccccggggtcctggtcttattggccgttcttcctgtgttgctactacagattacggtcggtttagtatttctgtgcctgcaatacaggctgcggggtaagttgagagccgagattgagaacctgcaccgaacctttgtcttccaccttgaggccctgagtggttag

SEQ ID NO: 23090 - DNA, 621 bp, Artificial Sequence
  derived and/or modified sequence
atggccagcctgagccggcccagcctgcccagctgcctgtgcagctttctactgttactcttgctacaggtgtcctcatcatacgctgggcagttccgtgttatcggaccccgacatccaattcgcgccctggtcggggatgaagtcgagctcccatgccggatttcgcccgggaagaatgcaactggaatggaggtgggttggtaccggccccccttttcaagagtggtccacctgtacagaaatggcaaagaccaggacggtgaccaggcccccgagtatagaggtagaacagagcttctgaaggatgccataggtgaaggcaaagttacattgcggataagaaacgttcgcttcagtgacgagggaggctttacctgcttctttagagatcacagttaccaagaggaggctgccatggaactgaaggtcgaggacccgttctactgggtgtcaccaggcgtgctggtgctcttggccgttctcccagtgttgttgctgcagataacagtgggccttgttttcctttgtcttcaataccggctccggggcaaactgcgcgcggaaatcgagaacttgcatagaacctttgtgtttcacctggaggccctgtctgggtag

SEQ ID NO: 23091 - DNA, 621 bp, Artificial Sequence
  derived and/or modified sequence
atggccagcctgagccggcccagcctgcccagctgcctgtgcagcttcctcctgttgctgttgctccaagtcagtagttcatatgcaggtcagtttagggtgattgggccgcgtcatccgatccgagctctggtgggtgacgaagtcgagttaccttgcagaatttcccccgggaagaacgctacagggatggaggtgggatggtaccgcccacctttctcccgggttgtccacctttaccggaatggtaaggatcaggacggcgatcaggccccagaatacagaggacgaaccgagctcttaaaagatgcgatcggcgagggaaaggtgaccttgcggatcaggaatgtgagattctccgatgaaggcggcttcacctgttttttcagggaccacagttatcaggaggaggctgccatggagctgaaggttgaagacccgttttattgggtatctccaggcgtgctggtgctgctggccgttttgcccgtgctgctgctgcagatcacagtcggactagttttcctgtgcctgcagtatcggctacggggtaaactcagagccgagatcgaaaacttacataggaccttcgtcttccacttggaagccctttcagggtag

SEQ ID NO: 23092 - DNA, 621 bp, Artificial Sequence
  derived and/or modified sequence
atggccagcctgagccggcccagcctgcccagctgcctgtgcagctttctgctgctcctgctgttgcaggtgagctccagttatgcggggcaatttcgagttataggacccagacacccaatcagggctctcgtgggagatgaggtagagcttccctgcagaataagccctggaaaaaacgccacaggtatggaggtgggatggtataggccccccttctcccgggttgtgcatctatatcgaaacggcaaggaccaggacggggatcaagcccctgagtaccggggccggaccgaacttctgaaggacgctataggtgaaggcaaggttactctgcgcattcgcaatgtccgctttagcgatgaaggcgggttcacttgcttcttccgagatcacagttatcaggaagaagcggccatggagctaaaagttgaagaccctttttattgggtctctcctggagtcctggttctgctggccgtccttcctgtgttgctgttgcagattaccctaggcttagtgttcctgtgtcttcaatacaggctgcggggtaaattaagggcagaaatcgagaacctgcacaggacgtttgtgttccatcttgaggccctgagcgggtag

SEQ ID NO: 23093 - DNA, 642 bp, Artificial Sequence
  derived and/or modified sequence
atggcctccttatcaaggcctagcctgccatcatgcctgtgctccttcctgctgctcctgctcctgcaagtctcgtcatcttatgcagggcaatttagagttataggccctcgccatccaatccgagcactggtgggagacgaagtcgaactgccttgtcggatctcgcccggtaagaatgcgactggaatggaggtgggatggtatcgacctccttttagtcgcgtggttcacctgtataggaacgggaaggatcaagacggcgatcaggccccagagtatcggggacgcacagaattattaaaagatgctattggtgaagggaaggtgacccttcgaattagaaatgtgcggttttctgacgagggaggattcacctgcttttttcgtgaccactcgtaccaagaggaggccgctatggaacttaaggtggaagaccctttttactgggtgtctcctggcgtgctcgtgctgctcgctgtcctccccgtgctgcttctccaaattacagtcgggctggtgtttctttgtctgcagtataggctgagggggaaactgcgcgctgagattgaaaatttacatagaacttttgggcagttcctggaagaattgctgtttcatctcgaagccctgtccggctag

SEQ ID NO: 23094 - DNA, 621 bp, Artificial Sequence
  derived and/or modified sequence
atggctagtctctccaggccaagcttaccgtcctgtctttgctccttcctgctcttgctgctacttcaagttagctcatcatatgcgggtcaatttagggtaattgggcctaggcatcctatacgagccttagtgggagatgaagtagaactgccatgccgcatctcgccgggaaagaacgccaccggtatggaggtggggtggtaccggcctccgttttctagggtcgtgcatctctaccgtaacggaaaggaccaggatggggatcaggcccctgaataccgtggcagaacagagcttctcaaagatgctatcggcgagggcaaggtgacattaagaatacgaaatgtgagatttagcgacgagggcggatttacctgcttctttcgcgatcattcctatcaggaggaagccgctatggagttgaaggtggaggaccctttctattgggtgtcccctggggtgttagtgttactggcggttctgccagttcttctgctccagatcacagtgggtcttatctttctctgcctacaatataggttaagaggtaaactacgggctgagatcgagaacctgcatcgcacctttgtgttccatctggaggcgctgtccggctag

SEQ ID NO: 23095 - DNA, 642 bp, Artificial Sequence
  derived and/or modified sequence
atggcgagtctcagtcgccctagtctaccaagttgcttgtgctctttcctgctgctactcctcctccaggtatcttcatcatacgccggtcagtttagggtcattgggccaagacaccccattcgggctctggtgggcgatgaggtggagctaccctgccgaatatcccctggcaaaaacgcaactggaatggaagtggggtggtaccgtccacctttctcacgcgtggtccacctgtaccggaacggcaaagaccaagatggtgatcaggccccagagtatcgcggaagaactgaactcctgaaagacgcaattggggagggaaaggtgaccctgagaatacgtaacgttcgcttttctgatgagggcggtttcacgtgtttctttagagaccacagttatcaggaggaagccgctatggagctcaaagtcgaggatcccttctactgggtctctcccggagtcctggtcctgctggcggtcctgccagtgttgcttctgcagataactgttgggctcatctttctctgtctgcagtatcgcctgagagggaaattgcgggctgagatagaaaacctgcaccggaccttcgggcagttcctcgaagaactgctgtttcacctggaggccctgagcggctag

SEQ ID NO: 23096 - DNA, 642 bp, Artificial Sequence
  derived and/or modified sequence
atggcgtctttgtcgcggcctagccttccctcatgcttatgcagttttctgctgctgctcttgctccaagtatccagtagttacgctggccagtttcgggtgatcggtcccaggcatcccattagggcattggtgggcgatgaggtcgaacttccatgccggataagtcccggaaaaaacgccactggaatggaggtcggctggtacagaccacccttttcacgggtcgtgcacctgtataggaatggaaaggatcaggacggcgaccaggcaccggagtatagaggcaggaccgaattattaaaggatgccataggagagggcaaagtgacgcttcgaatacggaacgtgagattcagcgatgaggggggattcacatgcttctttcgcgatcactcctaccaggaagaagcggctatggaactcaaggtggaggatccattttactgggtgtctccaggcgtgctggtgctacttgccgttttaccagttcttcttctgcaaattaccgtgggcctcgtctttctgtgtctgcagtacaggttgcgcggaaaactcagagctgagatcgaaaatttgcacaggacatttgggcagttcctcgaggagctgctgttccacttagaggcactgtccgggtag

SEQ ID NO: 23097 - DNA, 615 bp, Artificial Sequence
  derived and/or modified sequence
tctctaagccgacctagtctgccctcatgtctgtgttcatttcttctgttactgctactgcaggtgtcttcatcctatgcaggccagttcagagttattggccctaggcacccaatccgagccttggtgggcgacgaagttgagttaccatgccgcatttcaccaggtaaaaatgctaccggtatggaggttggttggtacaggcctcccttctctcgggtggtccatctttatcggaacgggaaggaccaggacggtgatcaggctccggagtacaggggacggacagagctactcaaggatgcaataggtgagggtaaggtaacattaagaattcggaatgtgaggtttagcgacgaggggggatttacctgcttctttagagatcacagctaccaggaggaagccgcaatggaacttaaggttgaggatcccttctattgggtaagccctggcgtactggtgcttctggccgttctcccggtcctgctgctgcagataaccgtaggtctcgtattcctgtgcttacagtaccgcttacggggaaaactgcgggctgagatcgagaacctccaccggactttcgtcttccatctcgaggccctttcaggatag

SEQ ID NO: 23098 - DNA, 642 bp, Artificial Sequence
  derived and/or modified sequence
atggcatcactgtctcggccatctttgccgtcttgcctttgtagtttcctgttactgttactcttgcaggtcagttcttcctacgccggtcagttcagagtcataggtcccaggcaccctatcagggccttagtgggggacgaggtggagctgccttgtagaataagcccaggcaagaacgctactggtatggaggtcgggtggtacaggcccccttttagccgagtggtgcatctttatcgcaatggaaaggaccaagatggagaccaggctcccgagtaccggggtagaactgaactactcaaggatgctatcggagagggtaaggtgaccttgcgcattaggaatgttcggttcagcgacgaggggggttttacctgttttttcagggaccatagttaccaagaagaggcggctatggaactgaaagtcgaagacccattttactgggtgagcccaggtgtgctcgtgctgctcgccgttctccccgtcctgttactccagataactgtcggcctggtattcttatgcctccagtataggctgaggggaaagctcagagccgagattgaaaacttacaccggacctttggccagtttcttgaggagctcctgtttcacttggaggctttatctgggtag

SEQ ID NO: 23099 - DNA, 615 bp, Artificial Sequence
  derived and/or modified sequence
tccttatcaaggcctagtctgcccagttgtctgtgcagcttcctactacttttgctcctgcaagtctcttcttcttacgctggacaatttagggtcattggtccccgacatcctatccgggcactggttggagacgaagtggagctcccatgccgaatctctcctggcaaaaacgccacgggcatggaggtcggctggtacagacctcccttctcgcgcgttgtgcacctgtatcggaatggtaaagatcaggacggcgatcaggctccagagtaccggggtagaacagagctcctgaaggatgccataggagagggaaaggtgacgctacgtatccggaatgtgagattcagcgacgaggggggatttacatgcttcttccgggaccactcctaccaagaagaagccgctatggagctgaaagtggaggatcccttttattgggtctcacccggtgtgctagtgctgctggcggttctccctgtgcttctcttacaaatcactgtagggctcgtcttcctatgtttgcagtacagattgagaggtaagctccgggcagaaattgaaaatcttcacaggacctttgttttccatcttgaagcgttgtccggctag

SEQ ID NO: 23100 - DNA, 642 bp, Artificial Sequence
  derived and/or modified sequence
atggcctctttatctagaccctctctgccctcttgcctgtgttcttttctcctcctgctcctgctgcaggtgtcctcgagttacgccggtcaattcagagtcatcggccctcggcacccgatacgcgctttagtcggcgacgaggtggagctgccctgcagaatctcccctggcaaaaacgccacgggcatggaagtcggctggtaccgccctcccttctccagggtagtccatctgtacagaaatggaaaagaccaagacggtgaccaggctccggagtacaggggaaggacagagcttcttaaggacgccatcggcgagggcaaggtgactctgcgcatccgaaacgtccgattttcagatgagggtggattcacctgcttcttccgtgaccactcttaccaggaagaagccgcaatggaactgaaggtggaagaccccttctattgggtaagccctggtgtgcttgtgctgctggcggttctcccagtgctgcttttacagattactgtgggcctggttttcctgtgcctgcagtaccgcctgcgcggaaaacttcgcgcagagattgagaacctccaccgtacgtttggtcagtttcttgaagagctgctgtttcatctcgaagcgctgagcggctag

SEQ ID NO: 23101 - DNA, 615 bp, Artificial Sequence
  derived and/or modified sequence
tccctgagtcgaccatctctccccagctgcctttgcagtttcttgctgctgctgctgctgcaggtctcctccagttatgctgggcagtttagggtgatagggcctaggcatccaatccgggctctggtaggggatgaggttgaactgccttgccgcatctcgcctggtaaaaatgccaccgggatggaggttggctggtaccgcccaccttttagccgggtggtgcacttgtataggaacggtaaagaccaggatggggatcaggctcctgaatacagagggaggacggagctcctaaaagatgccataggcgaggggaaagttacccttcggatacgaaacgttaggttttcagatgaaggcggttttacctgcttctttagagatcattcttatcaggaagaggctgccatggagctaaaagtcgaagatcctttctactgggtgagccccggagtgctagttctcctggccgtgctgcccgtgttactgctgcagataaccctcgggttggtgttcctgtgcttgcaataccgcctgagagggaagctgagagcggaaattgaaaatctgcataggacctttgtttttcacctcgaggctctgtcggggtag

SEQ ID NO: 23102 - DNA, 642 bp, Artificial Sequence
  derived and/or modified sequence
atggctagcctcagccggcctagcctcccctcttgtctctgcagctttttgctgctgttactgctgcaggtcagctctagctacgcaggccagtttcgggttattggcccacgacaccccattagagccctcgtcggcgatgaggtggagctgccctgtagaattagtccaggaaagaatgccactgggatggaggtgggatggtacagaccccctttttccagagtagtccacctatataggaatggaaaggaccaggacggagaccaggccccagagtaccggggacggacagaactactgaaggacgcaatcggagagggaaaggtcacactccggatccgtaatgtccgcttctcggacgaaggtggattcacatgcttcttccgagaccattcttaccaggaagaggccgcaatggaactaaaagttgaggatccgttttactgggtgagtcccggtgtcctggtgttacttgccgtgctgcccgtgttactgctgcagattacagtcgggctggtgtttctgtgtctgcagtaccgactgcggggaaaactcagggccgagattgagaatcttcatagaacatttggccagttcctcgaggaacttctgttccaccttgaggctttgtccggctag

SEQ ID NO: 23103 - DNA, 642 bp, Artificial Sequence
  derived and/or modified sequence
atggcgtctctgtctaggccgtcccttccaagttgtctttgtagcttcctgcttttgctgctactgcaggtctcctcctcttacgccggacagttccgagttattgggcctcgccaccctattcgggcattggttggtgacgaggttgaactgccctgtcggatatccccaggaaaaaatgctacaggaatggaggtgggctggtatcgccctccgttttctcgtgtggtgcacctttatagaaacggtaaggaccaggacggggatcaggcacctgagtaccgcggaaggactgaactgctgaaagacgcgattggcgagggaaaagtgactctacgtattcgaaatgtcaggttttccgatgaggggggattcacatgcttttttagagaccatagctaccaggaggaagcggctatggaactgaaagtggaagatcctttttattgggtgagcccgggagttctcgtattgcttgcggtccttcctgttctgttgctgcagatcactgtaggattggtgtttctgtgcttacagtacaggctgcgcggaaagctgagggccgaaatcgagaatttacacaggacatttggtcagtttctggaggaactcttgtttcacctggaagccctgtccggttag

SEQ ID NO: 23104 - DNA, 615 bp, Artificial Sequence
  derived and/or modified sequence
agccttagccggcctagcttaccttcctgtctatgctcctttctcctgcttctcctgctgcaggtctcatcatcatacgccggacaattcagagtgatcggtccccgacatccgatcagagccttggtgggtgacgaggttgagttgccttgcagaatttctccaggcaagaatgctacgggcatggaagtcggatggtaccgccctcctttttcacgagtggtccacttgtatagaaatgggaaagaccaggacggcgaccaagcgccagagtataggggacgcactgagttactgaaggatgccatcggagagggaaaagtcactctgagaattaggaatgtgaggttcagcgacgagggcggtttcacgtgtttttttagagatcacagttatcaagaagaagccgcaatggagctcaaagtggaagatccattctactgggtttcgccaggggtgcttgttcttttagccgtgcttcccgtgctgctgctacagatcacggtgggactggtgtttctgtgtttacagtatagattgcggggaaagctgagagcagaaattgagaacttgcatcgcacctttgtcttccaccttgaagcactgtcagggtag

SEQ ID NO: 23105 - DNA, 615 bp, Artificial Sequence
  derived and/or modified sequence
tcgctgtcacgacccagcctcccctcctgcctgtgcagctttctccttctgctgctgttgcaggtgagcagttcctatgccggacagtttcgagtgatcggtcccaggcatcccattcgcgctctggtcggggatgaagttgagctgccctgtcgaatttcccccggtaaaaacgcaactggcatggaagtaggatggtatcgcccacccttcagtcgcgtcgttcacctgtatagaaacggtaaagatcaggacggcgatcaagcccctgagtacagagggagaaccgagctgcttaaagatgcaatcggtgagggcaaggtgacactacgcattcgcaacgtgcgcttttccgatgaagggggtttcacctgtttcttccgcgaccattcttaccaagaggaggctgcaatggaattaaaggtggaagatcccttttattgggtatctcccggagttctcgtgctgttagccgttctacctgtcctgttgcttcagatcacggtaggcctggttttcttatgtttacagtaccgcctccgaggtaaactcagggccgagatagagaacctgcaccgcacatttgtgttccacctcgaagcactgtcaggctag

SEQ ID NO: 23106 - DNA, 642 bp, Artificial Sequence
  derived and/or modified sequence
atggcctccttgagcagaccttccctgcccagctgcctgtgcagcttcctcctcttgttactactgcaagtttcatcctcttatgccggtcaatttagagtcatcggcccacggcatcctatccgggctttggtcggcgatgaagtggagctcccctgccgcatctcccctggaaaaaacgcaactggcatggaggtgggatggtaccgacctcctttcagtagggtggtgcacttgtaccgtaatggtaaagaccaggacggggatcaggcccctgagtatcgcggacggacagagctgctgaaagacgccattggagagggtaaggtgaccttgaggatccgaaacgttaggttctccgatgaggggggttttacttgcttcttcagggatcatagttaccaagaagaagcggctatggaactgaaggttgaggacccattctattgggtctctcctggcgtgttggtcctgctggcggttcttcctgtgctcctcttgcaaatcactctggggctcgtcttcctctgcctgcaatatagactccggggaaagctgcgggctgagattgagaacctccaccggaccttcggccagtttctggaagagctgctctttcaccttgaggccttgtccggctag

SEQ ID NO: 23107 - DNA, 615 bp, Artificial Sequence
  derived and/or modified sequence
agtctttccaggccctctcttccgagctgtctctgcagcttcttgttactgttgttactccaagtgtccagttcgtacgctgggcagtttcgggtgattgggccacgccatcctattcgagctcttgtcggggacgaagtggaattgccttgcagaattagccccggtaagaacgcaactggcatggaagtgggctggtaccggcctcctttcagccgagttgtccatttgtaccgtaacggaaaggaccaggacggggaccaggctcctgagtaccgaggccgtacagagctgctgaaagacgccatcggcgaggggaaagtcaccctccggattcgcaacgtgcgctttagcgacgagggcggtttcacctgttttttccgggaccactcctaccaagaggaggcagcaatggagctaaaggtggaggatccattttactgggtttcgccaggtgtgcttgtcttactcgcggttctccctgtgctgctgctccagattaccgtgggcctggtgtttctctgccttcagtatcggctgagaggcaagctgcgcgcagagatcgaaaacttgcatcgcacatttgttttccatctggaagccttaagcggctag

SEQ ID NO: 23108 - DNA, 615 bp, Artificial Sequence
  derived and/or modified sequence
tccctatctaggccctccttgccctcatgtctttgttcctttctattgttactcctcttacaggtgtcctcttcctacgccggtcagtttcgcgttattggacccagacacccaattagagcgcttgtgggtgacgaagtcgagctgccctgtagaatctctcccggtaagaacgcaacgggaatggaggtcggttggtacagaccacccttcagtagggtggtgcatctttacaggaatggcaaggatcaggatggcgatcaggcacccgagtataggggccgtactgagctgttgaaggatgccattggggaggggaaggttactctgcgcatccggaacgttagattttcagacgaaggcggatttacttgcttctttcgggaccactcttaccaggaggaggccgctatggagctgaaagtggaagaccctttctactgggtatcgcctggcgttctcgtgctgctggcagttctgcctgtgctgctgcttcagatcaccgttgggttagtgtttctttgccttcagtaccgtcttagaggcaagcttcgcgcagagatagaaaacctgcacagaacatttgttttccacctggaggctttgtctgggtag

SEQ ID NO: 23109 - DNA, 621 bp, Artificial Sequence
  derived and/or modified sequence
atggcgtccttgagccggccttctctgccctcttgtctgtgctcttttctgctacttctgctgctacaagtgtcctcctcatatgcaggtcagttcagagtgataggtccaagacatcctattagagcccttgtgggtgatgaggtggagctcccttgcaggatatctccgggaaagaacgctacggggatggaagtgggctggtacagaccccctttcagccgcgtggtccacttgtatcgtaacgggaaggatcaggacggagatcaggcccctgagtataggggacgaaccgaactcttgaaggacgcgattggggagggaaaggtgactttgcgaataaggaatgtgaggttttctgacgaggggggattcacatgttttttccgtgaccattcatatcaggaagaagcagctatggaactaaaagtcgaagatcctttttattgggttagccccggagtcctagtcctattagccgtgctgcccgttttgctcctccaaattaccgttggattggtctttctttgtcttcagtacagactccgcggaaagctgagagctgaaattgagaacctgcaccggacctttgttttccacttggaggcactatcgggttag

SEQ ID NO: 23110 - DNA, 621 bp, Artificial Sequence
  derived and/or modified sequence
atggccagtctgtccaggccctctttaccatcttgcctgtgtagcttcctgttgcttctgttgcttcaagtgtcatcctcttacgctgggcaatttcgcgtgattgggcctcgccaccctatccgggcacttgttggagacgaagttgaactgccatgtcggataagcccaggcaaaaacgctacgggcatggaggttggctggtacagacctcctttctctcgagttgtccacctctatcggaatggcaaggaccaggatggagatcaggcccctgaatataggggccgaactgagctgttgaaggacgcgattggggagggaaaggtgaccctgaggatccgcaatgtgcgcttcagcgacgaggggggattcacctgtttcttcagggaccactcctatcaggaagaagccgcaatggagcttaaggtggaggatcctttctactgggtatcccctggcgtgctcgtgctgctcgccgttttacctgtccttctgctgcagattacagttggtctggttttcctatgtctacagtaccgactccgaggcaagctgcgcgctgaaattgaaaatcttcacagaacgtttgtgtttcaccttgaagccctgagcggctag

SEQ ID NO: 23111 - DNA, 621 bp, Artificial Sequence
  derived and/or modified sequence
atggcctcacttagcaggcctagcctcccttcctgcctgtgctcctttctgcttctgcttctcttacaggtgagctccagctatgccggtcagttccgagtgattggccctagacaccccatacgggcactggtcggcgatgaggttgagttgccgtgtaggattagtcctggaaagaacgcaactgggatggaggtgggctggtataggcccccattcagtcgagtggtgcacctgtatcgaaacggcaaggatcaggatggggaccaggcaccagagtaccggggaaggaccgaactgctgaaggacgccataggagaggggaaagtgaccctgcgaattcggaatgttcgcttcagtgatgaaggtggtttcacctgcttcttccgagaccattcttaccaggaggaggcagccatggagctcaaagtcgaggacccattttattgggtgtctccgggagtgctcgtgctcctggccgtgctgcctgtgctgctgctccagataactgttggcctggtgtttctgtgcctgcagtatcgcctgagggggaagctcagagccgagatagaaaatctgcaccggacctttgtgtttcacctagaagccctaagtgggtag

SEQ ID NO: 23112 - DNA, 621 bp, Artificial Sequence
  derived and/or modified sequence
atggcaagcctgagccgccctagtctcccatcatgtctatgcagcttcctcctcttgctgctgcttcaagtgtcgagttcatacgccggacagttcagggtaattggcccacgccaccccattagggctctcgtgggcgacgaggtggagttaccttgccgcatctctccgggtaagaacgccactggcatggaggtgggttggtaccgtcccccattctctcgtgtggtgcacctgtatagaaatggcaaggaccaggatggcgaccaggcccctgaatataggggacggaccgagcttttaaaggacgccataggcgaaggcaaagtaacactgcgaatccgcaatgttcgattctccgatgagggcggattcacatgcttctttagggaccactcgtatcaggaggaggccgcaatggaactcaaagtggaggatcctttctattgggtctctccgggtgtactggtgctcctggctgtgctgcctgtcctcctgctgcagattacagtgggactcgtgttcttatgtctccagtataggctgagggggaaacttcgagcagagatcgagaacctgcaccgtaccttcgtgttccacttggaggccctgtccggctag

SEQ ID NO: 23113 - DNA, 621 bp, Artificial Sequence
  derived and/or modified sequence
atggcaagtcttagtaggcccagtctgccctcttgcctgtgtagcttcctgctgctgctgctgctgcaggtgagcagttcttatgctggacagttcagagtgataggcccacgacaccctatacgcgcactcgtgggagacgaggtggaattaccttgtagaatctcacccggtaaaaatgcaactgggatggaggtcggatggtataggcccccattttcacgggtggtacatttgtaccggaacggcaaggatcaggacggggatcaagcaccagaataccggggacggaccgagctgctgaaagatgcaatcggggaaggcaaggtgaccctgcgcatcaggaacgtgcggttcagtgacgagggaggtttcacctgtttctttagagaccatagttatcaggaggaggctgcaatggagctgaaggtagaggatcccttctattgggtgtccccaggagtactggtactgctagccgtcctcccggtattgctgcttcaaattaccgtcggtctggtctttctgtgcctgcagtatagactgagagggaaactgcgcgcagagatagagaatctacataggaccttcgttttccaccttgaggctctatcagggtag

SEQ ID NO: 23114 - DNA, 621 bp, Artificial Sequence
  derived and/or modified sequence
atggcctccctgagtaggccaagtttgccatcctgcctctgctctttcctgctgctgttactgctgcaggtcagtagttcctacgctggtcagtttcgggtgattggtccacgacatccaatcagggcccttgtgggcgatgaagtggaactgccctgcaggatcagtccaggaaagaacgccaccggaatggaggtcggctggtaccggccaccattctcacgggtggttcatctgtaccgaaatggcaaagaccaggatggagaccaggccccagaatacagaggacgtaccgagctcctgaaagatgccatcggcgaaggtaaagtcacacttcgaattcgcaatgtgcggtttagtgatgaggggggttttacctgcttcttccgcgaccactcttatcaggaagaggcggcaatggagctgaaggtggaggacccattttactgggtgagcccaggggtgctggtgctgctggccgttctcccagtgctgctgctgcagataacagtcgggctagtatttttatgcctgcagtaccgcctgcggggaaagctgcgcgctgaaatagagaacctgcaccgcaccttcgtatttcacctggaagcattgtcagggtag

SEQ ID NO: 23115 - DNA, 621 bp, Artificial Sequence
  derived and/or modified sequence
atggcttcacttagccggccttctctccccagctgcctgtgcagctttctcctgctcctgctcctacaggtgtcaagcagctacgcaggccaattcagagtaattggtcccagacatcctatcagggcattggttggggacgaagtggagctaccatgtcggatctcacctggcaaaaacgccacaggcatggaagtgggatggtacagacctccttttagtcgtgtagtgcacctttatagaaacggaaaggatcaggatggggaccaagcaccagagtacagaggacgcactgagctgctcaaagacgcaattggcgaggggaaagtgaccctgcgtatccggaatgtcaggttttctgatgaaggtggctttacgtgcttcttccgcgatcatagttaccaagaggaagccgctatggagctgaaagtggaggatcccttttactgggtgtcccccggagtcctcgttttgctggccgttctgcctgtcttactcttgcagattactttgggcttggtttttctctgcctccagtatcgattgcgcggaaagctcagggccgaaatagagaatctgcatcgaacattcgtttttcacctggaagccctgagtggatag

SEQ ID NO: 23116 - DNA, 642 bp, Artificial Sequence
  derived and/or modified sequence
atggccagcctgagcagacccagcctgcccagctgcctgtgcagcttcctgctgctgctgctgctgcaggtgagcagcagctacgccggccagttcagagtgatcggccccagacaccccatcagagccctggtgggcgacgaggtggagctgccctgcagaatcagccccggcaagaacgccaccggcatggaggtgggctggtacagaccccccttcagcagagtggtgcacctgtacagaaacggcaaggaccaggacggcgaccaggcccccgagtacagaggcagaaccgagctgctgaaggacgccatcggcgagggcaaggtgaccctgagaatcagaaacgtgagattcagcgacgagggcggcttcacctgcttcttcagagaccacagctaccaggaggaggccgccatggagctgaaggtggaggaccccttctactgggtgagccccggcgtgctggtgctgctggccgtgctgcccgtgctgctgctgcagatcaccgtgggcctggtgttcctgtgcctgcagtacagactgagaggcaagctgagagccgagatcgagaacctgcacagaaccttcggccagttcctggaggagctgctgttccacctggaggccctgagcggctag

SEQ ID NO: 23117 - DNA, 621 bp, Artificial Sequence
  derived and/or modified sequence
atggccagcctgagcagacccagcctgcccagctgcctgtgcagcttcctgctgctgctgctgctgcaggtgagcagcagctacgccggccagttcagagtgatcggccccagacaccccatcagagccctggtgggcgacgaggtggagctgccctgcagaatcagccccggcaagaacgccaccggcatggaggtgggctggtacagaccccccttcagcagagtggtgcacctgtacagaaacggcaaggaccaggacggcgaccaggcccccgagtacagaggcagaaccgagctgctgaaggacgccatcggcgagggcaaggtgaccctgagaatcagaaacgtgagattcagcgacgagggcggcttcacctgcttcttcagagaccacagctaccaggaggaggccgccatggagctgaaggtggaggaccccttctactgggtgagccccggcgtgctggtgctgctggccgtgctgcccgtgctgctgctgcagatcaccgtgggcctgatcttcctgtgcctgcagtacagactgagaggcaagctgagagccgagatcgagaacctgcacagaaccttcgtgttccacctggaggccctgagcggctag

SEQ ID NO: 23118 - DNA, 642 bp, Artificial Sequence
  derived and/or modified sequence
atggccagcctgagcagacccagcctgcccagctgcctgtgcagcttcctgctgctgctgctgctgcaggtgagcagcagctacgccggccagttcagagtgatcggccccagacaccccatcagagccctggtgggcgacgaggtggagctgccctgcagaatcagccccggcaagaacgccaccggcatggaggtgggctggtacagaccccccttcagcagagtggtgcacctgtacagaaacggcaaggaccaggacggcgaccaggcccccgagtacagaggcagaaccgagctgctgaaggacgccatcggcgagggcaaggtgaccctgagaatcagaaacgtgagattcagcgacgagggcggcttcacctgcttcttcagagaccacagctaccaggaggaggccgccatggagctgaaggtggaggaccccttctactgggtgagccccggcgtgctggtgctgctggccgtgctgcccgtgctgctgctgcagatcaccgtgggcctgatcttcctgtgcctgcagtacagactgagaggcaagctgagagccgagatcgagaacctgcacagaaccttcggccagttcctggaggagctgctgttccacctggaggccctgagcggctag

SEQ ID NO: 23119 - DNA, 615 bp, Artificial Sequence
  derived and/or modified sequence
agcctgagcagacccagcctgcccagctgcctgtgcagcttcctgctgctgctgctgctgcaggtgagcagcagctacgccggccagttcagagtgatcggccccagacaccccatcagagccctggtgggcgacgaggtggagctgccctgcagaatcagccccggcaagaacgccaccggcatggaggtgggctggtacagaccccccttcagcagagtggtgcacctgtacagaaacggcaaggaccaggacggcgaccaggcccccgagtacagaggcagaaccgagctgctgaaggacgccatcggcgagggcaaggtgaccctgagaatcagaaacgtgagattcagcgacgagggcggcttcacctgcttcttcagagaccacagctaccaggaggaggccgccatggagctgaaggtggaggaccccttctactgggtgagccccggcgtgctggtgctgctggccgtgctgcccgtgctgctgctgcagatcaccgtgggcctggtgttcctgtgcctgcagtacagactgagaggcaagctgagagccgagatcgagaacctgcacagaaccttcgtgttccacctggaggccctgagcggctag

SEQ ID NO: 23120 - DNA, 615 bp, Artificial Sequence
  derived and/or modified sequence
agcctgagcagacccagcctgcccagctgcctgtgcagcttcctgctgctgctgctgctgcaggtgagcagcagctacgccggccagttcagagtgatcggccccagacaccccatcagagccctggtgggcgacgaggtggagctgccctgcagaatcagccccggcaagaacgccaccggcatggaggtgggctggtacagaccccccttcagcagagtggtgcacctgtacagaaacggcaaggaccaggacggcgaccaggcccccgagtacagaggcagaaccgagctgctgaaggacgccatcggcgagggcaaggtgaccctgagaatcagaaacgtgagattcagcgacgagggcggcttcacctgcttcttcagagaccacagctaccaggaggaggccgccatggagctgaaggtggaggaccccttctactgggtgagccccggcgtgctggtgctgctggccgtgctgcccgtgctgctgctgcagatcaccctgggcctggtgttcctgtgcctgcagtacagactgagaggcaagctgagagccgagatcgagaacctgcacagaaccttcgtgttccacctggaggccctgagcggctag

SEQ ID NO: 23121 - DNA, 642 bp, Artificial Sequence
  derived and/or modified sequence
atggccagcctgagcagacccagcctgcccagctgcctgtgcagcttcctgctgctgctgctgctgcaggtgagcagcagctacgccggccagttcagagtgatcggccccagacaccccatcagagccctggtgggcgacgaggtggagctgccctgcagaatcagccccggcaagaacgccaccggcatggaggtgggctggtacagaccccccttcagcagagtggtgcacctgtacagaaacggcaaggaccaggacggcgaccaggcccccgagtacagaggcagaaccgagctgctgaaggacgccatcggcgagggcaaggtgaccctgagaatcagaaacgtgagattcagcgacgagggcggcttcacctgcttcttcagagaccacagctaccaggaggaggccgccatggagctgaaggtggaggaccccttctactgggtgagccccggcgtgctggtgctgctggccgtgctgcccgtgctgctgctgcagatcaccctgggcctggtgttcctgtgcctgcagtacagactgagaggcaagctgagagccgagatcgagaacctgcacagaaccttcggccagttcctggaggagctgctgttccacctggaggccctgagcggctag

SEQ ID NO: 23122 - DNA, 621 bp, Artificial Sequence
  derived and/or modified sequence
atggccagcctgagcagacccagcctgcccagctgcctgtgcagcttcctgctgctgctgctgctgcaggtgagcagcagctacgccggccagttcagagtgatcggccccagacaccccatcagagccctggtgggcgacgaggtggagctgccctgcagaatcagccccggcaagaacgccaccggcatggaggtgggctggtacagaccccccttcagcagagtggtgcacctgtacagaaacggcaaggaccaggacggcgaccaggcccccgagtacagaggcagaaccgagctgctgaaggacgccatcggcgagggcaaggtgaccctgagaatcagaaacgtgagattcagcgacgagggcggcttcacctgcttcttcagagaccacagctaccaggaggaggccgccatggagctgaaggtggaggaccccttctactgggtgagccccggcgtgctggtgctgctggccgtgctgcccgtgctgctgctgcagatcaccgtgggcctggtgttcctgtgcctgcagtacagactgagaggcaagctgagagccgagatcgagaacctgcacagaaccttcgtgttccacctggaggccctgagcggctag

SEQ ID NO: 23123 - DNA, 621 bp, Artificial Sequence
  derived and/or modified sequence
atggccagcctgagcagacccagcctgcccagctgcctgtgcagcttcctgctgctgctgctgctgcaggtgagcagcagctacgccggccagttcagagtgatcggccccagacaccccatcagagccctggtgggcgacgaggtggagctgccctgcagaatcagccccggcaagaacgccaccggcatggaggtgggctggtacagaccccccttcagcagagtggtgcacctgtacagaaacggcaaggaccaggacggcgaccaggcccccgagtacagaggcagaaccgagctgctgaaggacgccatcggcgagggcaaggtgaccctgagaatcagaaacgtgagattcagcgacgagggcggcttcacctgcttcttcagagaccacagctaccaggaggaggccgccatggagctgaaggtggaggaccccttctactgggtgagccccggcgtgctggtgctgctggccgtgctgcccgtgctgctgctgcagatcaccctgggcctggtgttcctgtgcctgcagtacagactgagaggcaagctgagagccgagatcgagaacctgcacagaaccttcgtgttccacctggaggccctgagcggctag

SEQ ID NO: 23124 - protein, 159 aa, Artificial Sequence
  derived and/or modified sequence
MLHVLASLPLLLLLVTSASTHAWSRPLWYQVGLDLQPWGCQPKSVEGCRGGLSCPGYWLGPGASRIYPVAAVMITTTMLMICRKILQGRRRSQATKGEHPQVTTEPCGPWKRRAPISDHTLLRGVLHMLDALLVHIEGHLRHLATQRQIQIKGTSTQSG

SEQ ID NO: 23125 - DNA, 480 bp, Artificial Sequence
  derived and/or modified sequence
atgctgcacgtgctggccagcctgcccctgctgctgctgctggtgaccagcgccagcacccacgcctggagcagacccctgtggtaccaggtgggcctggacctgcagccctggggctgccagcccaagagcgtggagggctgcagaggcggcctgagctgccccggctactggctgggccccggcgccagcagaatctaccccgtggccgccgtgatgatcaccaccaccatgctgatgatctgcagaaagatcctgcagggcagaagaagaagccaggccaccaagggcgagcacccccaggtgaccaccgagccctgcggcccctggaagagaagagcccccatcagcgaccacaccctgctgagaggcgtgctgcacatgctggacgccctgctggtgcacatcgagggccacctgagacacctggccacccagagacagatccagatcaagggcaccagcacccagagcggctag

SEQ ID NO: 23126 - DNA, 480 bp, Artificial Sequence
  derived and/or modified sequence
atgctccacgtcctagcttctttgcccctgctccttctgctggtgactagcgcaagcacacatgcctggtctcggcccctgtggtatcaggtcggcctggatttgcagccttggggttgccagcctaaaagtgtggagggatgcaggggaggactctcgtgccccgggtactggctgggaccgggtgcttcaaggatctaccccgtggcagcagtgatgatcactactaccatgcttatgatatgcagaaaaattctgcaggggcggcggcggtctcaggcaacaaaaggcgagcaccctcaggttaccacagagccctgcggcccctggaagagacgcgcaccaattagcgaccatacccttctgcgcggagtgctgcacatgttggacgctctccttgtccacattgaaggccaccttcgccatctggcgacccagcggcagatccagattaagggaacatctacacagtccggatag

SEQ ID NO: 23127 - DNA, 480 bp, Artificial Sequence
  derived and/or modified sequence
atgctgcacgtgctggccagcctgcccctgctgctgctgctggtgaccagcgccagcacccacgcctggagccggcccctgtggtaccaggtgggcctggacctgcagccctggggctgccagcccaagtctgtggagggctgccggggcggcctgagctgccccggctactggctgggccctggggccagccgcatctaccctgtggccgctgtgatgatcaccaccaccatgctgatgatctgcaggaagatcctgcagggcagaagaagaagccaggccaccaagggggagcacccccaggtgaccacagagccctgtggcccctggaagaggcgggcccccatcagtgaccacaccctgctgcggggcgtgctgcacatgctggatgccctgctggtgcacatcgagggccacctgcggcacctggccacccagaggcagatccagatcaagggcaccagcacccagagcggctag

SEQ ID NO: 23128 - DNA, 480 bp, Artificial Sequence
  derived and/or modified sequence
atgctgcacgtgctggccagcctgcccctgctgctgctgctggtgacatccgcgtctacgcacgcctggagccgtcccctgtggtaccaagttggcttagatctgcaaccatggggatgtcagcccaagtctgtggaaggttgtaggggcggactgagctgtcccggctactggcttgggcccggagctagtcgcatctaccccgttgcagctgtcatgataaccaccacaatgctgatgatctgccgcaaaattttacaggggaggagaaggtctcaggccactaagggagagcacccccaagtgaccaccgagccatgcgggccttggaagagaagagctcccatctcagatcataccttactaagaggggttctgcacatgttggacgctttactagtgcacatcgagggccacttgcgccaccttgcgactcaacggcaaatacagataaagggcacctcaacccagtcaggctag

SEQ ID NO: 23129 - DNA, 480 bp, Artificial Sequence
  derived and/or modified sequence
atgcttcacgtgttggcatctttacccctgctgctcctccttgtcacgtccgccagcactcacgcttggtcccggcctctgtggtatcaggtgggcctcgacctgcagccttggggatgtcaacccaaaagcgtcgagggttgcaggggcggtttaagctgtcccggatactggttgggccctggggcttcccggatttatccagtagcagcagtcatgattacgactacaatgctgatgatctgccgtaaaatcctgcaggggagacggcgatcccaggctaccaaaggcgaacacccccaggtgactactgaaccctgcggcccttggaagagaagagccccaattagtgaccatactctgctgcgaggtgttctacacatgctggatgcccttctggttcacatagaaggacacctgcgacatctggcaactcaaaggcagatccagattaagggtacttctactcaaagtggctag

SEQ ID NO: 23130 - DNA, 662 bp, Artificial Sequence
  derived and/or modified sequence
ggctggaacctgctgccttagagccaggcctcttcccgggggaggggcgtttgcccgttgccaggtgcccgggttccggccctggcactagcgacggccatgctgcatgtgctggcctcgctgcctttgctgctcctgctggtgacgtctgcctccacccacgcctggtcgagacccctctggtaccaggtggggctggacttgcagccctgggggtgtcagccaaagagtgtggagggctgtaggggtggcctgagctgtcctggctactggctgggccctggagcaagccgcatctaccccgtggctgcggtcatgatcaccaccacgatgctgatgatctgccgcaagatactgcaggggcggcggcgctcacaggccaccaagggtgagcatccgcaggtgaccactgagccctgcggaccctggaaacggcgggccccaatctcagaccacaccctgctccgtggggtcctgcacatgctggatgccctcctggtccacatcgaaggccacctacgtcatctagccacccagcggcaaatccaaataaaggggacttccacccagagtgggtgaccgaacatgtgcctctctttgcctgacagcctgaggtcctgggccaggtctgctctttccaggcctgtctggaccgtgtgtcc

SEQ ID NO: 23131 - protein, 477 aa, Artificial Sequence
  derived and/or modified sequence
MSAAPGLLHQELSCPLCLQLFDAPVTAECGHSFCRACLGRVAGEPAADGTVLCPCCQAPTRPQALSTNLQLARLVEGLAQVPQGHCEEHLDPLSIYCEQDRALVCGVCASLGSHRGHRLLPAAEAHARLKTQLPQQKLQLQEACMRKEKSVAVLEHQLVEVEETVRQFRGAVGEQLGKMRVFLAALEGSLDREAERVRGEAGVALRRELGSLNSYLEQLRQMEKVLEEVADKPQTEFLMKYCLVTSRLQKILAESPPPARLDIQLPIISDDFKFQVWRKMFRALMPALEELTFDPSSAHPSLVVSSSGRRVECSEQKAPPAGEDPRQFDKAVAVVAHQQLSEGEHYWEVDVGDKPRWALGVIAAEAPRRGRLHAVPSQGLWLLGLREGKILEAHVEAKEPRALRSPERRPTRIGLYLSFGDGVLSFYDASDADALVPLFAFHERLPRPVYPFFDVCWHDKGKNAQPLLLVGPEGAEA

SEQ ID NO: 23132 - DNA, 1434 bp, Artificial Sequence
  derived and/or modified sequence
atgagcgccgcccccggcctgctgcaccaggagctgagctgccccctgtgcctgcagctgttcgacgcccccgtgaccgccgagtgcggccacagcttctgcagagcctgcctgggcagagtggccggcgagcccgccgccgacggcaccgtgctgtgcccctgctgccaggcccccaccagaccccaggccctgagcaccaacctgcagctggccagactggtggagggcctggcccaggtgccccagggccactgcgaggagcacctggaccccctgagcatctactgcgagcaggacagagccctggtgtgcggcgtgtgcgccagcctgggcagccacagaggccacagactgctgcccgccgccgaggcccacgccagactgaagacccagctgccccagcagaagctgcagctgcaggaggcctgcatgagaaaggagaagagcgtggccgtgctggagcaccagctggtggaggtggaggagaccgtgagacagttcagaggcgccgtgggcgagcagctgggcaagatgagagtgttcctggccgccctggagggcagcctggacagagaggccgagagagtgagaggcgaggccggcgtggccctgagaagagagctgggcagcctgaacagctacctggagcagctgagacagatggagaaggtgctggaggaggtggccgacaagccccagaccgagttcctgatgaagtactgcctggtgaccagcagactgcagaagatcctggccgagagccccccccccgccagactggacatccagctgcccatcatcagcgacgacttcaagttccaggtgtggagaaagatgttcagagccctgatgcccgccctggaggagctgaccttcgaccccagcagcgcccaccccagcctggtggtgagcagcagcggcagaagagtggagtgcagcgagcagaaggccccccccgccggcgaggaccccagacagttcgacaaggccgtggccgtggtggcccaccagcagctgagcgagggcgagcactactgggaggtggacgtgggcgacaagcccagatgggccctgggcgtgatcgccgccgaggcccccagaagaggcagactgcacgccgtgcccagccagggcctgtggctgctgggcctgagagagggcaagatcctggaggcccacgtggaggccaaggagcccagagccctgagaagccccgagagaagacccaccagaatcggcctgtacctgagcttcggcgacggcgtgctgagcttctacgacgccagcgacgccgacgccctggtgcccctgttcgccttccacgagagactgcccagacccgtgtaccccttcttcgacgtgtgctggcacgacaagggcaagaacgcccagcccctgctgctggtgggccccgagggcgccgaggcctag

SEQ ID NO: 23133 - DNA, 1434 bp, Artificial Sequence
  derived and/or modified sequence
atgtctgcggcccctggtcttctgcatcaggagctttcttgcccactctgtcttcagctctttgacgccccggtgacagctgagtgtggtcattcattctgtcgcgcctgtcttggcagagtcgccggcgagcccgctgctgacgggacagtgctttgcccctgctgccaggcgccgactcggccccaggccctgtccactaaccttcagcttgccagactggtggaggggctcgcacaggtgccccagggacactgcgaggaacatctcgacccactgagcatttactgtgaacaagatcgcgcactagtgtgcggtgtgtgcgcatcacttggcagccatcgaggacaccgactgctgcctgcagccgaagcccacgctcgactaaaaacacagctgccccagcagaagctccagctgcaggaggcctgcatgcgcaaggaaaaatctgtcgcggtgctcgaacaccagctggttgaagttgaggagactgtaagacaattcaggggagcggtgggcgagcagctgggcaaaatgcgggtcttcctggctgcactggaaggatcgctcgatagggaggccgagcgggtccggggcgaagccggagttgccttaaggcgcgagcttggcagcctaaacagctaccttgagcagctgaggcagatggaaaaagtcctcgaggaggtcgccgacaagcctcagacggagtttctgatgaagtactgcctagtgaccagccggctacagaagattctcgcggagtccccccctcccgcccgccttgatatccagctgccaataatttcagacgactttaaattccaggtctggagaaagatgtttcgggcgttaatgcctgcgttagaggagctgactttcgatccctcctccgctcatccatccctcgtggtgagctcgtctggcaggcgagtggagtgctccgaacaaaaagccccgccagccggggaggatccacggcagttcgataaggcagtggccgtcgtggcccaccagcagctcagtgagggggaacattactgggaggttgatgtcggagacaagccaaggtgggccctgggggttattgccgcagaggcaccaagacgaggccgccttcatgcagtgccatctcagggcctatggctgctcgggctgagagaaggcaagatcctggaggcccatgtagaagcgaaagagccccgggcccttaggtcaccagagcgacgccctacgcggatcggcttgtacctgtcttttggggacggcgtgctgtcattttacgatgcgtccgacgcggacgctctagtgcctctgtttgccttccatgagagactgccacggccagtatacccattctttgatgtgtgttggcacgacaaggggaaaaacgctcagcctctgctcctcgtggggcctgaaggtgcggaggcctag

SEQ ID NO: 23134 - DNA, 1434 bp, Artificial Sequence
  derived and/or modified sequence
atgtctgctgcccctggcctgctgcaccaggagctgagctgccccctgtgcctgcagctgtttgatgcccctgtgacagcagaatgtggccacagcttctgccgggcctgcctgggccgggtggccggggagcctgctgctgatggcaccgtgctgtgcccctgctgccaggcccccacccggccccaggccctgagcaccaacctgcagctggcccggctggtggagggcctggcccaggtgccccagggccactgtgaggagcacctggaccccctgagcatctactgtgagcaggaccgggccctggtgtgtggggtgtgtgccagcctgggcagccaccggggccaccggctgctgcctgctgctgaggcccacgcccggctgaagacccagctgccccagcagaagctgcagctgcaggaggcctgcatgaggaaggagaagtctgtggccgtgctggagcaccagctggtggaggtggaggagaccgtgcggcagttcagaggagctgtgggggagcagctgggcaagatgagggtcttcctggccgccctggagggcagcctggaccgggaggccgagcgggtgcggggggaggccggcgtggccctgcggcgggagctgggcagcctgaacagctacctggagcagctgcggcagatggagaaggtgctggaggaggtggccgacaagccccagacagagttcctgatgaagtactgcctggtgaccagccggctgcagaagatcctggccgagagccccccaccagcccggctggacatccagctgcccatcatcagtgatgacttcaagttccaggtgtggaggaagatgttccgggccctgatgcctgccctggaggagctgacctttgaccccagcagcgcccaccccagcctggtggtgagcagcagtggaagaagagtggagtgcagcgagcagaaggcccctcctgctggggaggacccccggcagtttgacaaggctgtggccgtggtggcccaccagcagctgtctgagggggagcactactgggaggtggatgtgggggacaagccccgctgggccctgggcgtgattgctgctgaggccccccggcggggccgcctgcatgctgtgcccagccagggcctgtggctgctgggcctgcgggagggcaagatcctggaggcccacgtggaggccaaggagccccgggccctgcggagccctgagcggcggcccaccagaattggcctgtacctgagctttggagatggagtgctgtccttctatgatgccagtgatgctgatgccctggtgcccctgtttgccttccacgagcggctgcccaggcctgtgtaccccttctttgatgtgtgctggcatgacaagggcaagaatgcccagcccctgctgctggtgggccctgagggcgctgaggcctag

SEQ ID NO: 23135 - DNA, 1434 bp, Artificial Sequence
  derived and/or modified sequence
atgagcgccgcccccggcctgctgcaccaggagctgagctgccccctctgtctgcaacttttcgatgcgccagttactgctgaatgcggccacagtttctgtcgtgcatgcctcggaagagtggcaggtgaacccgccgccgacggaaccgtgctgtgcccgtgctgtcaggccccaacacgacctcaggctctctcaaccaatcttcagctcgcgcgcctggtcgaagggctcgcacaggtgccgcaagggcactgtgaagaacacctcgaccctctctcaatctactgtgagcaggatagagcgttagtctgcggagtgtgcgcctcgctggggagtcatcgggggcaccggttgcttcctgccgccgaagcgcatgcacgtctgaagacccagctgccgcagcagaaactccagttacaagaagcctgcatgcggaaggaaaaatcagtggcagtcctagaacaccagctggtggaggtggaggagactgtgcgacagttcaggggtgccgtgggggagcaactcgggaagatgcgcgtgttcctcgccgccctggaggggtcattagacagagaagcagaaagggtaagaggcgaagcaggggttgcgctgagacgggagcttggttcattgaatagttatctcgagcagcttaggcagatggagaaggtcctggaggaggtagccgataaaccccagacagagttcctgatgaagtactgtctggttacctctcggttgcagaagatcttggctgaaagtccccctccagctcgcctcgacatccagctcccaattatctcagacgatttcaagtttcaggtgtggcgtaagatgtttagagccttgatgcccgccctcgaggaattaacttttgaccctagctcagcacaccccagtctggtggtgtcctcgtctggaaggagggttgagtgctccgagcagaaagcaccaccagctggagaggacccgaggcagtttgataaggccgtagctgtagtcgcccatcagcaactctccgaaggtgaacactattgggaagttgacgttggcgataagcctagatgggctttaggcgtgatagctgcagaggcgccacggcgcgggcgcttacatgctgttccctcccaaggcctgtggctgctaggtctgagggagggtaaaattctcgaagctcacgtcgaagctaaagaacctcgcgccctccgctctcctgagcggagacctactcggattggtctttatctgtcctttggcgatggagtgctgtccttttacgacgcatccgatgccgacgcgctcgtgccactcttcgctttccacgagaggttaccgaggccggtgtacccgttttttgacgtgtgttggcacgacaaagggaaaaatgcccagccacttctgctggtcggccctgagggtgccgaggcctag

SEQ ID NO: 23136 - DNA, 1434 bp, Artificial Sequence
  derived and/or modified sequence
atgagcgccgcacccggacttttgcaccaggaactttcgtgccccctctgtttacaactgtttgatgctcctgtgaccgcagaatgtgggcactccttttgtcgggcatgcctgggtcgtgtagccggagagcccgctgctgatggcactgtgctttgtccatgctgccaggccccaacaaggccacaggccctgagcaccaatctccagctggctagattagtggagggacttgcccaggtcccacagggtcattgtgaagagcatctcgacccactgtccatttactgcgagcaggaccgcgcactcgtgtgtggcgtctgcgcatccctaggcagccatcgtggccacaggctgttgccggctgccgaagctcatgcacggctcaaaactcagctgccccagcaaaagctgcagttgcaggaggcatgcatgcgcaaagagaaaagtgtggccgtactggagcaccagctggttgaggtagaagagaccgtccgtcagttcagaggagcagtgggcgagcaattaggcaaaatgagggtgtttctcgctgccttagaaggttctctcgatcgcgaggcggaacgtgtgagaggtgaggccggagtagccctccggagagagctggggagtttgaactcatatctcgagcagctgcgtcagatggagaaggtgctggaggaggtggccgataagcctcaaaccgaatttctcatgaaatactgtcttgtaacttctcggttacaaaagatcttggcagaaagcccccctcctgcccgactggatattcagctgccaatcatatcagacgactttaagtttcaggtatggcgcaagatgttcagagcgctgatgcccgctctggaggagctgaccttcgaccctagttcagcccacccatcactcgtggtgagttcaagcgggagacgggtcgaatgctccgagcagaaggcgccaccagccggtgaggatcctagacaatttgataaagccgttgctgtcgttgcacaccagcagctctccgagggcgagcattactgggaggtcgatgtgggtgacaaacccagatgggcacttggcgtcatagccgcagaggcgccaagacggggtcggttacatgcagtaccctcacagggtctgtggttgctgggcctcagggaaggcaagattctggaggctcacgtcgaggccaaagagccaagggccctgcgtagcccagagagacggccaacgcgcatcggactttatctgagcttcggggacggcgtcctatccttctacgacgctagcgatgccgatgccctggtgccactttttgcatttcatgaacgcctccccagacccgtgtacccgtttttcgacgtgtgctggcacgataaaggcaagaacgcacaacccctgctgcttgtggggccagagggagcagaagcttag

SEQ ID NO: 23137 - DNA, 2152 bp, Artificial Sequence
  derived and/or modified sequence
ttttagaacggtttccggaagtgatgggagggattgggcagggcagctaaatatagtcctggggccatggctcagtctgggagggtcttccgctgagcactgtgtgcccatcacgcgtggtgtccactgccagctgcccctgtgagtccctgtccttgcttggagcctgctgcttgtctcagatccttggacccagccctgaccccagtccagctaagctcaaccctgaccggtcctccttcgagactctttcagcctaagatctccaaccagacctgcccgccatgtcggctgcgcccggcctcctgcaccaggagctgtcctgcccgctgtgcctgcagctgttcgacgcgcccgtgacagccgagtgcggccacagtttctgccgcgcctgcctaggccgcgtggccggggagccggcggcggatggcaccgttctctgcccctgctgccaggcccccacgcggccgcaggcactcagcaccaacctgcagctggcgcgcctggtggaggggctggcccaggtgccgcagggccactgcgaggagcacctggacccgctgagcatctactgcgagcaggaccgcgcgctggtgtgcggagtgtgcgcctcactcggctcgcaccgcggtcatcgcctcctgcctgccgccgaggcccacgcacgcctcaagacacagctgccacagcagaaactgcagctgcaggaggcatgcatgcgcaaggagaagagtgtggctgtgctggagcatcagctggtggaggtggaggagacagtgcgtcagttccggggggccgtgggggagcagctgggcaagatgcgggtgttcctggctgcactggagggctccttggaccgcgaggcagagcgtgtacggggtgaggcaggggtcgccttgcgccgggagctggggagcctgaactcttacctggagcagctgcggcagatggagaaggtcctggaggaggtggcggacaagccgcagactgagttcctcatgaaatactgcctggtgaccagcaggctgcagaagatcctggcagagtctcccccacccgcccgtctggacatccagctgccaattatctcagatgacttcaaattccaggtgtggaggaagatgttccgggctctgatgccagcgctggaggagctgacctttgacccgagctctgcgcacccgagcctggtggtgtcttcctctggccgccgcgtggagtgctcggagcagaaggcgccgccggccggggaggacccgcgccagttcgacaaggcggtggcggtggtggcgcaccagcagctctccgagggcgagcactactgggaggtggatgttggcgacaagccgcgctgggcgctgggcgtgatcgcggccgaggccccccgccgcgggcgcctgcacgcggtgccctcgcagggcctgtggctgctggggctgcgcgagggcaagatcctggaggcacacgtggaggccaaggagccgcgcgctctgcgcagccccgagaggcggcccacgcgcattggcctttacctgagcttcggcgacggcgtcctctccttctacgatgccagcgacgccgacgcgctcgtgccgctttttgccttccacgagcgcctgcccaggcccgtgtaccccttcttcgacgtgtgctggcacgacaagggcaagaatgcccagccgctgctgctcgtgggtcccgaaggcgccgaggcctgagccgccggacgggtagtggaggggcgcgggggcctgggttgaagcttaggtctccttggtcgggtctgacgggagaagggtggggagcgggttgccagggcccagggggctgggaactgggggatctcccagaatactgacaagcgtggggtaggactggcttggtggctcatgcctgtaatcccagcactttgggagacggaggcgggtggatcacctgaggtcaggagttcaagaccagcctggccaacatggtgaaactcctctctactgaaaatacaaaaatgagctgggcgcggtggcatacgcctgtaatcccagctagttgggaggctgaggcaggataattgcttgaacccaggaggtggaggttgcagtgagcagacattgcggcactgcactctagcctgggtgacaagagtgagactctgtct

SEQ ID NO: 23138 - protein, 135 aa, Artificial Sequence
  derived and/or modified sequence
MVLESVARIVKVQLPAYLKRLPVPESITGFARLTVSEWLRLLPFLGVLALLGYLAVRPFLPKKKQQKDSLINLKIQKENPKVVNEINIEDLCLTKAAYCRCWRSKTFPACDGSHNKHNELTGDNVGPLILKKKEV

SEQ ID NO: 23139 - DNA, 408 bp, Artificial Sequence
  derived and/or modified sequence
atggtcctagagagcgttgctcgcattgttaaagtacagctacctgcataccttaagcgcttgccagtccccgaatctattaccggctttgcacggctcacggtatccgagtggctgcgtctgctgcctttcttaggcgttctggctcttctcggctacctcgccgtgcgcccgtttcttcccaaaaagaagcagcagaaagatagtctgatcaacctgaagattcagaaggagaacccaaaggtcgtgaacgagataaacattgaagacctctgcctcactaaagccgcctactgtcggtgttggaggagcaagactttccccgcctgcgatgggtcacacaacaaacacaacgagcttacaggggataatgtcggacctctcatccttaagaagaaggaggtgtag

SEQ ID NO: 23140 - DNA, 408 bp, Artificial Sequence
  derived and/or modified sequence
atggtgctggagagcgtggccagaattgtgaaggtgcagctgcctgcctacctgaagaggctgcctgtgcctgagagcatcaccggctttgcccggctgactgtgtctgagtggctgcggctgctgcccttcctgggcgtgctggccctgctgggctacctggccgtgcggcccttcctgcccaagaagaagcagcagaaggacagcctcatcaacctgaagatccagaaggagaaccccaaggtggtgaatgagatcaacatcgaggacctgtgcctgaccaaggccgcctactgccgctgctggaggagcaagaccttccctgcctgtgatggcagccacaacaagcacaatgagctgactggagacaacgtgggccccctcatcctgaagaagaaggaggtgtag

SEQ ID NO: 23141 - DNA, 408 bp, Artificial Sequence
  derived and/or modified sequence
atggtgctggagagcgtggcccggatcgtgaaggtgcagctgcccgcatacctgaaacgtctcccagtcccagagagtataactgggttcgcgcgcctcaccgtgagcgagtggctacgacttctgccctttctgggggtgctggctctactgggatatctggccgtgaggccatttttgcccaagaagaagcaacagaaagatagccttatcaatcttaagatccagaaagaaaatcccaaggttgtgaatgaaattaacatcgaagacctttgtttgacaaaggctgcctattgccgctgttggcggagcaaaaccttccccgcgtgcgatggcagccacaataagcacaacgagctaaccggagataacgtgggaccacttatcctaaaaaaaaaagaggtctag

SEQ ID NO: 23142 - DNA, 408 bp, Artificial Sequence
  derived and/or modified sequence
atggtcctggaaagtgtcgcccgtatcgtaaaagtgcagctcccggcttatctaaagcgtcttcccgtgccggagtccatcactgggtttgccagactcaccgttagcgaatggctgcgattgctgcccttcctgggagtactggccctgctcggatatcttgctgttagaccctttcttcccaagaaaaaacagcagaaggactcactgatcaacttaaaaattcagaaagagaaccccaaggttgtgaacgaaataaacatagaggatctgtgtctcacgaaggctgcgtattgcaggtgttggagatcaaagacattcccagcctgcgacggaagtcacaataagcacaatgagctgactggggacaatgtagggcctctgattctgaagaaaaaggaggtctag

SEQ ID NO: 23143 - DNA, 2327 bp, Artificial Sequence
  derived and/or modified sequence
aggccgaggccgccagtgcccgccggccgcttccgctcccggcgcaggcgcggcagcttggccagagcggagggggctcgggagaggagtggacgccgctggccaggatggtgctggagagcgtggcccgtatcgtgaaggtgcagctccctgcatatctgaagcggctcccagtccctgaaagcattaccgggttcgctaggctcacagtttcagaatggcttcggttattgcctttccttggtgtactcgcacttcttggctaccttgcagttcgtccattcctcccgaagaagaaacaacagaaggatagcttgattaatcttaaaatacaaaaggaaaatccgaaagtagtgaatgaaataaacattgaagatttgtgtcttactaaagcagcttattgtaggtgttggcgttctaaaacgtttcctgcctgcgatggttcacataataaacacaatgaattgacaggagataatgtgggtccactaatactgaagaagaaagaagtataataataataacaatattttctcattctttgtgtatagaaaattttaaaatggtggtcttaattattactactggttgaacaattatttcttccaatttattttcttcctgcactactgtttgtatttgatcctttgtctattcagtcacttaattagaaattaaattgtcaagcctcttattctgacttcaaagaattaatgtatcttccaacaataaaatcacttctgattttaatctaggaaaacctaaattgtggctatggatccaaagctgtttgtttctttgaatatcaatattttcaacaggatcttgtatttaaaattcccacctacattgttaaatatgttattttttcatatctcttttggttttgataatctgaagtgtttttttctcgttttggccttccaaactgcatttggttaggtgaattaagaaaaatattgccatcaagaattacttgtgttttcacagagatagactctttgctttatagagattgttgtgtatttaatatgaatatcccagctttagaaaagaagtaaactggatacaaaaagttccattgaggaacagttatttacagtataaaagatttgtttactttacaaaaggcttgtgtctgtgtgtgtgtgtgtgtgtgtgtgtgtgtattttaaactgactcagtgacagctggggtggaatggcaagaacacttacaaccaaactcatgggctgctgcaatttgaagataattggtaataaacataagacattaattcatattaaaatagttcagtgttcaaaattgtgtttatgtggatatttttctctttttaacactataaaccattaaaatacagtcatcccttgtatacgctagggactggttccagggccacacatataccaaaatctgcccatactcaagtcccacagaaagtcttgcagaacccatatgtagaaaagttggccctccagttgaccctccgtacacatgagtttcacatcccatgcacaaatgctgatctgtgtgacctcacctgcatttgattgaaaaaagtatgcgcgtaattgtacccacccagttcaaacccgtgtgtaagggtcaactgtacaaaaaagtttgtgaaataaacgtactggagaatctttaaaatttttgtgctttttaatcctactattatgaatctttttagtttcatcttacattactactctcataatagctatccttagccaggtgccatggcacaggcctgtagtcccaactgctgggaagattgaggtgggaggatggctgcagtacaagagcccaggagttcaaggccaggctgggcaacctagtgctccgcctctgctgggctctgtagggaatcctttctgttgtaaaagagttaccatttaactcccttcactgagtgcgtttctgagaccttgctaggcactctggaaactgcttagttgagaaaagacaaatacaaaagcttttctttagtctatttaagatacagtttattcagttcactttgctttctttttataagaatgtacaagaggcagacagaggtaatccttctagaaataaaactaattgttattgggcacttgtatgtaccagacactacactaagcatggtacttgggtttttaatttattacatgtaatgtcagtaggttcaattatatgatcgtaacatcttcatgaccagcagcatgtattttagagttagaaatgtagtctggtttttgagaagttttacaaggtgtatgtccaaaattgttctttcctcacatgtcagtgggggataaatacagcattgctctca

SEQ ID NO: 23144 - DNA, 408 bp, Artificial Sequence
  derived and/or modified sequence
atggtgctggagagcgtggccagaatcgtgaaggtgcagctgcccgcctacctgaagagactgcccgtgcccgagagcatcaccggcttcgccagactgaccgtgagcgagtggctgagactgctgcccttcctgggcgtgctggccctgctgggctacctggccgtgagacccttcctgcccaagaagaagcagcagaaggacagcctgatcaacctgaagatccagaaggagaaccccaaggtggtgaacgagatcaacatcgaggacctgtgcctgaccaaggccgcctactgcagatgctggagaagcaagaccttccccgcctgcgacggcagccacaacaagcacaacgagctgaccggcgacaacgtgggccccctgatcctgaagaagaaggaggtgtag

SEQ ID NO: 23145 - protein, 640 aa, Artificial Sequence
  derived and/or modified sequence
MGQPSLTWMLMVVVASWFITTAATDTSEARWCSECHSNATCTEDEAVTTCTCQEGFTGDGLTCVDLDECAIPGAHNCSANSSCVNTPGSFSCVCPEGFRLSPGLGCTDVDECAEPGLSHCHALATCVNVVGSYLCVCPAGYRGDGWHCECSPGSCGPGLDCVPEGDALVCADPCQAHRTLDEYWRSTEYGEGYACDTDLRGWYRFVGQGGARMAETCVPVLRCNTAAPMWLNGTHPSSDEGIVSRKACAHWSGHCCLWDASVQVKACAGGYYVYNLTAPPECHLAYCTDPSSVEGTCEECSIDEDCKSNNGRWHCQCKQDFNITDISLLEHRLECGANDMKVSLGKCQLKSLGFDKVFMYLSDSRCSGFNDRDNRDWVSVVTPARDGPCGTVLTRNETHATYSNTLYLADEIIIRDLNIKINFACSYPLDMKVSLKTALQPMVSALNIRVGGTGMFTVRMALFQTPSYTQPYQGSSVTLSTEAFLYVGTMLDGGDLSRFALLMTNCYATPSSNATDPLKYFIIQDRCPHTRDSTIQVVENGESSQGRFSVQMFRFAGNYDLVYLHCEVYLCDTMNEKCKPTCSGTRFRSGSVIDQSRVLNLGPITRKGVQATVSRAFSSLGLLKVWLPLLLSATLTLTFQ

SEQ ID NO: 23146 - protein, 276 aa, Artificial Sequence
  derived and/or modified sequence
MDGPAIITQVTNPKEDEGRLPGAGEKASQCNVSLKKQRSRSILSSFFCCFRDYNVEAPPPSSPSVLPPLVEENGGLQKGDQRQVIPIPSPPAKYLLPEVTVLDYGKKCVVIDLDETLVHSSFKPISNADFIVPVEIDGTIHQVYVLKRPHVDEFLQRMGQLFECVLFTASLAKYADPVADLLDRWGVFRARLFRESCVFHRGNYVKDLSRLGRELSKVIIVDNSPASYIFHPENAVPVQSWFDDMTDTELLDLIPFFEGLSREDDVYSMLHRLCNR

SEQ ID NO: 23147 - DNA, 831 bp, Artificial Sequence
  derived and/or modified sequence
atggatggtcctgctattattacccaagtcacgaaccctaaggaagacgagggccgcctgcctggggccggcgaaaaagcaagccagtgtaacgttagtctgaagaagcagcggtcgagatcaatcctgagctcttttttctgttgctttcgagattacaacgtggaagctcctccaccatccagtccaagtgtcctgcctccgttggtcgaagagaacgggggcctacaaaagggcgaccagaggcaggttatcccaatcccctcacctcccgctaaatacttactgccggaggtgactgtgcttgattacggcaaaaagtgcgttgtcatcgatctcgacgagacccttgtgcactcgtctttcaaacccatctcaaacgcagacttcatagtacctgtggagatcgacggcaccatccaccaggtgtacgttctcaagcggccacatgtcgatgagtttctgcagaggatgggacagctcttcgaatgtgtcctttttacggcctctctagcaaaatacgcagatcccgtagccgatcttttggacaggtggggggttttccgagcgaggctcttccgagagtcatgtgtgtttcaccgcggtaactacgtaaaagacctatcacgtctgggcagggagctttccaaagttattattgtggacaacagcccggcatcttacattttccatcctgaaaatgcagtcccggtccagtcctggttcgatgacatgactgacacagagttgctggatttgatccccttcttcgagggattgagtcgagaagatgatgtgtacagtatgctccacagactgtgtaatagatag

SEQ ID NO: 23148 - DNA, 831 bp, Artificial Sequence
  derived and/or modified sequence
atggatggccctgccatcatcacccaggtgaccaaccccaaggaggatgagggccgcctgcctggagctggggagaaggccagccagtgcaatgtgtccctgaagaagcagaggagccgcagcatcctgagcagcttcttctgctgcttccgggactacaacgtggaggcccccccacccagcagccccagcgtgctgccccccctggtggaggagaatggaggcctgcagaagggggaccagaggcaggtgatccccatccccagccccccagccaagtacctgctgcctgaggtgacagtgctggactatggcaagaagtgtgtggtgattgacctggatgagaccctggtgcacagcagcttcaagcccatcagcaatgctgacttcatcgtgcctgtggagattgatggcaccatccaccaggtgtatgtgctgaagaggccccacgtggatgagttcctgcagaggatgggccagctgtttgaatgtgtgctcttcaccgccagcctggccaagtatgctgaccctgtggccgacctgctggaccgctggggcgtcttccgggcccggctcttccgggagagctgtgtgttccaccggggcaactacgtgaaggacctgagccggctgggccgggagctgagcaaggtgatcatcgtggacaacagccctgccagctacatcttccacccagaaaatgctgtgcctgtgcagagctggtttgatgacatgacagacacagagctgctggacctgatccccttctttgagggcctgagcagagaagatgatgtgtacagcatgctgcaccggctgtgcaacagatag

SEQ ID NO: 23149 - DNA, 831 bp, Artificial Sequence
  derived and/or modified sequence
atggacggccccgccatcatcacccaggtgaccaaccccaaggaggacgagggacgcctccctggggctggtgaaaaggccagccagtgtaacgtgagtttgaaaaagcagagatccagatcaatcctgtccagcttcttttgttgtttcagggactataatgtggaggcgccacctccttcttcgccctcagtgctgcctcccctggtcgaggagaatgggggcctccagaagggagatcagaggcaagtgatcccaatcccaagtccccccgccaaatatctgctgccggaggttactgtactcgactatggcaaaaagtgcgtggtgatcgacttagacgaaactttagtgcacagctcctttaaaccaataagtaacgctgatttcatcgtgcccgtggaaatagatgggaccattcaccaggtctatgttctcaagcgaccacacgtggatgagttcctccagcgaatggggcagctattcgagtgtgtgctcttcaccgctagtttagcaaagtacgctgacccagtggccgaccttctcgatagatggggtgtgttcagagcgagactgtttcgggaaagctgtgtcttccatcgcggcaactatgtcaaagatctcagcaggctcgggagagaactttcgaaggtgataattgttgacaactccccagcctcttatatcttccatcccgaaaatgcagtgcctgtccaatcctggtttgatgatatgacagataccgagctgttggatttaatccctttcttcgaggggctgtcccgtgaggacgacgtgtacagcatgctccaccggctgtgtaaccgctag

SEQ ID NO: 23150 - DNA, 831 bp, Artificial Sequence
  derived and/or modified sequence
atggacggccctgcgattattactcaggtgactaaccccaaagaggatgagggcaggttgccgggtgcgggagagaaagcatcacagtgtaatgtgtcactcaaaaagcagagatcacgaagcatactctcaagcttcttctgttgctttagagactacaatgtcgaggctcctccaccctctagcccctcggtgctgccacccttggtcgaagaaaacggcggtctgcagaagggggatcagcggcaggtcatcccgatccccagccccccagcaaagtacctgcttcctgaggttaccgtgctggactatggtaagaaatgtgtagtgattgatctagatgaaactctggtgcacagctcctttaaacccatctcaaatgctgactttatcgtgccagtcgagatagacggcaccatccaccaggtgtacgttctgaaacgaccccatgttgacgaattcctgcagaggatgggacaactcttcgagtgtgtgctgttcactgccagtctggcaaagtacgctgatccagtagcagatctgctagatcgttggggagtcttcagggcacgtctcttccgcgagtcctgtgttttccaccgaggaaactacgtgaaggacctttcccgccttggcagagagctgtctaaggtcataattgttgataacagccccgctagctatatattccaccccgaaaatgccgtccctgtccagtcttggtttgacgacatgacagacacagaactgctcgatttgatcccatttttcgaggggctcagtcgcgaggacgacgtttactccatgctgcacaggctttgcaacaggtag

SEQ ID NO: 23151 - DNA, 4459 bp, Artificial Sequence
  derived and/or modified sequence
gcgggcggccgccgcgccgcgcacccatggacggcccggccatcatcacccaggtgaccaaccccaaggaggacgagggccggttgccgggcgcgggcgagaaagcctcccagtgcaacgtcagcttaaagaagcagaggagccgcagcatccttagctccttcttctgctgcttccgtgattacaatgtggaggcccctccacccagcagccccagtgtgcttccgccactggtggaggagaatggtgggcttcagaagggtgaccagaggcaggtcattcccataccaagtccaccagctaagtaccttcttccagaggtgacggtgcttgactatggaaagaaatgtgtggtcattgatttagatgaaacattggtgcacagttcgtttaagcctattagtaatgctgattttattgttccggttgaaatcgatggaactatacatcaggtgtatgtgctgaagcggccacatgtggacgagttcctccagaggatggggcagctttttgaatgtgtgctctttactgccagcttggccaagtatgcagaccctgtggctgacctcctagaccgctggggtgtgttccgggcccggctcttcagagaatcatgtgtttttcatcgtgggaactacgtgaaggacctgagtcgccttgggcgggagctgagcaaagtgatcattgttgacaattcccctgcctcatacatcttccatcctgagaatgcagtgcctgtgcagtcctggttcgatgacatgacggacacggagctgctggacctcatccccttctttgagggcctgagccgggaggacgacgtgtacagcatgctgcacagactctgcaataggtagccctggcctctgcctgcctcccgcctgtgcactctggaacctctggcctcaggggacctgcctgtcctcagctccctgggagctgaaagtgaggatactccgtgctccaggccacagggtgaatgtggccatgcctacctgttttgtttttttaagaacagaaacaactattttaaaagaactcttttaagaaatttcataaagggacatgcattttactgggtttgcttttcttaaaacataccaaaaaagaaaaaaatagaaaaaaaaaaaaaaaaagcttgatctctatcagacttcctttcaactgtcctcccctccaagcagaccacctgtccccttctatcccagctcagagcagctgacccaactcagaatctctttcctacaggatgaagtgccttttgaatgttattttaagccgagagttaatttttctacacaacatatttccagacatcttttagtcttttattgtcttagatactataagaagatgaacatgacaattttctagaacctggtagcgtgtgtgtgtgtggcggggggtgctgagggaggggagtgagtcacaggagcctgtcccccaacaggtgtgactgctctgacaacctgtggcatgctgcagggtcaggctcctgataggaggatttcatgactatgtcattgtctccactcatttttgacccagtttggaatgtatctgcaattgtgtggctcaacactttaggaaacaatagattattttatattattatttctgatggtgacaagtttgtcttgaggtcacattttctccttgaaaagtgacatcctgtcacttctgctctcacactactgccatacatttgtgttttttgttgttattgtttgggtagagcagttacaagaaaccctaaaacccttggatataaaagaaatctgtttattgatttttaaatctttcctttccaaaagctggatacacatggagctgtttgggaattttccttgctgctaccgcgctgccaccaaatggaattgaccagcggctgttacactgttctttgccactgtgcctatgctcagaatatgctcactgctaagctacaaactcggacagggtcagaaacagaggtgtcccatcccattgcagcctccaccacctgtaaccccttcctggcattggccactgaagggtacaaaggcaaaaggaccacagcaccacttaggtgtagcatggattttaaactgcagtcagtatcagatcctgtttgataaataagctgactgttctctcttgagaacctgtggcctcaaccagccaccaagctgatgtggcccaagtccatctcttggtcttctcctttgaagcacagcctatttctgagccaagggttggggaagcctgtctagatgtgggactcattgccccaaaccagggagaggaagagctcccacagggagagcccaggctctctttgcagcctttcccagtttggtgtttaagcagtgccatgttccttgtttgacaacaagacagtctgtaaagtattgctcttaaaaacaattaaaaagaaccctttcatattggcaccattgccttagtcctctgtgggttggtcttcagccagcattctggtgggagtgactggcattaacaagactggaaatcgggggtcaaagtaaaatatctttgttttgctttcattcacaaagtaatgaagccagctgccaattacatcctcccaacagcactttggtctgtggactgctgtgtgaatattcagaagggaagtaagtattcagggggtaaacaggtctcccagcattctgagtgttccaaaccagtaatccacatgccaattcaaatagaacagccccttgctagatattaccacagataatgacagttacatggtagaactgcccatgccacaaatatttatttggaaaagtagtcattaaatgaacccactgccttaaatgtcttgaatgttgcagtcaagtgtctgtcatgtgttgatatccacacagaattaggccctaatgagagccttagaccctcaaccatgcccccttcgttggcatcacagggccttatttggaagagcgggcaaagaggatggaaatcataaaatatttcatgggaatcgaacctagggatagtgctccacttctgacgatggagtgaagacacttggcagacttgagccagacacttcacctagtagttcctgaaactgtgagcaccactgcactaagccagtgcggagctgttagggacgggcccagctcctgcaccacggacacagaatgtctggagagggccagcaggccctctgagggttctggaatctgtgcaccttatttgaccacactccaaaattctgtttttattttaacccttgaatctgctttatgtacataatcaaaatatctatatctatatctatatctatatctatatatttttaatcatctacatgtaaatgaagcaatagaattctaacataaggccaagaaatgagacgaatgtttggggtttatgttttttaaggtaaatacgggtattgtttttaattattaccatgtattaaattgtgggctttgaaacctaatgaaacctgttagccacttctctgtgccatatacttcccatgttaccaaaatacccccaactctttagccaaaagagaaccctgacctcctgagtttccatgctcctttctgtaccaggtttaaatgtagtcttctggagaagtatttttgacattgagctctgggacaggacaccttgggtttgtggactgcagcccactatgatgttattacttctctggccaggcctccagtggaagtgcacaggcactcccaatgttgttaatgctctgtcttccatttgttctggaatcctacgtgttggtctgtggttccatgcattagctgtttgtaaataatgcatttgcatactgaaaaaggaatgccacctgccacagttgatggtgaggaagctcctttgacgtggtgcaattttgatgagatgtctctggggacacgaggatgccctaatgatgctgacttgtcatggttgcagcatttgaacttttggtgttaaaaaaaaaaacctgtaagtctgtaacctggcaacattttacaaccctgtatttttaaagatggctttctaataaaaaatccagaaccacacagccctatggtcaaacaatcctacgtttgtgcctctgcttttaaaggtgctgtgctggacagttggcatgccagggttcgagaagagtgaatggcttgacgtacttgcagttaactgtgcaaaattggctggctgcctctgttcctactgtactgtaactttgatcatgtctgttcctgttccattctcccaggagcttctctgcagactgacacaccctcccccaccccgggtagtggagatgctggtgtctgggtagtcatggatttctgctggacatttgaatgtgataaacaatccagcattacttaggaaatgctacatgcggaatgtgcacgtttccaggggcgagtattgtcaatcaaaaggtttgcaatgatttccttcctgccaaaaataaacatgtgaaactgca

SEQ ID NO: 23152 - DNA, 831 bp, Artificial Sequence
  derived and/or modified sequence
atggacggccccgccatcatcacccaggtgaccaaccccaaggaggacgagggcagactgcccggcgccggcgagaaggccagccagtgcaacgtgagcctgaagaagcagagaagcagaagcatcctgagcagcttcttctgctgcttcagagactacaacgtggaggcccccccccccagcagccccagcgtgctgccccccctggtggaggagaacggcggcctgcagaagggcgaccagagacaggtgatccccatccccagcccccccgccaagtacctgctgcccgaggtgaccgtgctggactacggcaagaagtgcgtggtgatcgacctggacgagaccctggtgcacagcagcttcaagcccatcagcaacgccgacttcatcgtgcccgtggagatcgacggcaccatccaccaggtgtacgtgctgaagagaccccacgtggacgagttcctgcagagaatgggccagctgttcgagtgcgtgctgttcaccgccagcctggccaagtacgccgaccccgtggccgacctgctggacagatggggcgtgttcagagccagactgttcagagagagctgcgtgttccacagaggcaactacgtgaaggacctgagcagactgggcagagagctgagcaaggtgatcatcgtggacaacagccccgccagctacatcttccaccccgagaacgccgtgcccgtgcagagctggttcgacgacatgaccgacaccgagctgctggacctgatccccttcttcgagggcctgagcagagaggacgacgtgtacagcatgctgcacagactgtgcaacagatag

SEQ ID NO: 23153 - protein, 143 aa, Artificial Sequence
  derived and/or modified sequence
MDSSQQKTFRGHDAPVLSLSFDPKDIFLASASCDGSVRVWQISDQTCAISWPLLQKCNDVINAKSICRLAWQPKSGKLLAIPVEKSVKLYRRESWSHQFDLSDNFISQTLNIVTWSPCGQYLAAGSINGLIIVWNVETKDCME

SEQ ID NO: 23154 - protein, 1006 aa, Artificial Sequence
  derived and/or modified sequence
MDSSQQKTFRGHDAPVLSLSFDPKDIFLASASCDGSVRVWQISDQTCAISWPLLQKCNDVINAKSICRLAWQPKSGKLLAIPVEKSVKLYRRESWSHQFDLSDNFISQTLNIVTWSPCGQYLAAGSINGLIIVWNVETKDCMERVKHEKGYAICGLAWHPTCGRISYTDAEGNLGLLENVCDPSGKTSSSKVSSRVEKDYNDLFDGDDMSNAGDFLNDNAVEIPSFSKGIINDDEDDEDLMMASGRPRQRSHILEDDENSVDISMLKTGSSLLKEEEEDGQEGSIHNLPLVTSQRPFYDGPMPTPRQKPFQSGSTPLHLTHRFMVWNSIGIIRCYNDEQDNAIDVEFHDTSIHHATHLSNTLNYTIADLSHEAILLACESTDELASKLHCLHFSSWDSSKEWIIDLPQNEDIEAICLGQGWAAAATSALLLRLFTIGGVQKEVFSLAGPVVSMAGHGEQLFIVYHRGTGFDGDQCLGVQLLELGKKKKQILHGDPLPLTRKSYLAWIGFSAEGTPCYVDSEGIVRMLNRGLGNTWTPICNTREHCKGKSDHYWVVGIHENPQQLRCIPCKGSRFPPTLPRPAVAILSFKLPYCQIATEKGQMEEQFWRSVIFHNHLDYLAKNGYEYEESTKNQATKEQQELLMKMLALSCKLEREFRCVELADLMTQNAVNLAIKYASRSRKLILAQKLSELAVEKAAELTATQVEEEEEEEDFRKKLNAGYSNTATEWSQPRFRNQVEEDAEDSGEADDEEKPEIHKPGQNSFSKSTNSSDVSAKSGAVTFSSQGRVNPFKVSASSKEPAMSMNSARSTNILDNMGKSSKKSTALSRTTNNEKSPIIKPLIPKPKPKQASAASYFQKRNSQTNKTEEVKEENLKNVLSETPAICPPQNTENQRPKTGFQMWLEENRSNILSDNPDFSDEADIIKEGMIRFRVLSTEERKVWANKAKGETASEGTEAKKRKRVVDESDETENQEEKAKENLNLSKKQKPLDFSTNQKLSAFAFKQE

SEQ ID NO: 23155 - DNA, 432 bp, Artificial Sequence
  derived and/or modified sequence
atggacagcagccagcagaagaccttcagaggccacgacgcccccgtgctgagcctgagcttcgaccccaaggacatcttcctggccagcgccagctgcgacggcagcgtgagagtgtggcagatcagcgaccagacctgcgccatcagctggcccctgctgcagaagtgcaacgacgtgatcaacgccaagagcatctgcagactggcctggcagcccaagagcggcaagctgctggccatccccgtggagaagagcgtgaagctgtacagaagagagagctggagccaccagttcgacctgagcgacaacttcatcagccagaccctgaacatcgtgacctggagcccctgcggccagtacctggccgccggcagcatcaacggcctgatcatcgtgtggaacgtggagaccaaggactgcatggagtag

SEQ ID NO: 23156 - DNA, 3021 bp, Artificial Sequence
  derived and/or modified sequence
atggacagcagccagcagaagaccttcagaggccacgacgcccccgtgctgagcctgagcttcgaccccaaggacatcttcctggccagcgccagctgcgacggcagcgtgagagtgtggcagatcagcgaccagacctgcgccatcagctggcccctgctgcagaagtgcaacgacgtgatcaacgccaagagcatctgcagactggcctggcagcccaagagcggcaagctgctggccatccccgtggagaagagcgtgaagctgtacagaagagagagctggagccaccagttcgacctgagcgacaacttcatcagccagaccctgaacatcgtgacctggagcccctgcggccagtacctggccgccggcagcatcaacggcctgatcatcgtgtggaacgtggagaccaaggactgcatggagagagtgaagcacgagaagggctacgccatctgcggcctggcctggcaccccacctgcggcagaatcagctacaccgacgccgagggcaacctgggcctgctggagaacgtgtgcgaccccagcggcaagaccagcagcagcaaggtgagcagcagagtggagaaggactacaacgacctgttcgacggcgacgacatgagcaacgccggcgacttcctgaacgacaacgccgtggagatccccagcttcagcaagggcatcatcaacgacgacgaggacgacgaggacctgatgatggccagcggcagacccagacagagaagccacatcctggaggacgacgagaacagcgtggacatcagcatgctgaagaccggcagcagcctgctgaaggaggaggaggaggacggccaggagggcagcatccacaacctgcccctggtgaccagccagagacccttctacgacggccccatgcccacccccagacagaagcccttccagagcggcagcacccccctgcacctgacccacagattcatggtgtggaacagcatcggcatcatcagatgctacaacgacgagcaggacaacgccatcgacgtggagttccacgacaccagcatccaccacgccacccacctgagcaacaccctgaactacaccatcgccgacctgagccacgaggccatcctgctggcctgcgagagcaccgacgagctggccagcaagctgcactgcctgcacttcagcagctgggacagcagcaaggagtggatcatcgacctgccccagaacgaggacatcgaggccatctgcctgggccagggctgggccgccgccgccaccagcgccctgctgctgagactgttcaccatcggcggcgtgcagaaggaggtgttcagcctggccggccccgtggtgagcatggccggccacggcgagcagctgttcatcgtgtaccacagaggcaccggcttcgacggcgaccagtgcctgggcgtgcagctgctggagctgggcaagaagaagaagcagatcctgcacggcgaccccctgcccctgaccagaaagagctacctggcctggatcggcttcagcgccgagggcaccccctgctacgtggacagcgagggcatcgtgagaatgctgaacagaggcctgggcaacacctggacccccatctgcaacaccagagagcactgcaagggcaagagcgaccactactgggtggtgggcatccacgagaacccccagcagctgagatgcatcccctgcaagggcagcagattcccccccaccctgcccagacccgccgtggccatcctgagcttcaagctgccctactgccagatcgccaccgagaagggccagatggaggagcagttctggagaagcgtgatcttccacaaccacctggactacctggccaagaacggctacgagtacgaggagagcaccaagaaccaggccaccaaggagcagcaggagctgctgatgaagatgctggccctgagctgcaagctggagagagagttcagatgcgtggagctggccgacctgatgacccagaacgccgtgaacctggccatcaagtacgccagcagaagcagaaagctgatcctggcccagaagctgagcgagctggccgtggagaaggccgccgagctgaccgccacccaggtggaggaggaggaggaggaggaggacttcagaaagaagctgaacgccggctacagcaacaccgccaccgagtggagccagcccagattcagaaaccaggtggaggaggacgccgaggacagcggcgaggccgacgacgaggagaagcccgagatccacaagcccggccagaacagcttcagcaagagcaccaacagcagcgacgtgagcgccaagagcggcgccgtgaccttcagcagccagggcagagtgaaccccttcaaggtgagcgccagcagcaaggagcccgccatgagcatgaacagcgccagaagcaccaacatcctggacaacatgggcaagagcagcaagaagagcaccgccctgagcagaaccaccaacaacgagaagagccccatcatcaagcccctgatccccaagcccaagcccaagcaggccagcgccgccagctacttccagaagagaaacagccagaccaacaagaccgaggaggtgaaggaggagaacctgaagaacgtgctgagcgagacccccgccatctgccccccccagaacaccgagaaccagagacccaagaccggcttccagatgtggctggaggagaacagaagcaacatcctgagcgacaaccccgacttcagcgacgaggccgacatcatcaaggagggcatgatcagattcagagtgctgagcaccgaggagagaaaggtgtgggccaacaaggccaagggcgagaccgccagcgagggcaccgaggccaagaagagaaagagagtggtggacgagagcgacgagaccgagaaccaggaggagaaggccaaggagaacctgaacctgagcaagaagcagaagcccctggacttcagcaccaaccagaagctgagcgccttcgccttcaagcaggagtag

SEQ ID NO: 23157 - DNA, 432 bp, Artificial Sequence
  derived and/or modified sequence
atggacagctctcagcaaaagacattccgaggacacgatgccccagtactgtctcttagctttgacccaaaagatatttttcttgcttccgcgtcctgtgacgggagtgttagagtctggcaaatttcggatcagacatgtgctatttcatggcctctgctgcagaagtgtaatgatgtcattaacgccaagagtatctgtaggcttgcttggcagccgaaatctggcaaactcctggccatcccggtggaaaagtccgtaaagctgtacaggagagaaagctggagtcatcagtttgatctctcggataacttcatttcacagacccttaacattgtgacctggtctccttgcggtcagtacctggcagccggatcaatcaacgggcttatcatcgtctggaacgtggaaaccaaggactgtatggagtag

SEQ ID NO: 23158 - DNA, 3021 bp, Artificial Sequence
  derived and/or modified sequence
atggatagtagtcagcagaaaactttcagaggacacgacgccccagtccttagcctcagcttcgatcccaaggatatctttctggcctctgcttcatgcgatggatccgtgagggtttggcagatcagtgatcagacatgtgccatcagctggccactcctgcaaaaatgcaatgacgtgataaacgcgaaaagcatttgccgtctggcgtggcagcctaaatcgggcaaactgttagccatccccgttgagaaaagtgttaaactttaccgccgggagtcttggtctcaccagtttgacttgtcggacaatttcataagccagaccctaaatattgttacgtggtcaccttgtggtcagtacctggccgccggctccatcaatggactgataattgtatggaatgtggagacaaaagattgcatggagcgcgtcaagcatgagaaagggtacgccatctgtggactggcgtggcaccccacctgtgggcgcataagctacaccgatgctgagggaaatctggggctgcttgaaaacgtctgcgatccctccggaaagaccagctcttctaaagtgtcatcacgcgtagagaaggactacaacgatctgtttgatggcgatgacatgtctaacgccggggactttttgaatgacaatgcggtcgagatccctagtttcagtaaggggataatcaatgatgacgaggatgacgaggaccttatgatggcgtcagggcggccgcgtcagaggtcccatattctggaagacgacgagaactcggtggatatctcaatgctgaagaccggatcttcgctgctgaaggaagaagaggaggatggccaggaaggctctatacacaatctcccccttgtcacttcgcagagacccttttacgatggacccatgccaacgccgagacagaaacctttccagtctggttctacccccctccacctgactcatcggtttatggtgtggaactcaattggaatcattaggtgctacaacgatgagcaagataatgctatcgacgtcgagttccatgacactagcatccaccacgcaacgcatctctcgaataccttgaattacactattgccgacctgtcacatgaggctatattgctcgcatgcgaaagtaccgatgagctggcttctaagctgcactgcctgcacttttcgagttgggacagtagcaaagagtggatcatcgatcttccccagaacgaagacatcgaggcaatctgcctcggacaaggctgggccgcagccgcaacaagtgcccttctgctccggttgtttaccattggcggcgtgcaaaaagaagttttcagcctggccgggcccgttgtgtccatggcaggacacggcgaacagctgttcatcgtctatcacaggggaacaggattcgacggagaccagtgcttgggggtccagctgttggaacttggaaagaaaaagaaacaaattttacatggcgatccactgcccctgaccagaaagtcgtacttggcttggattggcttcagcgccgagggcactccctgctacgtggatagtgagggtattgtgcggatgttaaatagagggctggggaatacttggactccgatctgcaatacaagagaacactgtaagggtaagtcagatcattattgggtggtagggattcacgaaaacccccagcaactccgctgtatcccatgcaaggggtcccggttcccccccacccttccgagaccagccgtcgctattctaagcttcaagttgccgtactgtcagatcgccacagaaaagggtcagatggaagagcagttctggcgatctgtgattttccacaaccacctcgactacctggcaaaaaacggatacgagtacgaagaaagcaccaagaaccaagccacaaaagagcagcaagagctgctgatgaaaatgctggcccttagttgcaaactggagcgggagtttagatgcgtcgaactggctgatctcatgacacaaaacgccgtgaatctcgctatcaagtacgctagtcgctccaggaaattgatcctggcccagaagctgagcgagctcgcagtggaaaaagcagctgagctgaccgcaactcaagtggaggaggaggaagaggaagaagattttcgaaagaagttaaacgccggctactctaacaccgctacggagtggagtcaaccccggtttcgtaaccaggtagaagaggacgctgaagattccggcgaagcggatgatgaggagaagccagaaatccacaagcctgggcaaaacagcttcagtaaatccactaattccagcgatgtgtccgccaaatcaggcgccgtgacattttcaagccagggtagggtaaatcccttcaaggtctccgccagctccaaagagccagccatgagcatgaactccgcgaggtcaacaaatatcctggacaacatggggaagagttcgaagaaatcgaccgccttatcaaggactacgaacaatgagaaaagtccaatcattaaaccactgataccaaaacccaaaccaaagcaggcatccgcagccagctactttcagaagcgtaactcccagaccaacaaaacagaagaagtgaaagaggaaaacctcaagaacgttttatctgaaacaccggcaatttgcccgcctcaaaacaccgaaaatcagcggcccaagacagggtttcagatgtggctggaagagaaccggagcaacatcttgtccgacaatccagatttcagtgacgaggcggacattattaaggagggcatgatcaggtttagggtactgagtacagaggagcgaaaagtctgggccaacaaagctaagggcgaaactgcgtccgaggggacagaggcaaagaaaagaaaacgggtggtggacgagagcgacgaaactgaaaatcaagaggaaaaggcgaaggaaaatttaaatctgtctaagaaacagaaaccactggatttttctacaaaccagaaattgtcagcattcgcctttaaacaggagtag

SEQ ID NO: 23159 - DNA, 432 bp, Artificial Sequence
  derived and/or modified sequence
atggacagcagccagcagaagaccttccggggccatgatgcccctgtgctgagcctgagctttgaccccaaggacatcttcctggccagcgccagctgtgatggctctgtgcgggtgtggcagatcagtgaccagacctgtgccatctcctggcccctgctgcagaagtgcaatgatgtgatcaatgccaagagcatctgccgcctggcctggcagcccaagagcggcaagctgctggccatccctgtggagaagtctgtgaagctgtacagaagagagagctggagccaccagtttgacctgagtgacaacttcatcagccagaccctgaacatcgtgacctggagcccctgtggccagtacctggccgccggcagcatcaatggcctcatcatcgtgtggaatgtggagaccaaggactgcatggagtag

SEQ ID NO: 23160 - DNA, 3021 bp, Artificial Sequence
  derived and/or modified sequence
atggacagcagccagcagaagaccttccggggccatgatgcccctgtgctgagcctgagctttgaccccaaggacatcttcctggccagcgccagctgtgatggctctgtgcgggtgtggcagatcagtgaccagacctgtgccatctcctggcccctgctgcagaagtgcaatgatgtgatcaatgccaagagcatctgccgcctggcctggcagcccaagagcggcaagctgctggccatccctgtggagaagtctgtgaagctgtacagaagagagagctggagccaccagtttgacctgagtgacaacttcatcagccagaccctgaacatcgtgacctggagcccctgtggccagtacctggccgccggcagcatcaatggcctcatcatcgtgtggaatgtggagaccaaggactgcatggagcgggtgaagcatgagaagggctacgccatctgtggcctggcctggcaccccacctgtggccgcatctcctacacagatgctgagggcaacctgggcctgctggagaatgtgtgtgaccccagcggcaagaccagcagcagcaaggtgagcagccgggtggagaaggactacaatgacctgtttgatggagatgacatgagcaatgctggggacttcctgaatgacaatgctgtggagatccccagcttcagcaagggcatcatcaatgatgatgaagatgatgaggacctgatgatggccagcggccggccccggcagaggagccacatcctggaggatgatgagaacagcgtggacatctccatgctgaagacaggcagcagcctgctgaaggaggaggaggaggatggccaggagggcagcatccacaacctgcccctggtgaccagccagaggcccttctatgatggccccatgcccaccccccggcagaagcccttccagagcggcagcacccccctgcacctgacccaccgcttcatggtgtggaacagcatcggcatcatccgctgctacaatgatgagcaggacaatgccattgatgtggagttccatgacaccagcatccaccacgccacccacctgagcaacaccctgaactacaccatcgctgacctgagccatgaggccatcctgctggcctgtgagagcacagatgagctggccagcaagctgcactgcctgcacttcagctcctgggacagcagcaaggagtggatcatcgacctgccccagaatgaagacatcgaggccatctgcctgggccagggctgggccgccgccgccaccagcgccctgctgctgcggctcttcaccatcggcggcgtgcagaaggaggtgttcagcctggccggccctgtggtgtccatggccggccacggggagcagctgttcatcgtgtaccaccggggcaccggctttgatggagaccagtgcctgggcgtgcagctgctggagctgggcaagaagaagaagcagatcctgcacggggaccccctgcccctgaccaggaagagctacctggcctggattggcttctctgctgagggcaccccctgctacgtggacagcgagggcatcgtgaggatgctgaacagaggcctgggcaacacctggacccccatctgcaacacccgggagcactgcaagggcaagagtgaccactactgggtggtgggcatccacgagaacccccagcagctgcgctgcatcccctgcaagggcagccgcttcccccccaccctgcccaggcctgctgtggccatcctgtccttcaagctgccctactgccagatcgccacagagaagggccagatggaggagcagttctggaggagcgtcatcttccacaaccacctggactacctggccaagaatggctatgaatatgaggagagcaccaagaaccaggccaccaaggagcagcaggagctgctgatgaagatgctggccctgagctgcaagctggagcgggagttccgctgtgtggagctggccgacctgatgacccagaatgctgtgaacctggccatcaagtatgccagccgcagcaggaagctgatcctggcccagaagctgtctgagctggccgtggagaaggctgctgagctgacagccacccaggtggaggaggaggaggaggaggaggacttcaggaagaagctgaatgccggctacagcaacacagccacagagtggagccagccccgcttcaggaaccaggtggaggaggatgctgaagattctggagaggctgatgatgaggagaagccagagatccacaagccaggccagaacagcttcagcaagagcaccaacagcagtgatgtgtctgccaagtctggagctgtgaccttcagcagccagggccgggtgaaccccttcaaggtgtctgccagcagcaaggagcccgccatgtccatgaacagcgcccggagcaccaacatcctggacaacatgggcaagagcagcaagaagagcacagccctgagcaggaccaccaacaatgagaagagccccatcatcaagcccctcatccccaagcccaagcccaagcaggccagcgctgccagctacttccagaagaggaacagccagaccaacaagacagaggaggtgaaggaggagaacctgaagaatgtgctgtctgagaccccagccatctgccccccccagaacacagagaaccagaggcccaagacaggcttccagatgtggctggaggagaacagaagcaacatcctgagtgacaacccagacttcagtgatgaagctgacatcatcaaggagggcatgatccgcttccgggtgctgagcacagaggagaggaaggtgtgggccaacaaggccaagggggagacagccagcgagggcacagaggccaagaagaggaagagggtggtggatgaaagtgatgaaacagagaaccaggaggagaaggccaaggagaacctgaacctgagcaagaagcagaagcccctggacttcagcaccaaccagaagctgagcgcctttgccttcaagcaggagtag

SEQ ID NO: 23161 - DNA, 432 bp, Artificial Sequence
  derived and/or modified sequence
atggacagcagccagcagaagaccttccggggccacgacgcccccgtgttgagcttatcctttgatcccaaggatatcttcttagcgagcgccagttgcgatgggtctgtgcgcgtttggcagatatccgaccagacatgtgcgatcagctggcccctgttgcaaaagtgcaatgatgttattaacgcaaagtctatctgccgcctcgcctggcagccaaagtccggtaagttgctagccatacctgtcgagaagtctgtcaagctgtaccgccgcgagagttggtctcaccagttcgatctgtctgacaacttcattagccaaacgctgaacatagtgacatggagtccatgtggacagtacctggcagctggctctattaatgggctgattatcgtgtggaacgtcgagactaaagattgcatggagtag

SEQ ID NO: 23162 - DNA, 3021 bp, Artificial Sequence
  derived and/or modified sequence
atggacagcagccagcagaagaccttccggggccacgacgcccccgtactctcacttagctttgatcctaaggatatctttctcgcctctgcctcttgtgatgggagtgtacgcgtgtggcagattagcgaccagacctgcgccatctcctggcctttacttcagaaatgcaacgatgtgattaatgcgaaaagcatatgtcgactggcatggcagcctaagagcggtaagctgctggcaattcctgttgaaaaaagcgtgaagttgtacaggagagagtcttggtcccaccagtttgatctttccgacaattttatttcccagacccttaatatcgtcacttggagcccttgcgggcagtatctggccgcaggcagcatcaatggtctgatcatagtgtggaacgtcgagaccaaggactgtatggaacgagtgaaacatgagaagggatacgctatttgtggcctggcatggcatccgacctgcggtcgcatcagctacacggacgccgaggggaaccttggtctgctggaaaacgtctgtgatcctagcggtaaaacaagttcttccaaggtatctagcagagtggagaaagattacaacgacttattcgatggggatgacatgagcaatgccggagactttctgaatgacaatgctgtggagatcccatcattctctaagggcatcataaacgacgatgaagatgacgaggatctgatgatggcaagcgggaggcctcgccaaaggtcccacattctggaggacgacgaaaattcagtggatattagcatgctgaaaacagggtcctcacttttgaaggaggaggaagaagacggacaagaaggatcaatccataatctcccattggtgactagtcagcgacccttctatgacggcccaatgccaaccccaaggcagaaaccattccagagtggctctacccccctccatttgactcatcggtttatggtttggaatagcatcggcatcatccgttgttacaacgatgagcaggacaatgccatagacgtggagtttcacgacacaagcattcaccatgctacccacctgagcaatactctcaattacacaatcgctgacctcagccatgaagccattctgcttgcctgtgagagcacggacgagctcgcctcaaagttacattgcctgcattttagctcctgggacagctcaaaagagtggatcattgacctgccgcagaacgaggacattgaggccatatgcctgggacagggatgggccgccgcagccacaagtgccctgctactgcgcctattcacaattggtggggtgcaaaaggaggtcttttccctcgccggacccgtggtgagtatggctggccacggagagcagcttttcatagtatatcatcgagggactggattcgacggcgatcagtgcctgggtgtccagctgctggagctgggtaagaaaaagaagcagatccttcacggcgaccctttgcccctgaccagaaaaagctacctggcttggatcggcttttcagctgagggcactccttgctacgtggattcagagggcatcgttagaatgctgaaccgggggctaggaaatacgtggacgccgatttgtaacacgagggaacattgcaagggcaaatcagaccattattgggtcgtcgggattcatgagaacccccagcagctgagatgcatcccatgcaagggcagtcgcttcccccctaccctgccacgccctgcagtcgctatcctaagtttcaaactgccctactgccagatcgcaacagagaaaggacaaatggaggagcaattctggaggagcgttatctttcacaaccatttggattatttagccaaaaacgggtacgagtatgaggagtccactaaaaatcaggccactaaagagcagcaggagttacttatgaaaatgctggccctaagttgcaaactggaaagggaattccgttgcgtggagctcgctgatttgatgacccagaatgccgtcaatctcgcaatcaaatacgcttctcggtcccgaaagctgatcctggcccaaaagctgtcggaactggccgtggaaaaggcagctgagttgactgctactcaagtggaagaggaagaggaggaagaggatttccgcaagaaactgaatgctggatactccaacacagctaccgaatggtctcaacctaggtttcgaaatcaggtcgaagaagacgcagaagattcgggagaagctgatgatgaggaaaaaccggagattcacaaaccaggacagaattccttttctaagtcaaccaactcctcagatgtttccgcaaagtcaggggctgtgaccttttcaagccagggccgggtgaatccctttaaagtgtctgcttcaagcaaagagcctgcgatgagtatgaattcagcgcggtccacgaatatcctagacaatatgggaaagtcatcaaagaagagcactgcccttagccgcaccacaaataatgagaaatcacccatcattaagcccctgatacctaagcctaaacctaagcaagcctcagcagcaagctacttccagaagaggaattcccagacaaacaagaccgaagaagtgaaggaggagaacctgaagaacgtactgagcgagaccccagccatatgtcctccccaaaacactgaaaaccaacgtcccaagacaggatttcagatgtggcttgaagaaaacagatctaacattttgtccgataatcccgatttcagcgacgaggcagacataattaaggaggggatgattcggttcagggtgctttccacagaagagagaaaagtctgggcaaacaaggcaaagggggagacggcctccgagggaacggaagccaagaagcgcaaacgcgtggtcgacgaatccgatgagaccgagaaccaggaagaaaaagccaaagagaaccttaatctgtctaagaagcagaagcccttggatttcagtactaatcaaaagttatcggcatttgcattcaagcaggaatag

SEQ ID NO: 23163 - DNA, 432 bp, Artificial Sequence
  derived and/or modified sequence
atggactcaagccagcagaaaacctttcgcggacatgatgcccctgtgctgtccttgtcctttgatccaaaagatatcttccttgcatcagccagctgcgacggcagcgtgagagtttggcaaattagcgaccaaacttgtgctattagctggcctctcctgcagaaatgcaacgacgtgatcaacgcaaaaagtatctgccggctggcgtggcagccaaagtcaggaaaactgctggcaatcccagtcgagaaatccgtcaagttgtaccggagagagtcatggtcccaccagttcgatctgtctgataacttcatcagccaaactttaaatatcgttacatggtccccctgcggccagtatctcgctgctggttctataaatggcctgattattgtatggaacgttgagacaaaagattgtatggaatag

SEQ ID NO: 23164 - DNA, 3021 bp, Artificial Sequence
  derived and/or modified sequence
atggattccagccaacaaaagaccttccgcggacatgacgctcccgtgctgagtctcagctttgatcctaaggacatcttcttggcttctgcaagttgtgacggcagcgttcgggtgtggcagatctccgatcagacctgcgcaatatcctggcctttattacagaagtgtaacgacgtgataaacgcaaaatcgatctgccgcctggcatggcagcctaaatctggaaaactgctcgccattcccgtggagaagtctgtcaagctgtataggagggagtcttggagccaccagtttgatctgagtgacaatttcatcagccagaccctcaatatcgtcacatggtccccctgtgggcaatacctagccgcaggatccatcaatggcctgattattgtgtggaatgtggagaccaaggattgtatggagagggtcaagcacgagaagggctacgcaatctgtggactggcatggcatcccacatgcggaagaatctcatatactgatgcagagggaaatttgggcttactcgaaaacgtctgtgatccatcaggcaagacatcctcatctaaggtgtcaagtagggtagagaaggactacaacgacctgtttgacggtgacgatatgtctaatgctggcgacttcttgaacgataatgcagttgagatcccaagctttagtaaggggattattaatgacgatgaggatgatgaagatttgatgatggcctcgggcagacccaggcagaggtcacacatcctggaagacgacgagaacagtgtggatatctccatgctgaagacaggatcatcgctgttaaaggaagaagaagaagacggccaggagggctcgattcacaacctgccgctggtgacctctcagaggcccttttatgatgggcctatgcccacacctcgccagaagccattccaatctggcagtactccgcttcacctgactcatcgtttcatggtgtggaattcaattgggattatccggtgctacaatgacgaacaagataatgcaattgacgtagaatttcatgatacatctatccatcatgcaactcatctgagcaataccttaaactatactatcgccgacttatcacacgaagcaatcctgcttgcctgcgagtctactgatgaactggcttcaaagttgcattgtctccacttctcctcttgggatagttccaaagaatggatcatcgacttgccacagaatgaggacatcgaggcaatctgcctcggacaagggtgggcagccgctgcaacctcagcccttctcttacggctgttcaccattgggggagtgcagaaagaagtgttttctctggcaggaccggtcgtgtctatggcaggacacggggaacaactttttattgtgtatcaccgcggaactggatttgatggcgaccagtgtcttggggtgcaacttctggaactgggaaagaagaaaaaacaaatactgcatggagaccccctgccccttactcgaaaaagctaccttgcatggattggattcagtgccgaaggtaccccctgttatgtcgattcggagggaatcgtgaggatgctgaatagagggctgggcaatacctggacaccaatttgcaatacacgcgagcactgcaaaggcaagtccgaccattactgggtcgtcggcatccatgagaacccgcaacagcttagatgcataccatgcaagggcagcaggttccccccaactctgccgaggccagccgtggccatcctgtctttcaaattgccatactgtcaaatcgcaacggaaaaagggcagatggaggaacagttctggagaagcgtcatttttcacaatcatttagactatttagccaaaaacggttacgagtacgaggagtctaccaaaaatcaggcgacaaaggagcaacaggaactgctgatgaagatgcttgctcttagttgtaagttagagagggagttccgatgcgtggagttggcagatctcatgacccagaatgccgttaatctggcaattaagtatgcctccagatctaggaaactgatcctggcccagaagttgtcagagttggcagtggagaaggccgcagagctaactgccacacaggtggaagaagaagaggaggaggaggattttagaaagaaattaaacgccggatattctaatacagccaccgaatggagccagcccaggttcaggaaccaggtcgaagaggatgcagaggacagcggagaagccgatgatgaggagaagcctgagatccataagcctggccaaaactcatttagcaagagcacaaattccagcgatgtgtccgcaaagtccggagctgtgacattctcctcccaaggtagggtgaatcccttcaaagtctcagcttcttcgaaagagcccgctatgtctatgaattccgccaggtccacgaatatcctggacaacatgggcaagagcagcaaaaaatccaccgccctctcaagaacaacaaacaacgaaaagtcccccataataaagcccctaatccctaagcctaagcccaaacaggccagtgcagccagttacttccagaagcgaaactctcagaccaataagacagaagaggtgaaagaagaaaacctcaagaacgttctttctgagactccagccatttgtccaccccaaaataccgagaaccagcgcccaaagaccggatttcagatgtggctggaagagaaccgttcaaacattctttcggataatcccgatttttccgatgaggcagacatcatcaaagagggaatgatcaggttcagggtcctttccaccgaggaacgcaaagtttgggccaacaaagccaaaggtgaaacagcaagcgagggcaccgaggccaaaaaacgcaagagggtcgtcgacgaatctgacgagaccgaaaaccaggaagagaaggctaaggaaaacctaaatctgagcaagaagcagaagccattagacttcagcacaaaccaaaagctgagtgcgttcgcctttaaacaagagtag

SEQ ID NO: 23165 - protein, 348 aa, Artificial Sequence
  derived and/or modified sequence
MTLQWAAVATFLYAEIGLILIFCLPFIPPQRWQKIFSFNVWGKIATFWNKAFLTIIILLIVLFLDAVREVRKYSSVHTIEKSSTSRPDAYEHTQMKLFRSQRNLYISGFSLFFWLVLRRLVTLITQLAKELSNKGVLKTQAENTNKAAKKFMEENEKLKRILKSHGKDEECVLEAENKKLVEDQEKLKTELRKTSDALSKAQNDVMEMKMQSERLSKEYDQLLKEHSELQHSSFGEFLSKRSHKNGSIGKQTGSRKGSFRKRQQEKTVNFIKDTCNILCQNDNFVMLASRKFKFRKMHYDRFVIFLMPHIGCIVMALSKYLMMFQIYCKVCIPALKKNISMLNTIFTY

SEQ ID NO: 23166 - DNA, 1047 bp, Artificial Sequence
  derived and/or modified sequence
atgaccctgcagtgggccgccgtggccaccttcctgtacgccgagatcggcctgatcctgatcttctgcctgcccttcatccccccccagagatggcagaagatcttcagcttcaacgtgtggggcaagatcgccaccttctggaacaaggccttcctgaccatcatcatcctgctgatcgtgctgttcctggacgccgtgagagaggtgagaaagtacagcagcgtgcacaccatcgagaagagcagcaccagcagacccgacgcctacgagcacacccagatgaagctgttcagaagccagagaaacctgtacatcagcggcttcagcctgttcttctggctggtgctgagaagactggtgaccctgatcacccagctggccaaggagctgagcaacaagggcgtgctgaagacccaggccgagaacaccaacaaggccgccaagaagttcatggaggagaacgagaagctgaagagaatcctgaagagccacggcaaggacgaggagtgcgtgctggaggccgagaacaagaagctggtggaggaccaggagaagctgaagaccgagctgagaaagaccagcgacgccctgagcaaggcccagaacgacgtgatggagatgaagatgcagagcgagagactgagcaaggagtacgaccagctgctgaaggagcacagcgagctgcagcacagcagcttcggcgagttcctgagcaagagaagccacaagaacggcagcatcggcaagcagaccggcagcagaaagggcagcttcagaaagagacagcaggagaagaccgtgaacttcatcaaggacacctgcaacatcctgtgccagaacgacaacttcgtgatgctggccagcagaaagttcaagttcagaaagatgcactacgacagattcgtgatcttcctgatgccccacatcggctgcatcgtgatggccctgagcaagtacctgatgatgttccagatctactgcaaggtgtgcatccccgccctgaagaagaacatcagcatgctgaacaccatcttcacctactag

SEQ ID NO: 23167 - DNA, 1047 bp, Artificial Sequence
  derived and/or modified sequence
atgacgcttcagtgggccgctgtggctactttcctctatgcagagatcggactgatcttgatcttttgtctgccgtttatcccaccacaacgctggcagaaaattttctcctttaatgtctgggggaagattgctacattctggaataaggcttttctgactatcatcatccttttgattgtcctctttctggacgcagtgcgcgaggtgaggaaatattcttccgtgcatactattgagaagagcagcacctctcgccctgacgcatacgagcacacacaaatgaaattgttccgttcacaacggaatctttacatatcagggttcagcctgtttttctggctggtcttgagaaggctcgtgacactgattacacaacttgccaaggagctgtcaaataaaggggttctcaaaacgcaggccgaaaacactaacaaagctgctaagaagtttatggaagaaaacgagaaactgaaaaggatccttaagtctcacgggaaagatgaagaatgtgtcttagaggcagagaacaaaaagctcgtggaagatcaggagaaactcaagaccgaactgagaaagacaagcgacgccctgtccaaagcccaaaacgacgtcatggagatgaaaatgcagtcggaacggctctctaaagaatatgaccagcttctgaaggagcattccgagctacagcatagctcctttggtgaatttttgtctaagcgatcccacaagaacgggtccattggtaaacagaccggtagtcggaaggggagcttccgcaagcgacagcaggagaaaactgtaaatttcatcaaagacacatgcaacatcctctgccaaaacgataatttcgtaatgctggcctcaaggaaatttaagtttagaaagatgcattacgaccggtttgttatttttctgatgcctcatatcggatgtatcgtcatggcactatccaagtatctaatgatgttccagatctactgtaaagtttgtatccccgctctgaaaaaaaatatcagcatgttaaacacaatctttacttattag

SEQ ID NO: 23168 - DNA, 1047 bp, Artificial Sequence
  derived and/or modified sequence
atgacgctccagtgggctgcagtagccacattcttgtatgccgaaattggcttgatcctgattttttgtctcccatttataccgcctcaaagatggcagaagatctttagcttcaacgtatgggggaaaatagcaaccttttggaataaagcgtttctgaccataatcatactccttatcgtgctgtttttagatgccgtgcgcgaagtgaggaaatattcgtctgtgcacaccatcgagaagagctccaccagtaggccggatgcctacgagcacacacagatgaaactgttcaggtctcagcgaaatctgtatatctcgggcttttccctgtttttctggctcgttctgcggcgcttagttacacttatcacgcagctggctaaagaactgagtaataaaggggtgttgaagacccaggccgagaatactaacaaagctgctaaaaagtttatggaagaaaatgagaaacttaaaaggattcttaagtcacacggcaaagatgaagagtgtgtactagaggccgaaaataaaaagcttgtggaggatcaggagaagttgaagaccgagctcagaaaaactagtgacgccctgtcgaaggctcagaacgatgtgatggagatgaaaatgcaaagtgagaggttgtccaaggaatatgaccaattattgaaagagcatagcgagctgcagcattcatcattcggcgaatttctgtctaaacggtctcataagaatggaagtatcggcaaacagactggttcaagaaaggggtcatttagaaaacggcaacaggaaaaaacagttaacttcataaaggatacctgcaatattctgtgtcaaaacgacaattttgtcatgctcgctagtcgaaaatttaagttccgcaagatgcactacgaccggttcgtgatttttctgatgccacacattgggtgcattgtaatggccttatcaaagtacctgatgatgttccagatatattgcaaagtttgtattcctgcactaaaaaagaatatttcgatgctgaacaccattttcacatattag

SEQ ID NO: 23169 - DNA, 1047 bp, Artificial Sequence
  derived and/or modified sequence
atgaccctgcagtgggccgctgtggccaccttcctgtatgcagagatcggcctcatcctgatcttctgcctgcccttcatccccccccagcgctggcagaagatcttctccttcaacgtgtggggcaagatcgccaccttctggaacaaggccttcctgaccatcatcatcctgctgattgtgctcttcctggatgctgtgcgggaggtgaggaagtacagctctgtgcacaccatcgagaagagcagcaccagcaggccagatgcctatgagcacacccagatgaagctgttccgcagccagaggaacctgtacatcagcggcttcagcctcttcttctggctggtgctgcggcggctggtgaccctcatcacccagctggccaaggagctgagcaacaagggcgtgctgaagacccaggccgagaacaccaacaaggccgccaagaagttcatggaggagaatgagaagctgaagaggatcctgaagagccacggcaaggatgaggagtgtgtgctggaggccgagaacaagaagctggtggaggaccaggagaagctgaagacagagctgaggaagaccagtgatgccctgagcaaggcccagaatgatgtgatggagatgaagatgcagagcgagcggctgagcaaggagtatgaccagctgctgaaggagcacagcgagctgcagcacagcagctttggagagttcctgagcaagaggagccacaagaatggcagcatcggcaagcagacaggcagcaggaagggcagcttcaggaagaggcagcaggagaagacagtgaacttcatcaaggacacctgcaacatcctgtgccagaatgacaactttgtgatgctggccagcaggaagttcaagttcaggaagatgcactatgaccgcttcgtcatcttcctgatgccccacatcggctgcatcgtgatggccctgagcaagtacctgatgatgttccagatctactgcaaggtgtgcatcccagccctgaagaagaacatctccatgctgaacaccatcttcacctactag

SEQ ID NO: 23170 - DNA, 1047 bp, Artificial Sequence
  derived and/or modified sequence
atgaccctgcagtgggccgccgtggccaccttcctgtacgccgagattgggctcatcctgatattctgtctgccctttatccctccacagcggtggcagaagattttttcttttaacgtctggggtaagatcgcgacattctggaataaggctttcctcacaatcatcattttgctgatagtccttttccttgacgccgtgcgtgaggtgcgcaagtactcttctgtccataccattgagaaaagttccacgtcccggccagacgcatacgaacacacccagatgaaactcttccgctcacagcggaatctttatatttccgggttctctctgtttttttggttggtgttaaggagacttgtaaccctcataacgcagttggctaaggaactgtccaataagggggtcttgaaaacccaggccgaaaacacaaataaggctgccaaaaaattcatggaagagaatgaaaaattaaaacgaattctgaaaagccatggtaaggacgaagaatgcgtgttggaggcagaaaacaagaaacttgtcgaggaccaggaaaagctcaaaactgaattgaggaaaacaagcgatgcgctgtccaaggcccagaatgacgtgatggagatgaagatgcagtccgagcggctgagcaaagagtatgatcaactgctgaaggaacactcggagctgcaacatagtagcttcggggaatttctgtccaaaaggagccataagaatggcagtataggcaaacagaccggctccagaaagggctcattcaggaagcggcaacaggaaaagaccgtgaattttataaaggatacttgcaatatcctttgccagaatgacaactttgtgatgttggcctctcggaaatttaaatttaggaagatgcactacgacaggttcgtgatttttctgatgccacacatcggctgcatcgtcatggctctcagcaaatatctgatgatgttccagatctattgcaaggtgtgcatcccagcacttaaaaagaacatttccatgctaaatactatttttacttattag

SEQ ID NO: 23171 - DNA, 1047 bp, Artificial Sequence
  derived and/or modified sequence
atgaccctgcagtgggccgccgtggccaccttcctgtacgccgagattgggctgatcttaattttctgtctccctttcatcccgcctcagcgttggcagaagatctttagttttaatgtgtggggcaagatcgctactttctggaataaagcctttctgaccataatcatcctcttgatcgtgctcttcctggacgccgtgcgggaagtccgaaagtattcttcagttcacactatcgagaaatcttccacaagcaggcccgatgcatatgaacacacccaaatgaagctttttagaagtcaacgaaacttgtatatctctggattttcacttttcttttggctggtcctccgacgcctcgtaacactcatcacccaattagcgaaagagctttcgaataaaggtgtgttgaagacacaggccgagaataccaacaaggccgctaagaagtttatggaagaaaacgagaagctgaaacgcattttaaagtcacacggtaaagacgaagaatgtgtcctggaggccgaaaacaaaaagcttgtggaagaccaggaaaagctaaaaaccgagctcaggaagaccagcgatgctctcagtaaggctcagaacgacgtcatggagatgaagatgcagtctgaacgcttgtccaaagagtacgaccagcttctgaaagagcactctgaactccagcacagctctttcggtgagttcctctctaaacgatctcacaaaaacggtagcattgggaaacagaccggaagcaggaaaggctccttccggaaaaggcagcaggagaaaaccgtcaactttatcaaggatacctgcaatatcctgtgccagaacgacaattttgtaatgctggcctcccgaaagttcaaatttcgcaaaatgcattatgaccggttcgtgatctttctcatgccccatatcggttgcattgtgatggcattgagcaaatacttaatgatgttccagatctattgcaaggtgtgcataccagctcttaagaaaaatatttccatgctgaacacaattttcacatactag

SEQ ID NO: 23172 - DNA, 1047 bp, Artificial Sequence
  derived and/or modified sequence
atgacccttcaatgggctgccgttgccacctttctgtacgctgaaatcggccttatattaatcttctgtctgccttttattcctcctcagaggtggcaaaagattttttcattcaatgtatggggcaagatcgccacgttttggaataaggcttttctgacaatcatcatcttattgatcgtgctgtttcttgatgctgttagagaggtacgcaagtacagtagtgtgcataccatagagaaatcgtcaacatcccggcctgatgcatatgagcatacgcagatgaaactattcagatcacaaaggaatctgtatattagcggatttagtctctttttctggctcgtcctccgccgacttgttacgctcatcacccagctggctaaggaactctccaacaaaggggtcctcaagacgcaggcggagaacactaataaagctgctaagaagttcatggaggaaaacgagaaactgaagaggatattaaaatcccatggtaaagacgaagagtgtgtacttgaagcagaaaacaaaaagctggtcgaagaccaggaaaagcttaaaacggaacttaggaaaaccagtgatgccttgtctaaagcgcagaatgacgtcatggaaatgaagatgcagagcgaaaggttgagtaaggagtatgaccagcttctcaaggagcattcagagttgcagcacagttcttttggcgagttcctgtctaaaagaagtcacaagaacggctcaataggaaaacagactggaagccggaagggctcttttcgcaagcgccagcaggagaagactgtgaattttattaaggacacatgtaatatcctttgtcagaatgacaactttgtcatgctggccagtcgtaagttcaaattccggaagatgcactacgataggttcgtcattttcctgatgcctcatatcggatgtatcgttatggcactgagcaagtaccttatgatgttccaaatttactgcaaggtgtgtatccccgcactcaaaaaaaacatcagtatgctgaataccattttcacatactag

SEQ ID NO: 23173 - DNA, 1047 bp, Artificial Sequence
  derived and/or modified sequence
atgacactccagtgggcagccgtggctacatttctatatgccgaaatcggcctcatccttattttctgcctaccttttatccccccacagcgctggcagaaaattttttctttcaatgtatggggcaagatcgccactttttggaataaagcatttctgaccatcatcatactgctgatagtcctattcctggatgccgtgagagaagtgcgcaaatattcttcagtgcataccatcgaaaaaagctctacgagccggccagatgcctacgagcacacacagatgaagctcttcaggtctcaacggaatctgtatatttccggattctccctgtttttttggctggtgctgagacgccttgtgacactgattacccagttagcgaaagagctctccaataaaggagttcttaagactcaggctgaaaatacaaacaaagcggcaaagaagttcatggaggagaatgagaaactaaaacggattcttaagtcgcatgggaaagatgaagaatgtgtgttagaggctgagaacaagaaactggtggaagatcaggagaagctgaagacagagctccgcaaaacctcagacgccctttccaaagcccagaatgatgtgatggaaatgaaaatgcaatcggagcgcctcagtaaagagtacgaccagctccttaaggaacactctgagttgcagcactcgagcttcggcgagttcctctccaagcggtcacataagaatggatccattggcaaacagactggctcacgcaaggggagctttcgcaagcgtcagcaggaaaaaacagtgaacttcataaaggatacatgtaatatcctgtgccagaacgataacttcgttatgctggctagccgaaagttcaagttccgcaagatgcattacgatagattcgttatcttcttgatgccccacatcggatgcatcgtgatggccctgtccaagtacctcatgatgtttcagatctactgtaaggtgtgcatccccgctctgaagaaaaatatttctatgctgaatactatctttacatattag

SEQ ID NO: 23174 - DNA, 4572 bp, Artificial Sequence
  derived and/or modified sequence
agacctggaccccggcaccctcccgccggggccgcacttagcagtggaaagtctgtcctcctgaagaagttgcgctccgacctccaagcatcaggtcaaaagtctaactcattctctgacctgccgccaattagaaaacaactgttgccaataaacgtggtcgcgccgcctgtgacctcagccgggacggacccgcgggcgggagcctgcggggcgtgaggcggggtggggccctggctcccctcccccgcccagccgcggcgtctgacgtcccgcgcgtcggcggccgcggagcagcgcagggagccaggcgggctgccggcgggtgtgaagaaaaaaatgacactccaatgggctgcagtggcaacctttctttatgccgaaataggactcattttaatcttctgcctaccttttattcctcctcagagatggcagaagattttttcatttaatgtctggggtaaaattgcaactttttggaacaaggctttccttaccattatcatcctattgattgttctatttctagatgctgtgagagaagtaaggaaatattcctcagttcataccattgagaagagctccaccagcagacctgatgcctatgaacacacacagatgaaactttttaggtctcaaagaaatctttacatttctggattttccctatttttttggctagttttgagacgtctggttacgcttattactcaactggcaaaagaactgtcaaacaaaggtgtacttaaaactcaagcagaaaatactaacaaggctgccaaaaaatttatggaagaaaacgaaaaactaaaaaggattttgaaaagccatggtaaagatgaagaatgtgttttggaagcagaaaataaaaaactagtagaagaccaggagaaactgaaaactgaattaaggaagacttcagatgccctttctaaggcacaaaatgatgtgatggaaatgaagatgcagtcagagagactttcgaaagaatatgatcaactcctgaaagaacactctgaacttcaggatcgtttagaaagaggcaacaagaaaagactgtgaactttataaaagacacttgcaatatactgtgtcaaaatgataattttgttatgttagcctctagaaaatttaagttcagaaaaatgcactatgaccggttcgtaatttttttaatgccacacataggttgtattgtaatggcattatcaaaatatttgatgatgtttcagatatattgcaaagtctgtattccagctcttaagaaaaatataagcatgttaaataccatatttacatattgataatgtcattggtatatggtggctgtttaccaataaaaggaaaaaattcattaaccggttgcttccaaaattagaagttttaagttgcatgaaaccattaatagccttgaaagctttgataagttttcagtaataataacctatttaatcagatgatgatgtgtttgaaaatagtgttcaatatcagcaaatttgtacacagggaatgtaaataaggataactgatcagagttatccactgtatttataaggaagagtcggaaaaaacaatgaccttagttttttttaagcctgatgatactatggtttactctaataagatagctatattgataattatatttttgttactgtgcccttgcacattttggtctttttgttaatatttttattaataacacataattagtaaccactctactgtttcaagttaatctagtaatagagcttacatatatttgtataactgctataccactgaactgaatttattttacaacagtgtagaattcttgaaaagttaacgtagaaaatatccaaaaagcagtatttctagaaagtgtccaaaaagcagtatttctttcccttggttgtgagagtaactaattatataaatattacctcaaaaatacatacactggtatcacacagtctttctacaatgtttctgtattctgaaagctaaatattaagtactatttttccattcaaatattcatttagaatttcctttagaagatggcagtgattataatattaatatgatttcatttgttccagtgtttagacatgaaatcatcttccttgtctcatgaaaacctaaatataaaaaaaaggaaaatactggagtttttatttctcttgtctttgttacatcctctgtttattataattttagcaccaacttcacacctagctaatttttttcatcataaagtggatgaaatgagcaagtacctaaaaattttatttcagataaaagtcaggagttactgctaaaaaacagacatgtaggagacattcaacaggagtatgaaatgagagttagaccatatgggctgacaacaccataaataacaagaaaagggagtgctgaaataggagagaacagagcaaatgttagctcaaagtatagacttagaaatatcaaagtaagagctatctggataaatatatagatattgagtgcttggaatcctagcctactatgtgaaaattaagtctaatgtcagaataacttacagaaaaatagaaaatgcacagctttaaaatgggcagagttaaaatctattcccagctttatcacttatttagccatgctagcctaggcctctatttccttgtctccaaaatgagaataataaaatttaggtcaggattactatataaactaagataatacagtgattctcaaagttgttcagactgtatagtaaggagaaagtctggttgcactttgaagagcttgaagatttgaaagattcccaaaaaagcattttaaagtttacatttaagggaccttggacctcaaccctctcaagtttacaagtctgaaactttagacatcaaaagtttgagcagtttttccaaggcaacattgatagttagattcagggccaggctgtaagtctagaatttagatatcctgatcccccagataccgctcttctggttatacacagaccagctataatttgctaaacataaaatattgcagtgtattagccggctgtggctccagagtctgtgccctttaccaccgtgcccaactgtttcacatgctgtgtttggtagtttttcctagtactctccttaataatggtggtgtttagcaaattgtattacataaataaatatttatttcatggattgagttatgttgcatattaaattactttccttcccattgtcaataatgacttctttatgtcttaggctgtattataaattcaaacacaggaatgttattcttgcctttttccatcagaattacctaaagttttattagactttccccctacttgcaaatctgcctggaggttctggtctttaggaagtagcacttagcaagttctggataagcactccagaatttgggatgagttatccttgttgtttgtccagctctatcttggaccccagtgctgctaattagattcatgccttgttctttagggcataagttcctctcttggctatttttcctagtatgctgagaactaggattccctttcagtgacagagtcctgccctggaaccccaatcaagagcctaaagtttaactactctctgagatattagcctgatgccagcagcctgcctggatctctaaatattacccattctgggagttgttagtggtctctgctttcctgcagtgtcactcctgcttcctcattgggcctgctagccacagctacttggatgtacccgaacctgttgccttgccctacctctgtgggctggttcagttctgcattcccattccagtgtccactgccttctcgctatccctcccatctgtgcgccaccaccagcttatccccagccctgctaacatgacaaactattgtgcatttgagtgcccactatacaatgtgtgaatataaccgtgcttttaagcattgactttaatgtctgggatgatccgtctagagtccatggaaccctcctgtgttttttcatccctttcttagtaatcttggaaatccacttatgaaattctttttctaacatttctttgctgaacggcatttttaaaattactttcacggtgtttctttccagtttgatctctacacaaacacaactttattacttgcaccagaaatgatttcaaacactttaggaactgtggtaggcttaattatgacttcccaaaagatatccctataccaatccctggaacctggaaatgttctcttctatagcaaaagatatgattaagttaaagtcttgagatggagagattattctgggtaatctgggagtgccctaaatgcagctacatctatgcttatatagaagcaaagggagatattaccacacagaagaggagaaagcacagtgaccacagaggcagagattggagtgatggagccgcagcaaaggaatgctgacagccaccagaagctggaggaggcaaagaacagattcttccccagagcctcttccagcaggagcatggccctacagataccgataaaactgatattggacttcctggcctccagaactatgggaataaatttattgtttcaagcta

SEQ ID NO: 23175 - DNA, 1946 bp, Artificial Sequence
  derived and/or modified sequence
gagcgggagggccgggaagccgggcgttggtggagggaggcgttgggcttctgtcgccgcgaagctggcggaaaaggcagtggccagcgagccgcctcgccagttcccacgactcccagggaggtgtgaagaaaaaaatgacactccaatgggctgcagtggcaacctttctttatgccgaaataggactcattttaatcttctgcctaccttttattcctcctcagagatggcagaagattttttcatttaatgtctggggtaaaattgcaactttttggaacaaggctttccttaccattatcatcctattgattgttctatttctagatgctgtgagagaagtaaggaaatattcctcagttcataccattgagaagagctccaccagcagacctgatgcctatgaacacacacagatgaaactttttaggtctcaaagaaatctttacatttctggattttccctatttttttggctagttttgagacgtctggttacgcttattactcaactggcaaaagaactgtcaaacaaaggtgtacttaaaactcaagcagaaaatactaacaaggctgccaaaaaatttatggaagaaaacgaaaaactaaaaaggattttgaaaagccatggtaaagatgaagaatgtgttttggaagcagaaaataaaaaactagtagaagaccaggagaaactgaaaactgaattaaggaagacttcagatgccctttctaaggcacaaaatgatgtgatggaaatgaagatgcagtcagagagactttcgaaagaatatgatcaactcctgaaagaacactctgaacttcaggatcgtttagaaagaggcaacaagaaaagactgtgaactttataaaagacacttgcaatatactgtgtcaaaatgataattttgttatgttagcctctagaaaatttaagttcagaaaaatgcactatgaccggttcgtaatttttttaatgccacacataggttgtattgtaatggcattatcaaaatatttgatgatgtttcagatatattgcaaagtctgtattccagctcttaagaaaaatataagcatgttaaataccatatttacatattgataatgtcattggtatatggtggctgtttaccaataaaaggaaaaaattcattaaccggttgcttccaaaattagaagttttaagttgcatgaaaccattaatagccttgaaagctttgataagttttcagtaataataacctatttaatcagatgatgatgtgtttgaaaatagtgttcaatatcagcaaatttgtacacagggaatgtaaataaggataactgatcagagttatccactgtatttataaggaagagtcggaaaaaacaatgaccttagttttttttaagcctgatgatactatggtttactctaataagatagctatattgataattatatttttgttactgtgcccttgcacattttggtctttttgttaatatttttattaataacacataattagtaaccactctactgtttcaagttaatctagtaatagagcttacatatatttgtataactgctataccactgaactgaatttattttacaacagtgtagaattcttgaaaagttaacgtagaaaatatccaaaaagcagtatttctagaaagtgtccaaaaagcagtatttctttcccttggttgtgagagtaactaattatataaatattacctcaaaaatacatacactggtatcacacagtctttctacaatgtttctgtattctgaaagctaaatattaagtactatttttccattcaaatattcatttagaatttcctttagaagatggcagtgattataatattaatatgatttcatttgttccagtgtttagacatgaaatcatcttccttgtctcatgaaaacctaaatataaaaaaaaggaaaa

SEQ ID NO: 23176 - DNA, 5773 bp, Artificial Sequence
  derived and/or modified sequence
gtgtgaagaaaaaaatgacactccaatgggctgcagtggcaacctttctttatgccgaaataggactcattttaatcttctgcctaccttttattcctcctcagagatggcagaagattttttcatttaatgtctggggtaaaattgcaactttttggaacaaggctttccttaccattatcatcctattgattgttctatttctagatgctgtgagagaagtaaggaaatattcctcagttcataccattgagaagagctccaccagcagacctgatgcctatgaacacacacagatgaaactttttaggtctcaaagaaatctttacatttctggattttccctatttttttggctagttttgagacgtctggttacgcttattactcaactggcaaaagaactgtcaaacaaaggtgtacttaaaactcaagcagaaaatactaacaaggctgccaaaaaatttatggaagaaaacgaaaaactaaaaaggattttgaaaagccatggtaaagatgaagaatgtgttttggaagcagaaaataaaaaactagtagaagaccaggagaaactgaaaactgaattaaggaagacttcagatgccctttctaaggcacaaaatgatgtgatggaaatgaagatgcagtcagagagactttcgaaagaatatgatcaactcctgaaagaacactctgaacttcagcattccagttttggtgaatttttaagcaaaagaagccacaaaaatggcagcattggaaaacagactggttctagaaaaggatcgtttagaaagaggcaacaagaaaagactgtgaactttataaaagacacttgcaatatactgtgtcaaaatgataattttgttatgttagcctctagaaaatttaagttcagaaaaatgcactatgaccggttcgtaatttttttaatgccacacataggttgtattgtaatggcattatcaaaatatttgatgatgtttcagatatattgcaaagtctgtattccagctcttaagaaaaatataagcatgttaaataccatatttacatattgataatgtcattggtatatggtggctgtttaccaataaaaggaaaaaattcattaaccggttgcttccaaaattagaagttttaagttgcatgaaaccattaatagccttgaaagctttgataagttttcagtaataataacctatttaatcagatgatgatgtgtttgaaaatagtgttcaatatcagcaaatttgtacacagggaatgtaaataaggataactgatcagagttatccactgtatttataaggaagagtcggaaaaaacaatgaccttagttttttttaagcctgatgatactatggtttactctaataagatagctatattgataattatatttttgttactgtgcccttgcacattttggtctttttgttaatatttttattaataacacataattagtaaccactctactgtttcaagttaatctagtaatagagcttacatatatttgtataactgctataccactgaactgaatttattttacaacagtgtagaattcttgaaaagttaacgtagaaaatatccaaaaagcagtatttctagaaagtgtccaaaaagcagtatttctttcccttggttgtgagagtaactaattatataaatattacctcaaaaatacatacactggtatcacacagtctttctacaatgtttctgtattctgaaagctaaatattaagtactatttttccattcaaatattcatttagaatttcctttagaagatggcagtgattataatattaatatgatttcatttgttccagtgtttagacatgaaatcatcttccttgtctcatgaaaacctaaatataaaaaaaaggaaaatactggagtttttatttctcttgtctttgttacatcctctgtttattataattttagcaccaacttcacacctagctaatttttttcatcataaagtggatgaaatgagcaagtacctaaaaattttatttcagataaaagtcaggagttactgctaaaaaacagacatgtaggagacattcaacaggagtatgaaatgagagttagaccatatgggctgacaacaccataaataacaagaaaagggagtgctgaaataggagagaacagagcaaatgttagctcaaagtatagacttagaaatatcaaagtaagagctatctggataaatatatagatattgagtgcttggaatcctagcctactatgtgaaaattaagtctaatgtcagaataacttacagaaaaatagaaaatgcacagctttaaaatgggcagagttaaaatctattcccagctttatcacttatttagccatgctagcctaggcctctatttccttgtctccaaaatgagaataataaaatttaggtcaggattactatataaactaagataatacagtgattctcaaagttgttcagactgtatagtaaggagaaagtctggttgcactttgaagagcttgaagatttgaaagattcccaaaaaagcattttaaagtttacatttaagggaccttggacctcaaccctctcaagtttacaagtctgaaactttagacatcaaaagtttgagcagtttttccaaggcaacattgatagttagattcagggccaggctgtaagtctagaatttagatatcctgatcccccagataccgctcttctggttatacacagaccagctataatttgctaaacataaaatattgcagtgtattagccggctgtggctccagagtctgtgccctttaccaccgtgcccaactgtttcacatgctgtgtttggtagtttttcctagtactctccttaataatggtggtgtttagcaaattgtattacataaataaatatttatttcatggattgagttatgttgcatattaaattactttccttcccattgtcaataatgacttctttatgtcttaggctgtattataaattcaaacacaggaatgttattcttgcctttttccatcagaattacctaaagttttattagactttccccctacttgcaaatctgcctggaggttctggtctttaggaagtagcacttagcaagttctggataagcactccagaatttgggatgagttatccttgttgtttgtccagctctatcttggaccccagtgctgctaattagattcatgccttgttctttagggcataagttcctctcttggctatttttcctagtatgctgagaactaggattccctttcagtgacagagtcctgccctggaaccccaatcaagagcctaaagtttaactactctctgagatattagcctgatgccagcagcctgcctggatctctaaatattacccattctgggagttgttagtggtctctgctttcctgcagtgtcactcctgcttcctcattgggcctgctagccacagctacttggatgtacccgaacctgttgccttgccctacctctgtgggctggttcagttctgcattcccattccagtgtccactgccttctcgctatccctcccatctgtgcgccaccaccagcttatccccagccctgctaacatgacaaactattgtgcatttgagtgcccactatacaatgtgtgaatataaccgtgcttttaagcattgactttaatgtctgggatgatccgtctagagtccatggaaccctcctgtgttttttcatccctttcttagtaatcttggaaatccacttatgaaattctttttctaacatttctttgctgaacggcatttttaaaattactttcacggtgtttctttccagtttgatctctacacaaacacaactttattacttgcaccagaaatgatttcaaacactttaggaactgtggtaggcttaattatgacttcccaaaagatatccctataccaatccctggaacctggaaatgttctcttctatagcaaaagatatgattaagttaaagtcttgagatggagagattattctgggtaatctgggagtgccctaaatgcagctacatctatgcttatatagaagcaaagggagatattaccacacagaagaggagaaagcacagtgaccacagaggcagagattggagtgatggagccgcagcaaaggaatgctgacagccaccagaagctggaggaggcaaagaacagattcttccccagagcctcttccagcaggagcatggccctacagataccgataaaactgatattggacttcctggcctccagaactatgggaataaatttattgtttcaagctatcaagtttgtgattatttgttactgctgccatagtaaattaatacaggagcatgcaggacagatctgtaatggcctgaactgaatttcaaggggtgtggaaaacagttactctttaacaccactccgtcttccccattagccatttggataagtcaaagatagccttagccatctcctatcttagttacttttctccttcaactgtattttgccattgtcgttgccattgcctctgcctaactgcaagccatcatcatctctcacatggactatgacgacctcctcatctccctgtatcttctctaatgcttctctcatatacatgctctcagcagccacctggtttaaaacaaaaacaaaaaaaacactaatcatgtcattccctgcttgtcttcccgttctttccaactgtcattccctgcttgtcttccaattctttccaactgcagttaagatcaaaccaccaagacctcaccaggctcccatctacttttcagcctcaactcagtccacctgctctgccaatcacacctgtttctttttgttgttctttccctaggatatagatcctggcatacctgcattctgattcttcttggaacaagccaaattctttcccctgtcagtacgtttgcatgtgtagtacatgttgcatcccaggcctgtctgccttcttaccctattttattttcatcatagcacttactaccatctgaaatgatctcatttatggtttgtctcctcagtgattaacacagttcctgcacacagtaaatcagtagttctcaacaggaagtgaagaggtcatcctgaggggaacatttagcaatacctagagacatttctggttgtcataaccaggggaatgctcctagtggatagaagtcagggaggctgttaaacccattccacaatgcacaggactggaacaaagaatgatctctcactcagaatgtcagtgttgccaaggtggagacatcctgcagtagatgcttgtggcagagggtactggttgtaccccagtatccattctttcattcacctgtgttaatacatgctccagttttgtatttttttttataaacagctgtcaagcataaagataacattttccatctccttgtatgtaagtggaaataggactgtcatgtggggccagtttcttttttttcttcctctgtcctgctgcttgaaacatatgctgctatcttagatcatgaggtcgaggccatgcaaagtggagcaacaaggagctgtgtccctgacgccataagcaccacacctgtcctgaattgctgtgaatgacaccagctaactacaatgcattgtctcaacatcctagacataataaaaagccataaatatgtttgtcctatgcagcacaaaacctttgtatctttgccttttatgttgggatcttaattaaaaattacatcctctactgtc

SEQ ID NO: 23177 - DNA, 1157 bp, Artificial Sequence
  derived and/or modified sequence
gcggagcagcgcagggagccaggcgggctgccggcgggtgtgaagaaaaaaatgacactccaatgggctgcagtggcaacctttctttatgccgaaataggactcattttaatcttctgcctaccttttattcctcctcagagatggcagaagattttttcatttaatgtctggggtaaaattgcaactttttggaacaaggctttccttaccattatcatcctattgattgttctatttctagatgctgtgagagaagtaaggaaatattcctcagttcataccattgagaagagctccaccagcagacctgatgcctatgaacacacacagatgaaactttttaggtctcaaagaaatctttacatttctggattttccctatttttttggctagttttgagacgtctggttacgcttattactcaactggcaaaagaactgtcaaacaaaggtgtacttaaaactcaagcagaaaatactaacaaggctgccaaaaaatttatggaagaaaacgaaaaactaaaaaggattttgaaaagccatggtaaagatgaagaatgtgttttggaagcagaaaataaaaaactagtagaagaccaggagaaactgaaaactgaattaaggaagacttcagatgccctttctaaggcacaaaatgatgtgatggaaatgaagatgcagtcagagagactttcgaaagaatatgatcaactcctgaaagaacactctgaacttcagcattccagttttggtgaatttttaagcaaaagaagccacaaaaatggcagcattggaaaacagactggttctagaaaaggatcgtttagaaagaggcaacaagaaaagactgtgaactttataaaagacacttgcaatatactgtgtcaaaatgataattttgttatgttagcctctagaaaatttaagttcagaaaaatgcactatgaccggttcgtaatttttttaatgccacacataggttgtattgtaatggcattatcaaaatatttgatgatgtttcagatatattgcaaagtctgtattccagctcttaagaaaaatataagcatgttaaataccatatttacatattgataatgtcattggtatatggtggctgtttaccaataaaaggaaaaaattcattaaccggt

SEQ ID NO: 23178 - DNA, 942 bp, Artificial Sequence
  derived and/or modified sequence
gtcccgcgcgtcggcggccgcggagcagcgcagggagccaggcgggctgccggcggatggcagaagattttttcatttaatgtctggggtaaaattgcaactttttggaacaaggctttccttaccattatcatcctattgattgttctatttctagatgctgtgagagaagtaaggaaatattcctcagttcataccattgagaagagctccaccagcagacctgatgcctatgaacacacacagatgaaactttttaggtctcaaagaaatctttacatttctggattttccctatttttttggctagttttgagacgtctggttacgcttattactcaactggcaaaagaactgtcaaacaaaggtgtacttaaaactcaagcagaaaatactaacaaggctgccaaaaaatttatggaagaaaacgaaaaactaaaaaggattttgaaaagccatggtaaagatgaagaatgtgttttggaagcagaaaataaaaaactagtagaagaccaggagaaactgaaaactgaattaaggaagacttcagatgccctttctaaggcacaaaatgatgtgatggaaatgaagatgcagtcagagagactttcgaaagaatatgatcaactcctgaaagaacactctgaacttcaggatcgtttagaaagaggcaacaagaaaagactgtgaactttataaaagacacttgcaatatactgtgtcaaaatgataattttgttatgttagcctctagaaaatttaagttcagaaaaatgcactatgaccggttcgtaatttttttaatgccacacataggttgtattgtaatggcattatcaaaatatttgatgatgtttcagatatattgcaaagtctgtattccagctcttaagaaaaatataagcatgttaaataccatatttacatattgataatgtcatt

SEQ ID NO: 23179 - protein, 439 aa, Artificial Sequence
  derived and/or modified sequence
MVPSREALLGPGTTAIRCPKKLQNQNYKGHGLSKGKEREQRASIRFKTTLMNTLMDVLRHRPGWVEVKDEGEWDFYWCDVSWLRENFDHTYMDEHVRISHFRNHYELTRKNYMVKNLKRFRKQLEREAGKLEAAKCDFFPKTFEMPCEYHLFVEEFRKNPGITWIMKPVARSQGKGIFLFRRLKDIVDWRKDTRSSDDQKDDIPVENYVAQRYIENPYLIGGRKFDLRVYVLVMSVFAECLLWSGHRRQDVHLTNVAVQKTSPDYHPKKGCKWTLQRFRQYLASKHGPEAVETLFRDIDNIFVKSLQSVQKVIISDKHCFELYGYDILIDQDLKPWLLEVNASPSLTASSQEDYELKTCLLEDTLHVVDMEARLTGREKRVGGFDLMWNDGPVSREEGAPDLSGMGNFVTNTHLGCVNDRKKQLRQLFCSLQVQKKASS

SEQ ID NO: 23180 - DNA, 1320 bp, Artificial Sequence
  derived and/or modified sequence
atggtgcccagcagagaggccctgctgggccccggcaccaccgccatcagatgccccaagaagctgcagaaccagaactacaagggccacggcctgagcaagggcaaggagagagagcagagagccagcatcagattcaagaccaccctgatgaacaccctgatggacgtgctgagacacagacccggctgggtggaggtgaaggacgagggcgagtgggacttctactggtgcgacgtgagctggctgagagagaacttcgaccacacctacatggacgagcacgtgagaatcagccacttcagaaaccactacgagctgaccagaaagaactacatggtgaagaacctgaagagattcagaaagcagctggagagagaggccggcaagctggaggccgccaagtgcgacttcttccccaagaccttcgagatgccctgcgagtaccacctgttcgtggaggagttcagaaagaaccccggcatcacctggatcatgaagcccgtggccagaagccagggcaagggcatcttcctgttcagaagactgaaggacatcgtggactggagaaaggacaccagaagcagcgacgaccagaaggacgacatccccgtggagaactacgtggcccagagatacatcgagaacccctacctgatcggcggcagaaagttcgacctgagagtgtacgtgctggtgatgagcgtgttcgccgagtgcctgctgtggagcggccacagaagacaggacgtgcacctgaccaacgtggccgtgcagaagaccagccccgactaccaccccaagaagggctgcaagtggaccctgcagagattcagacagtacctggccagcaagcacggccccgaggccgtggagaccctgttcagagacatcgacaacatcttcgtgaagagcctgcagagcgtgcagaaggtgatcatcagcgacaagcactgcttcgagctgtacggctacgacatcctgatcgaccaggacctgaagccctggctgctggaggtgaacgccagccccagcctgaccgccagcagccaggaggactacgagctgaagacctgcctgctggaggacaccctgcacgtggtggacatggaggccagactgaccggcagagagaagagagtgggcggcttcgacctgatgtggaacgacggccccgtgagcagagaggagggcgcccccgacctgagcggcatgggcaacttcgtgaccaacacccacctgggctgcgtgaacgacagaaagaagcagctgagacagctgttctgcagcctgcaggtgcagaagaaggccagcagctag

SEQ ID NO: 23181 - DNA, 1320 bp, Artificial Sequence
  derived and/or modified sequence
atggtcccttcccgagaagccctcttgggacccggtaccacggctatccggtgtccgaagaaactccaaaatcaaaactacaaggggcacggactgagcaagggtaaggagagggagcagcgggcctctatccggttcaaaacaaccctaatgaacaccctcatggacgtgctcagacatagaccaggctgggttgaggttaaggatgaaggcgagtgggacttttattggtgcgacgtgagttggttaagagagaacttcgaccatacttacatggatgagcacgtgaggattagccattttcgcaaccattatgagcttacgcgcaagaattacatggtgaaaaacctgaaacggtttcggaaacagttggaacgcgaagccggaaagctcgaggctgctaagtgcgattttttcccaaaaacattcgaaatgccatgcgagtaccacctgttcgtggaggaattccggaaaaatcctggcattacatggataatgaaacccgttgcacgttctcaagggaaaggtatctttttgttcaggcggttaaaggacatagttgattggcgcaaggatacccggtctagcgatgatcagaaagatgacataccggtcgaaaactacgtagcacaaaggtatattgaaaatccttatctgattggggggcgtaagttcgacctgcgggtctatgtgctggtcatgtcagtgttcgccgagtgtctcctgtggtccggacaccggcgacaggacgtgcacctcacaaatgtggcggtacagaagacttcacctgattatcaccctaagaagggatgcaaatggactctgcagcggtttcgccaatatctggcttctaaacacggacccgaggcagtcgaaaccctctttagagacatcgacaacattttcgtgaaatcccttcagtccgtgcaaaaagtcattatcagcgacaaacattgtttcgaactgtacgggtacgatattctgatcgaccaggatttaaagccatggttgctggaagtgaacgcttcaccaagcttgactgcctcatcacaggaggactacgaactgaagacttgtttgttagaagatactctccatgtggtggatatggaggcccggttgaccggacgggaaaagagagtgggagggttcgacttgatgtggaatgatggccccgtgtccagggaagagggcgctcctgatttgagcggcatgggtaattttgtgacaaacacacatctgggatgtgttaatgaccggaagaagcagttgcgacaactgttctgcagtctgcaggtgcagaaaaaagcgtctagttag

SEQ ID NO: 23182 - DNA, 1320 bp, Artificial Sequence
  derived and/or modified sequence
atggtgccttcaagagaggccttactgggtcccggaacgacagccatccgatgccccaaaaagctgcagaaccagaattataaggggcacggccttagcaaaggcaaggagcgcgagcaacgggcatctatacggttcaaaactaccctaatgaatacgttgatggatgttctcagacatcgccctggatgggtggaggttaaggacgagggcgagtgggatttctattggtgcgatgtttcatggttgcgagagaattttgaccatacatatatggacgagcacgtacgcatcagccactttcgcaatcactatgagctgacaaggaagaactatatggtgaaaaacttaaagcgttttcgcaagcagctggaacgcgaggccggaaagctagaagccgcaaaatgtgacttctttcctaaaacatttgagatgccttgcgagtaccatctttttgtggaggagtttcggaaaaatcccggaattacatggattatgaagcccgtggcaagatcccaaggaaagggcatttttctctttagaaggctgaaagatattgtggactggaggaaggacacacgatcgtccgatgaccagaaagacgacattcccgttgaaaactacgtcgcccagcgatatattgaaaacccttatctcatcggagggagaaaattcgatctgcgagtttacgtgttggttatgtccgtgtttgccgaatgtctgctgtggtcaggccacaggcggcaggacgttcaccttaccaatgttgcagtgcagaaaacctctccagattaccaccctaaaaaaggttgcaaatggaccctgcagcgcttcagacagtacctggcctccaagcatggccccgaagccgtagaaactctctttagggacatcgataatatattcgtgaaatcattgcaatctgtgcagaaagtcatcatcagcgacaagcattgcttcgagctctacgggtacgacatactgattgaccaagatctgaaaccatggttgctggaggttaatgccagtcccagcttgaccgccagttcacaggaggattatgaattgaagacctgcctattggaggacacactgcatgttgtggacatggaagcgcggctgaccggccgcgaaaaaagagtgggaggctttgatctcatgtggaatgatggccccgtaagccgggaagagggggcacccgacctgagcgggatgggtaacttcgtgactaatacgcatcttgggtgtgtgaacgatagaaaaaaacagttaagacagctcttctgctcactccaggtccagaaaaaggcttccagctag

SEQ ID NO: 23183 - DNA, 1263 bp, Artificial Sequence
  derived and/or modified sequence
aagcacgcgaggcgcgcggtggcggtttggatctggcccctggggaatcgcgttatgtcgcgaccgaagaaccaaaattacaagggccatggattgtcaaagggaaaagagcgagagcagagagcatcgatccggttcaagaccaccctcatgaacacactcatggacgtccttcgccacaggccaggatgggtggaagtgaaggacgaaggggagtgggatttctactggtgtgacgtcagctggctccgggagaacttcgaccacacctacatggatgaacatgtgcggatcagtcacttccggaaccactatgagctgacccggaagaactacatggtgaagaacctgaagcggttccggaagcagctggagcgtgaggcaggaaagctggaggcagccaagtgtgacttcttccccaaaacctttgagatgccttgcgagtaccacctgtttgtagaggagtttcgcaaaaacccaggaatcacctggatcatgaagcctgtagcccggtctcaagggaaaggcatcttcctcttccgtaggctgaaggacatcgtggactggaggaaggacacaagaagctctgacgaccagaaagatgatattcccgtggagaactatgtggctcagcgttacattgaaaatccttacctgataggaggccgcaagtttgacctgcgtgtctatgtgctggtgatgtcgatgttcacctcaccaacgtggctgtgcaaaaaacatctcccgactaccacccaaagaagggctgcaagtggacgctgcagcgcttccggcagtacctggcgtccaaacacgggcccgaggcagtggagacactcttcagggacatcgacaacatctttgtcaaaagcctgcagagtgtgcagaaggtgatcatcagtgacaagcactgcttcgagctgtacggctatgacatcctcatcgaccaggacctcaagccgtggctcctggaggtcaatgcgtccccatcactgacagccagcagccaggaagactatgagctcaagacctgcctcctggaagacaccctgcatgttgtggacatggaagcgaggctcacgggaagggagaagcgagtcgggggctttgacctcatgtggaatgatggccctgttagcagagaggagggggctcctgacctgtcgggaatgggaaactttgtgaccaacacacatctcggctgcgtcaacgatcggaagaaacaactgaggcagctcttctgctcccttcaagttcagaaga

SEQ ID NO: 23184 - DNA, 2623 bp, Artificial Sequence
  derived and/or modified sequence
gaggtgggggcgggggccttaccccaccctggcaccggcaggcgcgggcggatggggggatgtcgcctagagccccccggccggcccacaaactcccgtcccccttccggctctgcctggacgtccctgcgggccccgggggaaagcacccaacttctcccgcctcggcttctagcagaaacgtgacggggctggactttgatcgccgagggctctctgctcttcagagtctgcttggaacgggataagagggatggtgccatccagggaagctctgctgggaccaggcacaactgccattaggtgccccaagaaattacagaaccaaaattacaagggccatggattgtcaaagggaaaagagcgagagcagagagcatcgatccggttcaagaccaccctcatgaacacactcatggacgtccttcgccacaggccaggatgggtggaagtgaaggacgaaggggagtgggatttctactggtgtgacgtcagctggctccgggagaacttcgaccacacctacatggatgaacatgtgcggatcagtcacttccggaaccactatgagctgacccggaagaactacatggtgaagaacctgaagcggttccggaagcagctggagcgtgaggcaggaaagctggaggcagccaagtgtgacttcttccccaaaacctttgagatgccttgcgagtaccacctgtttgtagaggagtttcgcaaaaacccaggaatcacctggatcatgaagcctgtagcccggtctcaagggaaaggcatcttcctcttccgtaggctgaaggacatcgtggactggaggaaggacacaagaagctctgacgaccagaaagatgatattcccgtggagaactatgtggctcagcgttacattgaaaatccttacctgataggaggccgcaagtttgacctgcgtgtctatgtgctggtgatgtcggtgtttgctgaatgcctgctgtggtctgggcacaggagacaggatgttcacctcaccaacgtggctgtgcaaaaaacatctcccgactaccacccaaagaagggctgcaagtggacgctgcagcgcttccggcagtacctggcgtccaaacacgggcccgaggcagtggagacactcttcagggacatcgacaacatctttgtcaaaagcctgcagagtgtgcagaaggtgatcatcagtgacaagcactgcttcgagctgtacggctatgacatcctcatcgaccaggacctcaagccgtggctcctggaggtcaatgcgtccccatcactgacagccagcagccaggaagactatgagctcaagacctgcctcctggaagacaccctgcatgttgtggacatggaagcgaggctcacgggaagggagaagcgagtcgggggctttgacctcatgtggaatgatggccctgttagcagagaggagggggctcctgacctgtcgggaatgggaaactttgtgaccaacacacatctcggctgcgtcaacgatcggaagaaacaactgaggcagctcttctgctcccttcaagttcagaagaaagcttccagttgatccccagctgccaggaggaaatcagccttagcaggccttgtgtttgagattgggagctgagccagaaaccggaaaaccctgggctcatgggcaggacagcttcgggagttgagtgtcaagcccgaagggaagacttttggaaggaaaatactggcaaatccaagaagtgaaccagccgactttaggaaagccagaagccaggctactctagaccttctgccttcagagcatgaggacttctcccactcatccctgtacctgaggcacaccaacccagacaggtccaggcatggactccaggttccctatttccagaaggaatgcgattagctttttttggcccagcacccaccctgccagggaggaaggggcaattttccagtgatgaaattgtgaatcaggcagtcacactggacaacatctagcaaggtgaattctgcaactccctactttatttacattttaaaataagcaatatattcatacggtttaaaatccaaagtttacaaaagggtatagggtgacatctccttccctcccacctgtgcgccccaaccctgcaggtgctgttctgagggaatcacactgtgcttgcacaaaaattattagcttataagacaccagccttccccttgctttcctcacttgatgtatcttggagcttgttccttattcttgattatagttgtatggtattgcactatctggagctaacacctgtgacccacactcatgttttaaaagtttctgcattagtcaaaaatatttaaaaggagattcaacttcacaacccatatgtctagcttctcttgaaaacacgtaagaactggccatgacagcctgtgtttctatgtaactatgagccagagccaaggagcggggggaccaggagaggtgtgcccctgccatgctgccatttgttatcacccgcctgtcaaatcacaggtttatttcaaggcaagaaccatgttcataggttgtattctaaatggagtggcgtgcccttactgaaggactagatgaggcaaataaagactagttgctgctatt

SEQ ID NO: 23185 - DNA, 1320 bp, Artificial Sequence
  derived and/or modified sequence
atggtgcccagccgggaggccctgctgggccctggcaccacagccatccgctgccccaagaagctgcagaaccagaactacaagggccacggcctgagcaagggcaaggagcgggagcagagggccagcatccgcttcaagaccaccctgatgaacaccctgatggatgtgctgcggcaccggcccggctgggtggaggtgaaggatgaaggagagtgggacttctactggtgtgatgtgtcctggctgagagaaaattttgaccacacctacatggatgaacatgtgcgcatcagccacttcaggaaccactatgagctgaccaggaagaactacatggtgaagaacctgaagcgcttcaggaagcagctggagcgggaggccggcaagctggaggccgccaagtgtgacttcttccccaagacctttgagatgccctgtgagtaccacctgtttgtggaggagttcaggaagaaccctggcatcacctggatcatgaagcctgtggcccggagccagggcaagggcatcttcctgttccggcggctgaaggacatcgtggactggaggaaggacaccaggagcagtgatgaccagaaggatgacatccctgtggagaactacgtggcccagcgctacatcgagaacccctacctgattggaggcaggaagtttgacctgcgggtgtatgtgctggtgatgtctgtgtttgctgaatgtctgctgtggagcggccaccggcggcaggatgtgcacctgaccaacgtggccgtgcagaagaccagcccagactaccaccccaagaagggctgcaagtggaccctgcagcgcttccggcagtacctggccagcaagcacggccctgaggccgtggagaccctcttccgggacatcgacaacatctttgtgaagagcctgcagagcgtgcagaaggtgatcatcagtgacaagcactgctttgagctgtatggctatgacatcctgattgaccaggacctgaagccctggctgctggaggtgaatgccagccccagcctgacagccagcagccaggaggactatgagctgaagacctgcctgctggaggacaccctgcacgtggtggacatggaggcccggctgaccggccgggagaagagggtgggcggctttgacctgatgtggaatgatggccctgtgtcccgggaggagggcgccccagacctgagcggcatgggcaactttgtgaccaacacccacctgggctgtgtgaatgacaggaagaagcagctgcggcagctgttctgcagcctgcaggtgcagaagaaggccagcagctag

SEQ ID NO: 23186 - DNA, 1320 bp, Artificial Sequence
  derived and/or modified sequence
atggtgcccagccgggaggccctgctgggccccggcaccaccgccattaggtgtcccaagaagcttcaaaatcagaattataagggacacgggctgtcaaaaggcaaagagcgagaacagcgcgcctcaatcaggttcaagaccacactgatgaacactctcatggatgtgcttcgccataggccagggtgggtagaggtgaaggacgagggtgaatgggatttctactggtgtgatgtcagctggctgagagaaaatttcgatcacacctacatggatgagcatgttaggattagccactttaggaaccactatgagcttacacggaagaattacatggtcaaaaatctgaagaggtttcggaaacagctcgaacgagaggccggtaagttagaggccgctaagtgtgacttctttccaaaaacatttgagatgccctgtgaataccacctttttgtggaggaatttcggaaaaatccaggaatcacatggattatgaagcccgtggcccgatcccagggcaagggtatattcctatttcggcggctgaaagacatcgttgattggcggaaggatacaagatcctctgatgatcagaaggacgatattcctgtggagaactatgtggctcagagatatattgagaacccgtatttaattggagggcgcaaattcgatctgagggtttatgtgctcgtgatgagtgtatttgcggagtgtctcctgtggtcaggacatagaaggcaagacgtgcatttgactaatgttgccgtgcagaagacttctccagactaccacccaaaaaagggctgcaagtggaccctgcagcgattcagacagtacctggcttctaagcacgggcctgaggctgtagagactctcttccgggatatcgataacatttttgtgaaaagtttgcaatccgtccagaaagtgattataagtgacaagcactgtttcgaactgtacggctacgatattctgatcgaccaggatctgaaaccctggctcctggaagtgaacgcgtccccctctctcaccgctagctcccaggaggactatgagctcaagacatgtctgctagaggacacccttcatgtggtcgacatggaggccaggcttacaggacgggaaaagagagttggggggttcgatctgatgtggaacgatggccctgtgtcccgcgaggaaggtgcgccagacctgtctgggatgggcaatttcgtgacaaatacgcatctgggatgtgtgaatgaccgcaaaaagcagcttagacagctattttgctcactacaggttcagaagaaggcttcctcgtag

SEQ ID NO: 23187 - DNA, 1320 bp, Artificial Sequence
  derived and/or modified sequence
atggtgcccagccgggaggccctgctgggccccggcaccaccgccatccgctgccccaagaagttgcagaaccagaattacaaaggccacggccttagtaaggggaaagaaagggaacagcgggcgagtatccggtttaaaacaaccctaatgaacaccctcatggacgtgctgagacacagacctgggtgggtcgaggtgaaggatgagggggagtgggacttctattggtgtgatgtgtcgtggctgcgggaaaattttgatcacacatacatggatgaacatgttcgaattagtcattttaggaaccactacgaactgacgcgcaaaaattacatggtaaagaatttgaaacgattccggaagcagctggaacgcgaggcgggcaagttggaagcggccaaatgcgacttttttcctaagacctttgaaatgccatgcgaataccacctatttgttgaggaattcagaaaaaatcctggcatcacatggataatgaagcccgtcgctaggtctcaagggaaagggatctttttatttcggagactgaaagacattgtggattggcggaaagatactaggagcagtgacgatcagaaggacgatataccagtcgagaattacgtagcacagagatacatagagaatccttatttgatcggcggccgtaagttcgacctgcgggtctatgtgctggtcatgtctgtgtttgccgaatgtctgctgtggtctggtcataggcggcaggatgtgcacctgaccaatgtggcagttcaaaaaactagccctgattaccaccctaagaaaggctgtaagtggactctccagagatttagacagtatctggcgtccaagcatggtcccgaggctgtggaaacactgttcagggatatcgacaacattttcgtcaagtctcttcagagtgtacagaaggtaatcatatcagataaacactgtttcgagctctatgggtacgatatccttattgaccaggaccttaagccatggctgctggaagtcaatgcgagccccagtcttaccgcatcttctcaggaggattatgagcttaagacctgtctgctcgaggacaccttgcacgtggtcgatatggaagcgcgcctgaccggaagggaaaagagagtgggtggtttcgacctaatgtggaatgacggacccgtgtctagggaggagggtgcgcctgatctgagcggtatgggaaattttgtaacaaatactcacttaggctgtgtcaacgacagaaagaaacagctgaggcaattgttctgttcactgcaggtgcaaaaaaaggcatcatcctag

SEQ ID NO: 23188 - DNA, 1320 bp, Artificial Sequence
  derived and/or modified sequence
atggtgccatctagggaagcccttctcgggcctggaactacggctatcagatgtccaaaaaagctccagaaccaaaactacaaaggccatggactttcaaagggcaaagagagggagcaaagggcaagtattcggttcaagactaccttgatgaacacactgatggacgtgctgaggcacaggccaggctgggtggaagtcaaggatgaaggtgaatgggacttctattggtgcgatgtttcttggctgagggaaaattttgatcatacttatatggacgaacatgtgaggatctcccacttccggaaccattacgagctcaccagaaaaaactatatggtgaagaaccttaaaaggttccgcaaacagcttgagcgtgaagcgggaaaactagaggctgcaaagtgcgatttcttccctaaaacgttcgagatgccctgcgaataccatctctttgtggaggagtttcgcaagaacccagggatcacctggataatgaagccagtggcacgctcacagggcaaaggaatctttttatttaggcgacttaaagacatagtggattggcggaaggacacaagatcctcagatgaccagaaggacgatatccccgttgagaactacgtcgctcagcggtatatcgagaacccttaccttattgggggaagaaagttcgatctgcgggtatatgttctagttatgtccgtcttcgctgagtgcttactgtggagcggccaccggaggcaggacgttcatctgaccaatgtggcagtccagaagacctcaccggactatcaccccaagaagggctgcaaatggactctccagagattcagacagtacctcgcatctaagcacgggccagaagctgtggaaaccttgtttcgcgatattgataacatcttcgttaagtcactgcagtccgttcagaaggttatcatatccgataaacattgctttgagctgtacggctatgatattctgatcgatcaggacctaaagccctggctgcttgaggtcaacgcaagcccgagcctaactgcgagctcacaggaggactatgaattgaagacatgtctgctggaagacacactgcatgtggttgatatggaagccagattgaccgggcgagagaagagagtgggtggatttgacctgatgtggaatgatggacccgtctcacgcgaggaaggcgctcccgacttgagtggcatggggaactttgttactaacacccacctggggtgcgtgaacgaccggaagaagcagctgaggcagctgttttgttcacttcaggtgcaaaagaaagcttcgtcctag

SEQ ID NO: 23189 - DNA, 1320 bp, Artificial Sequence
  derived and/or modified sequence
atggtcccgagccgggaggccctcttggggcctggaacaactgcaatccgctgccccaaaaagctgcagaaccagaactataaagggcatggcctgtccaaggggaaagagcgtgaacaacgggcttcaataagattcaagaccactttaatgaataccctcatggacgtattgcggcacaggcctggatgggtagaagttaaagacgaaggcgaatgggatttctattggtgcgacgtctcctggttgcgggaaaactttgaccacacttacatggatgagcatgtccgcatttctcacttccgcaatcattatgagctgaccaggaaaaattatatggtgaagaatctgaagcgattccgcaaacagctggagagggaggccggaaagctggaagctgctaaatgtgactttttcccaaaaacgtttgaaatgccatgcgagtaccatttgtttgttgaagagtttcggaagaatccaggtataacctggatcatgaagcccgttgccagaagtcaggggaaaggtattttcttgtttcggcgacttaaagacatcgtcgactggaggaaggatactaggagctcagacgaccagaaggatgatattccagtggaaaattacgtggctcagagatatattgaaaatccctatctcatcgggggacgtaagtttgacttgagagtttacgtcctcgttatgtcagtcttcgcagaatgccttctctggtctggccacaggcgccaggacgtccatcttacaaacgtggccgtgcagaagacttctcccgattaccatccaaaaaaagggtgcaaatggaccctgcaaagattccggcagtacctggcatctaagcacggcccagaagctgttgaaaccctattccgcgacatagataacatttttgttaaatccttgcaatcagtacagaaggtgatcataagtgacaagcactgcttcgagctgtacggatacgacatcctgatagatcaggatttaaagccgtggctactcgaggtcaacgcctctccatcgctgaccgcatctagccaggaggactacgaactcaagacctgccttttagaggacaccctgcatgtggtcgatatggaggcacgattaactggccgagagaagcgggtcggtgggttcgaccttatgtggaatgatgggccagtttcgcgagaagaaggagccccagacctgtcagggatgggcaacttcgtaaccaacactcacctgggctgcgtcaatgacaggaaaaaacaactgcgacagctcttttgttcgctgcaggtccaaaaaaaggcctccagctag

SEQ ID NO: 23190 - DNA, 1607 bp, Artificial Sequence
  derived and/or modified sequence
gaggtgggggcgggggccttaccccaccctggcaccggcaggcgcgggcggatggggggatgtcgcctagagccccccggccggcccacaaactcccgtcccccttccggctctgcctggacgtccctgcgggccccgggggaaagcacccaacttctcccgcctcggcttctagcagaaacgtgacggggctggactttgatcgccgagggctctctgctcttcagagtctgcttggaacgggataagagggatggtgccatccagggaagctctgctgggaccaggcacaactgccattaggtgccccaagaaattacagaaccaaaattacaagggccatggattgtcaaagggaaaagagcgagagcagagagcatcgatccggttcaagaccaccctcatgaacacactcatggacgtccttcgccacaggccaggatgggtggaagtgaaggacgaaggggagtgggatttctactggtgtgacgtcagctggctccgggagaacttcgaccacacctacatggatgaacatgtgcggatcagtcacttccggaaccactatgagctgacccggaagaactacatggtgaagaacctgaagcggttccggaagcagctggagcgtgaggcaggaaagctggaggcagccaagtgtgacttcttccccaaaacctttgagatgccttgcgagtaccacctgtttgtagaggagtttcgcaaaaacccaggaatcacctggatcatgaagcctgtagcccggtctcaagggaaaggcatcttcctcttccgtaggctgaaggacatcgtggactggaggaaggacacaagaagctctgacgaccagaaagatgatattcccgtggagaactatgtggctcagcgttacattgaaaatccttacctgataggaggccgcaagtttgacctgcgtgtctatgtgctggtgatgtcggtgtttgctgaatgcctgctgtggtctgggcacaggagacaggatgttcacctcaccaacgtggctgtgcaaaaaacatctcccgactaccacccaaagaagggctgcaagtggacgctgcagcgcttccggcagtacctggcgtccaaacacgggcccgaggcagtggagacactcttcagggacatcgacaacatctttgtcaaaagcctgcagagtgtgcagaaggtgatcatcagtgacaagcactgcttcgagctgtacggctatgacatcctcatcgaccaggacctcaagccgtggctcctggaggtcaatgcgtccccatcactgacagccagcagccaggaagactatgagctcaagacctgcctcctggaagacaccctgcatgttgtggacatggaagcgaggctcacgggaagggagaagcgagtcgggggctttgacctcatgtggaatgatggccctgttagcagagaggagggggctcctgacctgtcgggaatgggaaactttgtgaccaacacacatctcggctgcgtcaacgatcggaagaaacaactgaggcagctcttctgctcccttcaagttcagaagaaagcttccagttgatccccagctgccaggaggaaatcagccttagcag

SEQ ID NO: 23191 - protein, 488 aa, Artificial Sequence
  derived and/or modified sequence
MPEEMDKPLISLHLVDSDSSLAKVPDEAPKVGILGSGDFARSLATRLVGSGFKVVVGSRNPKRTARLFPSAAQVTFQEEAVSSPEVIFVAVFREHYSSLCSLSDQLAGKILVDVSNPTEQEHLQHRESNAEYLASLFPTCTVVKAFNVISAWTLQAGPRDGNRQVPICGDQPEAKRAVSEMALAMGFMPVDMGSLASAWEVEAMPLRLLPAWKVPTLLALGLFVCFYAYNFVRDVLQPYVQESQNKFFKLPVSVVNTTLPCVAYVLLSLVYLPGVLAAALQLRRGTKYQRFPDWLDHWLQHRKQIGLLSFFCAALHALYSFCLPLRRAHRYDLVNLAVKQVLANKSHLWVEEEVWRMEIYLSLGVLALGTLSLLAVTSLPSIANSLNWREFSFVQSSLGFVALVLSTLHTLTYGWTRAFEESRYKFYLPPTFTLTLLVPCVVILAKALFLLPCISRRLARIRRGWERESTIKFTLPTDHALAEKTSHV

SEQ ID NO: 23192 - DNA, 1467 bp, Artificial Sequence
  derived and/or modified sequence
atgcccgaggagatggacaagcccctgatcagcctgcacctggtggacagcgacagcagcctggccaaggtgcccgacgaggcccccaaggtgggcatcctgggcagcggcgacttcgccagaagcctggccaccagactggtgggcagcggcttcaaggtggtggtgggcagcagaaaccccaagagaaccgccagactgttccccagcgccgcccaggtgaccttccaggaggaggccgtgagcagccccgaggtgatcttcgtggccgtgttcagagagcactacagcagcctgtgcagcctgagcgaccagctggccggcaagatcctggtggacgtgagcaaccccaccgagcaggagcacctgcagcacagagagagcaacgccgagtacctggccagcctgttccccacctgcaccgtggtgaaggccttcaacgtgatcagcgcctggaccctgcaggccggccccagagacggcaacagacaggtgcccatctgcggcgaccagcccgaggccaagagagccgtgagcgagatggccctggccatgggcttcatgcccgtggacatgggcagcctggccagcgcctgggaggtggaggccatgcccctgagactgctgcccgcctggaaggtgcccaccctgctggccctgggcctgttcgtgtgcttctacgcctacaacttcgtgagagacgtgctgcagccctacgtgcaggagagccagaacaagttcttcaagctgcccgtgagcgtggtgaacaccaccctgccctgcgtggcctacgtgctgctgagcctggtgtacctgcccggcgtgctggccgccgccctgcagctgagaagaggcaccaagtaccagagattccccgactggctggaccactggctgcagcacagaaagcagatcggcctgctgagcttcttctgcgccgccctgcacgccctgtacagcttctgcctgcccctgagaagagcccacagatacgacctggtgaacctggccgtgaagcaggtgctggccaacaagagccacctgtgggtggaggaggaggtgtggagaatggagatctacctgagcctgggcgtgctggccctgggcaccctgagcctgctggccgtgaccagcctgcccagcatcgccaacagcctgaactggagagagttcagcttcgtgcagagcagcctgggcttcgtggccctggtgctgagcaccctgcacaccctgacctacggctggaccagagccttcgaggagagcagatacaagttctacctgccccccaccttcaccctgaccctgctggtgccctgcgtggtgatcctggccaaggccctgttcctgctgccctgcatcagcagaagactggccagaatcagaagaggctgggagagagagagcaccatcaagttcaccctgcccaccgaccacgccctggccgagaagaccagccacgtgtag

SEQ ID NO: 23193 - DNA, 432 bp, Artificial Sequence
  derived and/or modified sequence
atggagatctacctgagcctgggcgtgctggccctgggcaccctgagcctgctggccgtgaccagcctgcccagcatcgccaacagcctgaactggagagagttcagcttcgtgcagagcagcctgggcttcgtggccctggtgctgagcaccctgcacaccctgacctacggctggaccagagccttcgaggagagcagatacaagttctacctgccccccaccttcaccctgaccctgctggtgccctgcgtggtgatcctggccaaggccctgttcctgctgccctgcatcagcagaagactggccagaatcagaagaggctgggagagagagagcaccatcaagttcaccctgcccaccgaccacgccctgagccccctgggcttcctgttcctggtggtgcagagcggcatcaccgtgtgcaagtag

SEQ ID NO: 23194 - DNA, 1467 bp, Artificial Sequence
  derived and/or modified sequence
atgcccgaggagatggataagccccttatttccctgcacctggtggatagcgattccagcctggctaaagtgcctgatgaggctcccaaggtggggattttgggctccggcgatttcgcgcggtcgctggcaaccaggctggtcgggtctggcttcaaggtggtcgtgggctctcgcaatcctaagcgaacggccaggcttttcccatccgccgcccaagttaccttccaggaggaagcggtgtcttcacctgaagtcatattcgtcgcagtctttcgagagcattacagtagtctgtgttccctctccgaccagctcgctgggaagatactcgtcgacgtatctaaccctaccgagcaggaacacctgcagcaccgtgaaagcaatgcagagtacctcgcctctttgttccctacgtgcaccgtggttaaggcattcaatgtaatctctgcatggactctgcaggctggtcctcgcgacggaaaccggcaggtgccaatctgcggggatcaacctgaggccaagagagcagtgtcagagatggctctggccatgggcttcatgcccgtcgatatgggttccctcgctagtgcttgggaagttgaagccatgccgctgaggcttttacccgcttggaaggtgcctaccctcctagccctgggcctgtttgtttgtttctacgcttacaacttcgtcagggatgtgctacagccatacgtccaggaatcccagaataagtttttcaaactgcctgtgagcgtcgtgaataccaccttgccgtgcgttgcttacgtgctgttgtccctggtgtacctgccaggggtactcgccgccgccctccaactccggcggggtactaaatatcaacggtttcccgactggcttgatcattggctgcagcataggaagcagatcgggctcctcagttttttttgcgcagcactgcatgccttgtatagcttttgtcttcccttgcgtcgcgctcacaggtacgacctcgtaaatctggctgtgaagcaagtcctggccaataaatcacatctgtgggttgaggaagaggtgtggagaatggaaatctatctgtccctgggagtcctggccttaggaacactttctttgcttgctgtcacatcactgcctagcatcgccaattccctcaactggcgagaattttcttttgtccagagcagtctagggtttgtagcccttgtgctgtctacattacataccctgacctatggctggacccgggcctttgaagaaagtcggtacaagttttatctgccacctaccttcactctaactcttcttgtgccgtgcgtggtgatcttagcaaaagccctgttcctcctcccctgcatttcccgtaggctggcaagaatccggcgcggatgggaaagggaaagcacaattaagtttacgctgcccaccgatcacgcgctggcagaaaagacatcccacgtttag

SEQ ID NO: 23195 - DNA, 1467 bp, Artificial Sequence
  derived and/or modified sequence
atgcccgaggaaatggataagccgcttatttcccttcacctggtagacagcgattccagtctggccaaagtgccagatgaggcccctaaagttggcattctcgggagtggcgactttgcacgaagcctggcaactcggttggtcggatccgggttcaaagtagttgtcggctcccgtaaccctaagaggaccgcacgccttttccctagcgcagctcaggttacatttcaggaggaggctgtgagttctcctgaggtcatttttgtggcggtgttcagggagcactacagctccctctgttctctctctgaccagctggctgggaaaatactagtggacgtttcaaaccctactgaacaggagcacctgcagcacagagaaagtaatgcggagtacctggccagcttgttccctacctgcaccgtcgtgaaggcttttaacgtcatctccgcatggaccctccaggccggcccaagggatgggaatcggcaagtcccaatttgcggggatcaacctgaggcaaaaagggccgtgtccgaaatggccctggcaatggggtttatgccagtggatatgggctctctcgcctccgcttgggaggttgaggctatgcctctccgtcttcttcctgcttggaaggtcccgacattactggctctgggactgttcgtttgcttctacgcttataactttgtgcgggatgtattacagccctacgtgcaggagtctcaaaataaatttttcaagcttcctgtgagtgtcgtaaatacaacactgccctgtgtggcatacgtgctgctctcacttgtctacctgcccggagtccttgctgcggctcttcaattaaggagagggactaagtatcagaggtttcctgattggttggaccactggctccaacaccgaaagcagattggactgctgagtttcttctgcgcagccttgcatgctttgtattctttttgcttgcccctacgccgagctcacaggtatgacctcgtcaatcttgctgtgaaacaggtgcttgcaaacaaatcacatctctgggttgaggaagaggtctggcggatggagatctacctgagtttaggggtgctcgctctggggaccctgtctcttttagctgtgacatcgctcccctccatcgctaactccctcaattggcgcgagttctcattcgttcaatcctcactggggttcgtcgcattggtactttcaacactccacactttgacttatgggtggactagggcattcgaggaatcaagatacaaattttatttgcctcctaccttcaccctgacccttttggtcccatgcgttgttatcctggcaaaggctttattcttgcttccatgtatatcaaggcggctagcgcgcatacggagagggtgggaacgcgagtctacaattaaatttacactacctacagatcatgcactggcggaaaagacctcccacgtgtag

SEQ ID NO: 23196 - DNA, 1467 bp, Artificial Sequence
  derived and/or modified sequence
atgcctgaggaaatggataaaccattgatcagccttcacctcgttgactccgattcatccctggctaaggtgccagatgaagccccgaaagtaggaatcttgggatctggagactttgcccggagccttgccacacggctcgtgggttcgggattcaaagtcgtagtgggttctcgtaaccccaagcgtactgcaaggctgtttccgtcggctgctcaagtcacctttcaagaggaggctgtttcttcccctgaagtgatcttcgtcgccgtttttagggagcactacagtagcctgtgctctctgtctgaccagcttgcaggcaagatactagttgatgttagcaacccaactgagcaggaacacctacagcaccgggagtcaaatgccgaatatcttgcctccctgtttcccacttgcactgtggtcaaagctttcaatgtcatcagcgcctggacgttgcaggctgggcctcgagacgggaacaggcaagttcctatctgcggtgatcaacccgaggccaaaagagccgtttccgaaatggctctggccatgggttttatgcccgttgatatggggagcttggcctcggcttgggaggtggaggcaatgcctttgagattgctcccagcgtggaaggtgccgactctcctggctttgggcctgttcgtgtgcttctatgcatacaactttgtgagggacgtactgcagccttatgtgcaggaaagccagaataagtttttcaaattgccggtgagcgtggtgaatactacccttccttgcgtcgcatacgtgctactgagtctggtctatcttcccggcgttttggcagcagcgttacagctccgaagaggaacaaagtatcaaaggtttcctgattggctcgaccactggttacaacataggaagcagattggtctcctttcctttttctgtgctgctttacatgccctgtatagcttctgcttgccactgagacgtgcacaccgttacgacttagtgaatttagccgttaagcaggtacttgcgaataagagccatctgtgggtggaggaggaggtgtggcggatggagatatatctctctctgggcgttctggccctaggaaccctgtcccttctggcagtgacctccctgccatctattgcaaattctctgaattggagggaattctctttcgtacagagctcacttggcttcgtggcgcttgtcctctctacactgcacacattgacctacggctggaccagagcctttgaggagagccgatataagttttacctgccacccacatttacgctgacactgctggtgccatgcgtcgtgatcctggccaaagctttatttctgctgccgtgcatcagtcgccgcctcgcccggattaggaggggctgggaaagggaaagcacaatcaaattcaccctgcccaccgatcacgcacttgcggaaaaaaccagccacgtgtag

SEQ ID NO: 23197 - DNA, 1467 bp, Artificial Sequence
  derived and/or modified sequence
atgcctgaggagatggacaagcccctgatatccctccatctggtggacagcgattcaagcttggcaaaggtccctgacgaagcccctaaagttgggatcttaggatctggagactttgcccgcagcctggccacccggctggtgggtagcgggtttaaagtggtggtcggctcacgcaatccaaaaaggaccgcccgcctcttcccgtccgccgcccaggtcacattccaggaggaggcagtgtctagcccagaagtcatctttgtagctgtgtttagggaacactactcgagtttgtgttccctgtccgatcaattagctggcaagatcctggtagacgtgtccaaccccaccgaacaggaacacctccagcaccgcgagagtaacgctgaatacctggcatctctgttccccacatgcactgttgtcaaggcgttcaacgtcatatctgcctggaccctgcaagcaggaccaagggacggaaaccgacaagtcccaatatgtggggaccaacccgaggctaaacgcgctgttagcgaaatggccttggccatgggatttatgcctgtcgacatgggtagtctggctagtgcctgggaggtggaagcaatgcccttaagattacttccagcctggaaggtcccgacactgctggcgctgggactcttcgtgtgcttctacgcctacaactttgtgagggatgtgctccaaccctacgtgcaagaaagtcagaataaattttttaagctgcccgttagtgttgtgaacactaccttgccctgtgttgcgtatgtgcttctgtctctggtgtacctgcctggggtacttgcagcggctctccaacttcgacgaggaaccaaataccagcgttttccagactggctggatcactggctccagcacaggaagcaaatcggactgctttctttcttctgtgccgccctgcacgctctttattccttctgcctgccactgcggcgcgcccaccggtacgatctggtgaacttggctgtgaagcaggtcttggccaacaaaagccacttgtgggtggaagaagaagtttggcgcatggagatctaccttagcttaggcgtcctggctctgggcactctgtcgttgctggccgtcacgagccttcccagtatcgccaatagtctcaactggagggagttctctttcgttcagtccagcctggggtttgtggctctggtgctgagcaccctgcataccctcacttatggatggactagggcatttgaggagagccgctacaagttctacttgccccctacttttactctgactctgctcgtcccttgtgtggttattctcgctaaggctctgtttctgctgccatgcatttcccgcagactcgcccgaattagacgaggatgggagcgtgagagtaccattaagttcaccctcccaacagatcacgcactagccgagaagacaagccacgtgtag

SEQ ID NO: 23198 - DNA, 1467 bp, Artificial Sequence
  derived and/or modified sequence
atgccggaagagatggataaacctctgatcagcctccatttggtggattcagacagctcgctggcaaaggtgcccgatgaagcgccgaaggtgggaatcctggggtctggagattttgcacggtcactcgccacccggttggtgggctccggttttaaggtagtcgtcggctcacgcaatccgaagaggaccgctcggttatttccttctgccgcccaagttacattccaggaagaggctgtttcgtcacctgaggttattttcgttgccgtgtttagagaacattactcctcattatgttctttgtcggaccagctggcagggaagattcttgtggatgtctcaaaccctacggagcaagagcatctccaacaccgtgagtcaaatgcagagtatctcgcctccctgtttcccacttgcaccgtagtcaaggccttcaacgtgattagtgcctggacattacaggctggcccccgagacgggaatagacaggtgcctatctgtggggaccagcctgaggcaaaaagagccgtgtccgagatggccctggcgatgggcttcatgcccgtggacatggggtctctggcctccgcttgggaggtcgaagccatgcccctgcgtctattgcctgcgtggaaggtaccaactctgttagccctcggtctattcgtttgcttttatgcttacaacttcgttcgggacgttcttcaaccatacgtccaggagtctcagaacaaattctttaaacttcccgtgtctgtcgtcaacactactctgccctgcgttgcgtatgtgctgctcagcctggtctatcttccgggggtgttggctgccgcccttcaactgcggagaggcaccaagtaccaacggttccccgactggttggaccattggctccagcaccggaagcagattggtctcctttccttcttctgcgcggcgcttcatgctctttacagtttttgtttgcccttgcggcgggctcacagatacgacctcgttaatcttgctgtgaaacaggtccttgcaaacaagtcacacctatgggtggaagaagaggtatggagaatggaaatctacttgtcactaggagttcttgccctgggcactctcagcctgctggccgtgaccagcctgccatctatcgctaacagccttaactggcgcgagttcagtttcgtgcagtcaagcctcggcttcgtcgcactggtcctgtccactctacacactttgacctatgggtggactcgcgcgtttgaggaatctaggtacaaattctatttacctcctacattcacactgactttgctcgtgccttgcgttgtaattttggctaaagccctgtttctactcccatgtatcagcaggaggcttgcacgaattcgcagaggatgggagcgggagtctactattaaatttacactacctaccgatcacgctttggcagaaaagaccagccacgtatag

SEQ ID NO: 23199 - DNA, 432 bp, Artificial Sequence
  derived and/or modified sequence
atggaaatttatctgagtctcggggtgttggctctggggacattgagcctgctggcagtaacttccttgccaagcattgcgaacagtctgaactggagagagttctcttttgtgcaatcaagtctcggcttcgtggcactagtgctgagcacacttcacaccctcacctacggctggacaagagccttcgaggagtccaggtacaaattctatctcccccccacatttaccctcacactgctagtgccctgcgtggtgattctggcaaaggccctttttctcctcccctgtatttcaagacgcttggctcggatacgtaggggatgggagcgggagagcaccataaagttcaccttacctacagaccatgccctgagtccgcttgggttcctgttcctggtagtccagagcggaattactgtctgtaagtag

SEQ ID NO: 23200 - DNA, 1467 bp, Artificial Sequence
  derived and/or modified sequence
atgcctgaggagatggacaagcccctcatcagcctgcacctggtggacagcgacagcagcctggccaaggtgcctgatgaggcccccaaggtgggcatcctgggcagcggggactttgcccggagcctggccacccggctggtgggcagcggcttcaaggtggtggtgggcagcaggaaccccaagaggacagcccggctcttccccagcgctgcccaggtgaccttccaggaggaggccgtgagcagccctgaggtgatctttgtggccgtgttccgggagcactacagcagcctgtgcagcctgagtgaccagctggccggcaagatcctggtggatgtgagcaaccccacagagcaggagcacctgcagcaccgggagagcaatgctgagtacctggccagcctcttccccacctgcaccgtggtgaaggccttcaacgtcatcagcgcctggaccctgcaggccggccccagagatggcaaccggcaggtgcccatctgtggggaccagcctgaggccaagagagctgtgtctgagatggccctggccatgggcttcatgcctgtggacatgggcagcctggccagcgcctgggaggtggaggccatgcccctgcggctgctgcctgcctggaaggtgcccaccctgctggccctgggcctgtttgtgtgcttctacgcctacaactttgtgagagatgtgctgcagccctacgtgcaggagagccagaacaagttcttcaagctgcctgtgtctgtggtgaacaccaccctgccctgtgtggcctacgtgctgctgagcctggtgtacctgcccggggtgctggccgccgccctgcagctgcggcggggcaccaagtaccagcgcttcccagactggctggaccactggctgcagcacaggaagcagatcggcctgctgtccttcttctgtgccgccctgcacgccctgtacagcttctgcctgcccctgcggcgggcccacagatatgacctggtgaacctggccgtgaagcaggtgctggccaacaagagccacctgtgggtggaggaggaggtgtggaggatggagatctacctgagcctgggcgtgctggccctgggcaccctgagcctgctggccgtgaccagcctgcccagcatcgccaacagcctgaactggagggagttctcctttgtgcagagcagcctgggctttgtggccctggtgctgagcaccctgcacaccctgacctacggctggacccgggcctttgaggagagccgctacaagttctacctgccccccaccttcaccctgaccctgctggtgccctgtgtggtgatcctggccaaggccctcttcctgctgccctgcatcagccggcggctggcccgcatccggcggggctgggagcgggagagcaccatcaagttcaccctgcccacagaccacgccctggccgagaagaccagccacgtgtag

SEQ ID NO: 23201 - DNA, 432 bp, Artificial Sequence
  derived and/or modified sequence
atggagatctacctgagcctgggcgtgctggccctgggcaccctgagcctgctggccgtgaccagcctgcccagcatcgccaacagcctgaactggagggagttctcctttgtgcagagcagcctgggctttgtggccctggtgctgagcaccctgcacaccctgacctacggctggacccgggcctttgaggagagccgctacaagttctacctgccccccaccttcaccctgaccctgctggtgccctgtgtggtgatcctggccaaggccctcttcctgctgccctgcatcagccggcggctggcccgcatccggcggggctgggagcgggagagcaccatcaagttcaccctgcccacagaccacgccctgagccccctgggcttcctgttcctggtggtgcagagcggcatcaccgtgtgcaagtag

SEQ ID NO: 23202 - DNA, 1467 bp, Artificial Sequence
  derived and/or modified sequence
atgcccgaggagatggacaagcccctgatcagcctgcacctggtggactccgattcttctttagctaaggtccctgacgaggctcctaaggttggaatcctgggcagcggtgacttcgcgcggagcttggccacacgactggttggttctgggttcaaggtcgtcgtgggtagccgaaatcctaagaggacagctcggctcttccccagtgcagcccaggtcaccttccaggaagaagctgtttcttcccccgaagtgatcttcgtagccgtgtttagggagcattacagctccctgtgtagtcttagcgatcagctggctggtaagatcctggtggatgtgagcaatcccacagagcaggagcacctacagcaccgcgagtcgaatgccgaatacctggcctccctgttccccacatgtactgtcgttaaggcttttaatgtaatttctgcatggactctgcaggcaggcccacgagacggaaacagacaggtgcccatttgtggggatcaaccagaggctaaacgcgcagtgagcgagatggccctggctatggggtttatgcccgttgatatggggagtctggcatcggcctgggaagtggaagccatgccacttaggctgcttccagcctggaaggtgcctacgttactagccctgggtttgttcgtgtgcttttatgcctacaattttgtgcgggatgtgttgcagccttacgtccaggaatctcagaacaagttcttcaaactgccagtgagtgtggtgaacaccacattgccttgcgtagcatatgttctgctcagtcttgtgtatctgcccggcgtgttagcggcggccctccagctcagacggggtaccaagtaccagagatttcctgactggctggaccactggctccaacacagaaaacaaatcggtctgctaagcttcttttgtgcagctttgcacgccctttactctttctgcctgccactgaggcgggcgcaccggtatgacttggtgaatctggccgttaaacaggtgctggctaataaatctcacctgtgggtggaagaagaagtgtggagaatggaaatatacctgtcccttggagtgttagccctcggtacattatcgttactggccgtgacatcgcttccttccatcgccaactcactgaattggcgggaattttcttttgtgcaatcctccctcggtttcgtggccctggtgctgtcgacgctgcacactctcacatacgggtggacccgggcgttcgaagagtcccgatacaagttttaccttcccccaaccttcactctgacactcctggtcccctgcgtcgtaattttagctaaagccctgttcctgctgccctgcatttcgcgtcggctggcacgaattcgccgcgggtgggagcgcgagagcacgatcaagttcactttgccaacagatcatgccctagcagagaaaacctcacacgtatag

SEQ ID NO: 23203 - DNA, 1467 bp, Artificial Sequence
  derived and/or modified sequence
atgcccgaggagatggacaagcccctgatcagcctgcacctggtggattccgatagtagccttgccaaggtgcctgacgaagcacccaaggtcgggatcctcggctcaggggatttcgctcggtcccttgctacacggctggtggggagcgggttcaaggtcgtggtcggtagtcgaaaccctaaacggaccgctcgcctgtttcccagcgctgcccaggtaacttttcaagaagaggcggtgtcctccccggaggtgatttttgtggccgttttcagagaacactattccagcctgtgcagccttagtgatcaactggccgggaaaatacttgttgatgtgtccaatcctaccgagcaggaacatcttcagcatcgggaatccaacgccgagtatcttgcctctctgttcccgacttgcacggtggttaaagcctttaatgttattagcgcctggactttgcaggccgggcctagggatggtaacagacaggtgccaatttgcggcgatcagcccgaagctaagagggctgtgagcgaaatggcattagcgatgggcttcatgcctgtggatatggggtccctggccagtgcgtgggaggtagaggcaatgccacttcggctcctgcccgcatggaaagtgcccaccttgctggcattgggtctcttcgtgtgtttttacgcctacaatttcgtcagggacgttctgcagccctacgtacaggagagtcaaaacaaattttttaaactgcctgtgagtgtagtgaatacgaccttaccctgtgtagcttatgtgttactgtctctcgtttacctgccaggggttctggcagcagccctccagttgcggcggggtacaaagtatcaacggtttcccgattggcttgaccactggctgcagcataggaaacagattggcttgctctctttcttttgcgccgccctgcatgcgctctattcattttgtttgcccctgcgaagggcccaccgttacgatctggtgaacctggccgttaagcaggtactggcaaacaagtcccacctttgggttgaagaagaggtctggcgaatggagatctacctaagcctgggcgttttagccctcggtacccttagtctcctcgctgttacttcactcccgagtattgcaaattcacttaattggcgggagtttagtttcgtgcaaagctctctcgggttcgttgccctggtgctgtccaccctgcatacactgacgtacggttggactcgagctttcgaggagtctcggtataagttctatttgcctccaacatttaccctgactcttttggtcccttgcgtcgtcattttagcgaaagctctattccttctgccttgcatctctagaaggctagccagaattcggcggggctgggagagagagagtaccataaagttcactctacccacggatcatgcacttgctgaaaagacaagccatgtgtag

SEQ ID NO: 23204 - DNA, 1467 bp, Artificial Sequence
  derived and/or modified sequence
atgcccgaggagatggacaagcccctgatcagcctgcacctggtggattcagatagtagtctggctaaagtccccgatgaggcccccaaagtgggcattctcgggagtggcgatttcgcgcggagcctggcaactagactggtcggaagcgggtttaaggtcgtcgtgggaagccgcaaccccaagaggacagcccgcttgtttccatcagccgctcaggtgacttttcaggaagaagcagtatcgtcaccagaggtgatcttcgtcgcagtgttcagggaacattacagctcactctgttccctctctgatcagcttgcgggcaagattctggtagacgtgtctaatcctaccgagcaggaacacttacagcaccgggaaagtaatgccgagtacctggccagcctcttcccgacatgcaccgtcgtaaaggctttcaatgtgatttctgcctggaccttacaagctggtcccagggatggcaaccgtcaggttcccatttgtggggaccagcccgaggccaagagagccgttagtgaaatggccctcgcaatgggattcatgcccgtggatatgggctcccttgccagcgcctgggaagtcgaagcaatgcccctgaggctgttaccagcatggaaagtgcccaccttgctcgccctgggactgtttgtgtgcttttacgcatataacttcgtgcgcgacgttctgcagccctacgtccaggagtcccagaataaattcttcaagttgcctgtgtccgttgtaaacacgaccttgccctgtgtggcctacgttctcctgtcgttggtttacctccctggggttctggccgctgccctgcaattgagaagaggtactaagtatcagaggttcccagattggcttgaccactggctacagcatcgcaaacaaatcggattactgtcttttttctgcgccgcactccacgccctctattcattttgcctgcctctacggcgggcacataggtatgacctggtaaatctagctgtaaagcaggtcttggccaataagtctcacctgtgggtggaagaagaggtctggcgtatggagatatacctctccctgggtgtgttggccctgggtaccctgagcctgttggcagtgactagcctgccctctatagctaatagtctcaactggagagagtttagttttgtgcagagtagtctgggatttgtggccctcgtcttatccaccctgcataccttgacctatggttggactcgcgcctttgaagagagccggtacaagttttacttacctcctacatttacacttacccttctggttccctgcgtggtgattctggcaaaggccctgttcctgttaccctgtatctcacgccggttggccagaatcagacgagggtgggagcgggagtctacgatcaagttcactctccctaccgatcacgcattagcggagaagacctcgcacgtgtag

SEQ ID NO: 23205 - DNA, 1467 bp, Artificial Sequence
  derived and/or modified sequence
atgcccgaggagatggacaagcccctgatcagcctgcacctggtggactctgactcatcgttggcaaaggttcccgacgaagctcctaaggtgggcattctcgggagcggagatttcgcccgatccctggccactaggctggttggatccggcttcaaggttgtggtaggttctcgaaatccaaaaaggacagcacgcttattcccctctgcagcacaagtaacattccaagaagaagcggtctcttcccccgaggtcatttttgtggccgtttttcgagagcactactcctcactgtgcagcctctccgaccagctagccggaaaaatcttggttgacgtgtccaacccgactgagcaggagcatctgcaacacagagagtccaacgcagaatatctagcgagcctcttcccaacctgcacggtcgtaaaggccttcaatgtaattagcgcctggactctgcaggccggaccacgggacggtaaccggcaggtgccgatctgcggggatcagccggaagctaaaagagccgtgagcgaaatggccctggccatgggattcatgccagtggatatgggatcattagcaagcgcctgggaagtggaagctatgccactgagacttctccctgcttggaaagttccgactttgctggccttagggttattcgtttgtttttatgcatataatttcgttcgagatgtgttacagccatacgtccaagagtcccagaacaagttcttcaaactgcctgtatcggtggtgaatactacgctgccttgtgtggcatacgtgctgctttctttggtgtatctcccaggagtgctggctgccgccctgcagctgcgcaggggcaccaagtaccagcgcttccccgattggttggatcactggcttcagcaccgaaagcagattggcttactgtccttcttctgtgcggccttgcatgcattatactccttctgcttaccactcagacgagcacataggtatgacctagttaatctggcggttaaacaggttctcgccaacaaaagccacttgtgggtcgaagaagaggtgtggagaatggagatatatcttagcctgggagtcttggcactgggtactctctcactgctggcagtaacatccctgcccagtattgctaacagtctgaattggcgtgaattcagctttgttcagtcatccctgggatttgtcgccctggtcctaagcaccttgcacacactgacctacgggtggaccagagccttcgaggaatcaagatacaaattctaccttcctccaaccttcaccctcaccttgctggtcccctgcgtcgtcatccttgccaaagctctgttcttgcttccctgtatctccagaaggctggcccgcattcggagggggtgggaacgagagtccactatcaaattcactctgccaacagatcatgcactggctgaaaaaacctctcacgtctag

SEQ ID NO: 23206 - DNA, 1467 bp, Artificial Sequence
  derived and/or modified sequence
atgcccgaggagatggacaagcccctgatcagcctgcacctggtggactcagatagcagtcttgctaaggtgccagacgaagctccaaaagtggggatcttggggtcaggagactttgcccggtcactcgccactagacttgtcggctcaggcttcaaggtggtcgtgggaagcaggaaccctaaaagaaccgcccggctctttccatctgcagcacaagtaaccttccaagaagaggctgtgagctctcctgaagtgatcttcgtcgcagtatttcgcgaacactactcttctctatgctctctttccgatcagctcgcgggcaaaatattggttgatgtgtcaaatcccaccgaacaggaacacctacaacatagagagtccaacgcagaatatcttgcttcactgttcccaacgtgtactgtggtgaaggcatttaacgttataagtgcttggaccttgcaggcaggacctcgagacggaaacagacaggtgcctatctgcggcgaccagcccgaggccaagcgcgccgtctccgaaatggccctcgccatgggattcatgcccgtggatatgggctcattggcctccgcctgggaggtggaggctatgccgttgcgcctcctgcctgcctggaaggtcccgacgctactggcactcggtttattcgtgtgcttctacgcctataacttcgtccgagacgtactgcagccctacgtgcaagaaagccaaaataagttcttcaaactgcccgtgtccgtcgtgaacactaccctcccatgcgtggcatatgtactcctctcacttgtgtacctgcccggcgtgttggctgccgcactgcaactccgccgaggaactaagtaccagaggtttcccgattggcttgaccactggctacagcaccgaaagcaaattggccttctgtcatttttttgcgcagcacttcacgctctttatagcttttgtcttccactgcgacgcgcccaccgctacgatctggtcaacctcgccgtgaagcaggtgctggccaataaatcacacctttgggtcgaggaagaagtgtggagaatggagatctacctgtccctgggcgttctcgcactcgggaccctgagcctcctggccgtcacatcactgccttcaatagcaaacagcttgaattggcgcgaattcagcttcgtacagtcaagtctcggttttgtggctcttgtgttgtcaacactccacaccctcacctacgggtggactcgagcatttgaagagtccagatacaaattttaccttcccccaacctttaccctgactcttctggtgccttgtgtcgtgatcttggccaaagcactgttcttgctgccttgcatttcccgccgcttggcgcggatacggcgcgggtgggagagggagagcacaattaagtttacactccccactgatcacgctctcgcagagaagacaagtcacgtttag

SEQ ID NO: 23207 - DNA, 432 bp, Artificial Sequence
  derived and/or modified sequence
atggagatctacctgagcctgggcgtgctggccctgggcaccctgtctttgctggccgtgacctccctgcctagcatcgctaattctctgaattggagggaattttccttcgtgcagtcctcactgggttttgtagccctggtgctcagcacgcttcataccctgacctacgggtggacccgtgcattcgaagaatccagatacaaattttatctgccaccaacattcacattaactttacttgtcccttgcgtcgttatccttgcgaaagccttgtttctcttgccctgcatctctcggcgattagcccggattcggagagggtgggagcgtgagagtactattaagttcacacttcctaccgaccatgcattgtctccattaggttttctgttcctggtggtacagtcaggaattaccgtgtgtaagtag

SEQ ID NO: 23208 - DNA, 1467 bp, Artificial Sequence
  derived and/or modified sequence
atgccagaggagatggacaagcctctcatatcactccacctcgtggacagtgactcatccctggctaaagtacctgacgaggcaccaaaggttggcatccttggttctggggacttcgctcgatctcttgctacacgcttagttggcagcgggttcaaggtggtggtcggtagcaggaacccgaaacgcactgccaggctgtttccctctgccgctcaggtgacttttcaggaagaggccgtgtcttctcccgaagtcatttttgttgctgtgtttcgcgaacactacagttccctgtgttctctctctgatcagctagcaggtaaaattctggtggatgtctcaaatccaaccgagcaggaacacctccaacaccgtgagagcaacgcagaatatctggcaagcctgtttcccacctgtacagtggtcaaggccttcaacgtgatttcagcctggacgcttcaagccggaccccgtgacggcaataggcaggtccctatttgcggggaccaacccgaggcgaagcgagccgtatccgaaatggccctcgccatgggcttcatgccagtagatatgggatctttggctagcgcttgggaagtagaggcaatgcctctgcggctgctgccagcctggaaagtgcctactctgttggctctgggcctttttgtgtgtttctatgcatacaattttgtgcgagacgtactgcagccctacgttcaagagtcccaaaacaagttttttaaactgcccgtgtcagtcgtcaacaccacattgccctgcgtggcatatgtgttgctgagcttagtgtacctcccaggcgttctagcagcagcgctgcagttacgtcggggaaccaagtaccagcgttttcccgattggttggaccactggttgcagcatcgtaagcagataggcttattgtccttcttctgtgctgcactgcacgctctttatagtttttgtctccctttaaggcgcgctcatagatatgatcttgtgaacctcgccgtgaagcaggtattagctaacaaatcacacctgtgggtcgaggaagaagtctggaggatggaaatttatctgagcctgggcgtgctggctctggggaccctgagccttctcgctgtaacctctctgccatcgatcgccaatagcctcaactggcgggaattttctttcgtccagagctctttgggtttcgttgccttggtgctgtcaactttacatacactcacctatgggtggactcgggctttcgaggagtcaaggtacaagttctacctgcccccaaccttcacacttacactgctcgtgccctgtgtggtgatattggctaaggcactgttcttgctcccttgcatttcccgtcggttagcccgaatcaggagaggttgggagagagagtccacaattaaatttacactgcctacagaccacgcgttggccgaaaaaacctcacacgtgtag

SEQ ID NO: 23209 - DNA, 1467 bp, Artificial Sequence
  derived and/or modified sequence
atgcctgaagagatggataaaccacttattagcctgcatcttgtcgacagcgattcctccttagccaaggtgcccgacgaggctccaaaggttggaattcttggcagtggcgatttcgcccgaagtctggctactcgcctggttggcagtggatttaaggttgttgttggttccagaaaccctaaacggactgctcggctcttcccaagcgccgctcaggtgactttccaggaggaggctgtctcgagcccagaagtgatttttgtcgctgtcttcagagaacactacagcagcctctgctcgctgagtgaccagttggccggtaagattttggtcgatgtgtccaatccaaccgaacaggagcacctccagcaccgggaatccaatgccgagtatttggcgtcgctttttccaacttgtaccgttgtgaaggcctttaacgttattagcgcttggactctgcaggccggtcccagagacggaaaccgacaggtgccgatttgcggcgaccagcccgaagctaaaagagctgtctccgaaatggcgttggctatgggctttatgcccgtcgatatgggctctctggcaagcgcctgggaagtggaggctatgccactgcgcttacttcctgcttggaaggtgcccacactcttggccctcggtcttttcgtgtgtttctacgcgtacaactttgtgcgggacgtgttacagccctacgttcaggaatcccaaaataagttcttcaagcttccagttagcgttgtgaatactaccctaccctgtgttgcttacgttctcttgagcctagtatatctgcccggagtcctggcagctgccctgcagctgcgtcggggaacaaagtaccagaggtttcccgactggctcgaccactggttacagcaccgcaaacagatcggactcctctcattcttttgtgccgcactgcatgcactctacagtttctgcctgcctctgaggcgggctcacaggtacgatctcgttaaccttgcagtgaaacaggtgctcgccaataaatctcacctatgggtggaagaggaggtgtggaggatggagatttacctgtcactcggcgtactcgccctgggtacactttcactcctggccgttaccagcctgcccagcatcgcaaattctctaaattggcgcgagttctccttcgtacagtcctccttaggttttgtagccttggttctgtctactctccacaccctgacctatgggtggacgcgggcattcgaagagagtcggtataagttctacctgcccccaacgttcaccctgaccctcctggtaccatgcgtcgtaattcttgccaaggctctgttcctcctcccatgtatctcacgtcggcttgccagaatccgcagaggctgggaacgcgagagcaccattaagttcacactgcccacggaccatgctctcgcagaaaagacaagccatgtgtag

SEQ ID NO: 23210 - DNA, 1467 bp, Artificial Sequence
  derived and/or modified sequence
atgcctgaggaaatggataaacctctaatttcgctgcatttagtggactcagactcctccctggccaaggtccctgatgaagcccctaaggtggggattttgggttcgggagattttgcgcgatcactcgccacacggctggtgggctcgggatttaaagtagtggttggcagccggaatcctaagagaacagccagactgtttcccagcgctgcccaagtaaccttccaggaggaggcagtgtcatctccagaggtgattttcgttgctgtgttccgggagcattatagctctctgtgctcactatccgaccagctggcagggaaaatccttgtagatgtgtccaaccctacagagcaggaacacctgcagcacagggaatcaaacgctgagtatctggcctcacttttccccacttgcaccgtggttaaggcatttaatgtgatctcagcctggacactacaggccggacccagggatggcaaccggcaggtcccgatctgtggcgatcagccagaggctaagagagccgtctccgagatggccctggcaatgggtttcatgccagtagacatggggtctctggcttctgcctgggaggtcgaagcaatgcccttgcgcctgctcccggcatggaaggttccgacgctgttggccctgggactgtttgtgtgtttctacgcatataatttcgtcagagatgtcctgcagccatatgtccaagagtcccagaataaattctttaagctacctgtttctgtcgtgaacacaaccctcccctgcgttgcctacgtgctcttgtcgctggtctatttgcccggagtgctcgcagccgctctgcagcttaggaggggcaccaagtatcaaaggttccccgactggctagaccactggctgcagcacagaaagcaaattgggcttttatcattcttctgcgcagccttgcacgcgctctattccttctgtttaccactgcgcagagcacacaggtacgacctggtgaatctcgctgttaagcaggtccttgccaataaatcacacctgtgggtcgaagaagaggtatggaggatggaaatttacctcagcttgggagtgctcgcactcggaaccctgtctctgcttgcagtgacctcactcccttctatcgccaatagtctgaattggagagagttctcttttgtgcaatcttccctgggatttgtcgcgttagttctgagcaccttgcacaccctgacttacggttggacaagggcctttgaggagtcgcgttataaattttacctcccccctacattcaccctaacactgctcgtcccatgcgtagttatcttggcaaaggcactcttcttactgccttgcatcagtagaaggctggcgaggattcggcgtggttgggaacgagagtccaccattaaatttacattgccgactgatcacgcgttggctgaaaagacgtcgcatgtctag

SEQ ID NO: 23211 - DNA, 1467 bp, Artificial Sequence
  derived and/or modified sequence
atgcctgaggaaatggacaagccgctgatctcactgcatctggttgactcggatagctccttggccaaagtgccagatgaagcacctaaagtagggatcctcggatctggtgactttgcgaggagtttggccacccgtctcgtaggcagtggatttaaagtggtagtgggctcaaggaaccctaagaggaccgccaggctcttcccctcagccgctcaggtcacatttcaggaggaggccgtgagcagtccggaggttatctttgttgctgtcttcagggagcactactcatcgctgtgcagtcttagtgatcagctggcgggaaagatcctcgttgacgtttcaaaccccacagaacaagaacatcttcagcatcgggagtcaaacgccgagtatttagcaagtttattccccacctgtaccgtggtcaaggcttttaacgtcatcagtgcctggacactccaggctggccctcgtgacggcaatcggcaggtaccaatttgcggcgaccagcctgaggcgaaaagagcagtctcggagatggccctggcgatgggcttcatgccagtcgatatgggctcgctggcaagcgcatgggaggttgaagccatgcctctcagattgctccctgcctggaaagtgccaaccttgctcgccctcgggctatttgtgtgtttctatgcctataatttcgtacgcgacgttctgcagccatacgtgcaagaaagtcagaataaattcttcaaactcccagtgtcggtagttaacactaccttaccatgcgtagcttacgtcctgctgagtctggtgtaccttcctggcgtgctcgccgcagctttacagctcagaagaggtacaaagtaccagaggttcccagactggctggaccactggctacagcatagaaaacagataggactcctctcattcttctgtgccgctcttcacgcgctgtatagtttctgccttcctctgcgcagagcccatagatacgacctcgtgaatctcgccgtaaaacaggttcttgctaacaaatcccacctctgggtcgaggaggaagtgtggcgcatggaaatctatttgagtctgggtgtactcgctctgggcacgctgtccctccttgccgtgacatcactcccctcaatagccaacagtctgaattggagggagttctcctttgtgcagtcctctcttggttttgtagcgcttgtgctatccactctgcacaccctgacttatggatggacgcgtgcgttcgaagaatccaggtacaagttttatctgcctccaacattcacccttaccctgctggtcccctgtgtcgtgattttagccaaggccctttttctactcccatgtatttcacgtagactggccagaataaggagaggctgggagagagagtccacgatcaagttcacgctgcccaccgaccacgcactggctgagaaaacctcacacgtatag

SEQ ID NO: 23212 - DNA, 1467 bp, Artificial Sequence
  derived and/or modified sequence
atgccagaggaaatggataagccactgatatcccttcacctggtggattcagactccagtttagccaaggtgccagatgaagcgcctaaggttggcattctagggagcggagactttgccaggtccctggcaacaagactggtaggctcagggtttaaggtcgtagttgggagccgcaaccccaaacggacagctagattatttccctcggcggctcaggtcacttttcaggaggaagccgtgtcaagcccggaggtgattttcgtggccgtgtttagagaacattatagctcgctgtgtagcctttctgatcagcttgccggaaagatccttgtcgacgtgtccaatccgacagagcaggagcacctccagcacagggaatcaaacgcagaatatttagcctccctgtttcccacctgcaccgttgtcaaggcttttaatgtgatatctgcctggacgttacaagcgggaccgagggacggtaaccgtcaggtcccaatctgcggtgatcagcccgaggccaaaagagctgtgtcagaaatggcactcgctatgggctttatgcccgtagatatgggcagtctggcatctgcctgggaagtcgaggccatgcccttgcggctgctgccagcatggaaagtacctacgctactggccttggggctctttgtgtgcttttatgcctacaactttgtgcgggatgtcttgcaaccttacgtgcaggaatctcagaataagttcttcaagcttcctgtctccgtggtcaatacaacgttaccctgtgtagcgtacgtcctgctgtctctagtgtatctcccaggggttcttgcagcagccctccaacttagacgtggtacgaagtaccagcgattccctgattggctggatcattggctgcagcacaggaagcagatcggcctgctgtccttcttttgcgctgccctgcacgccctatactctttttgcctgcctttgcgtagagcccatagatacgatcttgtgaatctggcagtcaaacaggtgcttgctaacaagtcacatctctgggtcgaagaagaggtgtggaggatggagatctatctaagtctgggtgtcctggccctcgggacactcagcctccttgccgtgacctccctgccatctatagcaaattccctgaattggcgggaattcagttttgtccagtcttcgctcgggtttgtggccctggtgctctcgactctacatacgttaacatacggatggactcgcgcttttgaggagagcaggtataaattctaccttccaccaacattcacccttacgctgttggtcccatgcgtggttatcctggccaaggctctatttctgctgccatgcattagcagaaggctggctaggattcgacggggatgggagcgggaaagtaccataaagtttactcttcctaccgaccatgcccttgcagaaaagacttcccacgtatag

SEQ ID NO: 23213 - DNA, 432 bp, Artificial Sequence
  derived and/or modified sequence
atggaaatttacctgtccttgggagtcctcgctcttggcacgctttcactgctcgcagtcacttctctcccctccattgctaactcgctgaattggagagaatttagtttcgttcaatcctccctcgggttcgtggctttggtcttatccaccctgcataccttgacgtatggctggacccgggcttttgaggaatctcgctacaagttctacctgccgccaacatttactctcactcttcttgtcccctgtgtagtcatccttgctaaggctctgttcttgctcccatgcatctcaagaagacttgccagaatacgtagagggtgggagagggagtctactatcaaattcactcttcctactgaccatgccctgagcccactagggtttctgttccttgttgtgcaatcaggaattaccgtgtgcaagtag

SEQ ID NO: 23214 - DNA, 2826 bp, Artificial Sequence
  derived and/or modified sequence
ctggctggaccactggctacagcaccgcaagcagatcgggctgctcagcttcttctgcgccgccctgcacgccctctacagcttctgcttgccgctgcgccgcgcccaccgctacgacctggtcaacctggcagtcaagcaggtcttggccaacaagagccacctctgggtggaggaggaggtctggcggatggagatctacctctccctgggagtgctggccctcggcacgttgtccctgctggccgtgacctcactgccgtccattgcaaactcgctcaactggagggagttcagcttcgttcagtcctcactgggctttgtggccctcgtgctgagcacactgcacacgctcacctacggctggacccgcgccttcgaggagagccgctacaagttctacctgcctcccaccttcacgctcacgctgctggtgccctgcgtcgtcatcctggccaaagccctgtttctcctgccctgcatcagccgcagactcgccaggatccggagaggctgggagagggagagcaccatcaagttcacgctgcccacagaccacgccctgagcccgttaggttttcttttcttggtggtgcaaagtggtataactgtgtgcaaataggaggtttgaggtccaaattcctgggactcaaatgtatgcagtactattcagaatgatatacacacatatgtgtatatgtatttacatatattccacatatataacaggatttgcaattatacatagctagctaaaaagttgggtctctgagatttcaacttgtagatttaaaaacaagtgccgtacgttaagagaagagcagatcatgctattgtgacatttgcagagatatacacacactttttgtacagaagaggcttgtgctgtggtgggttcgatttatccctgcccaccccacccccacaacttcccttttgctacttccccaaggctcttgcagagctagggctctgaaggggagggaaggcaacggctctgcccagagccatccctggagcatgtgagcagcggctggtctcttccctccacctggggcagcagcaggaggcctggggaggaggaaaatcaggcagtcggcctggagtctgtgcctggtcctttgcccggtggtgggaggatggagggattgggctgaagctgctccacctcatccttgctgagtgggggagacattttccctgaaagtcagaagtcaccatagagcctgcaaatggatcctcctgtgagagtgacgtcacctcctttccagagccattagtgagcctggcttgggaacaagtgtaatttccttccctcctttaacctggcgatgagcgtcctttaaaccactgtgccttctcaccctttccatcttcagtttgaatgactcccaggaaggcctagagcagaccctttagaaatcagcccaagggggagagcaagagaaaacactctagggagtaaagctccccgggcgtcagagttgagccctgcctgggctgaaggactgtcttcacgaagtcagtcctgaggaaaaatattggggactccaaatgtcctctggcagaggacccagaaaaccacactggctccaacttcctcctcatggggcattacacttcaaaacagtggggagcaacttttccaccaaagctacaaacctaaaatgctgctgccccaaagcacaagagggaagagcaccgccggggccacaggacgtctgtcctccagtcacaggccatccttgctgctccctactgactctagcttacttcccctgtgaagaaacaggtgttctcggctgagcccccaaccctctgcagaaccaggttgatctgccacagaaaaagcatctttgaagacaaagagggtgaggtcttcatgagtctcctgggcccaaagccatcttctgatggaaggaagagagtagggccagtgaaggctgcccagagagaatgtcacagatgaggctgcccctgccccccccccgccagggaggtttcatgagctcatgtctatgcagcacataagggttcttcagtgaaaagcaggagaagagcccactgcaaggatagctcattaggcacatgaccgatgcagggaaggccatgccggggaagctcttcctgcaggtattttccatctgctgtgccaaggctgagcggcagaaacttgtctcataaattggcactgatggagcatcagctgtggcccacagagagccttgctgagaagggggcaggtaaagcagagattttagcattgccttggcataacaagggcccatcgattccctactaatgagaggcagggagagcatgggcaatggagacccaccaatgatccccaaccccggtgggtactggctgcctgccctgggccagggaatggctccttataccaaagatgctggcacatagcagaacccagtgcacgtcctccccttcccacccacctctggctgaaggtgctcaagagggaagcaattataaggtgggtggcaggagggaacaggtgccacctgctggacaatcacacgaaaggcaggcgggctgtgtactgggccctgactgtgcgtccactgctgtcttccctacctcaccaggctactggcagcagcatcccgagagcacatcatctccacagcctggtaaattccatgtgcctctgggtacaaaagtgcctcaacgacatgctctggaaatcccaaatgccacagtctgaggttgatatctaaaatctatgccttcaaaagagtctctgttttttttttttaacctggtagacagtataaaagcagtgcaaataaacacctaaccttctgc

SEQ ID NO: 23215 - protein, 148 aa, Artificial Sequence
  derived and/or modified sequence
MSKQQPTQFINPETPGYVGFANLPNQVHRKSVKKGFEFTLMVVGESGLGKSTLINSLFLTDLYPERVIPGAAEKIERTVQIEASTVEIEERGVKLRLTVVDTPGYGDAINCRDCFKTIISYIDEQFERYLHDESGLNRRHIIDNRVHC

SEQ ID NO: 23216 - protein, 131 aa, Artificial Sequence
  derived and/or modified sequence
MSKQQPTQFINPETPGYVGFANLPNQVHRKSVKKGFEFTLMVVGESGLGKSTLINSLFLTDLYPERVIPGAAEKIERTVQIEASTVEIEERGVKLRLTVVDTPGYGDAINCRDCFKTIISYIDEQFERYLH

SEQ ID NO: 23217 - protein, 173 aa, Artificial Sequence
  derived and/or modified sequence
MSKQQPTQFINPETPGYVGFANLPNQVHRKSVKKGFEFTLMVVGESGLGKSTLINSLFLTDLYPERVIPGAAEKIERTVQIEASTVEIEERGVKLRLTVVDTPGYGDAINCRDCFKTIISYIDEQFERYLHDESGLNRRHIIDNRVHCCFYFISPFGHGLKPLDVAFMKAIHN

SEQ ID NO: 23218 - DNA, 1086 bp, Artificial Sequence
  derived and/or modified sequence
atgagtaagcaacagcccactcagtttatcaatcccgaaacacctggttacgttggcttcgccaacctgcctaaccaggtgcaccgaaaaagtgttaagaaagggttcgagttcacactcatggtcgttggtgaatcaggactgggcaagtccactctcattaatagtctattcctgaccgatctctatcccgaacgcgtaatacccggagccgctgaaaagatcgagaggacagtccagatagaagcatccaccgttgagattgaggaaagaggagtaaagcttagactgactgttgtggacacacccggctatggggacgccattaactgtcgagattgcttcaagaccatcatcagctacattgatgaacagttcgaacgatatctccatgacgagtcagggctgaataggcgacacattatcgataaccgagtgcactgttgcttttacttcataagcccatttggccacggcttaaagccgctggacgttgcttttatgaaggccatacacaataaggttaatatcgtacccgtgatcgcaaaggctgacaccctgacgttgaaagaacgcgaacggcttaaaaagaggatcctggacgaaatcgaagagcacaacatcaaaatctaccatctgcccgacgctgagtcagacgaggacgaggatttcaaggaacaaacgaggctgctcaaggcctccataccatttagcgtggtgggatcaaaccagctcatagaggccaaagggaaaaaagtgcgtggcaggctgtatccatggggtgtggtggaggtcgagaatccagagcataacgacttcttgaagctgagaaccatgctcatcacacatatgcaggatctgcaggaggtcacacaggatttgcactacgaaaactttcggtctgagaggctgaagagaggaggacgcaaggtagaaaacgaggacatgaacaaggatcagatcctgctggagaaggaggcagaactccggagaatgcaggagatgatcgcaaggatgcaggcacagatgcagatgcagatgcagggaggggacggagacgggggggcgctcggtcaccatgtctag

SEQ ID NO: 23219 - DNA, 1086 bp, Artificial Sequence
  derived and/or modified sequence
atgtccaaacagcagcccacccagttcattaacccagagacccccggttacgtgggcttcgcaaacctccccaaccaggtgcacaggaaatccgtgaagaaaggatttgaatttaccctcatggtcgttggcgagtcagggcttggcaaaagcaccctgatcaactctctgttcttgacggacctgtacccagagcgtgtgatacctggtgcagcagaaaagatagaaagaaccgttcaaattgaagctagcactgtggaaattgaagaacgcggagtgaagctgaggcttaccgtggtggatacgcccggttatggcgacgccatcaattgccgggactgcttcaaaacaattatttcctatatagacgaacagtttgagaggtacttacacgatgagtcgggacttaataggagacacatcatcgacaatcgtgttcactgctgtttttactttatttctcccttcggccacgggcttaagcctctcgacgtggcctttatgaaagctatccataacaaagtcaacattgtgccggtgatcgccaaggctgacactctgactttgaaggagcgcgagaggctcaaaaagagaattttggatgagattgaagaacataatattaaaatttatcacctcccagacgctgaaagcgacgaagacgaggactttaaggagcagacccgtcttctgaaagcatccattccattctccgtggtaggatcaaaccagctgattgaggcaaagggcaagaaagtgagagggaggctttatccctggggtgtggtcgaggtggaaaaccccgagcataacgacttccttaaactaagaaccatgctgattacacacatgcaggatcttcaagaggttacgcaggatcttcattacgagaattttaggtcagagcgattgaagcgcgggggacggaaggttgaaaacgaggatatgaacaaggaccagatcctattggaaaaagaagcagaactgcgacgcatgcaggaaatgatagctagaatgcaggctcaaatgcagatgcagatgcagggcggcgatggagatggaggggcactgggacaccacgtatag

SEQ ID NO: 23220 - DNA, 1086 bp, Artificial Sequence
  derived and/or modified sequence
atgagcaagcagcaacccactcagttcatcaaccccgaaactccgggctatgtggggttcgcaaacctgcccaatcaggtgcatcgaaagtccgttaaaaagggatttgaatttaccctcatggtagttggagaatccggccttggcaagtctactcttatcaactctcttttcctgactgatctataccccgagagggttatccctggcgctgcagagaaaattgaacggacggtgcagattgaagcttcgacggtggagatcgaggagcggggcgtgaagctccgtttgactgtcgttgacacccccgggtacggcgatgccattaactgccgtgactgtttcaagactatcatttcgtacattgatgaacagtttgagagatatctgcacgatgagtccgggctcaaccgaagacatattattgacaatagggtccattgctgtttctatttcatctctcctttcgggcacggtttgaaacccctcgacgttgctttcatgaaagctatccacaataaagtcaatattgtgccggtgatagcaaaggcagacaccctgaccctcaaagaaagggagagattgaagaagaggatcctcgatgagattgaggaacacaacataaagatctaccatctgccggacgcagagtcagatgaggatgaggacttcaaagaacagacccggctgctgaaggcctctattccattttcagtggtgggctcaaatcagctgatagaagcgaaggggaagaaggtgcggggcaggctttacccatggggggtagtcgaagtggaaaatcccgagcataatgattttttaaaactgaggacgatgcttataacacatatgcaggatctccaggaggtcacacaggatctgcattacgagaattttaggtcagagcgtcttaaaagaggaggaagaaaggtcgagaatgaggacatgaacaaagaccagatacttctggagaaggaggctgaattaagacgaatgcaggaaatgatcgcgcgcatgcaagcccaaatgcagatgcaaatgcagggaggagatggtgacggcggtgcactcggtcaccacgtctag

SEQ ID NO: 23221 - DNA, 1086 bp, Artificial Sequence
  derived and/or modified sequence
atgagcaagcagcagcctacccagttcatcaaccctgaaaccccgggctacgtgggttttgcaaatctccccaatcaggtccaccgaaagtccgttaagaaaggcttcgagtttactctgatggttgttggagagtctggtttaggaaagtccaccttgatcaacagcttgttcttgacagacctgtatcccgagagagtgataccaggggccgctgagaagatagagcgtacagtacagatcgaagccagcactgtggagatcgaggagcgaggggtgaagctgaggcttaccgtggtggacacccctgggtacggcgacgcaattaattgtcgggattgcttcaaaacaatcatttcctacatcgacgagcagtttgaacgatacctgcacgacgagtccggactgaaccgcagacatatcatcgataatagagtccattgttgtttttacttcatcagtcccttcgggcatggccttaaaccccttgatgtagcctttatgaaggccatccataacaaagtgaacatagtgccagtgattgcgaaagctgacacccttaccctcaaggaacgagagaggctgaagaaaaggattctcgacgaaatcgaggagcataacattaagatttaccatttacccgacgccgagagcgacgaggacgaagactttaaggaacagactaggctgctgaaggcctctatccctttcagcgttgtaggtagtaatcaactaattgaagcgaagggcaagaaggtgaggggacggctctacccctggggcgtcgtagaagtggagaacccagagcataacgattttctcaaattaagaaccatgctgattacccatatgcaggatctccaagaggtgactcaagatttgcattacgagaactttaggtctgaacgcctgaagaggggcggccgtaaagttgagaatgaagacatgaacaaagaccaaattcttctggaaaaagaagccgaacttagacgcatgcaggagatgatcgccagaatgcaggctcagatgcaaatgcagatgcaagggggggacggtgacgggggagctctggggcatcacgtctag

SEQ ID NO: 23222 - DNA, 159 bp, Artificial Sequence
  derived and/or modified sequence
atgagcaagcaacaaccgacacagttcatcaatccagagaccccaggctacgtgggctttgcaaatctgcccaaccaggtgcaccggaagtccgttaagaaggggttcgagtttaccttgatggtggtcggagaatctggcctgggcaaaagcacatag

SEQ ID NO: 23223 - DNA, 153 bp, Artificial Sequence
  derived and/or modified sequence
atgtccaagcagcagcccacacagtttattaatcccgagacacctggctatgtcgggtttgctaatctgcctaaccaggttcaccgcaagtccgttaagaagggttttgagtttaccctgatggtcgttggagaatcaggtctgggcaaatag

SEQ ID NO: 23224 - DNA, 447 bp, Artificial Sequence
  derived and/or modified sequence
atgagcaagcaacagcccactcagttcataaaccctgagacaccggggtacgtggggtttgcgaatctgcccaaccaggtccatcgtaaatcagtcaagaagggattcgaattcaccctgatggtggtgggggagagcggcctgggcaagtcaacccttatcaattcccttttcctgaccgacctgtacccggagcgggttatccctggcgctgctgaaaagatcgaaagaaccgttcagatagaagcgagtaccgtggaaatcgaggagagaggcgttaaattgcggttgactgtggtcgatacgcccggatatggcgacgccatcaactgtagggattgttttaaaactataatttcctatattgatgagcagtttgagaggtacttgcacgacgagtcgggcttaaatagacgacacatcatcgacaatagggttcactgttag

SEQ ID NO: 23225 - DNA, 396 bp, Artificial Sequence
  derived and/or modified sequence
atgagcaaacaacagcccactcagttcattaacccagagactccaggctacgtggggtttgcaaacctgcccaaccaagtccaccggaaatctgtgaaaaagggcttcgagttcacactcatggtcgtgggcgaaagcggccttggtaagtccactctgataaattcgctcttcctcaccgacctctaccctgagagggtcatacctggggctgctgagaaaatcgagagaactgtgcagatcgaggcctcaacagtggagatcgaggagcgaggggtgaaactaaggttgacagtggtcgacacgcctgggtacggggatgccatcaactgcagagactgtttcaagaccattatctcttatatcgacgagcagtttgaacggtatctgcactag

SEQ ID NO: 23226 - DNA, 219 bp, Artificial Sequence
  derived and/or modified sequence
atgtctaagcagcaaccaacccagttcattaatcctgagacccctggatatgtcggttttgccaacctgccaaatcaggtacaccggaagtcagtcaagaagggatttgaattcaccctgatggtcgtaggagaaagtgggctcgggaaatcaaccctaataaactctctcttcctcacggacctctatccggaaagggtgattccaggagctgcgtag

SEQ ID NO: 23227 - DNA, 219 bp, Artificial Sequence
  derived and/or modified sequence
atgtctaagcagcagcccacacaattcatcaatcctgaaacccccggctacgtcggttttgctaacctacctaaccaagtgcaccgcaaaagcgtcaaaaagggctttgaattcaccctcatggtggtcggagagtcagggttagggaaaagcacgctaatcaactccctcttcctgaccgacctgtaccccgaaagggtgatcccaggagctgcgtag

SEQ ID NO: 23228 - DNA, 522 bp, Artificial Sequence
  derived and/or modified sequence
atgagcaagcagcagcccactcagttcataaatcctgagactcctgggtatgtgggctttgccaatcttccgaatcaggtgcaccggaaatccgtcaagaaaggctttgagttcaccctgatggtagtgggcgagtctggcctcggcaaaagcacactcattaatagtctcttcttgacggacctgtatcccgaaagggtgattccaggtgccgctgaaaaaatcgagcggactgtccaaatagaagccagtaccgtagagattgaagaaaggggcgttaagctcaggctcacagtcgtcgacacaccaggctacggggacgcaattaactgccgcgactgttttaaaacaatcatttcttacatcgatgagcagttcgaaaggtacctgcacgacgaatccggtctgaaccgccgccacattatcgacaacagggtacattgctgtttttacttcattagcccctttggtcatgggctcaaaccccttgatgtggccttcatgaaagcaattcacaactag

SEQ ID NO: 23229 - DNA, 1086 bp, Artificial Sequence
  derived and/or modified sequence
atgagcaagcagcagcccacccagttcatcaaccctgagaccccaggctacgtgggctttgccaacctgcccaaccaggtgcacaggaagtctgtgaagaagggctttgagttcaccctgatggtggtgggggagagcggcctgggcaagagcaccctcatcaacagcctcttcctgacagacctgtacccagagagggtcatccctggagctgctgagaagattgaaagaacagtgcagatcgaggccagcacagtggagattgaggagcggggcgtgaagctgcggctgactgtggtggacaccccaggctatggagatgccatcaactgccgggactgcttcaagaccatcatctcctacattgatgagcagtttgagcgctacctgcatgatgagagcggcctgaacagaagacacatcatcgacaacagagtgcactgctgcttctacttcatcagccccttcggccacggcctgaagcccctggatgtggccttcatgaaggccatccacaacaaggtgaacatcgtgcctgtgattgccaaggctgacaccctgaccctgaaggagcgggagcggctgaagaagaggatcctggatgaaattgaggagcacaacatcaagatctaccacctgcctgatgctgagagtgatgaagatgaggacttcaaggagcagacccggctgctgaaggccagcatccccttctctgtggtgggcagcaaccagctgattgaggccaagggcaagaaggtgcggggccgcctgtacccctggggcgtggtggaggtggagaaccctgagcacaatgacttcctgaagctgcggaccatgctgatcacccacatgcaggacctgcaggaggtgacccaggacctgcactatgagaacttccgctctgagcggctgaagagaggaggcaggaaggtggagaatgaagacatgaacaaggaccagatcctgctggagaaggaggccgagctgcggaggatgcaggagatgattgccaggatgcaggcccagatgcagatgcagatgcagggcggagatggagatggaggagccctgggccaccacgtgtag

SEQ ID NO: 23230 - DNA, 159 bp, Artificial Sequence
  derived and/or modified sequence
atgagcaagcagcagcccacccagttcatcaaccctgagaccccaggctacgtgggctttgccaacctgcccaaccaggtgcacaggaagtctgtgaagaagggctttgagttcaccctgatggtggtgggggagagcggcctgggcaagagcacctag

SEQ ID NO: 23231 - DNA, 153 bp, Artificial Sequence
  derived and/or modified sequence
atgagcaagcagcagcccacccagttcatcaaccctgagaccccaggctacgtgggctttgccaacctgcccaaccaggtgcacaggaagtctgtgaagaagggctttgagttcaccctgatggtggtgggggagagcggcctgggcaagtag

SEQ ID NO: 23232 - DNA, 447 bp, Artificial Sequence
  derived and/or modified sequence
atgagcaagcagcagcccacccagttcatcaaccctgagaccccaggctacgtgggctttgccaacctgcccaaccaggtgcacaggaagtctgtgaagaagggctttgagttcaccctgatggtggtgggggagagcggcctgggcaagagcaccctcatcaacagcctcttcctgacagacctgtacccagagagggtcatccctggagctgctgagaagattgaaagaacagtgcagatcgaggccagcacagtggagattgaggagcggggcgtgaagctgcggctgactgtggtggacaccccaggctatggagatgccatcaactgccgggactgcttcaagaccatcatctcctacattgatgagcagtttgagcgctacctgcatgatgagagcggcctgaacagaagacacatcatcgacaacagagtgcactgctag

SEQ ID NO: 23233 - DNA, 396 bp, Artificial Sequence
  derived and/or modified sequence
atgagcaagcagcagcccacccagttcatcaaccctgagaccccaggctacgtgggctttgccaacctgcccaaccaggtgcacaggaagtctgtgaagaagggctttgagttcaccctgatggtggtgggggagagcggcctgggcaagagcaccctcatcaacagcctcttcctgacagacctgtacccagagagggtcatccctggagctgctgagaagattgaaagaacagtgcagatcgaggccagcacagtggagattgaggagcggggcgtgaagctgcggctgactgtggtggacaccccaggctatggagatgccatcaactgccgggactgcttcaagaccatcatctcctacattgatgagcagtttgagcgctacctgcactag

SEQ ID NO: 23234 - DNA, 219 bp, Artificial Sequence
  derived and/or modified sequence
atgagcaagcagcagcccacccagttcatcaaccctgagaccccaggctacgtgggctttgccaacctgcccaaccaggtgcacaggaagtctgtgaagaagggctttgagttcaccctgatggtggtgggggagagcggcctgggcaagagcaccctcatcaacagcctcttcctgacagacctgtacccagagagggtcatccctggagctgcctag

SEQ ID NO: 23235 - DNA, 522 bp, Artificial Sequence
  derived and/or modified sequence
atgagcaagcagcagcccacccagttcatcaaccctgagaccccaggctacgtgggctttgccaacctgcccaaccaggtgcacaggaagtctgtgaagaagggctttgagttcaccctgatggtggtgggggagagcggcctgggcaagagcaccctcatcaacagcctcttcctgacagacctgtacccagagagggtcatccctggagctgctgagaagattgaaagaacagtgcagatcgaggccagcacagtggagattgaggagcggggcgtgaagctgcggctgactgtggtggacaccccaggctatggagatgccatcaactgccgggactgcttcaagaccatcatctcctacattgatgagcagtttgagcgctacctgcatgatgagagcggcctgaacagaagacacatcatcgacaacagagtgcactgctgcttctacttcatcagccccttcggccacggcctgaagcccctggatgtggccttcatgaaggccatccacaactag

SEQ ID NO: 23236 - DNA, 1086 bp, Artificial Sequence
  derived and/or modified sequence
atgagcaagcagcagcccacccagttcatcaaccccgagacccccggctacgtcgggtttgccaatcttcccaatcaggtgcatcggaaatccgtgaaaaaggggttcgagtttactctcatggttgtgggagagtccggcttgggtaagtcgacactcatcaatagcctgttcttgacagacttgtatcccgagcgggtgatccctggcgcagccgaaaagatagaaagaacagtgcagatcgaggccagcacagtggagatagaggagcgcggagtgaagctgagactcactgtggtagacactccgggctacggcgatgctattaattgtcgggactgttttaagacgattatcagctacatagatgaacaattcgagaggtatctccatgacgaatctggtttgaatcggagacatattattgacaaccgcgtacattgctgcttttattttatctcacccttcgggcacggtctgaaacctctggacgtagccttcatgaaggcaatccataacaaagtgaatattgtccccgtcatcgctaaggccgacacgctgaccctgaaagaaagggagcggctgaagaaaagaattctggacgagatcgaagaacacaatattaagatttaccacttgcctgacgcggaaagtgacgaagatgaagacttcaaagaacagacccgtcttctcaaggcatctatacccttctcggtcgtggggagcaatcagctcatcgaggcaaaagggaagaaagtgcgaggccgcctatatccctggggagtcgttgaggtcgagaaccctgagcataatgactttctgaaacttcgtaccatgttaatcacgcatatgcaggatttacaggaagttacacaagatctacattatgaaaactttcggagcgagcgtctgaaacgaggaggaaggaaggtggaaaatgaggacatgaacaaagaccaaatcttgcttgagaaagaagccgaactgagacgaatgcaggagatgatagccagaatgcaggcacagatgcaaatgcagatgcagggaggagacggcgatggtggtgctctaggtcatcacgtgtag

SEQ ID NO: 23237 - DNA, 1086 bp, Artificial Sequence
  derived and/or modified sequence
atgagcaagcagcagcccacccagttcatcaaccccgagacccccggctacgttggctttgcgaatttacccaatcaggtccataggaagtctgtaaaaaaaggctttgaattcaccctaatggtggtgggtgaaagtggacttggcaaatccacgctgataaattctctcttcctcacagacttgtaccctgagagagttattccgggagcagccgagaaaattgagaggacagtacaaatagaagcgtctactgtcgagatcgaagaaaggggagtgaagctccgtctgacagtcgtggacaccccgggatacggagatgccattaattgcagggattgctttaaaaccattatctcctatatcgacgagcagtttgaaagatacctgcacgacgaatctggtctaaataggagacacattatagataacagggtgcattgttgcttttacttcatcagtccttttggccatggactgaagccgttggatgtggcttttatgaaggccatccacaataaggtgaatattgttcctgttatcgccaaggctgacactctgactctcaaagagagggagcgactcaagaaaaggattctggacgaaatcgaggaacacaatataaaaatctaccatctgccagacgccgaatctgatgaggacgaggactttaaagagcagacccgattgcttaaggcgtccattcccttctcagtggtggggagcaaccagttgattgaggccaagggcaagaaggtgagggggcgtctgtacccgtggggcgtggtcgaggttgaaaaccccgagcataatgactttttgaagttgagaactatgcttataacgcatatgcaagacctgcaagaggttacccaggacctgcactacgaaaatttcaggtctgagaggctcaagcggggcgggcgcaaggtggagaatgaggacatgaataaggaccagatcttactcgaaaaagaggcagaattgagaagaatgcaggagatgatcgccagaatgcaggctcaaatgcagatgcagatgcagggcggggacggagatggtggggccctaggccatcatgtctag

SEQ ID NO: 23238 - DNA, 1086 bp, Artificial Sequence
  derived and/or modified sequence
atgagcaagcagcagcccacccagttcatcaaccccgagacccccgggtacgtggggtttgcaaacctcccaaatcaggtccaccggaagagcgtgaaaaagggctttgagttcacactgatggttgtgggcgaaagtggcctcggaaagtccaccctgatcaattcccttttcctaacagatctgtatcctgaaagggtaataccaggagcagccgagaaaattgaaaggacagtgcagatcgaagcctcaacggttgaaatcgaagaacgaggcgtaaagctgcggctgaccgtagttgacacccccggctatggcgacgcaattaattgccgggattgtttcaaaacgattatatcctacatcgacgagcaatttgaaagatacctccacgatgagtccggtctcaaccgcagacatataatagacaatcgcgttcattgttgcttttactttattagccctttcggccacggactgaaaccgctggacgtggcatttatgaaggcgatccataataaggttaacatagtcccggtcattgccaaggctgacactctgaccttaaaagaaagagagcgcctaaagaaacggatactggacgagatagaggagcacaacataaagatctatcatctgccggatgccgagagtgacgaagatgaagacttcaaggaacaaacgcgattgctgaaagcctctattcccttcagtgtggtcggctcgaatcagctgatcgaggccaaggggaagaaagttcgcggccggctttacccgtggggagtcgtcgaggtggagaatcctgagcacaacgacttcctcaagctgaggacaatgctcatcacccatatgcaagaccttcaagaagtgacccaggaccttcactatgaaaactttcgatccgaacgtcttaaacggggtggacgaaaagtcgagaacgaggatatgaataaagaccagatcctcttggagaaggaggcagaactgagaagaatgcaggaaatgatcgccagaatgcaagcgcagatgcagatgcagatgcagggaggggatggggatggtggcgccctaggtcaccacgtctag

SEQ ID NO: 23239 - DNA, 1086 bp, Artificial Sequence
  derived and/or modified sequence
atgagcaagcagcagcccacccagttcatcaaccccgagacccccggctatgtcggcttcgcaaatctgccaaatcaggttcatagaaaatccgtgaaaaagggattcgagttcaccctgatggttgtgggcgagagtgggctgggcaaaagcacactcattaactcactctttctcactgacctgtaccctgagcgggttattccgggagccgccgaaaagatagaacggactgtgcagatagaggcttctactgtcgagatcgaagagcgtggggtgaagttgagactcactgttgtggacacaccggggtatggggacgccatcaactgccgggattgctttaagactatcattagttatatcgacgagcagtttgagcgctacctgcacgatgagtctggacttaataggagacatattatagacaatcgcgtgcactgctgcttttacttcatctcaccttttggccacggtttaaagccactggatgtagccttcatgaaggcaatccacaacaaagtgaatatcgttcccgtgattgctaaagccgataccctcactctcaaagaacgcgagaggctgaagaagaggatcttggatgaaatcgaggagcacaatataaagatctatcacctgcccgacgccgaaagcgacgaggacgaagatttcaaagaacaaactaggctgctgaaagcttctatccctttctcggtggtgggatcaaaccaactcattgaggccaaaggcaaaaaggttaggggacggctgtacccatggggcgtagtcgaggtggagaatcctgaacataatgatttcctgaaactgcggacaatgctgatcacccacatgcaggatttgcaagaggtgacccaggacctccactatgagaactttcggtccgagcggctgaagcgggggggccgtaaagttgagaacgaagatatgaacaaagaccagattcttctggaaaaagaggcagaactcaggcgaatgcaagagatgatcgcgcgtatgcaggcacagatgcaaatgcagatgcagggtggagatggagatggcggcgcactgggacatcatgtgtag

SEQ ID NO: 23240 - DNA, 159 bp, Artificial Sequence
  derived and/or modified sequence
atgagcaagcagcagcccacccagttcatcaaccccgagacccccggctatgtgggctttgctaaccttcccaaccaggttcatcgtaaaagcgtgaagaagggctttgaatttacattgatggtcgtgggagaaagcgggttgggaaagtctacttag

SEQ ID NO: 23241 - DNA, 153 bp, Artificial Sequence
  derived and/or modified sequence
atgagcaagcagcagcccacccagttcatcaaccccgagacccccggctatgttggctttgctaacctaccaaaccaggtccaccggaagagcgtcaagaaagggttcgaatttaccctcatggtcgtcggggagtcagggcttggcaaatag

SEQ ID NO: 23242 - DNA, 447 bp, Artificial Sequence
  derived and/or modified sequence
atgagcaagcagcagcccacccagttcatcaaccccgagacccccggctatgtcggattcgccaatctccccaaccaggtgcatcggaagtctgtcaaaaagggatttgaatttacactaatggttgtaggagagagcgggttaggcaaaagtacgctcattaattccctgttcctgactgacctctaccccgagagagtgataccaggcgcagcagaaaagatagaaagaacagtccaaatcgaagctagcactgtagagatcgaagaacgaggcgtaaagttacgtctgactgtagtggatacacctggatatggggatgccataaactgtagagactgctttaaaacaatcatctcgtatattgacgaacaatttgagaggtaccttcacgatgagagtgggctaaacagacgacatatcatcgacaatagggtgcactgttag

SEQ ID NO: 23243 - DNA, 396 bp, Artificial Sequence
  derived and/or modified sequence
atgagcaagcagcagcccacccagttcatcaaccccgagacccccggttatgtaggcttcgctaacctgcccaaccaagtgcaccgaaagtcagtcaagaaggggttcgagttcaccctgatggtcgtgggcgagagcggcctcggtaagagtaccttgatcaatagtctgtttttaaccgacctgtatcctgaacgtgtgatcccgggggcagctgagaaaattgagagaacagtgcagattgaagcctctactgttgagatagaggaaaggggggtgaagctgcgcttgactgtcgtggacacccctggatatggtgacgccataaactgccgtgactgttttaaaaccattatctcttatatcgacgagcagttcgaaaggtatttgcactag

SEQ ID NO: 23244 - DNA, 219 bp, Artificial Sequence
  derived and/or modified sequence
atgagcaagcagcagcccacccagttcatcaaccccgagacccccggctatgtgggattcgcgaatctccctaatcaggtgcatcggaagtccgtgaaaaagggttttgagttcacattgatggtggtaggagaatcaggcctgggcaaaagcacactgataaattcgttatttctgacagatttgtatcccgagcgagtgattcctggagccgcctag

SEQ ID NO: 23245 - DNA, 219 bp, Artificial Sequence
  derived and/or modified sequence
atgagcaagcagcagcccacccagttcatcaaccccgagacccccggctacgtaggctttgccaatctcccaaatcaagtccatagaaagagcgtgaagaagggttttgaattcacactaatggtggtgggagaaagtggcctggggaaatctacactgattaatagtctgtttctcactgatctgtatcccgagagagttatacctggcgctgcgtag

SEQ ID NO: 23246 - DNA, 522 bp, Artificial Sequence
  derived and/or modified sequence
atgagcaagcagcagcccacccagttcatcaaccccgagacccccgggtatgtcggattcgcaaatttgcccaaccaagtgcataggaagagtgtcaaaaagggctttgagttcacacttatggtcgtgggagagtctggtctcggaaaatcaacactgatcaattctctgtttcttactgacctgtaccccgagagagttatccctggggccgcggagaaaatcgagcggactgtacagatcgaggcgtctacagtggagatagaagaacgcggagttaaacttagactgacagttgtagacactcctgggtacggcgatgctattaattgtagggattgtttcaagacgatcatcagttatatagatgaacaatttgagaggtacttgcacgacgagtccgggctgaacagacgccatatcatcgacaaccgcgtgcactgctgtttttactttatttcaccattcgggcacggactgaagcctctggacgttgctttcatgaaagctatccataattag

SEQ ID NO: 23247 - DNA, 1086 bp, Artificial Sequence
  derived and/or modified sequence
atgagcaaacagcagcctacacaattcattaaccccgaaacacccggttatgtaggctttgcaaacctacctaatcaggtgcatcggaaatccgtgaagaaagggttcgaattcacattgatggtggtgggcgaatctgggctaggcaaatcaaccctcataaatagcctgttccttactgatttgtatcccgagagggtcattccaggcgcagccgagaagatagaacgcacagttcagatcgaagcttctacagtggaaatcgaagaacgaggtgtcaaactgcggctcacagtggtcgatacgcccggatatggggacgctattaactgtcgggactgtttcaagacaatcattagttatattgatgagcagtttgaacggtatctgcacgacgaaagcggtctgaatcgtagacacatcattgacaatcgagtgcactgttgcttttattttattagccctttcgggcatgggctcaagccgttggatgtggcatttatgaaggccatccacaataaagttaatatcgtcccagtgattgcaaaggcagacactctgacactaaaggagagagaacggctgaagaagcgcattcttgatgaaatcgaggagcacaacataaaaatctatcacctccccgacgccgaatccgatgaggacgaggactttaaggagcagactagactcctcaaagcatctatcccctttagtgtcgtcggcagcaaccagctgattgaggctaagggcaaaaaagtccgtggacgtctgtacccttggggcgttgtcgaagtagaaaacccagagcacaatgacttccttaagctgcgcaccatgctgatcacacacatgcaggacttgcaggaggtgacccaagacctccattatgaaaacttccgctcggagcgtctgaagcggggaggaagaaaagttgaaaatgaagatatgaataaggaccaaatactactggagaaagaggctgaacttaggaggatgcaggaaatgatcgccaggatgcaggcccagatgcagatgcaaatgcaggggggtgatggtgatgggggtgcgctgggtcaccacgtgtag

SEQ ID NO: 23248 - DNA, 1086 bp, Artificial Sequence
  derived and/or modified sequence
atgtctaagcagcagcccacgcaattcataaatcctgagacccccggatatgtggggtttgccaacctgccaaaccaagtccatagaaagagcgtgaagaagggtttcgagtttactcttatggtggtgggggaatccgggcttgggaagtcaactctgattaactccctctttctgacggatctctaccctgagcgagtaattcctggcgcagctgagaaaatcgaacgaacagttcagatcgaggccagtaccgtcgagattgaggaaagaggcgtcaagttacgccttactgttgttgacacccctggttatggcgacgctatcaattgcagggactgcttcaagaccatcattagctacattgacgaacaatttgagcggtacctgcacgacgaaagtggcttgaacaggagacatattattgacaatcgagttcattgttgcttttatttcatttcaccgtttggacacggcctgaaacctttggacgtggcgttcatgaaggcgatacataacaaggttaatatcgttccagtgattgccaaggcggatacacttacactgaaggagagagagaggctgaagaaacgaatcctagacgaaatagaagaacataatatcaaaatctaccacttgccagacgctgaatccgatgaagacgaggacttcaaggagcaaacacgtcttttgaaagcatctatccccttctcagtcgtgggtagtaaccagctgatcgaggcaaaagggaaaaaggtccgaggtcgcctatacccatggggggtggtagaagtggagaatcctgagcataacgacttccttaagttacgtacaatgctgatcacacacatgcaagacctgcaggaagtgacacaggacctgcattacgagaattttagaagcgagcgccttaagcggggtggccgaaaggtcgaaaatgaagatatgaataaggatcagatccttttggaaaaggaggctgagttacggcgaatgcaggaaatgattgcacggatgcaggcccaaatgcagatgcagatgcagggtggagacggcgacggtggagcgctgggacatcacgtgtag

SEQ ID NO: 23249 - DNA, 1086 bp, Artificial Sequence
  derived and/or modified sequence
atgtctaagcagcagccaactcagtttatcaatcctgaaacacctggatacgtgggcttcgctaacctgcccaaccaggtgcatagaaaatctgtcaaaaagggcttcgagttcaccttaatggtggtcggcgagtccgggcttgggaagtcaaccctgatcaactccctctttttgactgacttgtaccctgagcgtgtgattccgggtgccgcagagaagatagagcgcacagtgcaaatcgaggcgtctacagttgagatagaagaacgcggagtaaagctgcggttgaccgtggtggatactcccggatacggtgatgccattaactgcagggattgcttcaagacaattatcagctacatcgatgagcagtttgagaggtacctccacgatgagagtgggcttaacaggaggcatatcatcgataaccgcgtgcactgttgtttttatttcattagccctttcggtcacgggctgaagccactggatgtcgcttttatgaaggctattcacaacaaagtgaatatcgtgcccgtgatcgcaaaggccgatactctgactcttaaggaacgcgaacggcttaagaagcggatcctggacgagatagaagagcataacataaaaatttatcatctcccagatgctgagtccgatgaggatgaggatttcaaagaacagacaaggctgttaaaggcctctatcccgttttcagtggtgggctcgaaccagcttatagaagccaaaggaaaaaaagtccgcggaagattatacccttggggcgtcgtcgaggtcgagaacccagagcacaatgactttctcaagttgcgaaccatgttgattactcatatgcaggatttgcaggaggttacccaagaccttcactacgagaatttccgctcggagagactgaagagaggcggacgcaaagtggaaaatgaagatatgaacaaggaccagatacttctggaaaaagaggccgaactgcgcaggatgcaagagatgatcgctcggatgcaggcccaaatgcagatgcagatgcaagggggtgatggtgacggcggtgctttggggcatcacgtctag

SEQ ID NO: 23250 - DNA, 1086 bp, Artificial Sequence
  derived and/or modified sequence
atgagcaagcaacaacctacccagtttattaaccccgagacacccggatatgtggggttcgccaacctccccaaccaggtccacaggaaaagtgtgaaaaaaggctttgaattcactctgatggtggtcggagaatccggtcttggcaagtctaccttgataaatagcctcttcctgactgatctgtatcctgaacgcgtgatcccaggagcggctgagaaaatcgaacgtaccgtgcagattgaagcaagtacagtcgagattgaagagagaggagtgaaactaaggctcaccgtggttgacaccccgggatacggagatgccatcaactgcagagattgtttcaagactattattagttacatcgacgaacagtttgaaagatatctgcatgatgaatcaggactcaatcgcagacatatcatcgataatagagtacattgctgcttttacttcattagtcctttcgggcacggactgaagcctctggatgtagcgtttatgaaggcgattcacaataaagtgaatattgtcccagttatcgccaaagctgacactttaacattgaaagaaagagaaagactgaaaaaacgcatactcgacgaaatcgaggaacacaatatcaagatctatcatttacctgacgccgaaagcgatgaggacgaggacttcaaggagcagacccgattgttaaaggcatccattcctttcagcgtggtaggctcaaaccagctgatcgaggcaaagggcaagaaagtgagaggcaggctgtacccatggggcgtagtcgaggtggaaaaccccgagcacaacgattttcttaagctgaggaccatgctcatcacccacatgcaagacctgcaagaggttacccaggatctgcattacgaaaatttcaggagcgaacgccttaagagagggggacgcaaagtcgagaacgaagacatgaacaaggaccagatcctgctggagaaggaggctgaactgcgtcgtatgcaagagatgattgcaagaatgcaagcccagatgcaaatgcagatgcaaggcggagatggcgacggaggcgctctgggccaccacgtctag

SEQ ID NO: 23251 - DNA, 159 bp, Artificial Sequence
  derived and/or modified sequence
atgtctaagcagcaaccgacccagtttatcaacccggagacacccggttacgtgggcttcgccaatctgccaaatcaggtgcatcgcaagagtgtcaagaagggcttcgagtttacactcatggtggtcggggagagcgggttaggaaagagtacttag

SEQ ID NO: 23252 - DNA, 153 bp, Artificial Sequence
  derived and/or modified sequence
atgagcaagcagcaacctacgcaatttatcaatcctgaaacccccggttatgtgggcttcgctaatctccctaatcaggttcaccgtaagtctgttaaaaaaggcttcgagttcacgctgatggttgttggggagtccggtctgggtaaatag

SEQ ID NO: 23253 - DNA, 447 bp, Artificial Sequence
  derived and/or modified sequence
atgagtaaacagcaacccacccaatttattaaccctgagacgcccggttacgtcgggtttgccaatttaccaaaccaggtgcaccggaaaagcgttaagaagggatttgaatttaccctcatggtagtaggcgaaagcgggctaggtaagtccactctgattaatagcttgttcttaacagatctgtaccccgagcgggtgattccaggcgctgccgagaaaattgaaagaaccgtgcagatcgaagcatctaccgttgagatcgaggaacggggtgtgaaacttaggttaacagtggttgacactcctggatacggggatgccattaactgccgcgattgtttcaagacaattatatcttatatagacgaacagttcgagaggtacctgcatgacgagtccggactcaatcgcagacacatcatcgataatcgcgtgcactgttag

SEQ ID NO: 23254 - DNA, 396 bp, Artificial Sequence
  derived and/or modified sequence
atgtccaaacaacaaccaactcagttcatcaatcccgagactcccggatatgtgggcttcgcaaacctcccgaatcaggtgcataggaagagcgtcaagaagggttttgaatttactttgatggtggtgggtgagagtggactcgggaaaagcactctgatcaacagcctgtttctgaccgacctgtatcctgagagggtgatccctggcgcagccgaaaagatagaaagaaccgtccagatagaagcttccacagtggagattgaagagaggggtgttaagctgaggctgacggttgtggacacaccaggctacggcgacgccattaattgcagagactgtttcaagaccattatttcctatatcgacgagcagttcgagaggtatctacactag

SEQ ID NO: 23255 - DNA, 219 bp, Artificial Sequence
  derived and/or modified sequence
atgtctaagcaacagcccacccaatttattaaccctgaaacccctggttacgtgggatttgcaaaccttcccaaccaggtacatagaaaaagtgtgaaaaagggattcgagtttacccttatggtcgtcggggagtctggactggggaaaagcactctgatcaacagcctgtttctgacagatctctatcccgagcgcgtcatccccggagccgcatag

SEQ ID NO: 23256 - DNA, 219 bp, Artificial Sequence
  derived and/or modified sequence
atgtctaagcagcagcccacgcaattcatcaaccccgagacaccaggatacgtcggatttgccaatctccccaatcaggtgcatagaaaatctgtcaaaaagggcttcgagttcacccttatggtagtgggggagtcagggttgggtaaatcgaccctaataaactcattattccttacagacctataccccgagagagtgatccccggagctgcgtag

SEQ ID NO: 23257 - DNA, 522 bp, Artificial Sequence
  derived and/or modified sequence
atgagcaagcagcaacctacacagttcatcaacccagaaacgcccggatacgtgggctttgcaaacctcccaaatcaggtccaccggaaatctgtcaagaaagggttcgagtttaccctgatggtggtgggagaatctggtctgggcaaatctacactgatcaactctctgttcttaaccgatctgtatcccgaacgtgtaattcctggcgcagctgaaaagattgaaaggaccgtccagattgaagcctctacggtggagatcgaagagcggggtgtgaagttgcggctgacagtggtggatactcctggttatggcgatgcaattaattgtagggattgcttcaagacgatcataagttatatcgacgagcagtttgagagatacttgcacgacgaaagtgggttaaacaggcggcacattattgataacagggtgcactgttgtttctatttcatttcgccgttcggtcacgggctcaaacctctggacgttgcgtttatgaaagcaatccataattag

SEQ ID NO: 23258 - DNA, 1086 bp, Artificial Sequence
  derived and/or modified sequence
atgagcaagcagcagcccacccagttcatcaaccccgagacccccggctacgtgggcttcgccaacctgcccaaccaggtgcacagaaagagcgtgaagaagggcttcgagttcaccctgatggtggtgggcgagagcggcctgggcaagagcaccctgatcaacagcctgttcctgaccgacctgtaccccgagagagtgatccccggcgccgccgagaagatcgagagaaccgtgcagatcgaggccagcaccgtggagatcgaggagagaggcgtgaagctgagactgaccgtggtggacacccccggctacggcgacgccatcaactgcagagactgcttcaagaccatcatcagctacatcgacgagcagttcgagagatacctgcacgacgagagcggcctgaacagaagacacatcatcgacaacagagtgcactgctgcttctacttcatcagccccttcggccacggcctgaagcccctggacgtggccttcatgaaggccatccacaacaaggtgaacatcgtgcccgtgatcgccaaggccgacaccctgaccctgaaggagagagagagactgaagaagagaatcctggacgagatcgaggagcacaacatcaagatctaccacctgcccgacgccgagagcgacgaggacgaggacttcaaggagcagaccagactgctgaaggccagcatccccttcagcgtggtgggcagcaaccagctgatcgaggccaagggcaagaaggtgagaggcagactgtacccctggggcgtggtggaggtggagaaccccgagcacaacgacttcctgaagctgagaaccatgctgatcacccacatgcaggacctgcaggaggtgacccaggacctgcactacgagaacttcagaagcgagagactgaagagaggcggcagaaaggtggagaacgaggacatgaacaaggaccagatcctgctggagaaggaggccgagctgagaagaatgcaggagatgatcgccagaatgcaggcccagatgcagatgcagatgcagggcggcgacggcgacggcggcgccctgggccaccacgtgtag

SEQ ID NO: 23259 - DNA, 159 bp, Artificial Sequence
  derived and/or modified sequence
atgagcaagcagcagcccacccagttcatcaaccccgagacccccggctacgtgggcttcgccaacctgcccaaccaggtgcacagaaagagcgtgaagaagggcttcgagttcaccctgatggtggtgggcgagagcggcctgggcaagagcacctag

SEQ ID NO: 23260 - DNA, 153 bp, Artificial Sequence
  derived and/or modified sequence
atgagcaagcagcagcccacccagttcatcaaccccgagacccccggctacgtgggcttcgccaacctgcccaaccaggtgcacagaaagagcgtgaagaagggcttcgagttcaccctgatggtggtgggcgagagcggcctgggcaagtag

SEQ ID NO: 23261 - DNA, 447 bp, Artificial Sequence
  derived and/or modified sequence
atgagcaagcagcagcccacccagttcatcaaccccgagacccccggctacgtgggcttcgccaacctgcccaaccaggtgcacagaaagagcgtgaagaagggcttcgagttcaccctgatggtggtgggcgagagcggcctgggcaagagcaccctgatcaacagcctgttcctgaccgacctgtaccccgagagagtgatccccggcgccgccgagaagatcgagagaaccgtgcagatcgaggccagcaccgtggagatcgaggagagaggcgtgaagctgagactgaccgtggtggacacccccggctacggcgacgccatcaactgcagagactgcttcaagaccatcatcagctacatcgacgagcagttcgagagatacctgcacgacgagagcggcctgaacagaagacacatcatcgacaacagagtgcactgctag

SEQ ID NO: 23262 - DNA, 396 bp, Artificial Sequence
  derived and/or modified sequence
atgagcaagcagcagcccacccagttcatcaaccccgagacccccggctacgtgggcttcgccaacctgcccaaccaggtgcacagaaagagcgtgaagaagggcttcgagttcaccctgatggtggtgggcgagagcggcctgggcaagagcaccctgatcaacagcctgttcctgaccgacctgtaccccgagagagtgatccccggcgccgccgagaagatcgagagaaccgtgcagatcgaggccagcaccgtggagatcgaggagagaggcgtgaagctgagactgaccgtggtggacacccccggctacggcgacgccatcaactgcagagactgcttcaagaccatcatcagctacatcgacgagcagttcgagagatacctgcactag

SEQ ID NO: 23263 - DNA, 219 bp, Artificial Sequence
  derived and/or modified sequence
atgagcaagcagcagcccacccagttcatcaaccccgagacccccggctacgtgggcttcgccaacctgcccaaccaggtgcacagaaagagcgtgaagaagggcttcgagttcaccctgatggtggtgggcgagagcggcctgggcaagagcaccctgatcaacagcctgttcctgaccgacctgtaccccgagagagtgatccccggcgccgcctag

SEQ ID NO: 23264 - DNA, 522 bp, Artificial Sequence
  derived and/or modified sequence
atgagcaagcagcagcccacccagttcatcaaccccgagacccccggctacgtgggcttcgccaacctgcccaaccaggtgcacagaaagagcgtgaagaagggcttcgagttcaccctgatggtggtgggcgagagcggcctgggcaagagcaccctgatcaacagcctgttcctgaccgacctgtaccccgagagagtgatccccggcgccgccgagaagatcgagagaaccgtgcagatcgaggccagcaccgtggagatcgaggagagaggcgtgaagctgagactgaccgtggtggacacccccggctacggcgacgccatcaactgcagagactgcttcaagaccatcatcagctacatcgacgagcagttcgagagatacctgcacgacgagagcggcctgaacagaagacacatcatcgacaacagagtgcactgctgcttctacttcatcagccccttcggccacggcctgaagcccctggacgtggccttcatgaaggccatccacaactag

SEQ ID NO: 23265 - protein, 591 aa, Artificial Sequence
  derived and/or modified sequence
MSEQSICQARAAVMVYDDANKKWVPAGGSTGFSRVHIYHHTGNNTFRVVGRKIQDHQVVINCAIPKGLKYNQATQTFHQWRDARQVYGLNFGSKEDANVFASAMMHALEVLNSQETGPTLPRQNSQLPAQVQNGPSQEELEIQRRQLQEQQRQKELERERLERERMERERLERERLERERLERERLEQEQLERERQERERQERLERQERLERQERLERQERLDRERQERQERERLERLERERQERERQEQLEREQLEWERERRISSAAAPASVETPLNSVLGDSSASEPGLQAASQPAETPSQQGIVLGPLAPPPPPPLPPGPAQASVALPPPPGPPPPPPLPSTGPPPPPPPPPLPNQVPPPPPPPPAPPLPASGFFLASMSEDNRPLTGLAAAIAGAKLRKVSRMEDTSFPSGGNAIGVNSASSKTDTGRGNGPLPLGGSGLMEEMSALLARRRRIAEKGSTIETEQKEDKGEDSEPVTSKASSTSTPEPTRKPWERTNTMNGSKSPVISRRDSPRKNQIVFDNRSYDSLHRPKSTPLSQPSANGVQTEGLDYDRLKQDILDEMRKELTKLKEELIDAIRQELSKSNTA

SEQ ID NO: 23266 - protein, 882 aa, Artificial Sequence
  derived and/or modified sequence
MPGRARTRARGRARRRESYQQEAPGGPRAPGSATTQEPPQLQSTPRPLQEEVPVVRPLQPRAARGGAGGGAQSQGVKEPGPEAGLHTAPLQERRIGGVFQDLVVNTRQDMKHVKDSKTGSEGTVVQLLANHFRVISRPQWVAYKYNVDYKPDIEDGNLRTILLDQHRRKFGERHIFDGNSLLLSRPLKERRVEWLSTTKDKNIVKITVEFSKELTPTSPDCLRYYNILFRRTFKLLDFEQVGRNYYTKKKAIQLYRHGTSLEIWLGYVTSVLQYENSITLCADVSHKLLRIETAYDFIKRTSAQAQTGNIREEVTNKLIGSIVLTKYNNKTYRVDDIDWKQNPEDTFNKSDGSKITYIDYYRQQHKEIVTVKKQPLLVSQGRWKKGLTGTQREPILLIPQLCHMTGLTDEICKDYSIVKELAKHTRLSPRRRHHTLKEFINTLQDNKKVRELLQLWDLKFDTNFLSVPGRVLKNANIVQGRRMVKANSQGDWSREIRELPLLNAMPLHSWLILYSRSSHREAMSLKGHLQSVTAPMGITMKPAEMIEVDGDANSYIDTLRKYTRPTLQMGMSCLLVFKVICILPNDDKRRYDSIKRYLCTKCPIPSQCVVKKTLEKVQARTIVTKIAQQMNCKMGGALWKVETDVQRTMFVGIDCFHDIVNRQKSIAGFVASTNAELTKWYSQCVIQKTGEELVKELEICLKAALDVWCKNESSMPHSVIVYRDGVGDGQLQALLDHEAKKMSTYLKTISPNNFTLAFIVVKKRINTRFFLKHGSNFQNPPPGTVIDVELTRNEWYDFFIVSQSVQDGTVTPTHYNVIYDTIGLSPDTVQRLTYCLCHMYYNLPGIIRVPAPCHYAHKLAYLVGQSIHQEPNRSLSTRLFYL

SEQ ID NO: 23267 - DNA, 2649 bp, Artificial Sequence
  derived and/or modified sequence
atgcccggcagagccagaaccagagccagaggcagagccagaagaagagagagctaccagcaggaggcccccggcggccccagagcccccggcagcgccaccacccaggagcccccccagctgcagagcacccccagacccctgcaggaggaggtgcccgtggtgagacccctgcagcccagagccgccagaggcggcgccggcggcggcgcccagagccagggcgtgaaggagcccggccccgaggccggcctgcacaccgcccccctgcaggagagaagaatcggcggcgtgttccaggacctggtggtgaacaccagacaggacatgaagcacgtgaaggacagcaagaccggcagcgagggcaccgtggtgcagctgctggccaaccacttcagagtgatcagcagaccccagtgggtggcctacaagtacaacgtggactacaagcccgacatcgaggacggcaacctgagaaccatcctgctggaccagcacagaagaaagttcggcgagagacacatcttcgacggcaacagcctgctgctgagcagacccctgaaggagagaagagtggagtggctgagcaccaccaaggacaagaacatcgtgaagatcaccgtggagttcagcaaggagctgacccccaccagccccgactgcctgagatactacaacatcctgttcagaagaaccttcaagctgctggacttcgagcaggtgggcagaaactactacaccaagaagaaggccatccagctgtacagacacggcaccagcctggagatctggctgggctacgtgaccagcgtgctgcagtacgagaacagcatcaccctgtgcgccgacgtgagccacaagctgctgagaatcgagaccgcctacgacttcatcaagagaaccagcgcccaggcccagaccggcaacatcagagaggaggtgaccaacaagctgatcggcagcatcgtgctgaccaagtacaacaacaagacctacagagtggacgacatcgactggaagcagaaccccgaggacaccttcaacaagagcgacggcagcaagatcacctacatcgactactacagacagcagcacaaggagatcgtgaccgtgaagaagcagcccctgctggtgagccagggcagatggaagaagggcctgaccggcacccagagagagcccatcctgctgatcccccagctgtgccacatgaccggcctgaccgacgagatctgcaaggactacagcatcgtgaaggagctggccaagcacaccagactgagccccagaagaagacaccacaccctgaaggagttcatcaacaccctgcaggacaacaagaaggtgagagagctgctgcagctgtgggacctgaagttcgacaccaacttcctgagcgtgcccggcagagtgctgaagaacgccaacatcgtgcagggcagaagaatggtgaaggccaacagccagggcgactggagcagagagatcagagagctgcccctgctgaacgccatgcccctgcacagctggctgatcctgtacagcagaagcagccacagagaggccatgagcctgaagggccacctgcagagcgtgaccgcccccatgggcatcaccatgaagcccgccgagatgatcgaggtggacggcgacgccaacagctacatcgacaccctgagaaagtacaccagacccaccctgcagatgggcatgagctgcctgctggtgttcaaggtgatctgcatcctgcccaacgacgacaagagaagatacgacagcatcaagagatacctgtgcaccaagtgccccatccccagccagtgcgtggtgaagaagaccctggagaaggtgcaggccagaaccatcgtgaccaagatcgcccagcagatgaactgcaagatgggcggcgccctgtggaaggtggagaccgacgtgcagagaaccatgttcgtgggcatcgactgcttccacgacatcgtgaacagacagaagagcatcgccggcttcgtggccagcaccaacgccgagctgaccaagtggtacagccagtgcgtgatccagaagaccggcgaggagctggtgaaggagctggagatctgcctgaaggccgccctggacgtgtggtgcaagaacgagagcagcatgccccacagcgtgatcgtgtacagagacggcgtgggcgacggccagctgcaggccctgctggaccacgaggccaagaagatgagcacctacctgaagaccatcagccccaacaacttcaccctggccttcatcgtggtgaagaagagaatcaacaccagattcttcctgaagcacggcagcaacttccagaaccccccccccggcaccgtgatcgacgtggagctgaccagaaacgagtggtacgacttcttcatcgtgagccagagcgtgcaggacggcaccgtgacccccacccactacaacgtgatctacgacaccatcggcctgagccccgacaccgtgcagagactgacctactgcctgtgccacatgtactacaacctgcccggcatcatcagagtgcccgccccctgccactacgcccacaagctggcctacctggtgggccagagcatccaccaggagcccaacagaagcctgagcaccagactgttctacctgtag

SEQ ID NO: 23268 - DNA, 3504 bp, Artificial Sequence
  derived and/or modified sequence
tgctgcctcagcctcccgagtagctgggactacaggtgcccgccaccacgcccggctaattttttgtatttttagtagagatagggtttcactgtgttagccaggatggtctccatctcctgacctcatgatctacccgcctcagcctgccaaagtgctgggattacaggcgtgagccaccgcgcccggccaaagcggtttttaaagggaggatttggaaggcaaaagaggcagggggactgggaggtgtcaggtggtgtgaccccctccagtggcttgtcctgaattatttttccatctgtggaagtggccggcgtcatcatggctggaggaggtgcatggttcgtatcaggatctgactactgaagcttctaaggaaatatgtgaccagataaggtcatcaccttcaggaccacaatgcctggtagggcaaggactcgcgcccgaggcagagcccgccgcagggagagctaccaacaagaggcacctgggggacccagagcacctggatcagctacaacccaggagccccctcagttgcagtcgacaccccggccgctgcaggaggaagtcccagtggttagacctctgcagccaagagcagcaagaggaggagcaggaggaggagcacagtctcaaggggtgaaggaacctggacctgaggctgggttgcatacagcgcccttgcaggagagaaggattggtggagtttttcaagacctggtggtgaacaccaggcaagatatgaagcatgttaaagactcaaaaacaggttcagagggtacagtggtacagctactcgccaaccacttccgagtgatatctcgtcctcagtgggttgcatataaatacaacgttgactacaaaccagacatagaagatggaaatctccgtacaattttacttgatcaacatagaaggaaatttggagagcgccatatatttgatggaaactctttattattatctcggccactaaaagagcggagagtggaatggttgagcacaaccaaagacaaaaacatcgtgaagattacagttgagttttccaaagaactcacgcccacgtcgccagattgcctacgctattacaacattctctttagaagaactttcaagctgctggattttgaacaagttggtcgcaactattataccaaaaagaaggccattcagttataccgtcatggtaccagtttggaaatctggcttggttatgttacttctgttcttcaatacgaaaacagcattaccctctgtgccgatgtgagccacaaactgctccgaatagaaactgcttatgatttcataaagagaacatctgcccaggcccagacaggaaacatccgagaggaagtaactaataaattaattggatcaattgttctgacaaaatacaacaacaaaacctacagagtagatgatattgattggaagcagaatcctgaagacacatttaacaaatcagatggcagcaaaatcacctatatagactactacaggcagcaacataaagaaattgtcacagtgaagaaacagccacttttggtcagccagggcagatggaaaaagggcctaacgggtacacaacgtgaacctatcctgctgattcctcagctgtgccacatgacaggtctaacagatgaaatatgtaaagattatagcattgtgaaagaattggctaaacatacaagattgagtccaagaagaaggcatcatacattaaaagaattcatcaatactctacaagataataaaaaagtacgagagttacttcaactctgggatttgaaatttgataccaattttttgtccgtcccgggaagagttttgaaaaacgcaaacatcgtgcaaggcagaagaatggttaaagccaattcacaaggagactggtcaagagaaataagagaattacccttacttaatgcaatgccactacatagttggctcatactctatagcaggagcagtcacagagaagccatgtccttaaagggtcatctacagagtgtcacagcccccatgggcataactatgaaaccagcagaaatgattgaagtagatggtgatgctaactcctatatagacacattacggaaatatactagaccaacactgcagatgggaatgtcatgtttgctggttttcaaggtgatttgtatcctgcccaatgatgacaaacgtagatatgacagcataaaaagatacctatgtaccaaatgcccaattccaagccagtgtgtggtgaaaaagaccttagaaaaagtccaggcaaggaccatcgtcaccaagattgcccagcagatgaattgcaagatgggaggagccctctggaaggtggagacagacgtacaaagaacaatgttcgttggcattgattgtttccacgatatcgtaaatcgacagaaatcaatagcaggatttgttgcaagtaccaatgctgaattaacaaagtggtactctcaatgtgtcatccagaaaacaggagaagagcttgtgaaagagctggagatctgcttgaaagctgccctggatgtctggtgtaaaaacgaatcatcgatgccacattctgttattgtgtatcgggatggagtgggagatggtcagcttcaagcattgcttgaccatgaagcgaaaaagatgtcgacctacttaaaaaccatctctcctaacaatttcactctagctttcattgtggtgaagaaacgaataaacactagattttttcttaaacatggaagcaattttcaaaatccacctccaggaacagttattgatgtagagttgactaggaatgaatggtatgacttttttattgtgagtcagtctgtgcaagatgggactgttacccccactcattataacgtcatctatgacacgattggcttgagcccagatacagtacagcgtttaacatattgtctatgccacatgtattataatttgccaggcatcatccgagttccagcgccttgccactatgcccacaagctggcttacctcgtggggcagtccattcaccaggaaccgaatcgttccttgtcaactcgtctcttttacctttgacctgcagaagaagacctgatgtgctaatgaaaccacaacgtgtaagcctgtcttccttttgaagcaggatgtctgaaatattttcctaggtccatagcattaaattctcatcgtttttgattggacacaggagagattcagagtgatatgttctactctcaatactaccacagactgatttttccagagaggagaactgacagggtttggcttgcagtttccctttcaaatatgtgacagagatctcacagctgaacgtgactgaacattttccaccccaagcagggccactctaagaattgaaaagatggggcattcgtcacagagagagtacatctgtgaacaagtaaactctacttggaaaactacgtttactttatttttgaaacttttttttgttaaaggacaggaaaggaagacataaaagtaacaacactg

SEQ ID NO: 23269 - DNA, 2649 bp, Artificial Sequence
  derived and/or modified sequence
atgccaggacgggctcgcactcgcgcaagaggtcgagctcggcggcgggaaagctatcagcaggaagcaccagggggccctcgcgcacctggcagtgcgaccacccaggagcctccacagcttcagtctacaccaagacctctccaggaagaagtccccgtggttcgccctctgcagccacgagctgctagggggggggctggcggtggagcccaatcccagggagtgaaggagccaggtcccgaggccgggctgcacacagcacccctgcaggagcgacgcatcggtggggtgttccaagacctggtggtgaatacacggcaggacatgaagcacgtcaaggacagcaagactgggagcgagggtacagtggtacagcttcttgcgaaccacttccgggtaatcagtagacctcagtgggtggcatataagtacaatgtcgattataaacccgatatcgaggacggtaatctccgcaccatcctgctggatcaacaccgtcgaaaattcggagagagacacatatttgacggaaattcacttctgctgtctcgccctctgaaggagcgcagggtcgaatggctcagcacaacaaaggataaaaacatcgtgaagataacggttgagttctcaaaggagctcacccccacttctcctgactgcttaagatactataacattttgtttaggcgcacatttaagctgctagatttcgagcaggtgggcaggaactactacacaaagaaaaaggccattcagctgtaccgacacgggacatccttggaaatttggctgggctacgtgactagtgtgctgcaatatgagaattctattacactgtgcgctgatgtcagtcataaactcctaaggatagaaacggcctatgactttattaaacgcacaagcgcacaggcccagaccgggaacatacgcgaagaggttaccaataagctgatcggcagcatcgtgctgacaaaatacaacaacaaaacttaccgggtagatgacatcgattggaaacagaaccccgaggatactttcaacaagtcggacggatcaaagatcacgtatatcgactactaccgccagcaacataaggagatagtaacagttaaaaaacagcccctcctggttagtcaggggcggtggaagaaaggcctcacagggacacagagagagccaatcctgctaattccccagctatgccacatgactggactcactgacgaaatctgcaaggactattctattgtaaaggaacttgccaagcacacaaggctgtctccgcgcaggcgccatcatacgcttaaggagttcatcaatacccttcaagataataagaaggttcgggagttgcttcagctgtgggacttgaaatttgataccaacttcctgagcgtgcctgggagagtgcttaagaatgccaatatcgtgcagggtaggcgcatggtgaaggccaactcccagggagactggtctagagagattagggaattgccattactcaatgctatgcccctccattcctggcttattctgtactcccggtccagccatcgcgaagcaatgtccctcaagggacacttgcagtcggtgacagcccccatgggtatcacaatgaagcccgctgagatgattgaagttgacggcgatgcgaactcatacatagacacactgagaaagtataccaggccaactctccaaatgggcatgtcttgcttgttagtgtttaaagtgatctgcatcctcccaaacgacgacaaaagacgttatgactccatcaagcggtacctttgtactaaatgccccattccctcccagtgtgtagtcaaaaaaactttggaaaaagtccaagctaggacgatcgtgaccaaaatcgcccagcaaatgaattgtaagatggggggagccctatggaaggtagagacagatgtgcagcggacgatgttcgttggaatcgattgcttccacgacattgtgaatcgccaaaagtccattgccgggtttgtggcgtctactaatgcggaactcactaaatggtacagtcaatgcgtcatacagaagaccggcgaggaattggtaaaggaactcgaaatctgcttaaaggcggctttggacgtgtggtgcaaaaatgaaagttctatgccccactcagttattgtatatagagacggcgtgggggatggacagcttcaggctctgctggatcatgaagcaaaaaaaatgtctacctacttaaagaccatttctcctaacaacttcacactggcttttattgtggtcaagaagcggattaacactcgtttttttcttaagcatggctccaattttcagaacccccccccaggcactgtgattgatgtcgagctgacccgaaacgagtggtacgattttttcatcgtgtcccagtccgtacaggacggaaccgtgactccgacacactacaacgtcatttacgatacaattggcctctctccagacaccgtacagaggcttacatactgcctctgtcatatgtactataacctgccaggaattatccgagtgccggccccttgccactatgcacacaaattggcctatctggtgggccagtccatacaccaagagcctaaccgcagcctctcaacgagacttttttatctgtag

SEQ ID NO: 23270 - DNA, 2649 bp, Artificial Sequence
  derived and/or modified sequence
atgcctggccgggcccggacccgggcccggggccgggccaggagaagagagagctaccagcaggaggcccctgggggcccccgggcccctggcagcgccaccacccaggagcccccccagctgcagagcaccccccggcccctgcaggaggaggtgcctgtggtgcggcccctgcagccccgggccgcccggggcggggccggcggcggggcccagagccagggcgtgaaggagcccggccctgaggccggcctgcacacagcccccctgcaggagaggagaattggaggagtcttccaggacctggtggtgaacacccggcaggacatgaagcacgtgaaggacagcaagacaggcagcgagggcaccgtggtgcagctgctggccaaccacttccgggtcatcagccggccccagtgggtggcctacaagtacaacgtggactacaagccagacattgaagatggcaacctgcggaccatcctgctggaccagcacaggaggaagtttggagagcggcacatctttgatggcaacagcctgctgctgagccggcccctgaaggagcggcgggtggagtggctgagcaccaccaaggacaagaacatcgtgaagatcaccgtggagttcagcaaggagctgacccccaccagcccagactgcctgcgctactacaacatcctcttccggaggaccttcaagctgctggactttgagcaggtgggcaggaactactacaccaagaagaaggccatccagctgtacagacatggcaccagcctggagatctggctgggctacgtgacctctgtgctgcagtatgaaaattccatcaccctgtgtgctgatgtgagccacaagctgctgagaattgaaacagcctatgacttcatcaagaggaccagcgcccaggcccagacaggcaacatccgggaggaggtgaccaacaagctgattggcagcatcgtgctgaccaagtacaacaacaagacctacagagtggatgacatcgactggaagcagaaccctgaggacaccttcaacaagagtgatggcagcaagatcacctacatcgactactaccggcagcagcacaaggagatcgtgacagtgaagaagcagcccctgctggtgtcccagggccgctggaagaagggcctgaccggcacccagcgggagcccatcctgctgatcccccagctgtgccacatgacaggcctgacagatgagatctgcaaggactacagcatcgtgaaggagctggccaagcacacccggctgagccccaggagaagacaccacaccctgaaggagttcatcaacaccctgcaggacaacaagaaggtgcgggagctgctgcagctgtgggacctgaagtttgacaccaacttcctgtctgtgcccggccgggtgctgaagaatgccaacatcgtgcagggccgcaggatggtgaaggccaacagccagggcgactggagccgggagatccgggagctgcccctgctgaatgccatgcccctgcacagctggctgatcctgtacagccgcagcagccaccgggaggccatgagcctgaagggccacctgcagagcgtgacagcccccatgggcatcaccatgaagccagctgagatgattgaggtggatggagatgccaacagctacatcgacaccctgaggaagtacacccggcccaccctgcagatgggcatgagctgcctgctggtgttcaaggtgatctgcatcctgcccaatgatgacaagagaagatatgacagcatcaagcgctacctgtgcaccaagtgccccatccccagccagtgtgtggtgaagaagaccctggagaaggtgcaggcccggaccatcgtgaccaagatcgcccagcagatgaactgcaagatgggcggggccctgtggaaggtggagacagatgtgcagaggaccatgtttgtgggcatcgactgcttccatgacatcgtgaaccggcagaagagcattgctggctttgtggccagcaccaatgctgagctgaccaagtggtacagccagtgtgtgatccagaagacaggagaggagctggtgaaggagctggagatctgcctgaaggccgccctggatgtgtggtgcaagaatgaaagctccatgccccacagcgtcatcgtgtacagagatggagtgggagatggccagctgcaggccctgctggaccacgaggccaagaagatgagcacctacctgaagaccatcagccccaacaacttcaccctggccttcatcgtggtgaagaagaggatcaacacccgcttcttcctgaagcacggcagcaacttccagaaccccccacctggcaccgtgattgatgtggagctgaccagaaatgagtggtatgacttcttcatcgtgtcccagagcgtgcaggacggcaccgtgacccccacccactacaacgtcatctatgacaccatcggcctgagcccagacacagtgcagaggctgacctactgcctgtgccacatgtactacaacctgcccggcatcatccgggtgcctgccccctgccactacgcccacaagctggcctacctggtgggccagagcatccaccaggagcccaacagaagcctgagcaccaggctcttctacctgtag

SEQ ID NO: 23271 - DNA, 2649 bp, Artificial Sequence
  derived and/or modified sequence
atgcccggccgggcccggacccgggcccggggccgggcccggcggagggagagctaccaacaggaagcacctggcgggccacgggctccaggatcagcaaccacacaggaaccgccccagttgcagtccacaccacggcctctacaggaagaggtgcccgtggtcaggcccctccagcctagggcagccagaggaggcgccggagggggagcacaaagccagggcgttaaggagcctggaccggaagcggggttacataccgcccctctgcaggaacggagaattggtggagtcttccaggacctcgtggtgaacacgcgccaggacatgaaacacgtcaaggactcaaaaaccgggtccgagggtactgtggttcagctgctggccaaccatttccgggtgattagtcgcccccagtgggtcgcatataaatataatgtggattacaaacctgacattgaggatggcaatctgcggaccatcctcctggaccagcaccggcggaagtttggagagcggcacatcttcgatggtaacagcctgttgctctcaaggcccctcaaggaaaggcgtgtggagtggctctccacaacaaaggataagaacattgttaaaatcactgtagaatttagcaaggagttgactcccaccagccctgattgcctcagatactacaatatcctcttcaggcggactttcaagctattggactttgagcaggtgggccgcaactactacacgaagaagaaagccatccaactttataggcacggaacctcgcttgagatctggctgggctacgtaactagcgtgctccaatacgaaaactccatcactctttgcgccgacgttagccataagctacttaggatcgagaccgcctatgacttcatcaagcgcacatctgcccaggcacagactggcaacattcgggaggaggtgactaataagctgatcgggtctattgtcctaacaaaatataataataagacctatcgggtggatgatatcgactggaagcaaaatccagaggatacattcaataaaagtgacggctcaaaaataacttatatcgactactatcggcaacagcataaagagatcgtgaccgtgaagaagcagcccctcctggtctcccagggcagatggaagaagggactaactggaacgcaaagggaacctatcctcctgatcccccagctctgtcatatgaccggcctcaccgacgagatatgtaaggattactcgattgttaaggagctcgcaaaacatacccggttgagtccacggaggaggcatcacactctcaaggaatttataaatacgctgcaagacaataaaaaagtgagagaactgctgcagttgtgggatctgaagtttgacaccaatttcttgtctgtaccaggtcgggtcctgaagaacgcaaatattgttcaaggcagaaggatggtcaaagctaatagtcagggggactggtctcgtgaaatccgcgagctccccctcttgaacgctatgcccctacatagttggttgatactgtactcccggtcgagccaccgagaagccatgtcccttaaaggccaccttcaatctgtgaccgcccccatgggcatcacaatgaaacccgctgagatgattgaggtagacggggatgccaacagctacatcgatacgttgcgcaagtacacacgccccaccctccagatgggaatgagctgcctgctcgtatttaaggtgatctgcattctgcccaatgatgataaacgccgctacgatagcatcaaacgatacctttgtacgaaatgcccaatcccttcccagtgcgtggtgaaaaaaactctggaaaaagttcaggctcgtaccatcgttaccaaaatcgctcaacagatgaattgcaaaatgggaggggccttatggaaagtagagaccgatgtgcagaggactatgtttgtgggcattgactgctttcacgatattgtgaacagacagaagtccatcgccggtttcgtggcatcaaccaatgcagaactaacaaagtggtactcacagtgcgtgatccagaagaccggagaggagctggtgaaggagctggagatctgtctgaaagccgccttagatgtgtggtgtaagaatgagagcagtatgccacatagtgtcattgtgtaccgtgatggtgtgggggacggacaactgcaggccctgctggaccatgaggctaaaaagatgtccacgtatctgaaaacgataagcccaaataatttcaccctcgcttttatagtggtcaagaagcgcattaatacacgattctttctcaaacacgggagtaattttcagaatcctccccctggcactgttatagatgttgagctgacacggaacgaatggtacgacttttttatcgtgagccaaagtgtacaggatggtacggttacacctacccactacaatgtcatatatgacactatcggcctctccccagacacggttcagaggctgacatactgtctctgccatatgtattataacttacctgggatcattagggtcccagctccctgtcactacgcccataagctggcctacttagtcggtcagagtatccatcaggagccaaatcggtcccttagcacacgcctgttttacctgtag

SEQ ID NO: 23272 - DNA, 2649 bp, Artificial Sequence
  derived and/or modified sequence
atgccgggtcgggctcgcaccagggcacgcggtagggcgagacggagggagagttatcagcaggaagcacctggcggacctcgagccccaggatccgcaacaactcaagagcccccacagttgcagtccacccccaggcctctccaggaagaagtgccggtcgttagacctctgcagcctcgcgctgctagaggcggtgccggtggtggtgcgcagtcacaaggtgttaaggagcccggacctgaggccggtctgcatactgccccactgcaggagcgtcgtataggaggtgtctttcaggatctggtggtcaatacaagacaggacatgaaacacgtcaaagacagtaaaacaggctctgaaggcaccgttgtgcagctcttggccaaccattttcgtgtcattagccgtccccaatgggtagcctacaaatacaacgtcgactataagccagatatcgaggatggcaatctcaggaccatcctgttagatcagcaccgcaggaagtttggagagaggcatatttttgatggaaacagtttactgctctcccggccacttaaggagcggagagtggagtggctctctacaacaaaagataagaatatcgtcaaaatcacggtcgaatttagtaaggagctgacacccacatctcctgattgtctgagatactataacattctgttcaggaggacttttaaactgttagatttcgaacaggtgggacgcaactactacactaaaaaaaaggccatacagctgtaccgtcacgggacctctctggagatctggctcggatacgtgaccagcgtgctacagtatgaaaacagtataaccctgtgtgctgacgtgtcacataagctgctgcggatcgaaacagcctacgattttatcaagcggacttcggcccaagcacagaccggcaacatacgtgaggaggtgaccaacaaactgatcgggtcaattgttctgactaaatacaacaacaaaacctaccgggtcgatgacattgactggaagcagaacccagaggatactttcaataagtccgatgggagtaagataacttatatagactactatagacagcagcacaaggaaattgtcaccgtgaagaaacaacccttgctcgtgagccaggggcgatggaaaaagggcctgacgggaacccaacgggaacctattttgcttatccctcaactctgtcatatgactggcctgactgatgaaatctgcaaggactacagtatcgtaaaagagctcgcaaaacataccaggctctcaccaaggcggagacatcacaccctcaaagagttcatcaacacactgcaggataacaagaaagtgcgcgagctgttacagctctgggacttaaagttcgataccaactttttatccgtgcccggaagggtgcttaagaatgcaaatatagtccagggcaggcggatggtgaaagccaatagccagggagactggagccgagaaattagggagcttccgctgctgaacgcaatgccactgcattcttggcttatcctctattccaggtcatcacaccgcgaggcaatgagccttaagggacacttacagagtgtcaccgccccaatgggaattaccatgaaacccgcagagatgatcgaggttgacggcgacgccaactcctatatcgacacattgcgtaaatatacccgccctaccctgcagatgggcatgtcatgcttattggtttttaaagtgatctgtatcctaccaaacgatgataagcgccgatatgacagtatcaaaagatatttgtgcacaaaatgccctatcccctctcagtgcgtcgtgaagaagacattggaaaaagttcaagccagaactattgtcaccaagatcgcccagcagatgaattgcaagatgggtggcgctctctggaaggtggagacagacgttcaacgtacgatgtttgttggcatcgactgcttccatgatattgtgaatagacagaaatccatcgctgggttcgtggcttctacaaacgccgaacttacaaaatggtactcacagtgcgtgatccagaaaaccggagaggagctggtgaaagagctggagatatgcctgaaagcagccctggacgtgtggtgcaagaacgagtcatctatgccacattcagtgattgtatacagggatggtgtgggtgatggccagctccaggccttactggatcatgaggcaaaaaaaatgtcaacgtatttgaagaccattagtcctaataatttcacactggcatttattgtggtaaagaagagaatcaacactcggtttttcctcaagcacggaagcaactttcagaatcctccgcctgggactgtgatcgacgtggagctcacccgcaatgaatggtatgattttttcatcgtgtcacagtccgtgcaggatggtacagtcactcctacacactacaatgtcatctatgacactatcgggttgtccccagacacagtgcagcggctgacctattgcctctgccacatgtactacaacctccccggaatcattagagtgccagcaccctgccactacgcccataagttggcgtacttagtggggcagtccatccatcaagagcccaatcgctcgctctctacaagacttttttatttgtag

SEQ ID NO: 23273 - protein, 418 aa, Artificial Sequence
  derived and/or modified sequence
MDSSAAPTNASNCTDALAYSSCSPAPSPGSWVNLSHLDGNLSDPCGPNRTDLGGRDSLCPPTGSPSMITAITIMALYSIVCVVGLFGNFLVMYVIVRYTKMKTATNIYIFNLALADALATSTLPFQSVNYLMGTWPFGTILCKIVISIDYYNMFTSIFTLCTMSVDRYIAVCHPVKALDFRTPRNAKIINVCNWILSSAIGLPVMFMATTKYRQGSIDCTLTFSHPTWYWENLLKICVFIFAFIMPVLIITVCYGLMILRLKSVRMLSGSKEKDRNLRRITRMVLVVVAVFIVCWTPIHIYVIIKALVTIPETTFQTVSWHFCIALGYTNSCLNPVLYAFLDENFKRCFREFCIPTSSNIEQQNSTRIRQNTRDHPSTANTVDRTNHQPPLAVSMAQIFTRYPPPTHREKTCNDYMKR

SEQ ID NO: 23274 - DNA, 1257 bp, Artificial Sequence
  derived and/or modified sequence
atggactcctccgccgcacctactaatgcatccaattgcacagatgccctcgcctatagttcctgcagccctgcccctagcccagggtcctgggtgaacctgtcacatctcgacgggaacttaagcgacccttgcggccctaatcggaccgacttgggggggcgtgatagcctgtgccccccaactgggtctccttcgatgatcaccgctattactatcatggcactgtattccatcgtgtgtgtggttggtctgtttgggaacttcctggttatgtatgtcatagttagatatactaaaatgaaaaccgccacaaatatttacatctttaatctggcgctcgcagacgctctagcgactagcacgcttcctttccagtccgtgaactatctgatgggtacctggccatttggaacaattctatgcaagatcgtgatatccatcgactactacaatatgtttacttcaatctttacgctctgcaccatgtcagtggatcgctacatagccgtttgccatccagtcaaggcactggactttagaacaccccgcaatgccaagattataaacgtgtgcaactggatcctgtcttccgcaattggactccccgtcatgttcatggccacgacaaagtaccggcagggttcaatagattgcacccttaccttctctcatccaacctggtattgggaaaacttgttaaagatttgtgtatttatatttgctttcatcatgcctgtgctaattataacagtgtgctacggactcatgatcctccggctcaagagtgtgcgcatgctcagtggctcaaaggagaaagaccgcaacctgagacggataactaggatggtgttagtggtggtggcagtgttcatagtgtgctggaccccaatccacatttacgttattattaaggctttggtaactattcctgagacgacattccagaccgtctcatggcacttttgtatagcccttggatacacaaattcctgcctgaatcccgtgctgtatgcctttctagatgagaatttcaagcgttgtttccgggagttttgcatccccacgagcagtaatatcgaacagcaaaactccactcgaatcaggcagaatacacgcgatcatccctctactgccaatacagtcgaccgcaccaatcaccagccccctctggctgtgtccatggctcaaatattcactagatacccacctccaacgcaccgggaaaagacttgtaatgattatatgaagcgttag

SEQ ID NO: 23275 - DNA, 1257 bp, Artificial Sequence
  derived and/or modified sequence
atggacagcagcgctgcccccaccaatgccagcaactgcacagatgccctggcctacagcagctgcagccctgcccccagccctggctcctgggtgaacctgagccacctggatggcaacctgagtgacccctgtggccccaacagaacagacctgggcggccgggacagcctgtgcccccccaccggcagccccagcatgatcacagccatcaccatcatggccctgtacagcatcgtgtgtgtggtgggcctgtttggaaacttcctggtgatgtatgtgattgtgcgctacaccaagatgaagacagccaccaacatctacatcttcaacctggccctggctgatgccctggccaccagcaccctgcccttccagagcgtgaactacctgatgggcacctggcccttcggcaccatcctgtgcaagatcgtcatcagcattgactactacaacatgttcaccagcatcttcaccctgtgcaccatgtctgtggaccgctacatcgctgtgtgccaccctgtgaaggccctggacttccgcaccccaagaaatgccaagatcatcaacgtgtgcaactggatcctgagcagcgccatcggcctgcctgtgatgttcatggccaccaccaagtaccggcagggcagcattgactgcaccctgaccttcagccaccccacctggtactgggagaacctgctgaagatctgtgtgttcatctttgccttcatcatgcctgtgctgatcatcaccgtgtgctacggcctgatgatcctgcggctgaagtctgtgaggatgctgagcggcagcaaggagaaggacaggaacctgcggcgcatcaccaggatggtgctggtggtggtggccgtgttcatcgtgtgctggacccccatccacatctacgtgatcatcaaggccctggtgaccatccctgagaccaccttccagacagtgtcctggcacttctgcatcgccctgggctacaccaacagctgcctgaaccctgtgctgtatgccttcctggatgagaacttcaagcgctgcttccgggagttctgcatccccaccagcagcaacatcgagcagcagaacagcacccgcatccggcagaacacccgggaccaccccagcacagccaacacagtggacaggaccaaccaccagccccccctggccgtgtccatggcccagatcttcacccgctaccccccacccacccaccgggagaagacctgcaatgactacatgaagaggtag

SEQ ID NO: 23276 - DNA, 1257 bp, Artificial Sequence
  derived and/or modified sequence
atggacagcagcgccgcccccaccaacgccagcaactgcaccgacgcactcgcgtattcatcctgcagtccagccccttctcccggctcctgggtgaacttgtcacacctggacggcaacctgtccgacccctgtggtccaaacaggactgatctagggggtcgggattccctctgtcccccaactggcagtccaagcatgattactgctatcacaataatggctctctatagtatcgtttgcgttgtgggcctgtttgggaatttccttgtgatgtacgtcatagtcagatacactaagatgaagactgccacaaacatttacatctttaatctcgctctggccgatgccctggccacaagcacgctaccctttcagtcagttaattacctgatgggtacgtggccctttggaacaatcctttgcaaaattgtaataagtatcgactactataatatgtttaccagcatattcaccctctgtacaatgtcagtcgatcgctacatcgctgtgtgtcaccctgtgaaggccctcgacttccggacgccgcgtaacgccaagattatcaacgtttgtaactggattctttcaagtgccatcggtctcccggtgatgtttatggcaactaccaagtaccgtcagggaagcatagactgtactctgaccttcagccaccctacttggtactgggaaaatctactgaaaatctgtgtatttatcttcgctttcattatgcctgttctcattatcacagtctgttacggattgatgatcctgcgccttaagtccgtcaggatgctctccgggagtaaagagaaggataggaacctgcgaaggattacaaggatggttctcgtggtggtggcagtcttcatcgtctgctggacgccaatccacatctatgttattatcaaagccctggtgaccattcctgaaacaacctttcagaccgtcagttggcacttctgcattgctctgggctacacgaattcatgtctaaatcctgtcctctatgctttcctggatgaaaactttaaacgatgcttcagagaattttgcatccctacttcatcgaatattgagcagcagaacagcacaaggataaggcaaaatacacgggaccacccttccacggcgaacaccgtggaccggacaaaccaccagcccccactggctgtgtcaatggctcagatcttcaccagataccctcctcctacccatagagaaaaaacctgtaacgactacatgaagcgctag

SEQ ID NO: 23277 - DNA, 1389 bp, Artificial Sequence
  derived and/or modified sequence
cggtgctcctggctacctcgcacagcggtgcccgcccggccgtcagtaccatggacagcagcgctgcccccacgaacgccagcaattgcactgatgccttggcgtactcaagttgctccccagcacccagccccggttcctgggtcaacttgtcccacttagatggcaacctgtccgacccatgcggtccgaaccgcaccgacctgggcgggagagacagcctgtgccctccgaccggcagtccctccatgatcacggccatcacgatcatggccctctactccatcgtgtgcgtggtggggctcttcggaaacttcctggtcatgtatgtgattgtcagatacaccaagatgaagactgccaccaacatctacattttcaaccttgctctggcagatgccttagccaccagtaccctgcccttccagagtgtgaattacctaatgggaacatggccatttggaaccatcctttgcaagatagtgatctccatagattactataacatgttcaccagcatattcaccctctgcaccatgagtgttgatcgatacattgcagtctgccaccctgtcaaggccttagatttccgtactccccgaaatgccaaaattatcaatgtctgcaactggatcctctcttcagccattggtcttcctgtaatgttcatggctacaacaaaatacaggcaaggttccatagattgtacactaacattctctcatccaacctggtactgggaaaacctgctgaagatctgtgttttcatcttcgccttcattatgccagtgctcatcattaccgtgtgctatggactgatgatcttgcgcctcaagagtgtccgcatgctctctggctccaaagaaaaggacaggaatcttcgaaggatcaccaggatggtgctggtggtggtggctgtgttcatcgtctgctggactcccattcacatttacgtcatcattaaagccttggttacaatcccagaaactacgttccagactgtttcttggcacttctgcattgctctaggttacacaaacagctgcctcaacccagtcctttatgcatttctggatgaaaacttcaaacgatgcttcagagagttctgtatcccaacctcttccaacattgagcaacaaaactccactcgaattcgtcagaacactagagaccacccctccacggccaatacagtggatagaactaatcatcagccacccttggcagtcagcatggcccagatctttacacgatatcctcctccgactcatcgtgagaaaacctgcaatgattacatgaagaggtagataatgtattaccctgatttggtaggtaaagtattatcctgatttatgtgacagagtgaaaggcaacttttaattgttaacc

SEQ ID NO: 23278 - DNA, 1017 bp, Artificial Sequence
  derived and/or modified sequence
ggaacccgaaaagtctcggtgctcctggctacctcgcacagcggtgcccgcccggccgtcagtaccatggacagcagcgctgcccccacgaacgccagcaattgcactgatgccttggcgtactcaagttgctccccagcacccagccccggttcctgggtcaacttgtcccacttagatggcaacctgtccgacccatgcggtccgaaccgcaccgacctgggcgggagagacagcctgtgccctccgaccggcagtccctccatgatcacggccatcacgatcatggccctctactccatcgtgtgcgtggtggggctcttcggaaacttcctggtcatgtatgtgattgtcaggttccatagattgtacactaacattctctcatccaacctggtactgggaaaacctgctgaagatctgtgttttcatcttcgccttcattatgccagtgctcatcattaccgtgtgctatggactgatgatcttgcgcctcaagagtgtccgcatgctctctggctccaaagaaaaggacaggaatcttcgaaggatcaccaggatggtgctggtggtggtggctgtgttcatcgtctgctggactcccattcacatttacgtcatcattaaagccttggttacaatcccagaaactacgttccagactgtttcttggcacttctgcattgctctaggttacacaaacagctgcctcaacccagtcctttatgcatttctggatgaaaacttcaaacgatgcttcagagagttctgtatcccaacctcttccaacattgagcaacaaaactccactcgaattcgtcagaacactagagaccacccctccacggccaatacagtggatagaactaatcatcagccacccttggcagtcagcatggcccagatctttacacgatatcctcctccgactcatcgtgagaaaacctgcaatgattacatgaagagggtaaagtattatcctgatttatgtgacagagtgaaaggcaacttttaatt

SEQ ID NO: 23279 - DNA, 1257 bp, Artificial Sequence
  derived and/or modified sequence
atggattcctcagccgcacccacaaatgccagcaactgtactgacgcgctagcctattctagctgcagcccagcaccgtcacctggctcgtgggttaatcttagtcatctggacggcaacctgagtgatccttgtggcccaaaccgcactgacctgggtggacgcgatagcctgtgcccacccactggcagcccctccatgattactgctatcaccattatggccctgtactctattgtgtgtgtagtcggactgttcggcaatttcctggtaatgtatgttattgtcagatacaccaagatgaagaccgcaactaacatatatatctttaaccttgccctggccgacgctcttgctacgtccacactgccctttcagtcagtcaattacctgatgggaacttggccctttggtacaattctgtgtaagatagtcatctctatcgactactacaacatgttcacttctattttcaccttgtgcaccatgtctgttgatagatacatcgccgtgtgtcatcctgtaaaggctttggatttccgaaccccccgtaatgcaaaaattattaacgtttgcaattggatactgagttctgctatcggcctgccggtaatgttcatggctaccacaaagtacagacaggggagtattgattgtacgctgacctttagccatccgacgtggtattgggaaaatctgctcaagatctgtgtctttatctttgcgttcatcatgcctgtacttattatcaccgtgtgctatggacttatgatcttacgtttgaagtccgtgaggatgctgtcaggttccaaggagaaggaccgaaaccttagacgcataacaagaatggtgttggtcgtggtggctgttttcattgtgtgttggaccccaatccacatttacgttattatcaaagcacttgttaccatccctgaaacaacattccagactgtgagctggcatttttgtattgccctggggtacacaaacagctgcctgaaccctgtcttatatgcatttctcgacgaaaacttcaagcgctgtttcagagaattctgcatcccgacttcatcgaacattgagcaacaaaactctaccagaatccggcaaaacacgagagaccacccctccactgcgaataccgtcgatagaactaatcatcagcctcctctggctgtatctatggcccaaatcttcactcggtatcccccacctacacacagggaaaaaacctgcaatgattacatgaagagatag

SEQ ID NO: 23280 - DNA, 1257 bp, Artificial Sequence
  derived and/or modified sequence
atggacagcagcgccgcccccaccaacgccagcaactgcaccgacgccctggcctacagcagctgcagccccgcccccagccccggcagctgggtgaacctgagccacctggacggcaacctgagcgacccctgcggccccaacagaaccgacctgggcggcagagacagcctgtgcccccccaccggcagccccagcatgatcaccgccatcaccatcatggccctgtacagcatcgtgtgcgtggtgggcctgttcggcaacttcctggtgatgtacgtgatcgtgagatacaccaagatgaagaccgccaccaacatctacatcttcaacctggccctggccgacgccctggccaccagcaccctgcccttccagagcgtgaactacctgatgggcacctggcccttcggcaccatcctgtgcaagatcgtgatcagcatcgactactacaacatgttcaccagcatcttcaccctgtgcaccatgagcgtggacagatacatcgccgtgtgccaccccgtgaaggccctggacttcagaacccccagaaacgccaagatcatcaacgtgtgcaactggatcctgagcagcgccatcggcctgcccgtgatgttcatggccaccaccaagtacagacagggcagcatcgactgcaccctgaccttcagccaccccacctggtactgggagaacctgctgaagatctgcgtgttcatcttcgccttcatcatgcccgtgctgatcatcaccgtgtgctacggcctgatgatcctgagactgaagagcgtgagaatgctgagcggcagcaaggagaaggacagaaacctgagaagaatcaccagaatggtgctggtggtggtggccgtgttcatcgtgtgctggacccccatccacatctacgtgatcatcaaggccctggtgaccatccccgagaccaccttccagaccgtgagctggcacttctgcatcgccctgggctacaccaacagctgcctgaaccccgtgctgtacgccttcctggacgagaacttcaagagatgcttcagagagttctgcatccccaccagcagcaacatcgagcagcagaacagcaccagaatcagacagaacaccagagaccaccccagcaccgccaacaccgtggacagaaccaaccaccagccccccctggccgtgagcatggcccagatcttcaccagataccccccccccacccacagagagaagacctgcaacgactacatgaagagatag

SEQ ID NO: 23281 - protein, 392 aa, Artificial Sequence
  derived and/or modified sequence
MDSSAAPTNASNCTDALAYSSCSPAPSPGSWVNLSHLDGNLSDPCGPNRTDLGGRDSLCPPTGSPSMITAITIMALYSIVCVVGLFGNFLVMYVIVRYTKMKTATNIYIFNLALADALATSTLPFQSVNYLMGTWPFGTILCKIVISIDYYNMFTSIFTLCTMSVDRYIAVCHPVKALDFRTPRNAKIINVCNWILSSAIGLPVMFMATTKYRQGSIDCTLTFSHPTWYWENLLKICVFIFAFIMPVLIITVCYGLMILRLKSVRMLSGSKEKDRNLRRITRMVLVVVAVFIVCWTPIHIYVIIKALVTIPETTFQTVSWHFCIALGYTNSCLNPVLYAFLDENFKRCFREFCIPTSSNIEQQNSTRIRQNTRDHPSTANTVDRTNHQVRSL

SEQ ID NO: 23282 - DNA, 1209 bp, Artificial Sequence
  derived and/or modified sequence
atggattcatccgccgctcccacgaatgcgtccaattgcaccgacgcgctggcttactcctcatgttcccctgcaccatcccctgggagttgggtgaatttatcccacttggacggtaatttaagcgacccttgtggaccaaaccgtacagacctgggaggcagggattccttgtgcccgccaacaggtagtccatctatgattactgccataaccataatggccctgtactcaatcgtgtgcgtggtgggtctgtttggaaacttcctggtgatgtatgtaatcgtgcgctacacaaaaatgaagaccgcgaccaacatttatattttcaaccttgcacttgcggacgcactggcaactagcactctgccttttcaaagtgtgaattacctgatgggaacatggcctttcggcacaatcctctgtaaaattgtgatttctatcgactattacaacatgttcacatccatcttcacgttgtgcacaatgtctgtagaccgctatattgcagtgtgtcatccagtgaaggccctggacttcagaacaccccggaacgcaaaaattatcaacgtgtgcaattggattttaagtagcgccatcggcctgcctgtaatgtttatggcaactactaagtatcggcaaggctctattgattgcaccctgacattctctcaccccacatggtactgggagaacttgctcaaaatttgtgtcttcattttcgctttcatcatgccagtgctcatcattaccgtgtgctatggattgatgatactcagactgaagtcagtgcgaatgctcagcggaagtaaagagaaagatagaaatctaaggagaatcacacgcatggtcctggtcgtggtggccgtgtttatagtttgctggacgccaattcatatctatgtgattataaaagctctcgtgacaattcctgaaactactttccagacggtgtcttggcacttctgtatcgctctgggctacacaaactcatgccttaacccagttctctacgccttcctggacgagaatttcaagagatgtttcagagagttttgtattcctacctcttcaaacatcgagcagcagaattcaactcgaatacggcagaatacccgtgaccatcctagtactgctaatactgtagaccgtacaaaccaccaaatccgcgatccaatcagcaatctgccccgggtgtccgtcttctag

SEQ ID NO: 23283 - DNA, 1179 bp, Artificial Sequence
  derived and/or modified sequence
atggactccagcgccgcccctaccaatgcatccaactgtactgatgcccttgcctattcgtcctgctctcctgctccaagcccagggtcctgggtgaatttatcccacctcgacggaaatctttccgacccatgtggcccaaataggacagatcttggaggtcgggattctctgtgtcctccaaccgggtctccatcgatgataaccgcaattaccattatggccctgtattctattgtttgcgtggtgggactgtttggtaattttctggtcatgtacgtgattgtcagatatactaagatgaaaacagccacgaatatatacatttttaacttagcactggccgacgctctggcaacgtcaaccttaccctttcagtccgtgaattacttgatggggacctggccttttggaacaatcttgtgtaagatcgttatctccatcgattactataatatgtttacatccatttttaccctctgcaccatgtcagtggatagatacattgcggtatgccacccggttaaagctcttgactttcgtacccctcggaacgcaaaaattattaatgtgtgcaattggattctgtctagcgccattgggctgcctgtgatgttcatggcaaccacgaagtaccggcagggcagtattgactgtacactcaccttctcccacccaacttggtactgggaaaatctattgaaaatttgtgtattcattttcgcgtttatcatgccggtgctgatcatcaccgtatgctatggactgatgatcctcagactcaagtccgtaaggatgctgtccgggtctaaagagaaagaccggaaccttcggagaattaccagaatggtgctcgtcgtcgtggccgtattcattgtgtgttggacgcctatccacatttacgtcattatcaaagctctcgtgaccatcccagaaaccacatttcagacagtatcttggcatttctgtatcgctctgggatataccaactcctgtctgaatcccgtgctctacgcatttttagacgagaattttaagaggtgcttcagagagttctgcattccaacctcatccaacatcgagcagcagaactcaactcgtattcgccagaatactcgcgaccacccgagtactgcgaacaccgtggaccggaccaaccatcaggttcgtagcctgtag

SEQ ID NO: 23284 - DNA, 1209 bp, Artificial Sequence
  derived and/or modified sequence
atggattccagtgcggcacctacaaatgcatcgaactgcactgatgcccttgcatactcgagttgtagccccgcacctagcccaggatcctgggttaatctttctcacctggacggcaacttaagtgacccatgtggaccaaacagaacagatctcggaggcagggattctctctgccctcccactgggtctccctccatgatcacagccatcaccatcatggccctgtattccatcgtttgcgtggtcggattgtttggaaattttctggtcatgtacgtgatcgttcgttatacaaagatgaagactgcaactaacatttacattttcaacctagccttggcagatgccctcgcaacctcaacccttcccttccagtcggtcaactatctcatgggtacctggccttttggaacaattttatgcaagatagtgatatccattgactactacaatatgtttacatcgatttttacattgtgcactatgtcagtcgatcggtatattgccgtgtgccaccccgtcaaagcactggacttcaggaccccacgaaatgctaaaattatcaacgtctgtaattggattttaagtagtgccatcggattgcctgtgatgttcatggctaccacaaaataccgacagggatccatcgactgcacactgactttttctcacccgacctggtattgggagaatctcctcaagatttgtgtatttatatttgccttcatcatgcccgtgcttattattactgtgtgctacgggctgatgatcttacgtcttaagagcgtgcgcatgctgagcgggtctaaagagaaagataggaacttacgccgaatcacacgtatggtccttgtggttgttgctgtgttcatcgtgtgttggactcccatccacatttacgttataatcaaggcccttgtgaccatcccagaaactacctttcagactgtatcctggcatttctgtattgctcttggctacacaaactcttgcttgaatccagtgctctacgccttcctggatgaaaattttaaacggtgcttcagagagttttgcattccaacgagtagcaacatcgagcagcaaaattccaccagaattcgacagaacacccgtgatcaccccagtaccgctaacaccgtggatcggaccaatcatcagatcagagatccgataagcaacctcccgagggtgtccgtattctag

SEQ ID NO: 23285 - DNA, 1209 bp, Artificial Sequence
  derived and/or modified sequence
atggattcctcggccgccccgaccaacgcctccaactgtaccgatgctctagcctactcctcctgcagtccagctccatctccaggctcctgggttaatttgagccatctagacggcaatttgagcgatccctgcggccctaatcggaccgatctgggaggacgtgactcactgtgtccaccaacagggtccccatctatgataaccgctattaccataatggccctctacagcatcgtttgcgttgttgggcttttcggaaactttctcgttatgtatgtgattgtgcggtatactaagatgaagaccgcaaccaatatatacattttcaatttggcactggctgacgcgttagccacttcaacactcccgttccagtccgtcaactaccttatgggaacatggccgtttggaaccattctgtgtaagatagtgatatccatcgactactacaacatgtttacttctatcttcaccctgtgcactatgtctgtagatcggtacatagcagtgtgtcaccccgtgaaagcactggacttcaggaccccaagaaacgcgaagatcatcaatgtttgcaactggatactgtcgagcgcgataggcctgcccgtcatgttcatggccaccaccaaataccgccagggctcgatcgactgtacactcactttctcacaccctacttggtactgggagaatctcctgaaaatttgcgtgtttatcttcgccttcataatgccagtcctcattataaccgtgtgttatggcctgatgatcctgaggttgaagagtgtcagaatgctttccgggtcaaaggagaaagataggaatctgaggagaattacccggatggtcctggtggtcgtggcggtgttcattgtctgttggacacccatccacatctatgtcatcattaaggcactggtgaccattcccgaaactacctttcagaccgtttcctggcacttctgtatcgctctaggctacactaactcttgtctgaaccccgtgttgtacgcattcctggacgagaactttaaacgttgctttcgcgaattttgtattcccacgtctagtaacattgagcagcagaacagtacacggatccgccagaatacccgcgaccatccatctactgccaatacagtggatcgcaccaatcatcagatccgagatcccattagcaacctgccgcgagtgtctgtcttctag

SEQ ID NO: 23286 - DNA, 1209 bp, Artificial Sequence
  derived and/or modified sequence
atggacagcagcgctgcccccaccaatgccagcaactgcacagatgccctggcctacagcagctgcagccctgcccccagccctggctcctgggtgaacctgagccacctggatggcaacctgagtgacccctgtggccccaacagaacagacctgggcggccgggacagcctgtgcccccccaccggcagccccagcatgatcacagccatcaccatcatggccctgtacagcatcgtgtgtgtggtgggcctgtttggaaacttcctggtgatgtatgtgattgtgcgctacaccaagatgaagacagccaccaacatctacatcttcaacctggccctggctgatgccctggccaccagcaccctgcccttccagagcgtgaactacctgatgggcacctggcccttcggcaccatcctgtgcaagatcgtcatcagcattgactactacaacatgttcaccagcatcttcaccctgtgcaccatgtctgtggaccgctacatcgctgtgtgccaccctgtgaaggccctggacttccgcaccccaagaaatgccaagatcatcaacgtgtgcaactggatcctgagcagcgccatcggcctgcctgtgatgttcatggccaccaccaagtaccggcagggcagcattgactgcaccctgaccttcagccaccccacctggtactgggagaacctgctgaagatctgtgtgttcatctttgccttcatcatgcctgtgctgatcatcaccgtgtgctacggcctgatgatcctgcggctgaagtctgtgaggatgctgagcggcagcaaggagaaggacaggaacctgcggcgcatcaccaggatggtgctggtggtggtggccgtgttcatcgtgtgctggacccccatccacatctacgtgatcatcaaggccctggtgaccatccctgagaccaccttccagacagtgtcctggcacttctgcatcgccctgggctacaccaacagctgcctgaaccctgtgctgtatgccttcctggatgagaacttcaagcgctgcttccgggagttctgcatccccaccagcagcaacatcgagcagcagaacagcacccgcatccggcagaacacccgggaccaccccagcacagccaacacagtggacaggaccaaccaccagatccgggaccccatcagcaacctgccccgggtgtctgtgttctag

SEQ ID NO: 23287 - DNA, 1179 bp, Artificial Sequence
  derived and/or modified sequence
atggacagcagcgctgcccccaccaatgccagcaactgcacagatgccctggcctacagcagctgcagccctgcccccagccctggctcctgggtgaacctgagccacctggatggcaacctgagtgacccctgtggccccaacagaacagacctgggcggccgggacagcctgtgcccccccaccggcagccccagcatgatcacagccatcaccatcatggccctgtacagcatcgtgtgtgtggtgggcctgtttggaaacttcctggtgatgtatgtgattgtgcgctacaccaagatgaagacagccaccaacatctacatcttcaacctggccctggctgatgccctggccaccagcaccctgcccttccagagcgtgaactacctgatgggcacctggcccttcggcaccatcctgtgcaagatcgtcatcagcattgactactacaacatgttcaccagcatcttcaccctgtgcaccatgtctgtggaccgctacatcgctgtgtgccaccctgtgaaggccctggacttccgcaccccaagaaatgccaagatcatcaacgtgtgcaactggatcctgagcagcgccatcggcctgcctgtgatgttcatggccaccaccaagtaccggcagggcagcattgactgcaccctgaccttcagccaccccacctggtactgggagaacctgctgaagatctgtgtgttcatctttgccttcatcatgcctgtgctgatcatcaccgtgtgctacggcctgatgatcctgcggctgaagtctgtgaggatgctgagcggcagcaaggagaaggacaggaacctgcggcgcatcaccaggatggtgctggtggtggtggccgtgttcatcgtgtgctggacccccatccacatctacgtgatcatcaaggccctggtgaccatccctgagaccaccttccagacagtgtcctggcacttctgcatcgccctgggctacaccaacagctgcctgaaccctgtgctgtatgccttcctggatgagaacttcaagcgctgcttccgggagttctgcatccccaccagcagcaacatcgagcagcagaacagcacccgcatccggcagaacacccgggaccaccccagcacagccaacacagtggacaggaccaaccaccaggtgcgcagcctgtag

SEQ ID NO: 23288 - DNA, 1209 bp, Artificial Sequence
  derived and/or modified sequence
atggacagcagcgccgcccccaccaacgccagcaactgcaccgacgcgcttgcctactctagctgttctcccgctccttcaccaggaagttgggttaatctgtctcatctcgacggaaaccttagcgacccttgtggccctaaccggacagatctgggcggccgggatagcttatgtcctcccacaggatccccaagcatgattaccgccatcacaattatggctttgtattcaatcgtgtgtgtagtagggctgttcggcaactttttagtgatgtacgtgattgtgaggtatacaaagatgaagactgcaacaaatatttacatcttcaatctggccctggccgatgcgctcgccacttcaactctaccatttcagtccgtcaactacctgatgggcacttggccgtttggaacaattctctgtaaaattgtgatctccatcgattactataacatgttcacctccatcttcactctttgcacaatgagcgtggacagatatatcgccgtgtgccaccctgttaaagctctcgactttaggacgccccgcaacgctaagatcattaatgtatgcaattggatattgagcagcgcaatagggctgccagtgatgttcatggccacaacaaagtatagacagggctcgatagactgtacactgactttcagtcaccccacttggtactgggaaaatttgctcaagatctgtgtgtttatttttgcatttatcatgcccgtgctgataattactgtgtgttatggtctgatgattctcagactcaaatcagtacgtatgttatctggctcaaaggaaaaggatcgtaatctacgtagaataaccaggatggtgctcgtcgttgtcgctgtgttcatcgtatgttggacgcccattcatatttacgtgattatcaaggcccttgtcaccatccctgagactacttttcagaccgtgtcctggcacttttgtatagcacttggctacacgaactcttgtcttaatcccgttctctatgcttttctagacgagaacttcaagagatgcttcagagagttttgcattcctaccagttcaaacatcgaacagcagaactcaacacgaatccgacagaatacacgagatcacccaagcactgcgaatactgtagatcggaccaatcatcagataagagacccgattagtaacctacccagggtaagtgtgttctag

SEQ ID NO: 23289 - DNA, 1179 bp, Artificial Sequence
  derived and/or modified sequence
atggacagcagcgccgcccccaccaacgccagcaactgcaccgacgctctggcatatagctcatgcagccccgcaccttcccctggcagctgggtgaatttgtctcatctcgatggaaaccttagtgatccttgtggccctaatagaaccgatctgggcggacgagacagcttatgcccccccaccggaagcccaagcatgatcacagccattacgattatggccttatatagcattgtgtgtgttgtggggctattcgggaacttcctagtgatgtacgttattgtccgatatacgaaaatgaaaacagcgactaacatttatatcttcaatctggctcttgccgacgcactggccacttccaccttgccattccagagtgtcaactatctcatgggaacatggcctttcgggaccattctctgcaaaattgtaattagtattgattactacaatatgttcacatccattttcacactgtgtaccatgagcgtggataggtacattgctgtgtgccatcccgtaaaagcactagattttaggacacctcgcaacgccaagatcatcaacgtctgtaactggatactgtcaagcgccatcgggctgcccgtgatgttcatggcaaccacaaagtaccgacagggcagcattgattgtaccctgaccttcagccaccctacctggtattgggaaaaccttctgaagatctgtgtttttatattcgcgttcataatgccagtcctgataataacggtttgctacggcctcatgatcctgcgcctgaagtcagtcagaatgttatcagggtcaaaagaaaaggacaggaacttaaggcgaattacgcgtatggttttggtggttgtcgccgttttcattgtctgctggacacctatccatatttacgtgataattaaggctttagtgactatccctgagaccacattccagacagtcagttggcatttttgcatcgcgctgggctatacgaattcatgccttaacccagtactgtacgcctttttggatgagaattttaagcgctgtttccgtgagttttgtattccaacatcttctaacatcgagcagcagaatagtactagaattaggcaaaacactcgtgaccatccatctaccgcgaatactgttgatagaacgaaccaccaggtcagatcactctag

SEQ ID NO: 23290 - DNA, 1209 bp, Artificial Sequence
  derived and/or modified sequence
atggacagcagcgccgcccccaccaacgccagcaactgcaccgacgccctagcatactcctcatgttctccggccccatccccagggtcctgggtgaacctgagtcatcttgatggcaacttaagtgatccctgcggtcctaaccgaaccgacctgggcggccgagactctctttgcccccccactggatccccatcaatgatcacagcaatcacgatcatggcactgtacagcatcgtttgtgtcgtgggactgttcggtaattttttggtgatgtacgttattgtgaggtacacaaagatgaaaacggccacaaacatttacatctttaatttagcgctggcggacgccctggctacatctactctgccattccaaagtgtgaactatcttatgggcacatggcccttcggcactattttgtgcaagatcgtaatctctatagactactataatatgtttacgagcatattcacgttatgcactatgtccgtagataggtacatcgccgtgtgtcatccagtcaaggccctcgacttcagaacgccccgtaacgccaagattatcaatgtttgcaactggatcttgagcagcgccataggtctccctgtcatgttcatggcgactaccaagtataggcaaggatccattgattgtacactcacatttagccatcccacctggtactgggaaaatctgttgaaaatttgtgtctttatctttgctttcattatgccggtactgattataacagtgtgctacggactgatgatacttagactgaagagcgtcagaatgctctcgggatctaaagagaaggaccggaacctgaggcgcataaccagaatggtgctagtcgtcgtcgccgtgtttattgtctgttggactcctattcacatctacgtgatcatcaaagccctcgtgacaatccctgaaacaacatttcagactgtcagctggcacttctgtatcgccctgggctacaccaactcttgcctaaatcccgtgctttacgcttttctggatgagaacttcaaacggtgtttccgagagttttgtattcctaccagcagtaatatagaacaacagaattcaacccgcataagacaaaacacgcgagaccatcctagcacagccaatactgtcgacagaaccaatcaccagatccgtgaccctataagtaacctgccacgagtgtctgtgttttag

SEQ ID NO: 23291 - DNA, 1209 bp, Artificial Sequence
  derived and/or modified sequence
atggacagcagcgccgcccccaccaacgccagcaactgcaccgacgctctcgcctactccagctgttcccctgctccgtcccccgggagctgggtgaacctgagtcacctagatggaaatctttcggacccatgcggaccaaaccggactgatctcggcggtagggactccttatgccctcccacagggagcccttctatgattacggcaattaccataatggccttgtattcgatcgtgtgtgtggttggcctgtttgggaattttttggtgatgtatgtgatagtgcgatatacgaaaatgaaaacggccaccaatatttatatctttaacctggccctggctgatgcccttgccacaagcacacttcctttccagtcagtaaattatctaatgggcacctggcctttcggcacaatactatgtaaaatcgtcatctctatcgattactacaacatgttcacatccatttttacactgtgcaccatgtctgtggaccgttacattgccgtgtgccatcctgtgaaagctcttgactttagaaccccacgaaatgccaagattatcaatgtgtgtaattggatcctgtcgtccgccatcgggctgcccgttatgtttatggctacaaccaaatatcgccagggctcaatcgactgtactctgacatttagccacccgacctggtactgggaaaaccttcttaagatctgtgtgttcattttcgccttcataatgcctgttttaatcataactgtatgctatgggctgatgatcctgagactgaagtccgtacggatgctttccggcagtaaggagaaggacaggaacctacgcaggataacccggatggtgctcgtagtggtcgctgtgtttatcgtgtgctggacgcccatccatatctatgtgatcatcaaggctcttgtcactatcccggaaaccactttccaaactgtgtcttggcacttctgtattgccttgggttatacaaactcctgcctcaaccccgtcctctatgcatttctcgacgaaaactttaagagatgcttcagagagttctgcatccctaccagttcaaacatagagcagcagaattcaactcgtattcggcaaaatacgcgagaccacccgagcaccgctaacacagtggaccgaactaatcaccagatccgcgaccctatttcaaacttgccgagagtctctgtcttctag

SEQ ID NO: 23292 - DNA, 1209 bp, Artificial Sequence
  derived and/or modified sequence
atggactcctccgccgctcctaccaacgcgtcaaattgcaccgatgcgctggcatactcatcatgcagtcctgccccttcccccggaagctgggttaatttgtcacacctggacggcaacctgagcgacccatgtggacctaaccgcacagaccttgggggtcgcgatagcctgtgtcctcctactggcagtccttccatgatcaccgctattaccataatggccctgtattccatcgtctgtgtggttggtcttttcggtaacttcttagtgatgtacgtcattgttaggtacacaaagatgaaaacagccacaaatatttatatcttcaatctagctctagccgacgctcttgcgacgtctaccctcccttttcaatccgtcaattatttaatggggacctggccattcggcaccattttgtgtaagattgtcatctctattgactactacaatatgtttacatccattttcaccctgtgcacaatgagcgtggatagatacatcgcggtttgccatcccgttaaagcactggattttcgcacgcccaggaacgcaaaaatcataaatgtgtgcaactggatactttcctcagcaatcgggctccccgtgatgttcatggctacaacaaagtatcggcagggcagtattgactgtacactgactttctcccaccccacttggtactgggagaacctgctcaaaatttgcgtttttatctttgcctttattatgccagtcctgattataaccgtgtgttacggtcttatgatccttcgtctgaaaagcgtccgcatgctgagtggtagcaaagagaaggaccggaacttacgtcggatcacgcgcatggtgctggtggtggtcgctgtgttcatcgtttgttggacaccaatacatatctatgtgataatcaaagctctcgtgacgattcccgagacaacgtttcagactgtgtcctggcacttttgtatcgccttggggtatacaaatagttgcctgaaccccgtcctgtatgcattcctagacgagaatttcaagagatgcttcagagagttctgcatcccaacctcatccaatattgagcaacagaatagtactcggattagacagaacaccagggaccatccgagtaccgccaataccgtcgacaggactaaccaccagataagggatccaatctccaacctgcctagggtgagtgtcttttag

SEQ ID NO: 23293 - DNA, 1179 bp, Artificial Sequence
  derived and/or modified sequence
atggattcgagtgcggctcctactaacgcttccaactgtaccgatgcccttgcgtactcttcctgttcacccgctcctagccctgggagttgggttaatctgagtcacctagacgggaatctgtcagatccgtgtgggcctaatcgaacggacctcggcggtagagactctttatgccccccaactggctcaccctcaatgatcaccgctatcacaattatggccctgtacagtatagtttgtgtggtcggcctgtttggcaattttcttgtgatgtatgtgatcgtgcgctacactaaaatgaagaccgccaccaacatttatatcttcaatctggccctggcggacgccctggccacatcaactctcccctttcagtcagtgaattacctgatgggcacatggcccttcggcactattctctgcaagatcgttattagcatcgactactataatatgttcacgagtatatttactctgtgcaccatgtccgtggaccgttacattgctgtatgccacccagtgaaggccttggacttccgcaccccccgtaacgcaaagattattaatgtgtgtaattggatcctgagttcagccataggactcccagtgatgtttatggctactaccaagtataggcagggctctatagactgcacgctgaccttctctcatccaacttggtactgggaaaacctgttgaagatctgcgttttcatttttgcctttatcatgccagtactgattataacggtttgctatgggctgatgatcctgcgccttaaatctgtgaggatgctctcgggctccaaggagaaagacagaaacttaagaaggattacaaggatggttcttgtcgttgtggcggtctttatcgtgtgctggacccccatccacatttacgtcatcattaaggcactggtaaccattcccgaaactacattccagaccgtcagttggcatttctgtatagcactaggatataccaattcctgcctgaaccctgttctgtacgctttccttgacgaaaatttcaagaggtgttttcgcgagttttgtatccccacctccagtaacattgagcagcagaatagcactagaatacgccagaatacgcgggaccatccgagcacagccaacactgtggacaggaccaaccaccaagttaggagtctttag

SEQ ID NO: 23294 - DNA, 1209 bp, Artificial Sequence
  derived and/or modified sequence
atggattcctctgccgctcccactaatgcgtccaattgtaccgatgccttagcatacagttcctgtagtcctgccccatcacccggttcgtgggtgaacctcagccacttggatggaaacctgagcgacccctgcggacccaatcgaactgatctgggaggcagggatagcctctgtccacctaccggttctccatctatgattacggccatcacaattatggcactgtattccatcgtatgcgtggttggtttatttggcaacttcttagtcatgtacgtcatcgtgagatacacaaaaatgaagacagccacaaacatttatatcttcaatctcgccctcgcagatgccttggccacctcaacgctgccgttccaaagcgtgaactacctgatgggaacatggccctttggaaccattctatgtaaaattgtgatctcaattgactactataacatgttcacatcaattttcacattgtgtacaatgagcgtggaccggtatatcgccgtctgtcatccagtgaaggcactggattttcgaacacctcgcaacgctaagataataaacgtgtgtaattggatcttgtcgagcgctatagggctcccagtgatgtttatggcaaccacaaaatacagacaagggtctatcgactgcaccctgaccttttctcacccaacctggtattgggagaatctgctcaagatctgcgttttcatcttcgccttcattatgccggttctgatcatcacagtgtgttatggcctgatgatactgaggctcaagtccgtccggatgttgtcaggctctaaggagaaggaccgtaatctgcggcgaatcacgcgcatggtattagtggtagtggcagtgttcattgtctgctggactcccatccacatctacgtgattataaaggctttggtgacaatccctgaaacaactttccaaacagtctcctggcacttctgcatagccttagggtatactaactcatgcctgaatccagttctctatgcttttctggacgagaatttcaaaaggtgtttccgagagttctgcatcccaacaagttctaatatcgagcagcaaaactctacccggatccggcagaacacgcgcgatcacccctccactgcaaacaccgtggatagaacaaaccaccagattagagatcctatctccaacctcccccgagtcagcgtgttctag

SEQ ID NO: 23295 - DNA, 1209 bp, Artificial Sequence
  derived and/or modified sequence
atggattcttcagcagctccaaccaacgcttccaactgtactgacgcgctcgcgtatagctcttgcagccctgcgccttctccgggaagctgggtcaacctgagtcacctcgacgggaatctgtccgatccttgcgggcctaatcgaaccgacttgggagggagggatagtctatgtccccctacaggtagcccttccatgatcaccgccataacaatcatggccctgtactcaatagtatgtgtagtcgggctgtttggcaacttccttgtgatgtacgtgatagtccgctataccaaaatgaagacagctacaaacatctacatcttcaaccttgctttagctgacgctttagcgactagcacgctgcccttccagtccgtgaattacttgatggggacgtggcctttcgggacaatactctgtaagatagttatcagcatcgactattataacatgtttacttcaatctttactctgtgcactatgtccgtcgatcggtatatagcggtctgtcatcctgttaaggccttggactttagaacaccaaggaacgcgaaaatcatcaatgtttgcaactggatcctctcctccgccatagggctgcccgtgatgtttatggcaactaccaaataccgccaggggagcatcgattgcacattgaccttcagccatcccacctggtactgggaaaacctgttgaaaatctgcgttttcattttcgctttcatcatgcctgtcctaattataaccgtgtgttacggcctcatgattcttcgcctcaagtccgtccgcatgctgtcaggcagtaaagaaaaggataggaaccttcggagaattaccaggatggttctagtagtggtggctgtcttcatcgtttgctggacaccgattcatatctatgttatcattaaggctcttgtgactatccctgagacgacatttcagacagtctcctggcacttttgcatcgcccttggatatacgaacagttgcctcaatccagtcctgtacgccttcctggacgagaactttaagcggtgcttccgcgaattttgtattcctacatcttcaaatattgaacagcagaactcaacccggatccgacagaacactagagaccatcctagcaccgctaacaccgtggacagaactaatcaccaaataagagatccaatcagtaacctccctagagttagcgtgttttag

SEQ ID NO: 23296 - DNA, 1209 bp, Artificial Sequence
  derived and/or modified sequence
atggacagcagcgccgcccccaccaacgccagcaactgcaccgacgccctggcctacagcagctgcagccccgcccccagccccggcagctgggtgaacctgagccacctggacggcaacctgagcgacccctgcggccccaacagaaccgacctgggcggcagagacagcctgtgcccccccaccggcagccccagcatgatcaccgccatcaccatcatggccctgtacagcatcgtgtgcgtggtgggcctgttcggcaacttcctggtgatgtacgtgatcgtgagatacaccaagatgaagaccgccaccaacatctacatcttcaacctggccctggccgacgccctggccaccagcaccctgcccttccagagcgtgaactacctgatgggcacctggcccttcggcaccatcctgtgcaagatcgtgatcagcatcgactactacaacatgttcaccagcatcttcaccctgtgcaccatgagcgtggacagatacatcgccgtgtgccaccccgtgaaggccctggacttcagaacccccagaaacgccaagatcatcaacgtgtgcaactggatcctgagcagcgccatcggcctgcccgtgatgttcatggccaccaccaagtacagacagggcagcatcgactgcaccctgaccttcagccaccccacctggtactgggagaacctgctgaagatctgcgtgttcatcttcgccttcatcatgcccgtgctgatcatcaccgtgtgctacggcctgatgatcctgagactgaagagcgtgagaatgctgagcggcagcaaggagaaggacagaaacctgagaagaatcaccagaatggtgctggtggtggtggccgtgttcatcgtgtgctggacccccatccacatctacgtgatcatcaaggccctggtgaccatccccgagaccaccttccagaccgtgagctggcacttctgcatcgccctgggctacaccaacagctgcctgaaccccgtgctgtacgccttcctggacgagaacttcaagagatgcttcagagagttctgcatccccaccagcagcaacatcgagcagcagaacagcaccagaatcagacagaacaccagagaccaccccagcaccgccaacaccgtggacagaaccaaccaccagatcagagaccccatcagcaacctgcccagagtgagcgtgttctag

SEQ ID NO: 23297 - DNA, 1179 bp, Artificial Sequence
  derived and/or modified sequence
atggacagcagcgccgcccccaccaacgccagcaactgcaccgacgccctggcctacagcagctgcagccccgcccccagccccggcagctgggtgaacctgagccacctggacggcaacctgagcgacccctgcggccccaacagaaccgacctgggcggcagagacagcctgtgcccccccaccggcagccccagcatgatcaccgccatcaccatcatggccctgtacagcatcgtgtgcgtggtgggcctgttcggcaacttcctggtgatgtacgtgatcgtgagatacaccaagatgaagaccgccaccaacatctacatcttcaacctggccctggccgacgccctggccaccagcaccctgcccttccagagcgtgaactacctgatgggcacctggcccttcggcaccatcctgtgcaagatcgtgatcagcatcgactactacaacatgttcaccagcatcttcaccctgtgcaccatgagcgtggacagatacatcgccgtgtgccaccccgtgaaggccctggacttcagaacccccagaaacgccaagatcatcaacgtgtgcaactggatcctgagcagcgccatcggcctgcccgtgatgttcatggccaccaccaagtacagacagggcagcatcgactgcaccctgaccttcagccaccccacctggtactgggagaacctgctgaagatctgcgtgttcatcttcgccttcatcatgcccgtgctgatcatcaccgtgtgctacggcctgatgatcctgagactgaagagcgtgagaatgctgagcggcagcaaggagaaggacagaaacctgagaagaatcaccagaatggtgctggtggtggtggccgtgttcatcgtgtgctggacccccatccacatctacgtgatcatcaaggccctggtgaccatccccgagaccaccttccagaccgtgagctggcacttctgcatcgccctgggctacaccaacagctgcctgaaccccgtgctgtacgccttcctggacgagaacttcaagagatgcttcagagagttctgcatccccaccagcagcaacatcgagcagcagaacagcaccagaatcagacagaacaccagagaccaccccagcaccgccaacaccgtggacagaaccaaccaccaggtgagaagcctgtag

SEQ ID NO: 23298 - protein, 446 aa, Artificial Sequence
  derived and/or modified sequence
MDSSAAPTNASNCTDALAYSSCSPAPSPGSWVNLSHLDGNLSDPCGPNRTDLGGRDSLCPPTGSPSMITAITIMALYSIVCVVGLFGNFLVMYVIVRYTKMKTATNIYIFNLALADALATSTLPFQSVNYLMGTWPFGTILCKIVISIDYYNMFTSIFTLCTMSVDRYIAVCHPVKALDFRTPRNAKIINVCNWILSSAIGLPVMFMATTKYRQGSIDCTLTFSHPTWYWENLLKICVFIFAFIMPVLIITVCYGLMILRLKSVRMLSGSKEKDRNLRRITRMVLVVVAVFIVCWTPIHIYVIIKALVTIPETTFQTVSWHFCIALGYTNSCLNPVLYAFLDENFKRCFREFCIPTSSNIEQQNSTRIRQNTRDHPSTANTVDRTNHQCLPIPSLSCWALEQGCLVVYPGPLQGPLVRYDLPAILHSSCLRGNTAPSPSGGAFLLS

SEQ ID NO: 23299 - DNA, 1341 bp, Artificial Sequence
  derived and/or modified sequence
atggattcctctgccgccccgacaaacgccagtaactgtactgacgctctcgcctactcttcctgttcacctgcgccctccccaggttcttgggtaaatctgagccaccttgacggtaatctgtcagacccatgtggaccaaatcgaactgacctcggggggagagattccctgtgcccaccaaccggatcgccgtctatgatcacagcgataacgataatggccctctactcaattgtttgcgtggtcggcctgttcggcaacttcttagtaatgtatgttattgtacgctatacgaagatgaagaccgcaactaacatctatatatttaaccttgcccttgcagacgcactcgcaacttccacgctcccatttcaatctgtaaattacttaatggggacctggcctttcggcacgatattatgcaaaatcgttatctctatcgactactataacatgtttacgtcgattttcactctctgtacgatgagcgttgacagatacattgctgtgtgccatcccgtgaaggcgctcgacttccggactcccaggaacgcaaaaatcatcaatgtgtgtaactggatcctctcttctgcgattggactgcctgtgatgttcatggccactacgaagtatcggcagggctcaatcgactgcacactcaccttcagtcatcccacctggtattgggaaaacctactcaagatatgcgtgtttatatttgccttcatcatgccagtgctgataattacagtgtgctatggcctgatgattcttcgtctgaaatctgttcggatgctgagcggcagcaaggaaaaagaccgcaatctgagacggataacccggatggtgctggtggtagtggccgtgttcattgtctgctggacccccatacacatctacgttataattaaggctctggtaacgattcccgagaccacattccagacagtctcctggcatttttgcatcgcactgggttacacaaactcatgtttgaaccccgtactttacgcctttctggatgaaaacttcaaacgatgttttcgagagttctgcataccaaccagctcgaacatcgaacagcagaacagcacacggatccggcaaaacacccgggaccacccgagcacggccaatactgtcgatagaactaatcaccaatgtcttccaattccttctctttcctgttgggccctcgagcaaggctgcctagtcgtctatccaggtcccctgcaggggccactggtccgttacgatctgcccgccatcctgcactccagttgcctgaggggcaataccgccccttcaccctccggaggggcctttctcttatcttag

SEQ ID NO: 23300 - DNA, 1341 bp, Artificial Sequence
  derived and/or modified sequence
atggacagcagcgctgcccccaccaatgccagcaactgcacagatgccctggcctacagcagctgcagccctgcccccagccctggctcctgggtgaacctgagccacctggatggcaacctgagtgacccctgtggccccaacagaacagacctgggcggccgggacagcctgtgcccccccaccggcagccccagcatgatcacagccatcaccatcatggccctgtacagcatcgtgtgtgtggtgggcctgtttggaaacttcctggtgatgtatgtgattgtgcgctacaccaagatgaagacagccaccaacatctacatcttcaacctggccctggctgatgccctggccaccagcaccctgcccttccagagcgtgaactacctgatgggcacctggcccttcggcaccatcctgtgcaagatcgtcatcagcattgactactacaacatgttcaccagcatcttcaccctgtgcaccatgtctgtggaccgctacatcgctgtgtgccaccctgtgaaggccctggacttccgcaccccaagaaatgccaagatcatcaacgtgtgcaactggatcctgagcagcgccatcggcctgcctgtgatgttcatggccaccaccaagtaccggcagggcagcattgactgcaccctgaccttcagccaccccacctggtactgggagaacctgctgaagatctgtgtgttcatctttgccttcatcatgcctgtgctgatcatcaccgtgtgctacggcctgatgatcctgcggctgaagtctgtgaggatgctgagcggcagcaaggagaaggacaggaacctgcggcgcatcaccaggatggtgctggtggtggtggccgtgttcatcgtgtgctggacccccatccacatctacgtgatcatcaaggccctggtgaccatccctgagaccaccttccagacagtgtcctggcacttctgcatcgccctgggctacaccaacagctgcctgaaccctgtgctgtatgccttcctggatgagaacttcaagcgctgcttccgggagttctgcatccccaccagcagcaacatcgagcagcagaacagcacccgcatccggcagaacacccgggaccaccccagcacagccaacacagtggacaggaccaaccaccagtgcctgcccatccccagcctgagctgctgggccctggagcagggctgcctggtggtgtacccaggccccctgcagggccccctggtgcgctatgacctgcctgccatcctgcacagcagctgcctgcggggcaacacagcccccagccccagcggcggggccttcctgctgtcctag

SEQ ID NO: 23301 - DNA, 1341 bp, Artificial Sequence
  derived and/or modified sequence
atggacagcagcgccgcccccaccaacgccagcaactgcaccgacgccttagcatacagttcgtgctctcccgctcctagtccaggatcctgggtgaatctgtctcatctcgatggcaacctgagcgatccatgtggacccaaccgaaccgatctgggcggaagggactctttatgccccccaactggaagcccatcaatgattacagccattactatcatggccttgtactccattgtgtgcgtggtgggcctgtttgggaatttcctggtgatgtacgttattgtcaggtacactaagatgaaaacagcaaccaacatctatatctttaatctggctctggctgacgctcttgctacttcgaccctcccattccagtctgtgaactacctcatgggaacatggccattcgggaccatactctgcaagattgtgatatctatcgattactataacatgttcaccagcatcttcaccctgtgtaccatgtctgtcgacagatacatagcagtgtgtcatccagtgaaagcactggactttcgcactcccagaaatgccaagattatcaacgtgtgcaattggattctttcatctgcgattggtctccccgttatgttcatggctactaccaaataccgccagggttccatagattgtacacttactttcagccaccccacctggtactgggagaacctcctaaagatctgtgtgttcatttttgctttcattatgcctgtattaatcatcactgtctgctatggtctgatgattttgcggctgaaatcagtgcgcatgctgtcaggcagtaaagaaaaggataggaacctgagacggatcacccgcatggtcttggtggtggttgctgtgtttatcgtttgctggacccccatccatatctacgtgatcattaaggctctggtgaccattcctgagacaacctttcagactgttagctggcatttctgcattgcgctgggatatacgaacagctgcttaaatcccgttttatatgctttcttagacgagaacttcaaaaggtgtttccgcgagttttgcataccaacctctagcaacattgaacaacagaattctacacgaattagacagaacaccagggaccacccaagcacggcaaacaccgtggatcggaccaatcatcagtgtcttccgattccctcattgagttgctgggcactggagcaagggtgtctggttgtgtacccaggcccgcttcagggacctcttgtgcgatacgacctgcctgctattctgcactcctcatgtttgaggggcaataccgcccctagcccttcaggtggcgcatttctcctctcctag

SEQ ID NO: 23302 - DNA, 1465 bp, Artificial Sequence
  derived and/or modified sequence
cggtgctcctggctacctcgcacagcggtgcccgcccggccgtcagtaccatggacagcagcgctgcccccacgaacgccagcaattgcactgatgccttggcgtactcaagttgctccccagcacccagccccggttcctgggtcaacttgtcccacttagatggcaacctgtccgacccatgcggtccgaaccgcaccgacctgggcgggagagacagcctgtgccctccgaccggcagtccctccatgatcacggccatcacgatcatggccctctactccatcgtgtgcgtggtggggctcttcggaaacttcctggtcatgtatgtgattgtcagatacaccaagatgaagactgccaccaacatctacattttcaaccttgctctggcagatgccttagccaccagtaccctgcccttccagagtgtgaattacctaatgggaacatggccatttggaaccatcctttgcaagatagtgatctccatagattactataacatgttcaccagcatattcaccctctgcaccatgagtgttgatcgatacattgcagtctgccaccctgtcaaggccttagatttccgtactccccgaaatgccaaaattatcaatgtctgcaactggatcctctcttcagccattggtcttcctgtaatgttcatggctacaacaaaatacaggcaaggttccatagattgtacactaacattctctcatccaacctggtactgggaaaacctgctgaagatctgtgttttcatcttcgccttcattatgccagtgctcatcattaccgtgtgctatggactgatgatcttgcgcctcaagagtgtccgcatgctctctggctccaaagaaaaggacaggaatcttcgaaggatcaccaggatggtgctggtggtggtggctgtgttcatcgtctgctggactcccattcacatttacgtcatcattaaagccttggttacaatcccagaaactacgttccagactgtttcttggcacttctgcattgctctaggttacacaaacagctgcctcaacccagtcctttatgcatttctggatgaaaacttcaaacgatgcttcagagagttctgtatcccaacctcttccaacattgagcaacaaaactccactcgaattcgtcagaacactagagaccacccctccacggccaatacagtggatagaactaatcatcagtgcctacctataccttccctgtcttgctgggctctagagcaaggctgcttggttgtgtaccctggaccactgcaaggacctcttgtcagatatgacctcccagctatccttcactcgtcctgccttcgtggaaatactgctcccagcccgtctggtggagcatttctcctgagttaagcatgattattcttcagttgcccgacactgcccttgactcccttccaaattcggcattttcacatcagtatggc

SEQ ID NO: 23303 - DNA, 1341 bp, Artificial Sequence
  derived and/or modified sequence
atggatagttctgccgctccaaccaacgcaagcaattgtacagacgccctggcgtattcctcctgcagtcctgctccaagtccaggaagttgggtcaacctgtcccatcttgatggcaacctgtcagacccttgtggcccaaaccgaactgatctggggggacgagattcactctgccccccaacgggcagcccctctatgatcactgccattactatcatggctctatacagcatcgtatgtgtggtagggttgttcggcaatttcctggtgatgtatgtgatagttcggtacaccaagatgaagaccgcgaccaatatctacatctttaatcttgctctggcggatgccctcgccactagcacgctcccattccagtctgtcaactatctgatgggtacctggcctttcgggacaattttgtgtaaaatcgtaataagcattgactattacaatatgtttacctcgatcttcaccctctgcaccatgagcgtggaccggtacattgccgtgtgtcatccagtgaaggctctggatttcaggacaccacgcaatgcaaaaatcatcaacgtctgtaactggattctcagtagcgccatcggcctacctgtgatgttcatggctactacgaagtatcgtcagggaagcatcgattgcacgctaacgtttagccatccaacatggtattgggagaacttgctgaaaatctgcgtgtttatttttgcctttatcatgcccgttctaatcatcacagtgtgctacggactaatgatactgcgcctgaaaagtgtgagaatgttgtcaggaagtaaagagaaagacagaaatttacgacgcatcactcggatggttctggtagttgttgccgtatttattgtctgctggaccccgattcatatttatgtgatcatcaaagcactagtgacaatacctgagacaacctttcaaaccgtgtcatggcacttttgtattgccttaggttataccaatagctgtttgaatccggtgctttatgcgttcctggacgagaactttaagaggtgcttccgcgagttttgtatacccacctcctctaatattgagcaacagaacagcacccgcatccgccagaacacgcgagaccatccatcaactgccaataccgtggacaggaccaaccaccaatgccttcccatcccaagtctatcatgttgggcgctggagcaaggatgtttagtggtgtatccaggaccactacagggaccactcgtgaggtacgacctgcctgccatattgcacagttcttgcttacgaggtaacactgcccctagcccgagtggtggcgcttttttgctgtcatag

SEQ ID NO: 23304 - DNA, 1341 bp, Artificial Sequence
  derived and/or modified sequence
atggacagcagcgccgcccccaccaacgccagcaactgcaccgacgccctggcctacagcagctgcagccccgcccccagccccggcagctgggtgaacctgagccacctggacggcaacctgagcgacccctgcggccccaacagaaccgacctgggcggcagagacagcctgtgcccccccaccggcagccccagcatgatcaccgccatcaccatcatggccctgtacagcatcgtgtgcgtggtgggcctgttcggcaacttcctggtgatgtacgtgatcgtgagatacaccaagatgaagaccgccaccaacatctacatcttcaacctggccctggccgacgccctggccaccagcaccctgcccttccagagcgtgaactacctgatgggcacctggcccttcggcaccatcctgtgcaagatcgtgatcagcatcgactactacaacatgttcaccagcatcttcaccctgtgcaccatgagcgtggacagatacatcgccgtgtgccaccccgtgaaggccctggacttcagaacccccagaaacgccaagatcatcaacgtgtgcaactggatcctgagcagcgccatcggcctgcccgtgatgttcatggccaccaccaagtacagacagggcagcatcgactgcaccctgaccttcagccaccccacctggtactgggagaacctgctgaagatctgcgtgttcatcttcgccttcatcatgcccgtgctgatcatcaccgtgtgctacggcctgatgatcctgagactgaagagcgtgagaatgctgagcggcagcaaggagaaggacagaaacctgagaagaatcaccagaatggtgctggtggtggtggccgtgttcatcgtgtgctggacccccatccacatctacgtgatcatcaaggccctggtgaccatccccgagaccaccttccagaccgtgagctggcacttctgcatcgccctgggctacaccaacagctgcctgaaccccgtgctgtacgccttcctggacgagaacttcaagagatgcttcagagagttctgcatccccaccagcagcaacatcgagcagcagaacagcaccagaatcagacagaacaccagagaccaccccagcaccgccaacaccgtggacagaaccaaccaccagtgcctgcccatccccagcctgagctgctgggccctggagcagggctgcctggtggtgtaccccggccccctgcagggccccctggtgagatacgacctgcccgccatcctgcacagcagctgcctgagaggcaacaccgcccccagccccagcggcggcgccttcctgctgagctag

SEQ ID NO: 23305 - protein, 1516 aa, Artificial Sequence
  derived and/or modified sequence
MDNQQDKAIVASANGENTLINGVKENDSEDQDVAMKSFAALEAAAPIQPTPVAQKETLMYPRGLLPLPSKKPCMQSPPSPLGLIEAPEHAANSASVNAISLTSGIAKGLNTWSLPNECEKAPFAIMEPAGMSALNGDCLMQPSRTCLGCFMESKDAVDPEPGISLKVGDLNRDYETCAVSDIGIQCINAGENMKYGEQLLSDQLLGFPLHKSRAGDRRETEKPDIDLEDPAQKSYYEALLLDKCNTEEALLANSNQDWGYFETFISESKIELLDLCSKNELSVNLFSEEDVDNYMFDDDESTLGSDVCSLKIRYESFQDNVRDKTTLLMQEDAQFNFFPSVFTTCPKRESKSGALKQSSDFSQFKVPDVSIIWGEEDKNLDKKKGKEEGQEDKGVEKKDGKDNGEKPALNKPCSGTEVEQLKNPKQGHLANSLETSGSFSDDSSFIEISYDAMGEIKDCSRYMARDTNSGSSSSQQNYGLRAKRKVRYSEDYLYDVDSLEGEKVNERKEWLPVGSKEEDDDEWCPKKRRKVTRKEPPVIIKYIIINRFKGEKNMLVKLGKVDASETTVNLSENQLNKYAKLAPLKGFWQKKKKQRNTNTDSIKTPFSQKQSFEPGSFEVSFLPPARKRKSKLGNRHRIQRIPSIEISASSKQISLCNDQRHASNHKEDGGLKGTLKSAPLGAPSCANGSHLNDITGPDSVKVKAQDTEFKGPERKVLNKIKFKSEARLKSKKVKAAGQESKPIVQMSPLLENQSSKANLKNEVIPGTSNSSRLSEFHEAKAAKSSTFLPTTCSSEMPLSSANVTTNIPVIPGGYLQTLLDASDLSNNTSISYFSHHSPEQNEGSLTQTEKSFVPLQPTQDCVLTSSSDSELQQSSHNFKMESSNYRNVWPNKATSGTQEFMAEVSREIAPTQSSEFGASQVVSMENNLTPTTYNPICLNSGGSNCNKVLYDSMQDTQLPSDDSYQLCHFNNGEICFPFQQGPVNMDDGRLFSFDSMAPLSVSSSNYCSLSLKSCEKDGDDDITDDFLAHCSPKLVIQQSIDEIAPLKESTDLLDISNFTPDKFRHSSLSEMSPPDTPSLSPQITRCESMKTLGTLKGFQEGVPGPLDSVEKIKWDCSTLSRQVQMEDGFTLNNHQFQFHMFNDEDSVSLLQKNPCLSTFNDPSGQISTNNKVSKSRKKSSPSKSGAMNQSSSQKNTRKKSLKGNNKGIEKPPGKNSRQVPKSTKKGKYMAAINGEKMQIGIGRGGSQTNTISSTGKTLAECIQHGGPMASMKMPSQKGLSGDWALGKESSPGWSDMSMGTNTNSLLDDDQREFQEPSYILSNIASGMADVQRFMMASIEPLWEPMEHHGDPNIFYSPESNSLKLKTLKILAGTPQESKKKINSGSQGATKNHRSIKGVSKSNGKTAIGDPGRANMPGYNEDSRSTFFDKKYSNMSTLGNNGPTHKKLYRHKSSSKALRDEKCKGKHMEREQVHKDESGTASFEKLRDSDYNLLKAETTFWVLPVFEEETRIFQKDI

SEQ ID NO: 23306 - protein, 118 aa, Artificial Sequence
  derived and/or modified sequence
  misc_feature (1)..(1): Xaa can be any naturally occurring amino acid
XKSNGKTAIGDPGRANMPGYNEDSRSTFFDKKYSNMSTLGNNGPTHKKLYRHKSSSKALRDEKCKGKHMEREQVHKDESGTASFEKLRDSDYNLLKAETTFWVLPVFEEETRIFQKDI

SEQ ID NO: 23307 - DNA, 4551 bp, Artificial Sequence
  derived and/or modified sequence
atggacaatcagcaggataaggcgatcgttgcttcagcaaatggagagaacaccctgattaatggtgtgaaagaaaatgacagtgaggatcaggacgtcgccatgaaatcattcgcagcgctggaggctgccgccccgatacagcctacacctgtcgcccaaaaggagactctcatgtacccacgaggactgctgccattaccttctaagaagccctgtatgcagagccccccatccccactgggccttattgaggcaccggagcacgcagccaattccgcctcagtcaatgcgatctcacttacctcagggatcgcgaagggcctgaacacctggtcactgccaaacgaatgtgaaaaggcaccctttgcgataatggaaccggccgggatgtctgctctcaacggagattgcctgatgcagccaagtaggacatgtttgggctgcttcatggagtccaaggatgccgttgatcccgagccaggtatcagtctgaaggttggcgacctgaaccgtgattacgagacatgcgccgtgtcagacattggcattcagtgtatcaatgccggtgaaaatatgaaatacggagagcagctcttgtcagaccagctccttggctttccattacacaagtcaagagcaggagatcgtcgggaaaccgaaaagccagatattgatttggaggatcccgcacagaaaagctattacgaggccctgctcctggataaatgtaacaccgaggaggcgttactggccaactctaaccaagactgggggtattttgagactttcatcagcgaaagcaaaatagaactgcttgatctctgctctaaaaacgaattatcagtgaacctcttctctgaggaagacgtcgataactacatgtttgatgatgatgagtccacgctggggtccgatgtttgctctctcaagatcaggtatgaatccttccaggacaatgtgagggacaagacaaccttgctgatgcaggaagatgcccagttcaatttttttccctccgtgttcactacatgccctaaaagagaatctaagagcggtgccctcaagcagtcgtcagatttttcccagttcaaagtccctgacgtgtcaatcatttggggggaggaggacaagaacctggacaagaagaaaggcaaggaggaggggcaggaggacaagggagtcgaaaaaaaggatggaaaggacaacggtgaaaagcctgccttgaacaaaccatgctcggggaccgaggtggagcagttgaaaaatccgaaacagggccacctggccaactccctcgaaacctcaggttctttttccgatgattcgagcttcatcgaaatcagctatgatgccatgggggaaatcaaggattgttcaaggtacatggctagagatactaactctgggtcatcaagcagccagcaaaactatggactccgagcaaagcgtaaagtgcgctactctgaagactacctgtatgatgtggattccctggagggggagaaggtgaatgaacgcaaagaatggctgccagtcggctctaaggaggaggacgacgacgagtggtgcccaaagaaacgccgaaaggtgactcgaaaggagccccccgttataataaaatacataattattaaccgttttaagggcgagaaaaatatgttagtgaaacttggaaaggtggatgcatcagagaccactgtaaatctctctgaaaatcagctaaacaaatacgcaaagctggctcctttaaagggattctggcaaaaaaaaaagaaacagaggaacacaaacacggatagcatcaaaacacctttctcccagaaacagtcctttgagcccggcagttttgaggtgagctttctgccaccagctaggaaacggaaatcaaaactagggaaccgccatcgcattcagaggatcccgagcatcgagatctccgctagcagcaagcagatctctctgtgcaacgaccaacgccacgcatctaaccacaaggaggatggcggtctgaaaggaactctgaagtccgcaccgctaggcgccccctcatgcgcaaatggtagccacctgaatgacattaccggaccggatagtgtaaaggtcaaggctcaggatactgagttcaaagggcctgagagaaaggtcctcaataaaattaagtttaagtccgaagcaagactgaaatcgaagaaggtgaaggccgcaggccaagagtccaagcctattgtgcagatgtcgcccctgctcgagaatcagtcatctaaggcaaatctgaaaaatgaggtgattcctggaacaagcaattcatcacggctgtccgagttccacgaagcgaaggccgctaagagctcaacctttctgcccacgacctgcagttctgagatgccactgagcagcgccaatgtgaccacaaatattccagttatccccggaggttacctccagacattgttggacgcctcagatctgagcaataacacttcaatttcctatttcagccaccatagtcctgaacagaatgaggggtcacttactcagaccgaaaaatcattcgtgcctctgcaacccacacaggactgtgtccttacctctagctctgactccgagttgcagcaatccagccataacttcaagatggaatccagtaactacaggaacgtgtggcctaacaaagccacgtccgggacccaggaattcatggccgaagtgtcccgagagattgccccaactcagagcagcgaattcggagcctcacaggtcgtctccatggagaacaacctcactcctacaacctacaatccaatttgcctgaactccggaggcagcaattgtaacaaagtgctctacgattccatgcaggatacccagttgccttctgatgactcttatcagctgtgccacttcaacaatggcgaaatatgctttcccttccagcaaggacccgtgaatatggacgatggacggctcttcagctttgactctatggctcctctgtcagtttcttcatctaattactgttccctgtctctgaaatcctgcgaaaaggatggtgacgacgatatcacggacgacttcctggcgcattgcagccccaaactggtaattcaacaatctatcgatgagatcgctccgctgaaagaatcgactgacctattggacatttcaaatttcacacctgacaagtttcgtcattcctctctcagcgagatgtcaccacccgacaccccctccctgtcgccccagatcactaggtgcgagtctatgaaaaccctgggtacgcttaaaggctttcaggaaggagtaccgggtccgctcgatagcgttgagaagattaaatgggattgtagcacactgagccgccaggtccagatggaggacggctttacgttaaacaatcaccagtttcagtttcatatgttcaacgatgaagatagcgtgtctttattacagaagaacccttgcctcagcaccttcaacgacccctcgggtcagatctctaccaacaataaagtcagcaagagcaggaaaaagtcatctccgagtaagtcaggtgctatgaatcagtctagtagccagaagaataccagaaagaagtctctgaagggcaacaacaaaggcatcgaaaagcctccaggaaagaacagccggcaagttcccaaatccacaaagaaaggcaagtacatggctgctatcaacggggagaaaatgcaaattggaataggccgtgggggaagtcagactaacaccatttcatccacagggaagacgctggccgagtgtatccagcacggaggcccaatggcttctatgaagatgccaagccagaaggggctgagtggtgattgggctttgggtaaggagagtagcccgggctggtcagatatgtcgatggggactaatacaaatagtctgcttgatgacgaccagagggagttccaggagccctcatacatactaagtaacatcgcgtccgggatggcagatgtgcagaggtttatgatggcaagcatagaaccactgtgggagcctatggaacaccatggtgatcctaatattttctactcacctgaaagcaacagcctcaagttgaaaaccttgaagatccttgccggcaccccacaggagagtaagaagaaaatcaacagcggtagccagggtgcaaccaaaaaccacaggtctatcaagggcgtaagcaagagcaatggtaaaactgccattggggaccctgggagggcaaacatgcccggctacaatgaagattctcgctccactttcttcgacaagaagtacagcaatatgtccacacttggcaacaatggacctactcacaaaaaactttaccggcataagagttcttcaaaagcgctgcgggacgaaaaatgcaaaggcaagcatatggaacgggagcaagttcacaaggatgagagcgggactgcgtcatttgagaagctgcgggacagcgattataatctgctcaaggctgagactacattttgggtcctcccagttttcgaggaagagacgcgtattttccagaaggatatatag

SEQ ID NO: 23308 - DNA, 4551 bp, Artificial Sequence
  derived and/or modified sequence
atggataaccagcaggacaaagcaatagtggcgtcagctaatggcgaaaacactctaattaacggagtcaaagagaacgactcagaagaccaagatgtcgccatgaaaagctttgccgcgctggaagcagccgccccgattcaacccacaccagtcgctcagaaagagacattgatgtacccgcgagggctgttgccgttgccaagcaaaaaaccctgtatgcagagccccccctcacctctgggactgatagaagcccctgagcatgctgccaacagtgcgagtgtgaatgcaatttcattaacatctgggatcgcaaaaggtttaaatacatggtcactccccaacgaatgcgagaaagccccctttgctataatggaacctgcgggcatgagtgcgctcaacggagactgtctcatgcaaccatccagaacgtgtctgggttgttttatggagtctaaggacgccgtggaccccgagcccgggatctctctgaaggttggagacttgaaccgggactacgaaacttgcgctgtatcagatatcggaatccagtgtattaatgctggtgaaaacatgaagtatggcgaacagctgctgagcgaccagctgctgggatttcctctgcacaagagccgggccggcgacagacgtgaaaccgaaaaacccgacatcgatctggaggatcctgcgcagaaaagctattatgaagccttactgctggataagtgtaacaccgaagaggctctgctggccaatagcaaccaggactgggggtactttgagaccttcatcagtgaaagcaagattgagttgctcgatctctgctcaaaaaacgaactctcagtcaaccttttcagcgaggaagacgttgacaattacatgttcgacgacgatgagtccacattgggctccgacgtctgtagccttaaaattcgctatgagtcattccaagacaacgtccgcgacaagactacattgctcatgcaagaagacgcgcagttcaacttcttcccatcagtttttacgacgtgtcccaagcgggaatccaagtcaggggccctgaagcagtcgagcgacttttcacagttcaaggtgcccgacgtgtccattatttggggcgaggaggacaaaaatttagacaaaaagaagggcaaggaggagggtcaggaggataagggcgtagaaaagaaggatggaaaggacaatggtgagaagcccgctttaaacaaaccttgctcaggaacagaggtcgagcagcttaaaaaccctaaacagggacaccttgccaattccctagagaccagcggcagtttttcagacgactcctcattcattgagattagctatgatgcaatgggagaaattaaagattgctctcggtatatggcacgagacacaaacagcggttcctccagttcgcaacagaattacggactaagagcaaaaaggaaggtacgatatagtgaagattatctctacgacgtggacagtttggaaggtgagaaggtcaacgaacggaaagagtggctccctgtcggtagtaaggaagaagacgacgacgaatggtgtcctaaaaagaggcggaaggtcacccgaaaagagccaccggtgatcataaagtatataatcattaaccggttcaaaggcgagaagaatatgctcgtgaagctcgggaaagtggacgccagcgagaccaccgtgaatctgtccgagaatcagctcaacaagtacgctaaactggctcctcttaagggtttttggcaaaagaaaaaaaagcagaggaatacgaacacagactctatcaagacacccttttcccagaaacagagcttcgagcctggctcttttgaggtgagcttccttcctcctgctaggaagcggaagtccaaactgggtaatcgccaccgcatccagcgtatccctagcattgagataagcgcctcttccaagcagatctctctttgcaacgaccagaggcacgccagcaatcataaggaagacggcgggctaaaaggcactttaaaatctgcgcctctgggggccccatcatgtgccaacggatcccacttaaatgatattacgggccccgatagcgttaaggtcaaggcacaggataccgagtttaaagggcctgagaggaaagtgctgaataagatcaagttcaagtccgaggctagattgaagagtaagaaggtgaaggcagcaggccaggaatcaaagcccattgtgcagatgagtccattgctggagaatcaatcgagtaaagctaacctgaagaacgaggtgatcccgggaacctcaaactcctcccgcctaagcgaatttcatgaggcgaaagccgccaaatcaagcacctttctgcctaccacctgttctagcgaaatgcccttgtcttccgctaatgtaacaaccaacatcccagtcatcccgggcggatatctacagacacttttagacgcttcagatctctccaacaatacttccatctcctacttctcccaccattcccctgagcagaatgaaggatcactgacacagacagagaagagctttgtcccgttacaacctacgcaggattgtgtgttgacgtcctcgtctgatagcgagcttcagcagtctagtcacaatttcaagatggaatcttccaattacagaaacgtgtggcctaacaaagccacatccgggacacaggagtttatggctgaggtgtcgcgagaaattgcccccacccagtccagcgagttcggtgcatcacaagtggtgtcaatggaaaataatctgactccgacaacctacaatcctatatgcctgaacagcggtggatcgaattgtaataaggtcctctacgattccatgcaggatacacagttacccagtgacgatagctatcagctgtgccactttaataacggcgagatttgctttccttttcaacagggccctgtgaacatggatgatggccggttattcagctttgactccatggctcccctttctgtgtcgtccagtaattactgttcccttagcttgaagtcttgtgagaaagacggggacgacgatattaccgatgacttccttgctcactgcagcccaaagcttgtgatccagcagtccatcgatgaaatcgcgccactgaaagagtcaacagatctgcttgatatctccaacttcaccccagacaaattccggcactcttcactgagcgaaatgtctcctcctgacaccccgtccctttccccccagatcaccagatgcgaatctatgaaaaccctcgggaccctgaaaggattccaggagggcgtgccagggccacttgactcagtggagaaaattaagtgggactgcagcacactttcccgccaagtccaaatggaagatggttttacacttaacaaccaccagttccagttccacatgttcaatgatgaggactctgtgtctcttctacagaaaaacccctgcctgtctaccttcaatgatccgagcgggcaaatttccacgaacaataaggtgtccaaaagcagaaaaaagtcctctccctcaaagtctggcgctatgaaccagtcttccagccagaagaacactagaaagaagtctcttaaaggcaacaataaagggatcgagaagccaccaggaaaaaactctcgtcaggtgccaaagtcgactaaaaaggggaaatacatggctgccataaacggcgagaagatgcagataggaataggtaggggcggttcgcaaaccaacactatctctagtacggggaagacccttgcggaatgcattcagcacgggggccccatggccagtatgaagatgcccagccagaaggggttgtcaggggactgggcacttggaaaggaatccagtcccggctggtccgacatgagcatggggactaacacgaacagcctactggatgacgaccagcgagagttccaggagcccagttatatcttgtcaaatattgcgtcggggatggccgacgtgcagcggtttatgatggcctccatcgagcccctgtgggagcctatggaacatcacggagacccgaacatattttattcccccgaaagcaacagtcttaagctcaaaacccttaaaatcctggcagggactccacaagagagtaagaaaaagattaacagcggaagtcagggagccaccaaaaaccaccggagcattaaaggggttagtaaaagtaatggcaaaacagctataggggatccggggcgagccaatatgcctggatataacgaagacagcaggtcaacgttcttcgacaagaagtattcaaatatgagtactcttggcaataacgggcctacccacaagaaactgtaccgtcataaaagctcatccaaagccctgcgagacgaaaaatgcaaagggaaacatatggaacgagaacaggtgcacaaggatgagtcaggaactgcttcatttgaaaaacttcgagactcagattacaatcttctcaaagctgagacaactttttgggtgcttccagttttcgaggaggaaacgcgaatctttcaaaaggatatctag

SEQ ID NO: 23309 - DNA, 357 bp, Artificial Sequence
  derived and/or modified sequence
tgaaagagtaacggaaaaacagccatcggggatcctgggagagctaatatgcctggttataatgaagactctaggtcgacctttttcgacaaaaagtattctaacatgagtacattgggaaacaacggccctacacataagaagctctatagacataagagctcttctaaggcccttcgggatgagaagtgtaagggaaagcacatggaacgagagcaggtgcataaggatgagtcaggcacagcttccttcgagaaattgagagatagtgactacaacctcctgaaagccgaaaccaccttctgggtgctgcccgtgttcgaggaagaaaccagaatctttcagaaggatatctag

SEQ ID NO: 23310 - DNA, 4551 bp, Artificial Sequence
  derived and/or modified sequence
atggacaaccagcaggacaaggccatcgtggccagcgccaacggggagaacaccctcatcaatggagtgaaggaaaatgacagcgaggaccaggatgtggccatgaagagctttgctgccctggaggccgccgcccccatccagcccacccctgtggcccagaaggagaccctgatgtacccccggggcctgctgcccctgcccagcaagaagccctgcatgcagagcccccccagccccctgggcctcatcgaggcccctgagcacgccgccaacagcgcctctgtgaatgccatcagcctgaccagcggcatcgccaagggcctgaacacctggagcctgcccaatgaatgtgagaaggccccctttgccatcatggagcctgctggcatgtctgccctgaatggagactgcctgatgcagcccagcaggacctgcctgggctgcttcatggagagcaaggatgctgtggaccctgagcccggcatcagcctgaaggtgggggacctgaacagagattatgagacctgtgctgtgtctgacatcggcatccagtgcatcaatgctggggagaacatgaagtatggagagcagctgctgagtgaccagctgctgggcttccccctgcacaagagccgggccggggacagaagagaaacagagaagccagacatcgacctggaggaccctgcccagaagagctactatgaggccctgctgctggacaagtgcaacacagaggaggccctgctggccaacagcaaccaggactggggctactttgagaccttcatcagcgagagcaagattgagctgctggacctgtgcagcaagaatgagctgtctgtgaacctcttctctgaagaagatgtggacaactacatgtttgatgatgatgagagcaccctgggcagtgatgtgtgcagcctgaagatccgctatgagagcttccaggacaacgtgcgggacaagaccaccctgctgatgcaggaggatgcccagttcaacttcttccccagcgtcttcaccacctgccccaagcgggagagcaagagcggggccctgaagcagagcagtgacttcagccagttcaaggtgcctgatgtgtccatcatctggggcgaggaggacaagaacctggacaagaagaagggcaaggaggagggccaggaggacaagggcgtggagaagaaggatggcaaggacaatggagagaagccagccctgaacaagccctgcagcggcacagaggtggagcagctgaagaaccccaagcagggccacctggccaacagcctggagaccagcggcagcttcagtgatgacagcagcttcatcgagatctcctatgatgccatgggagagatcaaggactgcagccgctacatggcccgggacaccaacagcggcagcagcagcagccagcagaactacggcctgcgggccaagaggaaggtgcgctacagcgaggactacctgtatgatgtggacagcctggagggggagaaggtgaatgaaaggaaggagtggctgcctgtgggcagcaaggaggaggatgatgatgagtggtgccccaagaagaggaggaaggtgaccaggaaggagccccctgtgatcatcaagtacatcatcatcaaccgcttcaagggggagaagaacatgctggtgaagctgggcaaggtggatgccagcgagaccaccgtgaacctgtctgagaaccagctgaacaagtatgccaagctggcccccctgaagggcttctggcagaagaagaagaagcagaggaacaccaacacagacagcatcaagacccccttcagccagaagcagagctttgagcccggcagctttgaggtgtccttcctgcccccagccaggaagaggaagagcaagctgggcaacagacaccgcatccagaggatccccagcattgagatcagcgccagcagcaagcagatcagcctgtgcaatgaccagagacatgccagcaaccacaaggaggatggcggcctgaagggcaccctgaagagcgcccccctgggcgcccccagctgtgccaacggcagccacctgaatgacatcactggaccagattctgtgaaggtgaaggcccaggacacagagttcaagggccctgagaggaaggtgctgaacaagatcaagttcaagtctgaggcccggctgaagagcaagaaggtgaaggccgccggccaggagagcaagcccatcgtgcagatgagccccctgctggagaaccagagcagcaaggccaacctgaagaatgaagtcatccctggcaccagcaacagcagccggctgtctgagttccacgaggccaaggccgccaagagcagcaccttcctgcccaccacctgcagcagcgagatgcccctgagcagcgccaacgtgaccaccaacatccctgtgattcctgggggctacctgcagaccctgctggatgccagtgacctgagcaacaacaccagcatctcctacttcagccaccacagccctgagcagaatgaaggcagcctgacccagacagagaagagctttgtgcccctgcagcccacccaggactgtgtgctgaccagcagcagtgacagcgagctgcagcagagcagccacaacttcaagatggagagcagcaactacagaaatgtgtggcccaacaaggccaccagcggcacccaggagttcatggccgaggtgtcccgggagatcgcccccacccagagcagcgagtttggagccagccaggtggtgtccatggagaacaacctgacccccaccacctacaaccccatctgcctgaacagcggcggcagcaactgcaacaaggtgctgtatgacagcatgcaggacacccagctgcccagtgatgacagctaccagctgtgccacttcaacaatggagagatctgcttccccttccagcagggccctgtgaacatggatgatggccgcctcttctcctttgacagcatggcccccctgtctgtgagcagcagcaactactgcagcctgagcctgaagagctgtgagaaggatggagatgatgacatcacagatgacttcctggcccactgcagccccaagctggtgatccagcagagcattgatgaaattgcccccctgaaggagagcacagacctgctggacatcagcaacttcaccccagacaagttccgccacagcagcctgtctgagatgagccccccagacacccccagcctgagcccccagatcacccgctgtgagagcatgaagaccctgggcaccctgaagggcttccaggagggcgtgcccggccccctggacagcgtggagaagatcaagtgggactgcagcaccctgagccggcaggtgcagatggaggatggcttcaccctgaacaaccaccagttccagttccacatgtttaatgatgaggacagcgtgtccctgctgcagaagaacccctgcctgagcaccttcaatgaccccagcggccagatcagcaccaacaacaaggtgtccaagagcaggaagaagagcagccccagcaagagcggggccatgaaccagagcagcagccagaagaacaccaggaagaagagcctgaagggcaacaacaagggcatcgagaagcccccaggcaagaacagccggcaggtgcccaagagcaccaagaagggcaagtacatggccgccatcaatggagagaagatgcagattggaattggccggggcggcagccagaccaacaccatcagcagcacaggcaagaccctggccgagtgcatccagcacggcggccccatggcctccatgaagatgcccagccagaagggcctgagcggggactgggccctgggcaaggagagcagccctggctggagcgacatgtccatgggcaccaacaccaacagcctgctggatgatgaccagcgggagttccaggagcccagctacatcctgagcaacatcgccagcggcatggctgatgtgcagcgcttcatgatggccagcattgagcccctgtgggagcccatggagcaccacggggaccccaacatcttctacagccctgagagcaacagcctgaagctgaagaccctgaagatcctggccggcaccccccaggagagcaagaagaagatcaacagcggcagccagggcgccaccaagaaccacaggagcatcaagggcgtgtccaagagcaatggcaagacagccatcggggaccccggccgggccaacatgcctggctacaatgaagacagccgcagcaccttctttgacaagaagtacagcaacatgagcaccctgggcaacaacggccccacccacaagaagctgtaccgccacaagagcagcagcaaggccctgagagatgagaagtgcaagggcaagcacatggagcgggagcaggtgcacaaggatgaaagtggcacagccagctttgagaagctgcgggacagcgactacaacctgctgaaggccgagaccaccttctgggtgctgcctgtgtttgaggaggagacccgcatcttccagaaggacatctag

SEQ ID NO: 23311 - DNA, 357 bp, Artificial Sequence
  derived and/or modified sequence
tgaaaaagcaatggcaagacagccatcggggaccccggccgggccaacatgcctggctacaatgaagacagccgcagcaccttctttgacaagaagtacagcaacatgagcaccctgggcaacaacggccccacccacaagaagctgtaccgccacaagagcagcagcaaggccctgagagatgagaagtgcaagggcaagcacatggagcgggagcaggtgcacaaggatgaaagtggcacagccagctttgagaagctgcgggacagcgactacaacctgctgaaggccgagaccaccttctgggtgctgcctgtgtttgaggaggagacccgcatcttccagaaggacatctag

SEQ ID NO: 23312 - DNA, 4551 bp, Artificial Sequence
  derived and/or modified sequence
atggacaaccagcaggacaaggccatcgtggccagcgccaacggcgagaacaccctgatcaacggcgtgaaagaaaacgactcagaggaccaggacgtggctatgaagtcatttgcagcccttgaagcagcggccccaatccagcccacaccggtggctcagaaggaaacactcatgtatccacgtggactcctgccgttgccttctaagaaaccttgtatgcagagtccacccagcccgctcgggctgattgaggcccctgagcatgccgccaactccgcctctgtgaatgctatcagcctaacatcggggatcgcaaaggggctgaacacctggagccttcctaacgaatgcgagaaggctccattcgccataatggagcccgctggaatgagtgcgttaaatggggattgtcttatgcagccatcaagaacatgccttggatgcttcatggaatccaaggatgccgtggatccagagcccggcataagcctgaaagttggtgatctgaatagggattatgagacctgtgccgtgtccgacattggcatccagtgcattaatgcgggtgaaaatatgaaatacggggaacaattgttgagcgaccagcttcttggcttccctctgcacaaatcaagagccggcgaccgtcgggagactgagaaacctgatatcgatcttgaagaccccgcccagaagagctattacgaggccctgttactggataaatgtaataccgaggaagccctgctagcaaattccaaccaggactggggttattttgagactttcatcagcgaatcgaaaatcgagcttttagatttgtgtagtaaaaatgaactgagcgtgaacctgttttcagaagaagatgtcgacaactatatgtttgatgacgacgaatctaccctcggatccgatgtttgcagcttaaagatccgatacgagtcatttcaagacaacgtgcgggacaagacgacactgctcatgcaggaagatgctcagtttaatttttttccgagcgtcttcacaacctgcccgaagagagagtccaagtctggggccctgaaacaatcatctgacttctctcagttcaaagtgccagacgtgtccattatttggggggaggaagataagaacttagacaagaaaaagggtaaggaggagggacaggaggataagggggtggagaagaaagacggcaaagataatggcgaaaaacccgctcttaacaaaccctgctcaggtaccgaggtcgagcagctaaagaatcccaaacaagggcatttagccaatagtcttgagaccagtgggagcttcagcgacgattcctcttttatagaaatctcctacgacgccatgggcgagattaaagactgctcgcgctacatggcccgtgatacaaattccggatcaagctcctcacaacagaactacggtctgagggcgaaaagaaaggtgagatactcagaggactacctgtatgatgtggattccctcgaaggggaaaaagtaaatgaaagaaaggagtggttacccgttggaagtaaagaggaggatgacgacgaatggtgtcccaagaagcgacgcaaggtgacgaggaaggaacctccagtgataatcaagtacataattatcaacaggtttaaaggggaaaagaacatgctcgtgaagctggggaaagtggacgcgagcgagaccaccgtgaatctgtcagagaaccagctgaacaaatacgcaaagctggcgccactgaaagggttctggcagaagaagaagaagcaaagaaacaccaataccgatagtatcaaaacccccttctcgcaaaagcagagcttcgaaccaggctccttcgaagtatccttccttccccccgcgcgcaaaaggaaaagtaagctcggcaaccgccaccggatacagaggatcccatccatcgaaatcagcgcatcgtcaaagcagatctctttgtgtaatgaccagcgacatgcctccaaccacaaagaagatgggggtctgaaaggcactctgaaatccgctccccttggggcccctagttgcgccaatggttctcacttgaacgacattactggacctgattcggtgaaagtgaaggcccaggatacagagtttaagggccccgagaggaaggtgctcaacaagataaagttcaagagtgaggctcgactcaaaagtaagaaagttaaggcagccggtcaggagtcgaagcctatcgttcaaatgtctccacttctggaaaatcaaagcagcaaggctaatctcaaaaatgaggtgatccccggtacttctaatagtagtcgactttcagagttccacgaagcaaaagccgcgaaatcctcaacgttcctgccaactacctgttcctctgagatgcccctgtcatcagcaaatgtgacaacaaacatccctgtgatccccggcggttaccttcagaccctgttagacgctagcgatttaagcaacaatacaagtatatcttatttttcccaccattcaccggaacagaatgagggctcactgacacagacagaaaaatcgtttgtgccccttcaacctacacaggactgcgtcctgactagctcatctgactctgagttacagcagagctcccataatttcaagatggaatcctctaactacagaaacgtctggcctaataaggccacctcaggaacccaggagtttatggccgaagtgtcccgagaaattgcacccactcagagcagcgaattcggggcctcccaggtggtcagcatggagaacaacctcaccccaacaacatacaatccaatttgtctgaactctggagggtccaactgtaataaggttttgtacgactccatgcaagacacgcagcttccctccgacgactcctaccagttatgtcactttaacaacggtgagatttgttttccattccagcaaggtcctgttaatatggacgatggccggttgttcagcttcgactccatggccccactgagcgtatcttcgtcaaactactgttccctatccctgaaatcatgcgaaaaggatggggatgatgacatcaccgatgattttctggctcactgctctcccaagctggtgatccaacagagcattgatgagattgcccccctaaaggaaagcacagacctgctggacatcagcaactttacaccggacaaatttcggcacagcagtctgtccgagatgtcgccaccagacacgccctccctgagtcctcagatcaccagatgtgagtctatgaagacgctggggaccctcaagggattccaggaaggggtgcccggccctctcgatagcgttgagaagattaaatgggactgttctactttaagccgacaggttcagatggaagatggcttcactctgaacaatcaccagtttcagtttcacatgttcaacgatgaagattccgttagcttgctccagaaaaatccttgcctgtccaccttcaacgatccctcagggcaaatttctacaaacaacaaggtctccaagtctagaaaaaaatcctcacccagcaaatccggggccatgaaccaatcttcttcgcaaaagaacaccagaaagaagtctttgaaaggcaataataaggggatagagaaaccgcctggaaagaacagtcgacaggtccccaagtccacaaagaagggaaagtacatggcagcaataaatggcgagaagatgcagatcggaattgggcggggaggttcacagaccaatacaatctctagcacggggaaaacactcgccgagtgtattcagcatggcgggccaatggcaagtatgaaaatgccttctcagaaagggctgtccggggactgggccctcgggaaggagtcaagccctggctggtctgatatgtctatgggcacaaacaccaattccctcctggacgatgatcagcgggaatttcaggagccatcatacatcctgtctaatatcgcctcaggcatggccgatgtacagaggttcatgatggcatcgatcgagcccctctgggagccgatggaacaccacggggatcccaacatattctattcaccagaaagcaacagtcttaaattgaagacccttaaaattctagcaggcaccccccaagaatcgaagaaaaaaattaactcaggtagtcagggagcgacgaagaaccacagaagcatcaagggggtgtcaaaatctaacggaaaaacagccatcggcgacccaggtcgcgcgaacatgcccggatataacgaagattcccgaagcactttcttcgataagaaatatagcaacatgtctaccctcggtaacaatgggccaacccataaaaaactataccggcataaaagttcaagtaaggcactgcgggatgagaaatgcaaagggaagcacatggaacgagagcaggtgcacaaagacgaatcaggcactgcgagctttgagaagttgagagacagtgactacaatctcctgaaggcagaaaccacattttgggtcctgcccgtgtttgaggaagaaacgaggatattccagaaggatatttag

SEQ ID NO: 23313 - DNA, 4551 bp, Artificial Sequence
  derived and/or modified sequence
atggacaaccagcaggacaaggccatcgtggccagcgccaacggcgaaaatactctgatcaatggtgtcaaagagaacgatagcgaggaccaagatgtggctatgaagagctttgccgccctcgaggccgctgccccaatccagccaacccctgtcgcccagaaagagactctgatgtacccgcgtgggctgctacccttacccagcaaaaagccgtgtatgcagtcacccccaagccccctgggacttattgaagctcccgaacatgccgctaacagtgcttccgttaacgctatttcattgactagtggcatcgccaagggcctgaacacgtggtctttgccgaatgagtgtgaaaaagccccttttgccattatggaacccgctgggatgagcgctctaaacggagactgtctgatgcagccgtccaggacatgcctcggatgctttatggaaagcaaagacgccgttgaccccgaacccggcatttccctcaaggtcggagacctcaaccgagactacgaaacatgcgccgtgagtgatattggaattcaatgcattaatgccggggaaaatatgaagtacggtgagcagcttctcagcgaccaattgctgggctttccactccataaatccagggccggagataggcgcgagacagagaaacccgacatagacctggaagaccctgcccagaagtcttattatgaggctctgcttctggataagtgcaacacggaggaagccctgcttgccaacagcaaccaggattggggctatttcgagacattcatcagcgagtccaagatcgagctcctggatttgtgctccaaaaatgaactctccgtgaatctgttttccgaggaggacgtggacaattacatgtttgacgatgatgagtccactcttggctccgatgtgtgctcactgaagatccgatacgaaagtttccaagacaacgtgagggacaaaactacgctgctcatgcaggaggatgcacagttcaatttcttcccaagcgtcttcactacctgtccaaaaagggagtcaaaaagcggcgctctgaaacagagcagtgacttttcacaattcaaggtgccagacgtgagcatcatctggggcgaggaagataaaaacctcgacaagaaaaagggcaaggaagaagggcaggaggataagggcgtagaaaagaaggatggtaaggacaacggcgaaaagcccgctctcaacaagccctgcagtggtacggaggtggagcaacttaagaacccaaaacagggccatctggccaacagtctggagacatcaggttccttctctgacgactccagtttcatagaaattagctacgacgcgatgggtgagatcaaagactgctcacgttacatggcccgtgacaccaactccggaagcagttcctcccagcagaattacgggctccgcgctaaacgcaaagtcaggtacagcgaagactacctgtacgatgtagacagtctggagggggagaaggtcaacgagcggaaggaatggctccccgttggatccaaagaggaggatgatgacgagtggtgtcctaagaaaaggagaaaagtgactcgcaaggaaccaccagtgatcatcaaatatattatcatcaaccggtttaaaggagaaaagaatatgctggtgaaactcggcaaggtcgacgccagtgaaactaccgtgaatctttccgagaaccaactcaataagtatgcgaaattagcccccctgaaaggtttttggcagaaaaagaagaaacaacggaacacaaacactgattcgatcaaaacgcccttctcacaaaaacaaagctttgagcccgggtctttcgaggtgtcttttctacccccagccaggaagaggaaaagcaaactcggaaatcggcacagaatccagaggatacctagtatcgagatctccgcaagctccaaacagatttctctctgcaatgaccagcgacatgcatctaatcacaaggaggatggaggtttgaaaggcaccttgaagagcgccccactgggagcccccagttgtgccaacggctcacatctcaatgacatcacggggcctgacagcgtcaaggtcaaagctcaagacactgaattcaaggggcctgaacggaaggtcctgaacaagatcaaattcaagtccgaggctagattgaagagcaagaaggtcaaagcggcgggtcaagaatctaaacccatagtgcagatgtctcctctgcttgaaaatcagtcctcaaaggctaacctcaaaaacgaggtgattcccggaacatctaattcatccagattgagcgagttccacgaggcgaaagctgctaaatccagcacattcctgccgacaacatgcagttccgaaatgccactctctagtgccaacgtaacaactaacattccagtgatccccggcggctacttacagactttgctggacgcttctgacctgtcaaacaacacttctattagttatttttcccatcactctccagagcagaacgaaggtagtttaacgcagactgagaagagctttgtgccccttcaaccaacccaggattgtgtcctgacctcaagcagtgattctgagctacagcagtcatctcacaactttaagatggaatcatctaattacagaaacgtctggcctaataaggctacttcgggcacgcaggaattcatggctgaagtgagccgcgagattgctcccacccagagttcagagttcggggcaagtcaggtcgtctcaatggagaacaacctgactccgacaacttataacccgatctgcttaaattcggggggaagtaattgtaacaaagtattatacgactccatgcaggacacacagctccctagcgatgatagctaccagctgtgccattttaacaatggtgagatatgctttccattccagcaggggccagttaacatggacgacggccggctcttctcgtttgactcaatggcccccctgagtgtgtcgtcatccaattactgtagtctgtccttaaaatcttgtgaaaaagatggtgatgatgatatcaccgatgactttctcgcccattgttcacctaaactcgtcatccagcaaagcatcgatgagattgcacctctgaaggaatctactgacctcctggacattagcaactttactccagacaagtttcgtcactcaagtttaagcgagatgtccccgcccgacactccgtcactgtctccccaaattaccaggtgtgaaagcatgaagaccctcgggactctaaaggggtttcaggagggcgtcccagggccccttgatagtgtcgagaagattaaatgggattgtagtactctgtcaaggcaggtccaaatggaagacggctttaccctgaataaccatcagttccaatttcatatgtttaacgacgaggacagcgttagcctgctgcaaaagaacccctgtttatctactttcaacgacccatccggtcaaatcagtactaacaacaaagtgtcaaagagtcggaaaaagtcctccccatccaagagcggtgcaatgaatcaaagctcttctcagaagaataccagaaaaaagtcacttaaaggtaacaataagggaatcgaaaaaccgcccgggaaaaactcaaggcaggtgccaaagtccacaaaaaaggggaagtatatggcggctattaatggggaaaagatgcagattggcatcggacggggtggtagccagaccaacacgatcagtagtaccggaaagacattggcggaatgtatacagcacggcggtcccatggcatccatgaaaatgccatcacagaagggactgagcggggactgggcgctggggaaggagtctagccctggatggagtgacatgtcaatgggcaccaacaccaatagcctgctggatgatgatcagcgggagtttcaagaaccgtcttatatcctttcaaacattgcctccgggatggctgacgtccagcggttcatgatggctagtatcgaacctctgtgggaacctatggaacaccacggggatcctaatatcttttactcgcccgagagtaatagtctgaaactgaaaacactcaagatcctggctgggaccccacaggagtccaaaaaaaagataaactcaggctcccagggcgctacaaaaaaccacaggtccatcaaaggtgtgtctaaatctaacggaaagactgcaatcggtgatccaggtcgggctaacatgccaggctataacgaagactctcgatcgactttcttcgataagaagtatagtaatatgagtaccctgggaaataacggtccaacacacaagaaactgtacaggcacaagagcagtagcaaagccctgcgtgatgaaaaatgcaaggggaagcatatggagcgggaacaagtgcataaggacgaaagcggcactgcctcgttcgagaagctccgggattccgattacaaccttctaaaggccgaaactaccttttgggtgctgcctgtcttcgaggaagagaccaggatcttccaaaaagatatctag

SEQ ID NO: 23314 - DNA, 357 bp, Artificial Sequence
  derived and/or modified sequence
tgaaagagcaacggcaagaccgccatcggcgaccccggccgggccaatatgcctggctataacgaggactcccggagcactttttttgacaaaaagtattccaacatgagcaccctgggtaataacggaccaacacacaagaagttgtaccgtcacaaaagctcctccaaagctctgagggatgagaagtgtaagggcaaacacatggagagagagcaggtacataaggacgaatccggcacggcaagttttgaaaagctcagagacagcgactacaatctgctaaaagccgaaaccaccttttgggtcctgccggtctttgaagaggaaaccaggattttccagaaggatatttag

SEQ ID NO: 23315 - DNA, 4551 bp, Artificial Sequence
  derived and/or modified sequence
atggataaccaacaggacaaagcaattgtggcaagcgctaatggagagaatactctgattaacggcgtgaaggagaacgattccgaggatcaggacgtggcgatgaagagctttgctgctttagaagcggcagcgccaattcagccaacgccagttgctcagaaagagactttgatgtaccctcgcggactgcttcctcttccatcaaaaaaaccttgcatgcagtcaccacctagcccacttggcctgatcgaggctcccgaacatgcggctaatagcgcatcggtgaacgctatttccctgacttctgggattgctaaaggattaaacacctggtctctcccgaacgagtgtgaaaaggctccgttcgctatcatggagcctgccggtatgtcagccctgaatggtgactgtttaatgcagccgagtcggacctgcctggggtgctttatggaatccaaggatgcagtagaccctgagccaggaatcagcctgaaagtgggtgaccttaatcgagattatgaaacctgcgcagtgtcagatattggcattcagtgcattaacgccggagagaatatgaagtatggagagcagctgctatcagaccagttgcttgggttcccgctgcataaatcaagagccggagatcgaagagagaccgaaaaacctgacatcgatttagaagatcccgcacagaaaagttactatgaggcactcttgcttgacaagtgcaatactgaggaggctctactcgcgaactccaaccaggattggggttatttcgaaacattcatcagtgagtcaaaaatagagttgctagacttgtgcagcaaaaatgagctcagtgtaaacctgttctctgaagaggacgttgacaattatatgttcgatgacgatgagtcaaccctcggcagtgatgtgtgctcactgaagatcagatacgagtcgtttcaggacaatgtcagagataagactacactgctaatgcaagaagacgctcaattcaatttcttcccttctgtgttcaccacatgtcctaagcgtgaatccaaatccggagctctcaagcagtcctctgactttagccagtttaaggtccccgacgtgtcaattatctggggcgaagaggataagaatctggacaagaaaaaaggcaaagaagagggccaggaggataagggggtggagaagaaggatggcaaagataacggggagaagcctgccctcaacaagccctgtagtgggacagaagtcgagcagctaaagaatcccaagcagggccatttggcaaatagtctggagactagtgggagtttttcagacgactcatcctttatcgagattagctatgatgctatgggtgagattaaggattgcagtcggtacatggcccgtgacaccaactctggaagtagcagtagccagcagaattatgggttgcgcgctaaacgtaaagttagatacagcgaggactatctgtacgacgtggacagcttggagggggagaaggtgaacgagcggaaggagtggttacccgtaggctcaaaggaagaagatgacgatgaatggtgccccaaaaagcggagaaaagtgacaaggaaagaaccccctgtgatcataaagtatatcataataaaccgtttcaaaggtgagaaaaacatgttagtgaagctgggcaaagtcgatgcaagcgagaccaccgtgaatttgtcagaaaatcagctgaacaaatacgccaagctagccccattgaaaggattctggcagaagaagaaaaaacagaggaataccaatacggattccattaaaacaccgttcagccagaagcagtccttcgagcccggaagttttgaagtgtcctttttgccaccagctcggaaacgcaagtcaaaattgggcaatagacatcgtatccagagaatccctagcatcgagattagtgcctcatctaagcagattagtctgtgcaatgatcagcgtcacgcaagtaaccacaaggaggatggtggtttgaagggcaccctcaaatcagccccactcggcgctccttcctgcgctaatggctctcacctgaacgacattaccgggccagactctgtgaaagtcaaagcccaggacactgagttcaagggaccggaacggaaggtcctcaacaaaatcaaatttaagtccgaggcacgtctcaagtctaaaaaagttaaggctgctggccaggagtctaagcccatcgtgcaaatgagcccgctgctggagaaccagtctagtaaagctaacctcaagaatgaggtaataccaggaactagcaattccagtcgcctgtccgaatttcacgaggccaaggctgcaaagtcttcgacattcctgcctactacgtgcagtagcgaaatgccactctcgtctgctaatgtgacgaccaacattccggttatacctgggggttatctgcagactctgttggacgcctctgatctgagtaacaacactagtatctcttatttctctcaccattccccggaacagaacgaaggaagcctgactcagacggaaaaatctttcgtgcctctccagcccacccaagattgcgtgctgactagcagctctgatagcgaactccagcagtcaagtcacaatttcaaaatggagtcatcaaactaccgaaacgtgtggcccaacaaggcaacaagtggaactcaggagttcatggccgaggtgagccgagaaattgctccaacgcagtcttccgagttcggcgcttctcaggtggtatccatggaaaacaatctcacccctactacttacaatcctatttgtttaaattcgggaggatctaattgcaataaggtcctgtacgatagtatgcaggacacacagttgccaagcgatgacagctaccagctgtgccattttaacaacggtgagatctgttttccgttccagcagggtccagtgaacatggatgacggaagactcttcagttttgacagcatggcacctcttagcgtgtcctcttcaaactattgttcactcagcctcaagagctgtgagaaagatggcgatgacgatattactgatgacttcctcgctcattgtagtccgaagttggtgatacagcaaagcatagacgagattgctcctttgaaagaatcaacagacctgttggacatttctaatttcacgcctgacaagtttcgccatagtagcctctccgaaatgagtcctccagataccccttctctgtcaccccagataaccagatgcgagtctatgaaaacactgggcaccttgaagggctttcaggagggtgtgccaggtccgttagattcagtagaaaaaattaaatgggactgctcaaccctctccaggcaggtgcagatggaggatggattcaccttgaacaatcaccagtttcagttccatatgttcaacgacgaggatagcgtgtctctgcttcaaaaaaacccatgtttgtccacgttcaacgatccctccggccagattagcactaataacaaagtgtcaaagagccggaagaaatcaagtcccagtaaatctggggcaatgaaccagtccagctcccagaaaaacacaagaaagaagtccctcaaggggaacaataaggggattgaaaaacctcctgggaaaaatagtcggcaggtgcccaaatccactaaaaaggggaagtatatggccgctattaacggagagaagatgcagatcggtattggacgtggaggatcacagactaacaccattagcagtaccggtaagacgctggccgagtgcatccagcacggaggccctatggcatccatgaaaatgcccagccaaaaagggctgtcaggcgactgggctctgggaaaggaaagttcacccggatggagcgacatgtcaatgggcacaaacacaaattctcttctggatgatgatcaaagagagttccaggagccctcttatattctcagcaatatcgcatccggcatggctgatgtgcaacggttcatgatggcttctatcgagcctctgtgggagcccatggagcaccacggcgatcctaacattttctatagccctgagtccaactccctaaagctgaagactttgaagatcctggcaggaacaccgcaagagagcaaaaagaagatcaattccggctctcagggcgctactaagaaccatcgctcaattaagggagtgtccaaatcaaacggcaaaacagctatcggcgatcccggaagagctaacatgcctggttataacgaagactcaaggtctacgttttttgacaaaaaatattccaacatgagcacactgggcaacaatggcccaacccacaagaagctttacagacacaaaagttccagtaaagctctacgcgatgaaaagtgcaaaggaaaacacatggaacgtgagcaagtgcataaggatgagagcggcacagcctctttcgaaaagctacgggactccgactataacctgttgaaggcagagacaactttttgggttctccctgtgtttgaggaagaaacacgaatctttcaaaaggacatctac

SEQ ID NO: 23316 - DNA, 4550 bp, Artificial Sequence
  derived and/or modified sequence
atggacaatcagcaggacaaagccatcgtggcttccgctaacggcgaaaataccctcatcaatggcgtgaaggagaacgactccgaggaccaggacgttgccatgaaatctttcgcagctctagaagcagccgctcccattcagcctactcccgtcgctcagaaggagaccctgatgtatcccagaggactgctccccctgccatcaaaaaaaccttgcatgcagagccccccaagccctttgggcctcatagaagctcctgaacacgccgctaatagcgcctcggtaaacgcgatttcactgacaagcggtatcgctaaggggctgaatacctggtctctcccgaatgagtgtgaaaaggccccttttgcaatcatggaacctgccggtatgtctgccctgaacggcgactgcctcatgcagccctccagaacatgtttaggttgttttatggagagcaaggatgcagtggatccagagccaggtatttccctgaaggttggagatctcaaccgcgactacgagacttgcgccgtcagcgacatcgggatacagtgcattaatgctggtgagaacatgaagtatggggagcaacttcttagtgaccagctgttggggttcccactgcataagtctcgggcaggggaccgcagggagaccgagaagcccgacatcgatctcgaggaccctgcccagaaatcatactacgaggccctactgctggacaaatgtaatacagaggaggccctcctcgcaaatagcaatcaggattggggatattttgagaccttcattagtgagtcaaaaatagaactgctagatctctgtagcaaaaatgagctgtccgtcaacctatttagtgaagaagatgttgacaactacatgttcgatgacgacgaatccaccttaggaagcgatgtgtgttccctgaaaatccggtacgagtccttccaagacaacgtgagagataaaaccacgcttttaatgcaggaggacgcacaattcaacttcttcccatcggtttttacaacctgcccaaagcgggagtcaaaatccggggctctcaaacagagtagcgatttcagccagttcaaggtacctgacgtgtccataatctggggcgaggaagacaaaaatttggataaaaaaaaaggcaaagaagaaggacaggaagacaagggggtggaaaagaaggatggtaaagacaacggggaaaagcctgcgcttaacaaaccttgtagcggaacagaggtggagcagcttaagaatcccaagcagggccatctggccaactctctcgaaacttccggatcattttctgatgactctagttttattgaaatttcatacgacgctatgggagagatcaaggattgcagtaggtatatggccagagatacgaatagtgggtcaagcagctctcagcaaaactacggcctgagggccaaacggaaagtaaggtactccgaggactacctttacgatgttgatagcctagagggggagaaggtcaacgagagaaaagaatggttgccagttggatccaaagaggaagatgacgacgagtggtgtcccaagaagaggcgaaaggtaactcgaaaggagccacccgtgatcataaaatacataatcattaataggttcaaaggagagaagaacatgctagtgaaactcggcaaggtggatgcttccgagactactgtaaacttgagcgaaaatcaattgaacaagtatgctaagctagcccctttgaagggtttctggcagaagaagaaaaagcagcgcaacaccaacaccgattctatcaagacacctttctcacagaagcagtcctttgaaccagggtcgttcgaggtttcttttctccccccagctcgcaagcggaaatccaagctcggcaataggcatcgcatccagcgcatcccaagcattgaaatctccgcttcgagtaaacagattagcctgtgtaatgaccagaggcacgccagtaatcataaggaggatggcggactgaaaggcacattaaagtcagctcccctcggtgctcccagttgcgcaaatggaagccacttaaatgatattaccggtcccgattcagttaaagtgaaagctcaggacactgagttcaaggggcctgagagaaaagtactgaacaaaattaaatttaaatctgaggccaggcttaagtctaagaaagtaaaagccgctggccaggaatcaaagcctatagtccaaatgtcgcccttgcttgagaaccagagtagtaaggccaacctgaaaaatgaggtgatacctggtactagcaatagcagcagactcagcgaattccacgaggcaaaggcggcaaaaagcagcacctttttgcccacaacttgcagcagcgaaatgccactgtcatctgccaatgtaacaacgaatatcccagtaatacctggcggataccttcagaccttgctggatgcaagcgacctctccaacaacacgagcatctcctacttttcccatcacagtcctgagcaaaacgaggggagtctgactcaaactgaaaagtctttcgtgcccttgcaacctacccaggattgtgtgctgacttctagctcagactccgagttgcagcagagctcccataactttaagatggaatcatcaaactataggaacgtttggcctaacaaggccacaagtggcacccaggagtttatggcagaggtctcccgggagatcgcgcctacccaaagttctgaatttggtgcgtcacaggtggtgagtatggagaacaacttgacccccacgacatacaatcccatctgcctaaatagcggcggttccaactgtaataaagtcctatacgattcaatgcaggatactcagctcccttccgatgacagctaccagctatgtcattttaacaacggcgagatctgttttccattccagcaggggcctgtgaatatggacgacgggaggctcttctccttcgactccatggccccactctcggtgtccagttcgaactactgcagcctgtctcttaaatcatgcgagaaggacggggacgacgacattacagacgacttcctggctcactgtagcccaaaactggttattcagcagagcatcgacgaaattgctcccctgaaagaatcaaccgacctgctcgacatctccaacttcacccccgataagtttaggcactcctctttaagtgagatgtcacccccagataccccgagcctaagtccacagatcacccgctgtgaaagcatgaaaaccctaggcacgctcaaggggttccaggaaggcgtgccgggtccactggattcagtcgagaaaattaaatgggactgtagtacactgagccggcaggtccagatggaggatggattcacgttgaacaatcaccagtttcagtttcacatgtttaatgatgaagattccgtgtccctgcttcagaagaacccttgtctgtccacatttaacgacccttccggacaaatctctacaaacaataaggtgagtaagtcgcgaaaaaagagcagcccttcaaagtcaggggctatgaaccagtcttcctctcagaaaaacactagaaagaaaagtctgaagggcaacaacaaaggcattgagaagccgcctggcaaaaattcacgtcaggtgcctaaatcaacaaagaaggggaaatacatggcggctatcaatggagaaaagatgcagatcggtatcggcaggggtgggagccagactaatactatctcgtccaccggcaaaactctcgccgagtgcatacaacacggagggccaatggcatccatgaaaatgccctcgcagaaagggctgagcggggactgggccctaggaaaagaatcatcgccaggatggagcgacatgtctatgggaacgaacaccaactcgctgctcgatgatgaccagcgggagtttcaggagccatcctacatcctcagcaacatcgcaagtggaatggccgatgtgcagcgattcatgatggcctctattgagcctctctgggagcctatggagcaccacggggaccccaatatattttactcccctgagagcaatagcctgaaattgaaaactcttaagattctcgcaggcactcctcaggaaagcaagaaaaaaatcaatagtgggtcacaaggggctactaagaatcaccgcagcataaagggagtctctaagtccaatggtaagacggctattggagaccctggtagagctaacatgcctggatacaatgaggattcacggagcacgttcttcgataagaaatattccaacatgtcaaccttagggaacaatgggcctacccataaaaagctctataggcataaaagctcctctaaggccctcagggacgagaagtgcaagggaaagcacatggaacgcgaacaagtgcataaagacgagtcaggtacagcgtctttcgagaagcttcgggacagtgattacaacctgctgaaggccgaaaccactttctgggtgctccctgtctttgaggaggagacaaggatctttcaaaaggacatcta

SEQ ID NO: 23317 - DNA, 357 bp, Artificial Sequence
  derived and/or modified sequence
tgaaagtctaacggaaagactgcaattggcgaccccggacgagctaacatgccaggatacaatgaggatagtcgcagcacttttttcgacaaaaaatattctaacatgtctaccctggggaacaacgggccaacccacaagaagctgtacaggcacaagtccagcagcaaagctttgagggacgagaagtgcaagggcaagcatatggagcgagagcaggtccacaaggatgaaagtgggacagccagttttgagaagctgcgggactcggattataatctcttaaaggctgagacaacattttgggttctccctgttttcgaggaagaaacccgcatctttcagaaggatatttag

SEQ ID NO: 23318 - DNA, 11716 bp, Artificial Sequence
  derived and/or modified sequence
aaaaccagtagcatcagcagcagcagcagcagccgccgccgccaccaccgccgccacagcagtagcattagcggcagtagcagcatttagcaatagctttaacagctatagcgacagtagcagccgccctcctctctccctctcgcggacggccgcagccaccgcacagagcgggctccaggcgccgagcgcgcagcccgctcgctaggtagctccagccggggcgagcgacagtgtaagcgaagcacggacccttggagcagccgggcagccgcggaggctctgagtttcagggccagagcccgacagctctgactccatctagcgcggcggcggcggagcctgagggagcgagcgaggagagaggcgcgtccacctggcgggcccagcgtatggagctgaggcagaggcggcggcggcggcggcagcagtagcagcggcggtggcggctaaggcagctcgaacagctgcggcgacggcgacagcccagccttgactgcgaccgcgctagctacagcgcctgctgcctgagcccgccagcgacgtgcgcctcgggagtcggcctgtgaggttggacagcatttggacttggaatgaaacaataagaggttatattcatggataaccaacaagataaggctattgttgcctcagccaacggagaaaacactctgattaatggggtcaaagaaaatgactcagaggaccaggatgtggcaatgaagtcatttgcagctctagaagctgctgcacctatccagcctacaccggtggcacaaaaagagaccctgatgtatcccagaggtctcctgcctctaccctctaagaagccctgtatgcagagcccgccctctcctttgggcctgattgaagcacccgaacatgctgctaatagtgcttctgtgaatgccatctccctcacatctggcattgcaaaaggcctgaacacatggtcacttcccaatgaatgtgagaaagctccatttgccataatggagcctgcaggcatgtcagctctgaatggggactgtctcatgcagccaagtcggacttgcttaggctgcttcatggaatccaaggatgcagtagatcctgagccagggatcagtctgaaagttggtgatctaaatagggattatgaaacgtgtgcagtctctgatatagggattcagtgtattaatgctggagaaaatatgaaatatggagagcagctgctctcagaccagctcctaggcttccccctgcataagtcaagggcaggagacagacgagaaactgagaaacctgacattgacttggaggatccggctcagaaaagctattatgaggcattactgttagacaagtgcaatacagaagaagctttgcttgcaaattccaatcaggattggggttacttcgagacttttattagtgaaagtaagattgaactgcttgacctctgttccaaaaatgagctgtctgtcaacctattctctgaagaagatgtggataactacatgtttgatgatgatgaatcaacactaggcagtgatgtctgctccctgaaaattcgatatgaatcctttcaggacaatgttcgagacaagactactcttttgatgcaggaagatgcccaattcaacttttttcccagcgtctttactacctgccccaagcgagagtctaagagtggggccctgaagcagagcagtgatttttcccaattcaaggtccctgatgtgagcatcatctggggggaggaagataaaaacttggacaagaagaaaggcaaagaggaaggacaggaagacaaaggtgtagagaagaaagatggaaaggataatggagaaaagcctgccttaaataaaccatgcagtgggactgaagtagagcaacttaagaatccaaagcagggccatcttgctaattccctggagacatcagggagtttcagtgatgatagttccttcattgagatctcatatgatgctatgggtgagatcaaggactgtagtcgctatatggctcgggacactaattctggcagctcctcctcccaacagaactatgggctgcgagccaagagaaaagtcagatacagtgaagattatctatatgatgttgactcactagagggtgaaaaagtaaatgagaggaaggaatggctgccagttggttccaaagaggaagatgatgatgaatggtgtcccaaaaagagaagaaaagtaacccgtaaggagccccctgttattatcaaatatatcatcattaatcgctttaaaggtgagaagaacatgctggtgaagttgggtaaggtggatgccagtgagacaacagtgaatttgagtgagaatcagctcaacaaatatgccaagctggcacccttgaaaggcttctggcaaaagaagaagaagcagagaaacaccaacacggactccatcaagacacctttttcccaaaagcaaagctttgaaccaggtagctttgaggtgtcatttctgccacctgctcgcaaacgaaaatctaaacttggcaacaggcacaggattcaaagaatcccatccattgaaatttcagcaagtagtaaacagatttcattatgtaatgatcagaggcacgctagtaatcataaagaagatggaggcctaaaaggtacactgaagtcagcacctctgggtgctcctagctgtgcaaatggatcacatttaaatgacatcacaggccctgactcagtgaaagtcaaagcccaagacacagagtttaaggggccagagaggaaagtgctcaataaaatcaaatttaaaagtgaagctaggttaaaatctaagaaagtcaaagctgctgggcaagaaagcaagccaattgttcaaatgagccctctcttggaaaaccaatcctcaaaggctaatttaaagaatgaagttattcctgggacatcaaacagttcccgtctatctgaatttcatgaggcaaaggctgctaagagttccacttttctaccaacgacatgctcttctgaaatgcctttatcatctgctaatgttaccactaatatacctgttatcccgggagggtatctgcagacattgttagatgcttctgacttgtcaaataacactagtatctcatacttcagccaccattctccagagcaaaatgaaggcagcctcactcaaaccgaaaaatcatttgtacccctccagcctacccaggactgtgtgctcacctcatcctctgactctgagctgcagcagtcatctcataacttcaaaatggaatcaagcaactatagaaatgtgtggcccaacaaggctacttctggcacccaggaattcatggctgaagtctcaagggagatagccccaacccaatccagtgaatttggagcctcccaagtagtctccatggaaaataacctcacacctacaacatacaatccaatctgtctcaatagtggtggcagtaattgcaacaaggtcctgtatgactccatgcaagatacccaactcccatctgatgactcttaccaattatgtcactttaataatggagagatctgctttcctttccagcaggggccagtcaatatggatgatggtcggctctttagctttgattcaatggccccactctctgtcagctcaagtaattattgctccttaagcttgaagtcctgtgaaaaggatggcgatgatgatatcactgatgacttcctggcccattgcagccctaagctggtgatccagcaaagcattgatgagatagcaccactaaaggagtccactgacctcctggatatatccaacttcacccctgacaaattccgccactcttccctttcagagatgtccccaccggacacccctagtctttcccctcaaattaccagatgtgagagtatgaagacactaggaacactaaaggggttccaagagggtgtcccaggaccattggacagtgtggaaaaaatcaagtgggactgcagtaccctttcacggcaggtccaaatggaggatggatttactttaaataatcaccagtttcagttccatatgttcaatgatgaggattctgtcagcctgctccaaaaaaacccttgcctgtcaacatttaatgatccatctggtcaaattagtaccaacaacaaagtgtcaaaatcaagaaagaaaagttcacccagcaagagtggggctatgaaccaaagctcttctcagaaaaacaccaggaaaaaatccctcaaaggtaacaacaaggggattgaaaaaccacctggcaaaaactcccgccaggtccctaagtccacaaagaaagggaaatacatggctgccatcaatggagagaaaatgcaaattggcattggccgtgggggaagccaaaccaacaccatatcctccactgggaagacattggctgaatgtatccaacatggtggccctatggcctctatgaagatgccaagtcaaaagggactttctggagattgggccttggggaaggagagcagcccaggctggagtgatatgagcatgggcaccaacaccaacagccttctggatgatgaccaacgggaatttcaggagccttcctatatcttgtccaacattgcctctggtatggcagatgtgcagagattcatgatggcctccatagagcccctttgggaacccatggagcaccatggggatcccaacatattctactcccctgagtccaatagtctaaaattaaaaaccctcaaaatattggctgggacaccacaggagtctaagaaaaagatcaacagtgggtcccaaggagccactaagaatcacaggtcaatcaagggtgtgagcaaaagcaatgggaaaacagcaataggtgatcctggtcgtgcaaacatgcctggttataacgaggactctcgctctaccttctttgataaaaagtatagtaacatgagcactttaggcaataacggaccgacacacaaaaagttgtatcgtcacaaatccagctccaaggccctgagagatgagaaatgtaagggaaagcacatggagcgagaacaggtccacaaggatgagtctgggacagcttcttttgaaaaactgagggattccgactacaatctcctaaaagcagaaacaaccttttgggttttacctgtgtttgaagaagagactcgcattttccagaaagacatttgatgtttgtgttttatttctttcaaaatatgccttgtggtatgtatgttgacatgtaagtgcttaaagaaaagaattttaaattgtgggaatacgtctttggagcaaactttaatctcatgttctatgtaaaagacttaaaaagtcatacagttgcacaagtagtttatgcactatttacccacaaggaaaaaattgaaaacattgtgccaaactacaaacaagtgactgtactgtatatatttttacttctatatcaacatttggttgtatttggggaagttgtccctgttaatttactagaaacattccagtgattcttgctattaaccacccccacttatgtggatagcacctgtagatcatggtggaaaaatatgttgtgttacacaatttaccaaaattaaaggatactgtttgaaatgtgccaaattttcttacctcatctcacagattcacccacagtttaaagctcattaattatttttaaatggatatatacacacccaaacatatatatgtatatgtttgtgtgtgtgtgtgtgtgtgtatatatatgtatatatatatatacacacacacacgttcttttaaagttttagactctactgtcctgtgtggaaacatgaacagctaaacaaggcaaaataaagattttcttgttccattgtgtaagggttaaaattttggaaaagtctgaaggccacaacagctaagtccatcagggacccaagtatatgcatttacagaacgttttacaaggaaacaaaacagctgctttcaaagtttgttttctaaaagcaaaatctgtagctgaaaattatttaaagtgcaaagttatattgctgatactttatatctcagttttatatattttataatagtctgggataaattataaaaatagctataaaatcaacactaatgataaatgaagtatatagaatgcttttatttaaatagtttcctaaatgttttattccagttttgtcaaaagtgcactcatatcatggctttagtgttctttcagtgtttaatcttgcaatgccaatgtcatttaaagaaaatgttaaggcatcccagttcaaccaaatttttcttcttatgagtaaagtacatttactatcagataagatgaacaatttgtggcaacaactgatttgggccatatacccttagtctgaggataaccaatatttgatgccacacactaaacttaaatctcaattttaagtacaaatttttaaatcacattttttattcagtactccccctactttttaaaaaaaatttcacagccccaacattcctcactactactttttcttcccttttattcaccacttgacttctaacatttgatctcttttctttgcacaattgaaggcctgtgcatctgatgactgatgcattatggcacagatgagataatggatgtgagagcgctttgtagatcataaagtgctatacagatataggggattaatattattaatattgttagttgttgtcgttgttactattcttattaatattgttactaacctattaacttgtgaatatataggctggggtgggagggtggagaataagtgggaagggaaaaaggggatttaacaaaaaaagggaagatgtttcaaaaggaaaattttaagcaaaatatgaacctacctagtcaatgccacctaaatgtattcacaaacagagaagcaacatttgaaagtagtcagagagaaatggaaggaagcctgtcatgtatataagtatatacacttcccggtccatgattcctttcaccagcctgctctattccttacagctgggtcgtaaaatgaacaagcctgtgttcttgatcatgtgtgttcccagcgtcagtctcttgtgtctgtggggatgagtgggtgaggagcattctgtgaggctggtacaggcccattcctaggctttaatgctctgtttgcagtgagccctggaaaattacttagtggaaaggcaccagatgaaacatgtctcctgccccatagctaccattcaaaagggaaaataaccaaactggaaaaccttcttctatttctctattctgatagctagctgtactaaatgctatggccagtccctagaaactggtctttgttttgtttttgtttttgtttttgatttttctgttttgcagctgaattttggcttggaatcaccaactctgcctgtattgtgatccccaagactccagacctcagagtcacctgctggcttagaggagtggagtgctttctatgtaatgaaaaggtggcaattaatgaaaaaataaagaaaatgttccattaatacaatgtgtttttataaaagtaaatatgggagcagttgtcccagttttttttcggtatcagttcagctttggagaatggggtgtgagtggggtaggacagcctgaaactgttggaaacaatttccttgtgagaacttgctatcataagtcctttggaatggatattctttcagttgctcctatggagcccattaagggccaattctagggcatagttcatccctttctccaaagagaattgttattttaaagtacctttttaattggcctgcagtgtattatatgtttttaatatataaattagtgacgcataaccagtcactttgtactgaaacataaaaagaaacagagtttgagaaatgagcaataggccgaggcagaagatgtttattctcttaattgcatttaatattcctctcagtacattgtgttctgagatgttcatcatttagcattttgttggtcctgtctctgctctcacagttctttttcttcctgtcataaccagctgccttagtagagtataaaaatagtgttttgccctatcactggtatctcaagtcagaaatatatattatccttggtctgaaattcctgattaccgctcccttctaaccttccccctctgagaagctgtttcctattaatgcctccctaacagagtcccatttaatctttactttcctggaaatggtaacctcccttattcttcttacttaatctcagaccttggtcttagaatttttcttttatggtctcatatcccacctgcccaaattgtcagggctcaacaatcttaggctgctttcttctggaagttcagaaggaaaccttcccattcttaattgcctttaattgctttggctattttcaaatctaattttttaattaaattttttttaatttttatagagtaggggtacaaggacagttgtgttacatggatatattgcttagtgttgaaatctgggcttttagtgtacccatcaccgaaatagtgtacattgtacccaataggtggtatttcatccctcaaatataattttaaacacacactcgtgcccacatggacaaattatatcacatgactgaggaaacttagaaattccttttccctgaagatctgttaagaataggtctcatctcctgccctggttaggtgctatattatatggagaagggtattgagactttgggggtcatgtttgggctgtgataactggcttgaaccagtgaccatcctttctgcctcgccaaggtctcttataccagcttcttcacatatgctgcttcctcccagctttcccttctgacttcttgttactctgcaactatgtgtcaaggccttaccttttcctgatgttttcaaacctcctgcattactttgatcatcacttcttcagccatctcactgaagtccttggtgctagctgggcttttgtgacaactttcaccttctctgaactttttccttgctgggaagcatctgcgtgtgtgagggggctacggagggaagtgtgtgtgtgtgtaagagagaggcaaaaggatgcttcaaaagctataaacaactctagcaagcatcctaagtcctatgtgaggttttgcagttctagtgaatttctgttttagtaggtttcaattagcatttactgcctaaaggagaaaaaccatatccaaggaccttttagccatgcttgctattaccaagctggaccagtgtgatgtagatccaacatgtcttcagcttacagatgctctcagaacagttccaagaattgaagagagctaagtttttatgctgaagaggagaatggagcactagctagtcctaactattgctagaaatagaaatgtttattttctcctttattattgagaaattatctaatttaaggagtaaccattttcatttagggatttttttaatgactgcccatcactacagaaatatgttctttttataaaataaaactaatgtgaggttggtttgttttctaatcataaaattcactaagcctatagttacatttagaagatttagtaccaaaatcaaacttttagtaacaaacaggaatcttgtcaacacaatgtaggccagggattttgtaaaggtttctcaaagacccaaataagggagaaaaaaattttagttgggctgtttaacttgggaaacactgtcatcagcttgagggtcctcagccagcatgtgattattttgatgacaggactcaggctaccctttaaggcacattttttactcagcattaaacactagctacagtcgtgaagcagagctcccattgcagctacatacttgagatgtactcttggtttcagaatcgtaactaagaggtaaggcattggagaaggacaatgtaaaagacagaggtttagaacaaagtttatggtgtgaatgaggctttcaaaatcagtatctgggtaaattgatactaaagacactgaagaaacactcatccacataagatggaaaggatgtctgtccatctaacaagctcaggggtttctgagtctcagaatgacatcccatttcaaaaagaagaaaagagatattgaaatcattctgcctgtttgagagatgactggttatttacagcacaaaaaaaggcttagaatgaaaactagaagaggccttttgtttttcactcccagtgaggagagtagaaatcttaagatgctctactgggctacctgtagcactgactggagtttgctgcctacagagttttgaatgtactagtccttagtttccatagaactgaatgcacctctttagtaagttgctgatttatggtgctaaagaaaatgattattcccatttttttcttcttccccaagccccttaagcatttaagaaaatttaaaataaaagcgttagaggccctttttatgaatgtaacctaagtttctgtttgacatatgacactgcaacttaaaaatgttaggaaattatttgcctttttttttcttttagagttaagctttataaataatctgtagaatcaattgaagtttaaagcttaaggatcactcttaagacgtctacaaaatcttgtatatttttaagtgtgccaatttgtaacatattttgtaagtgtatatttttcttagaaaagtgctgtgaagtgtctgtatgtgagagttttcctttttctgcaccactaggtgctaataaaaggatatttacttcaaagtttctggttttagaaaccacaatacaaagaaaaaaaatacacttttgttggaaattttgtaacacaaaacatgttgtgaaagagtgtagtgatcttgtgcaaaaaaaatgaacatttgtgagcttcttgctgttttatagattttcttgtaaattattcttgtaacacttctggttttgttgttcttgttgcgaaggtttcaaatatttgtgactgaatgtacggtgaaactgtcataatgttacctagctgagttttgttattgtttatgaaataaataaaaagaaaagtttaaaatactgctttagaatcatatgtattagaaatcaaaccatttctaattaaatctatgtcccaaataaaacgttctttatcatctagagcagtgtttctcaaactatctgtggtgagggaccaatagtttttgcaatccatcacagaccaatactattataaaacacaacaaaaatgaatttctaagaaagttaaatggaaaaaagatatgcaaaataaaagcccaaatgtattagatttaacatgtaaaattacatttcgagataaacataacataaggggaaagaaacgaattgcaaaaagttggtaccctgtttgagacaagtccactcatcaatgtcaaattgccatagaaggttctaatcatactttgaataatactttgactagaccagcagcattgccatcatctgggaacttgttaggaatgcgaaattccaagccctacaccaattctgctgaatgagaatctgaattttaacaagatccctaggtgttttgtgtgcatgttaaagtttgagaagcactgggctagagttttgtgtaggggattcttttgcccctcaaattgaggaatcatcttctagtgtgtccagtcttcaaagaccttaaaacaaattgtgtctttgttttgtgatccagatggaatctgcagagatgcagtcctctcaaagtgttaaagctgtttattgaaagtaataaatgctgatttgcctggt

SEQ ID NO: 23319 - DNA, 11759 bp, Artificial Sequence
  derived and/or modified sequence
ggggggacgaggcaggggaagaacctgggaaggaaaaccagtagcatcagcagcagcagcagcagccgccgccgccaccaccgccgccacagcagtagcattagcggcagtagcagcatttagcaatagctttaacagctatagcgacagtagcagccgccctcctctctccctctcgcggacggccgcagccaccgcacagagcgggctccaggcgccgagcgcgcagcccgctcgctaggtagctccagccggggcgagcgacagtgtaagcgaagcacggacccttggagcagccgggcagccgcggaggctctgagtttcagggccagagcccgacagctctgactccatctagcgcggcggcggcggagcctgagggagcgagcgaggagagaggcgcgtccacctggcgggcccagcgtatggagctgaggcagaggcggcggcggcggcggcagcagtagcagcggcggtggcggctaaggcagctcgaacagctgcggcgacggcgacagcccagccttgactgcgaccgcgctagctacagcgcctgctgcctgagcccgccagcgacgtgcgcctcgggagtcggcctgtgaggtgttggacagcatttggacttggaatgaaacaataagaggttatattcatggataaccaacaagataaggctattgttgcctcagccaacggagaaaacactctgattaatggggtcaaagaaaatgactcagaggaccaggatgtggcaatgaagtcatttgcagctctagaagctgctgcacctatccagcctacaccggtggcacaaaaagagaccctgatgtatcccagaggtctcctgcctctaccctctaagaagccctgtatgcagagcccgccctctcctttgggcctgattgaagcacccgaacatgctgctaatagtgcttctgtgaatgccatctccctcacatctggcattgcaaaaggcctgaacacatggtcacttcccaatgaatgtgagaaagctccatttgccataatggagcctgcaggcatgtcagctctgaatggggactgtctcatgcagccaagtcggacttgcttaggctgcttcatggaatccaaggatgcagtagatcctgagccagggatcagtctgaaagttggtgatctaaatagggattatgaaacgtgtgcagtctctgatatagggattcagtgtattaatgctggagaaaatatgaaatatggagagcagctgctctcagaccagctcctaggcttccccctgcataagtcaagggcaggagacagacgagaaactgagaaacctgacattgacttggaggatccggctcagaaaagctattatgaggcattactgttagacaagtgcaatacagaagaagctttgcttgcaaattccaatcaggattggggttacttcgagacttttattagtgaaagtaagattgaactgcttgacctctgttccaaaaatgagctgtctgtcaacctattctctgaagaagatgtggataactacatgtttgatgatgatgaatcaacactaggcagtgatgtctgctccctgaaaattcgatatgaatcctttcaggacaatgttcgagacaagactactcttttgatgcaggaagatgcccaattcaacttttttcccagcgtctttactacctgccccaagcgagagtctaagagtggggccctgaagcagagcagtgatttttcccaattcaaggtccctgatgtgagcatcatctggggggaggaagataaaaacttggacaagaagaaaggcaaagaggaaggacaggaagacaaaggtgtagagaagaaagatggaaaggataatggagaaaagcctgccttaaataaaccatgcagtgggactgaagtagagcaacttaagaatccaaagcagggccatcttgctaattccctggagacatcagggagtttcagtgatgatagttccttcattgagatctcatatgatgctatgggtgagatcaaggactgtagtcgctatatggctcgggacactaattctggcagctcctcctcccaacagaactatgggctgcgagccaagagaaaagtcagatacagtgaagattatctatatgatgttgactcactagagggtgaaaaagtaaatgagaggaaggaatggctgccagttggttccaaagaggaagatgatgatgaatggtgtcccaaaaagagaagaaaagtaacccgtaaggagccccctgttattatcaaatatatcatcattaatcgctttaaaggtgagaagaacatgctggtgaagttgggtaaggtggatgccagtgagacaacagtgaatttgagtgagaatcagctcaacaaatatgccaagctggcacccttgaaaggcttctggcaaaagaagaagaagcagagaaacaccaacacggactccatcaagacacctttttcccaaaagcaaagctttgaaccaggtagctttgaggtgtcatttctgccacctgctcgcaaacgaaaatctaaacttggcaacaggcacaggattcaaagaatcccatccattgaaatttcagcaagtagtaaacagatttcattatgtaatgatcagaggcacgctagtaatcataaagaagatggaggcctaaaaggtacactgaagtcagcacctctgggtgctcctagctgtgcaaatggatcacatttaaatgacatcacaggccctgactcagtgaaagtcaaagcccaagacacagagtttaaggggccagagaggaaagtgctcaataaaatcaaatttaaaagtgaagctaggttaaaatctaagaaagtcaaagctgctgggcaagaaagcaagccaattgttcaaatgagccctctcttggaaaaccaatcctcaaaggctaatttaaagaatgaagttattcctgggacatcaaacagttcccgtctatctgaatttcatgaggcaaaggctgctaagagttccacttttctaccaacgacatgctcttctgaaatgcctttatcatctgctaatgttaccactaatatacctgttatcccgggagggtatctgcagacattgttagatgcttctgacttgtcaaataacactagtatctcatacttcagccaccattctccagagcaaaatgaaggcagcctcactcaaaccgaaaaatcatttgtacccctccagcctacccaggactgtgtgctcacctcatcctctgactctgagctgcagcagtcatctcataacttcaaaatggaatcaagcaactatagaaatgtgtggcccaacaaggctacttctggcacccaggaattcatggctgaagtctcaagggagatagccccaacccaatccagtgaatttggagcctcccaagtagtctccatggaaaataacctcacacctacaacatacaatccaatctgtctcaatagtggtggcagtaattgcaacaaggtcctgtatgactccatgcaagatacccaactcccatctgatgactcttaccaattatgtcactttaataatggagagatctgctttcctttccagcaggggccagtcaatatggatgatggtcggctctttagctttgattcaatggccccactctctgtcagctcaagtaattattgctccttaagcttgaagtcctgtgaaaaggatggcgatgatgatatcactgatgacttcctggcccattgcagccctaagctggtgatccagcaaagcattgatgagatagcaccactaaaggagtccactgacctcctggatatatccaacttcacccctgacaaattccgccactcttccctttcagagatgtccccaccggacacccctagtctttcccctcaaattaccagatgtgagagtatgaagacactaggaacactaaaggggttccaagagggtgtcccaggaccattggacagtgtggaaaaaatcaagtgggactgcagtaccctttcacggcaggtccaaatggaggatggatttactttaaataatcaccagtttcagttccatatgttcaatgatgaggattctgtcagcctgctccaaaaaaacccttgcctgtcaacatttaatgatccatctggtcaaattagtaccaacaacaaagtgtcaaaatcaagaaagaaaagttcacccagcaagagtggggctatgaaccaaagctcttctcagaaaaacaccaggaaaaaatccctcaaaggtaacaacaaggggattgaaaaaccacctggcaaaaactcccgccaggtccctaagtccacaaagaaagggaaatacatggctgccatcaatggagagaaaatgcaaattggcattggccgtgggggaagccaaaccaacaccatatcctccactgggaagacattggctgaatgtatccaacatggtggccctatggcctctatgaagatgccaagtcaaaagggactttctggagattgggccttggggaaggagagcagcccaggctggagtgatatgagcatgggcaccaacaccaacagccttctggatgatgaccaacgggaatttcaggagccttcctatatcttgtccaacattgcctctggtatggcagatgtgcagagattcatgatggcctccatagagcccctttgggaacccatggagcaccatggggatcccaacatattctactcccctgagtccaatagtctaaaattaaaaaccctcaaaatattggctgggacaccacaggagtctaagaaaaagatcaacagtgggtcccaaggagccactaagaatcacaggtcaatcaagggtgtgagcaaaagcaatgggaaaacagcaataggtgatcctggtcgtgcaaacatgcctggttataacgaggactctcgctctaccttctttgataaaaagtatagtaacatgagcactttaggcaataacggaccgacacacaaaaagttgtatcgtcacaaatccagctccaaggccctgagagatgagaaatgtaagggaaagcacatggagcgagaacaggtccacaaggatgagtctgggacagcttcttttgaaaaactgagggattccgactacaatctcctaaaagcagaaacaaccttttgggttttacctgtgtttgaagaagagactcgcattttccagaaagacatttgatgtttgtgttttatttctttcaaaatatgccttgtggtatgtatgttgacatgtaagtgcttaaagaaaagaattttaaattgtgggaatacgtctttggagcaaactttaatctcatgttctatgtaaaagacttaaaaagtcatacagttgcacaagtagtttatgcactatttacccacaaggaaaaaattgaaaacattgtgccaaactacaaacaagtgactgtactgtatatatttttacttctatatcaacatttggttgtatttggggaagttgtccctgttaatttactagaaacattccagtgattcttgctattaaccacccccacttatgtggatagcacctgtagatcatggtggaaaaatatgttgtgttacacaatttaccaaaattaaaggatactgtttgaaatgtgccaaattttcttacctcatctcacagattcacccacagtttaaagctcattaattatttttaaatggatatatacacacccaaacatatatatgtatatgtttgtgtgtgtgtgtgtgtgtgtatatatatgtatatatatatatacacacacacacgttcttttaaagttttagactctactgtcctgtgtggaaacatgaacagctaaacaaggcaaaataaagattttcttgttccattgtgtaagggttaaaattttggaaaagtctgaaggccacaacagctaagtccatcagggacccaagtatatgcatttacagaacgttttacaaggaaacaaaacagctgctttcaaagtttgttttctaaaagcaaaatctgtagctgaaaattatttaaagtgcaaagttatattgctgatactttatatctcagttttatatattttataatagtctgggataaattataaaaatagctataaaatcaacactaatgataaatgaagtatatagaatgcttttatttaaatagtttcctaaatgttttattccagttttgtcaaaagtgcactcatatcatggctttagtgttctttcagtgtttaatcttgcaatgccaatgtcatttaaagaaaatgttaaggcatcccagttcaaccaaatttttcttcttatgagtaaagtacatttactatcagataagatgaacaatttgtggcaacaactgatttgggccatatacccttagtctgaggataaccaatatttgatgccacacactaaacttaaatctcaattttaagtacaaatttttaaatcacattttttattcagtactccccctactttttaaaaaaaatttcacagccccaacattcctcactactactttttcttcccttttattcaccacttgacttctaacatttgatctcttttctttgcacaattgaaggcctgtgcatctgatgactgatgcattatggcacagatgagataatggatgtgagagcgctttgtagatcataaagtgctatacagatataggggattaatattattaatattgttagttgttgtcgttgttactattcttattaatattgttactaacctattaacttgtgaatatataggctggggtgggagggtggagaataagtgggaagggaaaaaggggatttaacaaaaaaagggaagatgtttcaaaaggaaaattttaagcaaaatatgaacctacctagtcaatgccacctaaatgtattcacaaacagagaagcaacatttgaaagtagtcagagagaaatggaaggaagcctgtcatgtatataagtatatacacttcccggtccatgattcctttcaccagcctgctctattccttacagctgggtcgtaaaatgaacaagcctgtgttcttgatcatgtgtgttcccagcgtcagtctcttgtgtctgtggggatgagtgggtgaggagcattctgtgaggctggtacaggcccattcctaggctttaatgctctgtttgcagtgagccctggaaaattacttagtggaaaggcaccagatgaaacatgtctcctgccccatagctaccattcaaaagggaaaataaccaaactggaaaaccttcttctatttctctattctgatagctagctgtactaaatgctatggccagtccctagaaactggtctttgttttgtttttgtttttgtttttgatttttctgttttgcagctgaattttggcttggaatcaccaactctgcctgtattgtgatccccaagactccagacctcagagtcacctgctggcttagaggagtggagtgctttctatgtaatgaaaaggtggcaattaatgaaaaaataaagaaaatgttccattaatacaatgtgtttttataaaagtaaatatgggagcagttgtcccagttttttttcggtatcagttcagctttggagaatggggtgtgagtggggtaggacagcctgaaactgttggaaacaatttccttgtgagaacttgctatcataagtcctttggaatggatattctttcagttgctcctatggagcccattaagggccaattctagggcatagttcatccctttctccaaagagaattgttattttaaagtacctttttaattggcctgcagtgtattatatgtttttaatatataaattagtgacgcataaccagtcactttgtactgaaacataaaaagaaacagagtttgagaaatgagcaataggccgaggcagaagatgtttattctcttaattgcatttaatattcctctcagtacattgtgttctgagatgttcatcatttagcattttgttggtcctgtctctgctctcacagttctttttcttcctgtcataaccagctgccttagtagagtataaaaatagtgttttgccctatcactggtatctcaagtcagaaatatatattatccttggtctgaaattcctgattaccgctcccttctaaccttccccctctgagaagctgtttcctattaatgcctccctaacagagtcccatttaatctttactttcctggaaatggtaacctcccttattcttcttacttaatctcagaccttggtcttagaatttttcttttatggtctcatatcccacctgcccaaattgtcagggctcaacaatcttaggctgctttcttctggaagttcagaaggaaaccttcccattcttaattgcctttaattgctttggctattttcaaatctaattttttaattaaattttttttaatttttatagagtaggggtacaaggacagttgtgttacatggatatattgcttagtgttgaaatctgggcttttagtgtacccatcaccgaaatagtgtacattgtacccaataggtggtatttcatccctcaaatataattttaaacacacactcgtgcccacatggacaaattatatcacatgactgaggaaacttagaaattccttttccctgaagatctgttaagaataggtctcatctcctgccctggttaggtgctatattatatggagaagggtattgagactttgggggtcatgtttgggctgtgataactggcttgaaccagtgaccatcctttctgcctcgccaaggtctcttataccagcttcttcacatatgctgcttcctcccagctttcccttctgacttcttgttactctgcaactatgtgtcaaggccttaccttttcctgatgttttcaaacctcctgcattactttgatcatcacttcttcagccatctcactgaagtccttggtgctagctgggcttttgtgacaactttcaccttctctgaactttttccttgctgggaagcatctgcgtgtgtgagggggctacggagggaagtgtgtgtgtgtgtaagagagaggcaaaaggatgcttcaaaagctataaacaactctagcaagcatcctaagtcctatgtgaggttttgcagttctagtgaatttctgttttagtaggtttcaattagcatttactgcctaaaggagaaaaaccatatccaaggaccttttagccatgcttgctattaccaagctggaccagtgtgatgtagatccaacatgtcttcagcttacagatgctctcagaacagttccaagaattgaagagagctaagtttttatgctgaagaggagaatggagcactagctagtcctaactattgctagaaatagaaatgtttattttctcctttattattgagaaattatctaatttaaggagtaaccattttcatttagggatttttttaatgactgcccatcactacagaaatatgttctttttataaaataaaactaatgtgaggttggtttgttttctaatcataaaattcactaagcctatagttacatttagaagatttagtaccaaaatcaaacttttagtaacaaacaggaatcttgtcaacacaatgtaggccagggattttgtaaaggtttctcaaagacccaaataagggagaaaaaaattttagttgggctgtttaacttgggaaacactgtcatcagcttgagggtcctcagccagcatgtgattattttgatgacaggactcaggctaccctttaaggcacattttttactcagcattaaacactagctacagtcgtgaagcagagctcccattgcagctacatacttgagatgtactcttggtttcagaatcgtaactaagaggtaaggcattggagaaggacaatgtaaaagacagaggtttagaacaaagtttatggtgtgaatgaggctttcaaaatcagtatctgggtaaattgatactaaagacactgaagaaacactcatccacataagatggaaaggatgtctgtccatctaacaagctcaggggtttctgagtctcagaatgacatcccatttcaaaaagaagaaaagagatattgaaatcattctgcctgtttgagagatgactggttatttacagcacaaaaaaaggcttagaatgaaaactagaagaggccttttgtttttcactcccagtgaggagagtagaaatcttaagatgctctactgggctacctgtagcactgactggagtttgctgcctacagagttttgaatgtactagtccttagtttccatagaactgaatgcacctctttagtaagttgctgatttatggtgctaaagaaaatgattattcccatttttttcttcttccccaagccccttaagcatttaagaaaatttaaaataaaagcgttagaggccctttttatgaatgtaacctaagtttctgtttgacatatgacactgcaacttaaaaatgttaggaaattatttgcctttttttttcttttagagttaagctttataaataatctgtagaatcaattgaagtttaaagcttaaggatcactcttaagacgtctacaaaatcttgtatatttttaagtgtgccaatttgtaacatattttgtaagtgtatatttttcttagaaaagtgctgtgaagtgtctgtatgtgagagttttcctttttctgcaccactaggtgctaataaaaggatatttacttcaaagtttctggttttagaaaccacaatacaaagaaaaaaaatacacttttgttggaaattttgtaacacaaaacatgttgtgaaagagtgtagtgatcttgtgcaaaaaaaatgaacatttgtgagcttcttgctgttttatagattttcttgtaaattattcttgtaacacttctggttttgttgttcttgttgcgaaggtttcaaatatttgtgactgaatgtacggtgaaactgtcataatgttacctagctgagttttgttattgtttatgaaataaataaaaagaaaagtttaaaatactgctttagaatcatatgtattagaaatcaaaccatttctaattaaatctatgtcccaaataaaacgttctttatcatctagagcagtgtttctcaaactatctgtggtgagggaccaatagtttttgcaatccatcacagaccaatactattataaaacacaacaaaaatgaatttctaagaaagttaaatggaaaaaagatatgcaaaataaaagcccaaatgtattagatttaacatgtaaaattacatttcgagataaacataacataaggggaaagaaacgaattgcaaaaagttggtaccctgtttgagacaagtccactcatcaatgtcaaattgccatagaaggttctaatcatactttgaataatactttgactagaccagcagcattgccatcatctgggaacttgttaggaatgcgaaattccaagccctacaccaattctgctgaatgagaatctgaattttaacaagatccctaggtgttttgtgtgcatgttaaagtttgagaagcactgggctagagttttgtgtaggggattcttttgcccctcaaattgaggaatcatcttctagtgtgtccagtcttcaaagaccttaaaacaaattgtgtctttgttttgtgatccagatggaatctgcagagatgcagtcctctcaaagtgttaaagctgtttattgaaagtaataaatgctgatttgcctggtacccaaaa

SEQ ID NO: 23320 - DNA, 508 bp, Artificial Sequence
  derived and/or modified sequence
caaaagcaatgggaaaacagcaataggtgatcctggtcgtgcaaacatgcctggttataacgaggactctcgctctaccttctttgataaaaagtatagtaacatgagcactttaggcaataacggaccgacacacaaaaagttgtatcgtcacaaatccagctccaaggccctgagagatgagaaatgtaagggaaagcacatggagcgagaacaggtccacaaggatgagtctgggacagcttcttttgaaaaactgagggattccgactacaatctcctaaaagcagaaacaaccttttgggttttacctgtgtttgaagaagagactcgcattttccagaaagacatttgatgtttgtgttttatttctttcaaaatatgccttgtgctgaattttggcttggaatcaccaactctgcctgtattgtgatccccaagactccagacctcagagtcacctgctggcttagaggagtggagtgctttctatgtaatgaaaaggtgg

SEQ ID NO: 23321 - DNA, 4551 bp, Artificial Sequence
  derived and/or modified sequence
atggacaaccaacaagataaagcgatcgtggcttctgccaatggcgagaatacccttattaatggagtcaaggagaacgattccgaggaccaagatgtcgcgatgaaaagttttgctgctttagaggccgctgcacctatacaacctactccagtggcccagaaggaaacgctcatgtacccgcgaggcctactgccgcttcccagcaaaaaaccctgcatgcaatcccctccatcccccctgggtctgatcgaagcccctgaacacgccgccaattctgctagtgttaacgctatatctctgacttctgggatcgccaagggtctcaatacctggtccctccccaatgaatgtgaaaaagcaccatttgccatcatggagcctgccggcatgtccgcactcaacggggattgtcttatgcagccatccagaacttgtcttggctgtttcatggagtctaaagacgccgtggatcctgagccagggatatcccttaaggtgggtgatctcaaccgagactacgaaacttgtgcagtctctgatattggaatccagtgcattaacgcaggagagaacatgaaatatggggaacagctcctgtccgatcaattgcttggatttcccctccacaagagccgcgcaggcgatcgccgtgaaacagagaagcccgatatagatctggaggatccagcgcagaaatcgtactacgaggccctgctcttagacaagtgtaacactgaagaagcgctactggcaaatagcaaccaggactgggggtacttcgaaacttttatatctgagagcaagatcgaactgctcgatctgtgtagcaaaaacgaacttagcgtaaatctgttttccgaggaggatgtggataattatatgttcgatgacgacgaaagcactttgggctccgacgtgtgttcactcaagattagatatgaaagcttccaggataatgtgagggacaagactaccctgcttatgcaggaagatgcacaatttaacttcttcccgtctgttttcactacatgcccaaagagagagagtaagagtggtgcactgaagcagtccagcgactttagtcaattcaaggtgcctgatgtttctatcatctggggggaagaagataagaatctggacaagaagaaagggaaggaagaaggtcaggaggataaaggcgtggagaaaaaagatggcaaggacaacggggaaaagcccgcattaaacaagccctgttctggaaccgaggtggaacagctgaaaaatcctaagcagggccacctcgcaaattcattggagacaagcgggtcattcagcgatgatagctcgttcatcgaaatttcctacgatgctatgggcgagataaaagattgtagccgctacatggcaagagatactaattcaggcagttcttcctcccagcagaattatggattgagggccaagagaaaggttaggtattccgaagattatctgtatgatgtggatagcttggagggcgaaaaagtaaatgagagaaaggagtggctgccagtgggcagtaaggaagaagatgatgacgaatggtgccctaagaaacgcagaaaggttacaaggaaagagccacctgtcatcattaagtacatcattatcaataggttcaaaggcgaaaagaacatgctggtcaaacttggcaaggtggacgcatctgaaactacagtgaacctaagcgagaaccagctgaacaagtacgcgaagctagcccccctaaagggtttctggcagaagaagaaaaagcagcgaaacacgaataccgactccattaagaccccatttagtcagaaacagtcatttgaacccggcagtttcgaagtttccttcttacctcccgctcgcaaaaggaagagtaagctgggcaatcgccatcggatccagcgcattccttcaatcgagattagtgctagtagtaagcaaatctcactgtgcaatgatcagcggcatgcatcaaaccataaggaggacggtggcctgaaaggaaccttgaagtcagcacccctcggtgccccttcttgtgccaatgggtcacatctaaacgacatcacaggcccagattctgttaaggtgaaagcccaggatactgagttcaaaggacccgaacgaaaggtgctgaataagattaaattcaagtctgaagctcgattgaagtcaaaaaaggtgaaagccgcaggacaggagagcaaacctatcgtacagatgtcccccctgttagagaatcagtcgagtaaggcaaacctcaagaacgaagtcataccagggacatccaatagcagtcgactgtctgagttccatgaagccaaggctgcgaaatctagtacctttctgcctacgacttgctcgagcgaaatgccattgtccagcgcaaatgtaacaaccaacatcccagtgatccctggaggttatctgcagactctactcgatgctagcgatttgagcaataacaccagcatatcatacttctcgcaccactcgcctgagcagaacgagggatccctgacacaaaccgaaaaatcctttgttcccctgcaaccaacccaggattgtgtccttacctcttctagcgattctgagttgcagcagagcagtcataactttaagatggaaagctctaactatcgcaatgtatggccgaataaagccacctctggcacccaagaattcatggcagaggtcagccgagagatcgcgcccacccaatcatctgagttcggagcctcccaggtcgtatcaatggagaacaacttaacacccacaacatataatccaatctgcctgaattccggggggtccaactgcaataaggtcttgtacgattccatgcaggatacgcagctgcccagcgacgattcttaccagttatgccactttaataacggagagatctgtttcccgtttcagcagggtccagtaaacatggacgacgggcggctgttcagcttcgacagcatggctccgcttagtgtgtcctcatcgaattactgtagtctgtcattgaagtcttgtgagaaagatggtgatgacgatatcacggacgatttccttgctcactgtagtcccaagctggtgatccagcagagcatcgacgagattgcccctcttaaagaaagcactgacctattggatatatccaattttactcctgataagtttcgtcactccagcttaagcgaaatgtccccccccgacacaccttctttatctccccaaatcacacgctgcgagtctatgaagacactcgggaccctgaaaggcttccaggagggggtgcctgggcccctcgattctgtggaaaaaataaagtgggactgctctacgctgagccgccaagtgcagatggaggacggcttcactctcaataaccatcaattccagttccatatgttcaatgacgaggatagcgtgagcttgctgcagaaaaacccatgcctgtctaccttcaacgacccttccggccagatctccaccaacaacaaggtgtccaagtcccgtaaaaaaagctcaccatctaaaagcggagccatgaatcagagctcatcccagaaaaacacaagaaagaagagcctgaagggaaacaacaagggaattgaaaagccgccaggtaaaaactctcggcaggtccctaaatctaccaagaaagggaagtacatggcggccatcaacggcgaaaaaatgcaaattggcatcggtcggggcggatcacagacaaacaccatttcatctacgggcaaaacactcgccgagtgtatccagcacggtggcccaatggcttccatgaaaatgccgtctcagaagggactatccggggattgggctctcgggaaggaaagtagcccaggttggtcagatatgtctatgggcacaaataccaacagcctgcttgatgacgaccagagggaattccaagagcctagctatatcctatccaatatcgcaagtgggatggccgacgtgcagaggttcatgatggcttctatcgagcctttgtgggagcccatggagcatcatggagaccctaacatattttactccccagaaagtaacagcctgaagttaaaaacccttaaaattttggcaggcacacctcaagaaagcaaaaagaaaatcaatagcggaagtcagggagccactaaaaatcaccggtcgattaagggcgtcagcaaaagcaacgggaaaaccgccatcggtgaccctggccgtgctaatatgccgggttacaatgaagattcccgcagtacattcttcgacaagaaatactctaatatgagtacccttggcaacaatgggcccactcacaaaaagctgtatcgccacaagagttccagtaaggcacttagggacgaaaagtgtaaaggaaagcatatggagagagagcaggtgcataaggacgaatccggcactgcttctttcgaaaagctgcgtgattccgactacaacttgctgaaagctgagacaaccttttgggtgctccctgttttcgaggaagagacacgcattttccaaaaagatatttag

SEQ ID NO: 23322 - DNA, 4551 bp, Artificial Sequence
  derived and/or modified sequence
atggataatcaacaggataaagctatagttgcctccgccaacggagagaatacactgatcaacggagtaaaggagaacgacagtgaggaccaggatgtcgcaatgaaatccttcgccgcattagaggcagcggcccccattcaacctacgcccgtggcccaaaaggagactctcatgtacccccgcggactcttacctctgccctctaaaaagccctgtatgcaaagccccccatcccctctgggactgattgaggccccggaacatgctgccaatagtgcttcggtaaatgccatctcactgacgagcggcatcgcgaaaggcttgaacacctggagcctcccaaatgaatgtgaaaaggcaccctttgccataatggaacccgccggtatgagcgccctcaacggcgactgtctcatgcaaccttctcgtacctgcctgggctgttttatggaaagtaaagatgctgtcgatccagagcccggcatttccctcaaagtaggtgatcttaaccgggattatgaaacctgtgccgtttccgacatcggcatccaatgtattaatgcaggggagaacatgaagtacggtgagcaacttctgagcgaccagttgttggggttccctcttcataaatccagggccggggaccgccgagaaaccgaaaagcccgatattgatctcgaggatcctgcccagaagtcttactacgaagccttactgcttgataagtgtaataccgaagaagccttgctggccaacagtaatcaggactggggatacttcgagaccttcatatctgagtcaaaaatagaactgttagatctctgtagcaaaaatgagctttcagtcaatttattcagcgaggaggacgtggataattatatgtttgatgacgacgaatctacactgggctcggacgtctgtagcttaaagatccggtatgaatcgttccaggacaacgtgagagacaagaccactctgttaatgcaggaagatgctcaattcaacttctttcctagtgtattcaccacatgtccaaaacgagagagtaagtcaggagctcttaaacagagtagcgatttcagccaattcaaagtaccggacgttagtataatctggggtgaagaagataaaaatctcgacaagaagaaagggaaggaggagggacaagaagataagggggtggaaaagaaagatgggaaagataatggcgagaaacccgctctgaataaaccatgcagcggcacagaggttgagcagttgaaaaaccccaaacagggacatttggccaatagtctggaaacatctggatcgttctcagacgacagttctttcattgaaatttcctacgacgccatgggagagatcaaagattgttctcgatatatggccagggataccaatagcgggtcaagttcatcacaacagaactatgggctgagggcaaagagaaaggtaagatacagcgaagactatctatacgatgtagacagcctggaaggggagaaagtgaacgagcggaaagaatggctccccgtgggaagtaaagaagaagacgatgatgagtggtgcccaaagaagagaaggaaagtgacgcgcaaggagccccccgtgattattaaatatattatcatcaatagatttaagggcgaaaagaacatgctagtgaagctcggcaaagtggacgcgagtgaaacgacagtgaatctttccgaaaaccaactcaacaagtacgccaaactggctcctttaaagggtttctggcagaagaagaagaagcagaggaacacaaatactgatagcatcaaaactccattctcacagaagcagtcatttgaaccgggttcatttgaagtgagttttctgccacctgcgaggaagaggaaatcaaagctcggtaaccgacacagaatccagagaataccatctatcgagatctctgcatcatccaaacaaatctctctctgcaacgatcaacgtcacgctagcaaccataaagaggatggcggtctgaaagggacactcaagtccgcacccctgggggcaccttcatgcgcaaacggttcgcacttgaacgatataacaggaccggattctgttaaggtgaaagctcaggatacagagttcaaaggccccgagaggaaagtgctgaataagattaagtttaagagtgaggcgagactcaagtcaaagaaggtcaaggctgccggacaagaaagcaaaccgatcgtgcagatgtccccccttttagagaaccaaagtagtaaagcaaaccttaagaatgaagtgatacccggcactagcaactcttcaagactgagcgaattccacgaagccaaggctgccaaaagctctacattcctcccaactacatgtagctccgagatgcccctgtccagtgccaacgtgactaccaacataccagtgattcctggcggctatctccagacccttctcgatgctagcgatttaagcaacaatacttccatatcctacttttcacatcatagtccagaacagaacgagggatccctgacccagacagaaaaatcattcgtgccattgcagcctactcaggattgtgtactgacctctagctctgactctgagctacagcaaagctctcataactttaaaatggaatcttctaattataggaatgtgtggcctaacaaggctacgagtggaacccaagaatttatggctgaagtgtctagagagatcgcgcctactcagtcatcagaatttggggcttcccaggtggttagcatggaaaataacttgaccccaacgacgtacaatcctatttgcctgaactctggtggttccaactgcaataaggtcctatacgatagtatgcaagacacgcaactaccatccgatgattcctaccagctgtgtcatttcaataatggagaaatctgcttccccttccagcagggccccgtaaacatggatgacggacgtctttttagctttgacagcatggcccccctcagcgtctcctcttcgaactactgctctctctcactgaagtcttgtgaaaaggatggtgatgacgacataaccgatgacttcctcgcccactgttccccgaagctggtaattcaacagtctatagacgagattgcaccgctcaaggagtccactgatctgttggacattagtaacttcacccctgacaaattcaggcactcttccctctccgaaatgtctccccccgatacaccatctctaagtcctcaaattaccaggtgtgagtctatgaaaaccttgggaacccttaagggattccaggagggcgtacccggccccctcgattccgtggagaaaattaaatgggactgtagcactctgtcccgacaagttcaaatggaagacgggttcactttgaataaccatcaatttcagttccacatgtttaacgacgaagattcagtttccctgttgcagaaaaatccatgtttgagtaccttcaacgacccatctggacaaataagtacaaataacaaagtgtctaagagccgcaaaaaaagctctccttcaaaaagcggagcgatgaaccagtcttcctcacagaaaaataccagaaagaagagtctgaagggaaataacaagggaatcgaaaagccgccaggaaagaattctcgacaggtcccaaaaagtacaaagaaaggtaagtatatggctgcaattaatggcgagaaaatgcaaatcgggataggaagaggtggtagtcagacgaatacaattagctccactggtaaaactctcgcagaatgcattcaacacggtggaccaatggcaagtatgaaaatgcccagtcagaagggcctctcaggcgattgggctttaggaaaagagtctagtcccggctggtcggacatgagtatgggcactaacacaaattccctcttagatgatgaccagcgcgagttccaagagccctcctatatactgagtaatatcgcctcgggcatggccgatgtccaaagatttatgatggcaagtattgaacctttgtgggaacctatggagcatcatggagatcctaatattttctacagcccagaatccaatagcttgaaactgaaaacattaaagatcctggccggaaccccacaggaaagcaagaaaaagatcaacagcggatcacaaggggccaccaaaaatcatcggtcaattaagggtgtatccaagagcaatggaaaaacagccatcggcgatccgggacgagctaacatgccggggtacaacgaagactcgcggtctaccttctttgacaaaaaatactctaatatgtcgacgcttggtaacaacggacccacccacaaaaagctctaccgacataagtcctcttctaaggccctccgtgatgaaaaatgtaaaggcaaacatatggagcgcgaacaggtacataaagatgagagtgggacagcttcatttgaaaagttgcgagattccgactacaaccttctgaaagctgaaactactttttgggtactacccgtgttcgaagaagaaaccagaatttttcaaaaagatatatag

SEQ ID NO: 23323 - DNA, 4551 bp, Artificial Sequence
  derived and/or modified sequence
atggacaaccagcaggacaaggccatcgtggccagcgccaacggcgagaacaccctgatcaacggcgtgaaggagaacgacagcgaggaccaggacgtggccatgaagagcttcgccgccctggaggccgccgcccccatccagcccacccccgtggcccagaaggagaccctgatgtaccccagaggcctgctgcccctgcccagcaagaagccctgcatgcagagcccccccagccccctgggcctgatcgaggcccccgagcacgccgccaacagcgccagcgtgaacgccatcagcctgaccagcggcatcgccaagggcctgaacacctggagcctgcccaacgagtgcgagaaggcccccttcgccatcatggagcccgccggcatgagcgccctgaacggcgactgcctgatgcagcccagcagaacctgcctgggctgcttcatggagagcaaggacgccgtggaccccgagcccggcatcagcctgaaggtgggcgacctgaacagagactacgagacctgcgccgtgagcgacatcggcatccagtgcatcaacgccggcgagaacatgaagtacggcgagcagctgctgagcgaccagctgctgggcttccccctgcacaagagcagagccggcgacagaagagagaccgagaagcccgacatcgacctggaggaccccgcccagaagagctactacgaggccctgctgctggacaagtgcaacaccgaggaggccctgctggccaacagcaaccaggactggggctacttcgagaccttcatcagcgagagcaagatcgagctgctggacctgtgcagcaagaacgagctgagcgtgaacctgttcagcgaggaggacgtggacaactacatgttcgacgacgacgagagcaccctgggcagcgacgtgtgcagcctgaagatcagatacgagagcttccaggacaacgtgagagacaagaccaccctgctgatgcaggaggacgcccagttcaacttcttccccagcgtgttcaccacctgccccaagagagagagcaagagcggcgccctgaagcagagcagcgacttcagccagttcaaggtgcccgacgtgagcatcatctggggcgaggaggacaagaacctggacaagaagaagggcaaggaggagggccaggaggacaagggcgtggagaagaaggacggcaaggacaacggcgagaagcccgccctgaacaagccctgcagcggcaccgaggtggagcagctgaagaaccccaagcagggccacctggccaacagcctggagaccagcggcagcttcagcgacgacagcagcttcatcgagatcagctacgacgccatgggcgagatcaaggactgcagcagatacatggccagagacaccaacagcggcagcagcagcagccagcagaactacggcctgagagccaagagaaaggtgagatacagcgaggactacctgtacgacgtggacagcctggagggcgagaaggtgaacgagagaaaggagtggctgcccgtgggcagcaaggaggaggacgacgacgagtggtgccccaagaagagaagaaaggtgaccagaaaggagccccccgtgatcatcaagtacatcatcatcaacagattcaagggcgagaagaacatgctggtgaagctgggcaaggtggacgccagcgagaccaccgtgaacctgagcgagaaccagctgaacaagtacgccaagctggcccccctgaagggcttctggcagaagaagaagaagcagagaaacaccaacaccgacagcatcaagacccccttcagccagaagcagagcttcgagcccggcagcttcgaggtgagcttcctgccccccgccagaaagagaaagagcaagctgggcaacagacacagaatccagagaatccccagcatcgagatcagcgccagcagcaagcagatcagcctgtgcaacgaccagagacacgccagcaaccacaaggaggacggcggcctgaagggcaccctgaagagcgcccccctgggcgcccccagctgcgccaacggcagccacctgaacgacatcaccggccccgacagcgtgaaggtgaaggcccaggacaccgagttcaagggccccgagagaaaggtgctgaacaagatcaagttcaagagcgaggccagactgaagagcaagaaggtgaaggccgccggccaggagagcaagcccatcgtgcagatgagccccctgctggagaaccagagcagcaaggccaacctgaagaacgaggtgatccccggcaccagcaacagcagcagactgagcgagttccacgaggccaaggccgccaagagcagcaccttcctgcccaccacctgcagcagcgagatgcccctgagcagcgccaacgtgaccaccaacatccccgtgatccccggcggctacctgcagaccctgctggacgccagcgacctgagcaacaacaccagcatcagctacttcagccaccacagccccgagcagaacgagggcagcctgacccagaccgagaagagcttcgtgcccctgcagcccacccaggactgcgtgctgaccagcagcagcgacagcgagctgcagcagagcagccacaacttcaagatggagagcagcaactacagaaacgtgtggcccaacaaggccaccagcggcacccaggagttcatggccgaggtgagcagagagatcgcccccacccagagcagcgagttcggcgccagccaggtggtgagcatggagaacaacctgacccccaccacctacaaccccatctgcctgaacagcggcggcagcaactgcaacaaggtgctgtacgacagcatgcaggacacccagctgcccagcgacgacagctaccagctgtgccacttcaacaacggcgagatctgcttccccttccagcagggccccgtgaacatggacgacggcagactgttcagcttcgacagcatggcccccctgagcgtgagcagcagcaactactgcagcctgagcctgaagagctgcgagaaggacggcgacgacgacatcaccgacgacttcctggcccactgcagccccaagctggtgatccagcagagcatcgacgagatcgcccccctgaaggagagcaccgacctgctggacatcagcaacttcacccccgacaagttcagacacagcagcctgagcgagatgagcccccccgacacccccagcctgagcccccagatcaccagatgcgagagcatgaagaccctgggcaccctgaagggcttccaggagggcgtgcccggccccctggacagcgtggagaagatcaagtgggactgcagcaccctgagcagacaggtgcagatggaggacggcttcaccctgaacaaccaccagttccagttccacatgttcaacgacgaggacagcgtgagcctgctgcagaagaacccctgcctgagcaccttcaacgaccccagcggccagatcagcaccaacaacaaggtgagcaagagcagaaagaagagcagccccagcaagagcggcgccatgaaccagagcagcagccagaagaacaccagaaagaagagcctgaagggcaacaacaagggcatcgagaagccccccggcaagaacagcagacaggtgcccaagagcaccaagaagggcaagtacatggccgccatcaacggcgagaagatgcagatcggcatcggcagaggcggcagccagaccaacaccatcagcagcaccggcaagaccctggccgagtgcatccagcacggcggccccatggccagcatgaagatgcccagccagaagggcctgagcggcgactgggccctgggcaaggagagcagccccggctggagcgacatgagcatgggcaccaacaccaacagcctgctggacgacgaccagagagagttccaggagcccagctacatcctgagcaacatcgccagcggcatggccgacgtgcagagattcatgatggccagcatcgagcccctgtgggagcccatggagcaccacggcgaccccaacatcttctacagccccgagagcaacagcctgaagctgaagaccctgaagatcctggccggcaccccccaggagagcaagaagaagatcaacagcggcagccagggcgccaccaagaaccacagaagcatcaagggcgtgagcaagagcaacggcaagaccgccatcggcgaccccggcagagccaacatgcccggctacaacgaggacagcagaagcaccttcttcgacaagaagtacagcaacatgagcaccctgggcaacaacggccccacccacaagaagctgtacagacacaagagcagcagcaaggccctgagagacgagaagtgcaagggcaagcacatggagagagagcaggtgcacaaggacgagagcggcaccgccagcttcgagaagctgagagacagcgactacaacctgctgaaggccgagaccaccttctgggtgctgcccgtgttcgaggaggagaccagaatcttccagaaggacatctag

SEQ ID NO: 23324 - DNA, 357 bp, Artificial Sequence
  derived and/or modified sequence
tgaaagagcaacggcaagaccgccatcggcgaccccggcagagccaacatgcccggctacaacgaggacagcagaagcaccttcttcgacaagaagtacagcaacatgagcaccctgggcaacaacggccccacccacaagaagctgtacagacacaagagcagcagcaaggccctgagagacgagaagtgcaagggcaagcacatggagagagagcaggtgcacaaggacgagagcggcaccgccagcttcgagaagctgagagacagcgactacaacctgctgaaggccgagaccaccttctgggtgctgcccgtgttcgaggaggagaccagaatcttccagaaggacatctag

SEQ ID NO: 23325 - protein, 356 aa, Artificial Sequence
  derived and/or modified sequence
MSIPLPLLQIYTSDNYTEEMGSGDYDSMKEPCFREENANFNKIFLPTIYSIIFLTGIVGNGLVILVMGYQKKLRSMTDKYRLHLSVADLLFVITLPFWAVDAVANWYFGNFLCKAVHVIYTVNLYSSVLILAFISLDRYLAIVHATNSQRPRKLLAEKVVYVGVWIPALLLTIPDFIFANVSEADDRYICDRFYPNDLWVVVFQFQHIMVGLILPGIVILSCYCIIISKLSHSKGHQKRKALKTTVILILAFFACWLPYYIGISIDSFILLEIIKQGCEFENTVHKWISITEALAFFHCCLNPILYAFLGAKFKTSAQHALTSVSRGSSLKILSKGKRGGHSSVSTESESSSFHSS

SEQ ID NO: 23326 - DNA, 1071 bp, Artificial Sequence
  derived and/or modified sequence
atgagcatccccctgcccctgctgcagatctacaccagcgacaactacaccgaggagatgggcagcggcgactacgacagcatgaaggagccctgcttcagagaggagaacgccaacttcaacaagatcttcctgcccaccatctacagcatcatcttcctgaccggcatcgtgggcaacggcctggtgatcctggtgatgggctaccagaagaagctgagaagcatgaccgacaagtacagactgcacctgagcgtggccgacctgctgttcgtgatcaccctgcccttctgggccgtggacgccgtggccaactggtacttcggcaacttcctgtgcaaggccgtgcacgtgatctacaccgtgaacctgtacagcagcgtgctgatcctggccttcatcagcctggacagatacctggccatcgtgcacgccaccaacagccagagacccagaaagctgctggccgagaaggtggtgtacgtgggcgtgtggatccccgccctgctgctgaccatccccgacttcatcttcgccaacgtgagcgaggccgacgacagatacatctgcgacagattctaccccaacgacctgtgggtggtggtgttccagttccagcacatcatggtgggcctgatcctgcccggcatcgtgatcctgagctgctactgcatcatcatcagcaagctgagccacagcaagggccaccagaagagaaaggccctgaagaccaccgtgatcctgatcctggccttcttcgcctgctggctgccctactacatcggcatcagcatcgacagcttcatcctgctggagatcatcaagcagggctgcgagttcgagaacaccgtgcacaagtggatcagcatcaccgaggccctggccttcttccactgctgcctgaaccccatcctgtacgccttcctgggcgccaagttcaagaccagcgcccagcacgccctgaccagcgtgagcagaggcagcagcctgaagatcctgagcaagggcaagagaggcggccacagcagcgtgagcaccgagagcgagagcagcagcttccacagcagctag

SEQ ID NO: 23327 - DNA, 1895 bp, Artificial Sequence
  derived and/or modified sequence
ttttttttcttccctctagtgggcggggcagaggagttagccaagatgtgactttgaaaccctcagcgtctcagtgcccttttgttctaaacaaagaattttgtaattggttctaccaaagaaggatataatgaagtcactatgggaaaagatggggaggagagttgtaggattctacattaattctcttgtgcccttagcccactacttcagaatttcctgaagaaagcaagcctgaattggttttttaaattgctttaaaaattttttttaactgggttaatgcttgctgaattggaagtgaatgtccattcctttgcctcttttgcagatatacacttcagataactacaccgaggaaatgggctcaggggactatgactccatgaaggaaccctgtttccgtgaagaaaatgctaatttcaataaaatcttcctgcccaccatctactccatcatcttcttaactggcattgtgggcaatggattggtcatcctggtcatgggttaccagaagaaactgagaagcatgacggacaagtacaggctgcacctgtcagtggccgacctcctctttgtcatcacgcttcccttctgggcagttgatgccgtggcaaactggtactttgggaacttcctatgcaaggcagtccatgtcatctacacagtcaacctctacagcagtgtcctcatcctggccttcatcagtctggaccgctacctggccatcgtccacgccaccaacagtcagaggccaaggaagctgttggctgaaaaggtggtctatgttggcgtctggatccctgccctcctgctgactattcccgacttcatctttgccaacgtcagtgaggcagatgacagatatatctgtgaccgcttctaccccaatgacttgtgggtggttgtgttccagtttcagcacatcatggttggccttatcctgcctggtattgtcatcctgtcctgctattgcattatcatctccaagctgtcacactccaagggccaccagaagcgcaaggccctcaagaccacagtcatcctcatcctggctttcttcgcctgttggctgccttactacattgggatcagcatcgactccttcatcctcctggaaatcatcaagcaagggtgtgagtttgagaacactgtgcacaagtggatttccatcaccgaggccctagctttcttccactgttgtctgaaccccatcctctatgctttccttggagccaaatttaaaacctctgcccagcacgcactcacctctgtgagcagagggtccagcctcaagatcctctccaaaggaaagcgaggtggacattcatctgtttccactgagtctgagtcttcaagttttcactccagctaacacagatgtaaaagacttttttttatacgataaataacttttttttaagttacacatttttcagatataaaagactgaccaatattgtacagtttttattgcttgttggatttttgtcttgtgtttctttagtttttgtgaagtttaattgacttatttatataaattttttttgtttcatattgatgtgtgtctaggcaggacctgtggccaagttcttagttgctgtatgtctcgtggtaggactgtagaaaagggaactgaacattccagagcgtgtagtgaatcacgtaaagctagaaatgatccccagctgtttatgcatagataatctctccattcccgtggaacgtttttcctgttcttaagacgtgattttgctgtagaagatggcacttataaccaaagcccaaagtggtatagaaatgctggtttttcagttttcaggagtgggttgatttcagcacctacagtgtacagtcttgtattaagttgttaataaaagtacatgttaaactta

SEQ ID NO: 23328 - DNA, 1071 bp, Artificial Sequence
  derived and/or modified sequence
atgtcaatcccactgcccctgttgcagatatacacttccgataattacaccgaggagatgggttcaggcgactacgacagcatgaaggagccttgcttcagagaagagaatgccaactttaataagatctttctcccgactatttattcgattatatttctaactgggatagttggtaacgggctggttatactggtcatgggttaccagaaaaaactgcggtctatgactgataaatacaggcttcatctaagcgtcgcggatctgctgtttgtgatcactcttccattctgggcagttgatgccgtggcaaactggtatttcggcaatttcctgtgcaaggcggtccacgtcatctataccgtgaatctttattccagtgtgctcatacttgcttttatcagcttggatagatacttggctattgttcacgccacgaattctcaacggccccgaaagctgcttgccgagaaagtggtttacgttggggtgtggatccctgccctgttgctcacaatccccgacttcattttcgcgaacgtgagcgaagccgacgaccggtacatctgtgatcggttctatcctaatgatctatgggtagtggtttttcagtttcagcatatcatggtgggcttgatcctgccaggaatagtgatcctctcctgctattgcataattatcagtaagctgtctcacagtaaagggcatcaaaagcgcaaggccctgaagaccaccgttatcttgatcttagctttcttcgcctgttggctgccctactacatcggcatcagtattgactctttcattctattggagattataaaacaaggctgtgaattcgagaacaccgtccacaagtggatttctatcaccgaagctctggccttcttccactgttgtctaaatccaattttgtatgctttcctcggggcaaaattcaaaaccagtgcccagcatgccctgacatccgtctcccgggggtcatctctgaagatcctctctaaaggtaaacgcggtggccatagttccgtgtccacagagagcgaatcaagctcattccattccagctag

SEQ ID NO: 23329 - DNA, 1071 bp, Artificial Sequence
  derived and/or modified sequence
atgagcatccccctgcccctgctgcagatctacaccagtgacaactacacagaggagatgggcagcggggactatgacagcatgaaggagccctgcttccgggaggagaatgccaacttcaacaagatcttcctgcccaccatctacagcatcatcttcctgactggaattgtgggcaatggcctggtgatcctggtgatgggctaccagaagaagctgcgctccatgacagacaagtaccgcctgcacctgtctgtggccgacctgctgtttgtgatcaccctgcccttctgggccgtggatgctgtggccaactggtacttcggcaacttcctgtgcaaggctgtgcacgtgatctacacagtgaacctgtacagctctgtgctgatcctggccttcatcagcctggaccgctacctggccatcgtgcacgccaccaacagccagaggcccaggaagctgctggccgagaaggtggtgtatgtgggcgtgtggatcccagccctgctgctgaccatcccagacttcatctttgccaacgtgtctgaggctgatgaccgctacatctgtgaccgcttctacccaaatgacctgtgggtggtggtgttccagttccagcacatcatggtgggcctcatcctgcccggcatcgtcatcctgagctgctactgcatcatcatcagcaagctgagccacagcaagggccaccagaagaggaaggccctgaagaccaccgtcatcctgatcctggccttctttgcctgctggctgccctactacatcggcatcagcattgacagcttcatcctgctggagatcatcaagcagggctgtgaatttgaaaatacagtgcacaagtggatcagcatcacagaggccctggccttcttccactgctgcctgaaccccatcctgtatgccttcctgggcgccaagttcaagaccagcgcccagcacgccctgacctctgtgtcccggggcagcagcctgaagatcctgagcaagggcaagagaggaggccacagctctgtgtccacagagagcgagagcagcagcttccacagcagctag

SEQ ID NO: 23330 - DNA, 1071 bp, Artificial Sequence
  derived and/or modified sequence
atgagcatccccctgcccctgctgcagatctacaccagcgacaactacactgaggaaatgggttctggggactacgactccatgaaggagccatgctttcgcgaggagaacgccaacttcaacaagatctttctccccacgatctactcaattattttcctcacggggatcgtcgggaatggccttgttattttagtgatgggctaccaaaagaaacttcgtagcatgacggacaaataccgtctacatctgagtgtggcagacctcctattcgtgatcaccttgcccttttgggcggtagatgcagtggccaactggtacttcggaaactttctgtgtaaggccgtacacgtaatttatactgtgaacttatattcctctgtccttattctggcatttatctccctcgatagatacctggccatcgtgcatgcaacaaacagccagaggccaaggaagctgctcgcggaaaaagttgtctacgtcggagtttggatacccgccctgcttctaaccatccccgacttcatattcgccaacgtctccgaggccgatgaccgatatatctgcgacagattctatccaaatgacctgtgggtggtagtgttccagttccagcacattatggttggactcatactgccgggcatcgttatccttagttgttattgcataattatttcaaagctgtctcattcaaagggacatcagaagcggaaagctctcaagaccactgtcatattgattctcgcctttttcgcgtgctggctgccatactacatcggcataagcattgactcgttcatcttacttgagataataaagcaaggctgcgaatttgagaataccgtgcataagtggatttcaattactgaagctttggccttcttccactgttgcctcaaccccattttgtatgccttccttggcgccaagtttaaaacgtccgcacagcacgcattgaccagtgtaagccgcggaagttccttgaagatattgtcaaaaggcaaacgcgggggccatagttccgtatctaccgaaagcgaatctagcagttttcactcttcttag

SEQ ID NO: 23331 - DNA, 1071 bp, Artificial Sequence
  derived and/or modified sequence
atgtccattccactgccattgctgcagatttatacaagtgacaattataccgaggagatgggcagtggcgattatgattccatgaaggagccctgttttagggaggagaacgctaacttcaacaaaattttcctgccaaccatatactctatcatcttccttaccggcatcgtggggaacggtctcgtgattctagtgatgggctatcagaaaaagctaaggtcgatgactgataaatatcgcctccacctgagcgttgccgatctgcttttcgttataacactgcccttttgggccgtcgacgccgtagcaaactggtactttggtaattttctctgcaaagccgtgcatgtcatttacacagtgaatctttattcgagcgtcctgatcttggcttttattagccttgaccggtatttggccattgttcacgcgacgaactctcagagaccaagaaagctgctggcagaaaaggtcgtgtatgtaggagtctggattcccgcactgctgctcaccattcctgatttcatttttgccaatgttagcgaggccgatgaccgatatatctgtgacaggttttaccccaacgatctgtgggtagtggtattccaatttcaacatattatggtcggactaatcctgcccggaatcgtgatcctttcctgttattgtattattatatccaagctgtctcactccaagggccaccagaaacgcaaggcgctgaaaactacggttatccttattctagcctttttcgcctgctggttgccttactatatcgggatatctattgattctttcatcttgctcgaaatcataaagcaggggtgcgagtttgagaatacggttcacaagtggatcagtataacagaggctctcgctttctttcactgctgcctcaaccccatactctacgcattcctcggtgctaagtttaagacatctgcccagcatgctcttacaagcgtgagtagggggtccagcctgaagattctgagtaagggtaagcgcggtgggcattcgagtgtgtccaccgagtctgaatcatctagctttcacagcagttag

SEQ ID NO: 23332 - protein, 182 aa, Artificial Sequence
  derived and/or modified sequence
MPSPRLQHSKPPRRLSRAQKHSSGSSNTSTANRRAHLRLCLERLKVLIPLGPDCTRHTTLGLLNKAKAHIKKLEEAERKSQHQLENLEREQRFLKWRLEQLQGPQEMERIRMDSIGSTISSDRSDSEREEIEVDVESTEFSHGEVDNISTTSISDIDDHSSLPSIGSDEGYSSASVKLSFTS

SEQ ID NO: 23333 - DNA, 549 bp, Artificial Sequence
  derived and/or modified sequence
atgccctctccccgtcttcagcactcaaagcccccacgacgacttagccgtgctcagaaacacagttcgggatcctcaaacacatcaacagcaaacaggcgcgcccacttgcggctgtgcctggaacgactcaaagtattgattcctctggggcctgactgcaccagacacacaaccctgggacttcttaataaggcgaaggcccatattaagaagctggaagaggcggaacgtaagagtcagcaccaacttgaaaatctggaaagggagcagcgattcctaaaatggagactcgaacagctccagggcccacaggagatggaacgaatcaggatggattctatcggctccacaatctcgtctgacaggtccgattccgagcgcgaggagatcgaagtggacgtggaaagtacagagttttcccacggggaagttgataatatcagcactactagtattagcgacattgatgaccacagttcactgccttcgattggatctgatgaaggatactccagcgcttcagtaaagctctccttcacttcttag

SEQ ID NO: 23334 - DNA, 549 bp, Artificial Sequence
  derived and/or modified sequence
atgcccagcccccggctgcagcacagcaagccaccccggcggctgagccgggcccagaagcacagcagcggcagcagcaacaccagcacagccaacagaagagcccacctgcggctgtgcctggagcggctgaaggtgctgatccccctgggccctgactgcaccaggcacaccaccctgggcctgctgaacaaggccaaggcccacatcaagaagctggaggaggccgagaggaagagccagcaccagctggagaacctggagcgggagcagcgcttcctgaagtggaggctggagcagctgcagggcccccaggagatggagcgcatccgcatggacagcatcggcagcaccatcagcagtgacagaagtgacagcgagcgggaggagattgaggtggatgtggagagcacagagttcagccacggggaggtggacaacatcagcaccaccagcatcagtgacattgatgaccacagcagcctgcccagcattggaagtgatgagggctacagcagcgcctctgtgaagctgtccttcaccagctag

SEQ ID NO: 23335 - DNA, 549 bp, Artificial Sequence
  derived and/or modified sequence
atgcccagcccccggctgcagcacagcaagcccccccggcggctgtctagagctcaaaagcattctagtggctcctccaacaccagcaccgcaaaccggcgtgctcaccttagactgtgcctagagagattgaaagtgctgatccctctgggaccggattgcactaggcatactaccctgggtttactgaataaagccaaagctcatatcaaaaaactggaggaagctgagaggaagtctcaacaccagttggagaatctcgagagagaacagaggtttctgaaatggcgcttagagcagctacaaggaccacaggagatggaacggatccgtatggacagcatcggctccacaatatcatccgaccggtcagactccgaaagagaggaaatcgaggtggatgtggaatcaacagagttttctcatggagaggtcgacaacatctccactacaagcatctctgatattgatgaccacagcagtctgccgtccatcggcagtgatgagggctactcctcggccagcgtcaagctgagcttcacaagttag

SEQ ID NO: 23336 - DNA, 549 bp, Artificial Sequence
  derived and/or modified sequence
atgccgagccctagattgcagcattcaaaacctcctaggaggctttcccgtgcacagaaacacagctcgggatcaagcaatactagtacagctaacaggcgcgcacacctgcgcctctgcctggaaagacttaaagtgctcattcctttgggccctgactgcacccgtcacaccactctgggacttctgaataaagccaaggcacacatcaaaaagctagaggaggcggaacggaagtcccagcatcagctggaaaatctggaacgggagcagaggttcctgaagtggagactggagcagctccaaggtcctcaggagatggagcggattcgcatggattccatcggaagtacgatttcatctgacagatctgactcagaacgggaggagattgaggtggacgtggaatctactgagtttagccatggagaggttgataatatttccactacctcaatttcagatatcgatgatcacagctcgcttccttccatcggatctgatgaagggtactcttcggcaagtgtcaagctaagctttacttcatag

SEQ ID NO: 23337 - DNA, 549 bp, Artificial Sequence
  derived and/or modified sequence
atgcccagccccagactgcagcacagcaagccccccagaagactgagcagagcccagaagcacagcagcggcagcagcaacaccagcaccgccaacagaagagcccacctgagactgtgcctggagagactgaaggtgctgatccccctgggccccgactgcaccagacacaccaccctgggcctgctgaacaaggccaaggcccacatcaagaagctggaggaggccgagagaaagagccagcaccagctggagaacctggagagagagcagagattcctgaagtggagactggagcagctgcagggcccccaggagatggagagaatcagaatggacagcatcggcagcaccatcagcagcgacagaagcgacagcgagagagaggagatcgaggtggacgtggagagcaccgagttcagccacggcgaggtggacaacatcagcaccaccagcatcagcgacatcgacgaccacagcagcctgcccagcatcggcagcgacgagggctacagcagcgccagcgtgaagctgagcttcaccagctag

SEQ ID NO: 23338 - protein, 958 aa, Artificial Sequence
  derived and/or modified sequence
MAEARKRRELLPLIYHHLLRAGYVRAAREVKEQSGQKCFLAQPVTLLDIYTHWQQTSELGRKRKAEEDAALQAKKTRVSDPISTSESSEEEEEAEAETAKATPRLASTNSSVLGADLPSSMKEKAKAETEKAGKTGNSMPHPATGKTVANLLSGKSPRKSAEPSANTTLVSETEEEGSVPAFGAAAKPGMVSAGQADSSSEDTSSSSDETDVEGKPSVKPAQVKASSVSTKESPARKAAPAPGKVGDVTPQVKGGALPPAKRAKKPEEESESSEEGSESEEEAPAGTRSQVKASEKILQVRAASAPAKGTPGKGATPAPPGKAGAVASQTKAGKPEEDSESSSEESSDSEEETPAAKALLQAKASGKTSQVGAASAPAKESPRKGAAPAPPGKTGPAVAKAQAGKREEDSQSSSEESDSEEEAPAQAKPSGKAPQVRAASAPAKESPRKGAAPAPPRKTGPAAAQVQVGKQEEDSRSSSEESDSDREALAAMNAAQVKPLGKSPQVKPASTMGMGPLGKGAGPVPPGKVGPATPSAQVGKWEEDSESSSEESSDSSDGEVPTAVAPAQEKSLGNILQAKPTSSPAKGPPQKAGPVAVQVKAEKPMDNSESSEESSDSADSEEAPAAMTAAQAKPALKIPQTKACPKKTNTTASAKVAPVRVGTQAPRKAGTATSPAGSSPAVAGGTQRPAEDSSSSEESDSEEEKTGLAVTVGQAKSVGKGLQVKAASVPVKGSLGQGTAPVLPGKTGPTVTQVKAEKQEDSESSEEESDSEEAAASPAQVKTSVKKTQAKANPAAARAPSAKGTISAPGKVVTAAAQAKQRSPSKVKPPVRNPQNSTVLARGPASVPSVGKAVATAAQAQTGPEEDSGSSEEESDSEEEAETLAQVKPSGKTHQIRAALAPAKESPRKGAAPTPPGKTGPSAAQAGKQDDSGSSSEESDSDGEAPAAVTSAQDQESS

SEQ ID NO: 23339 - DNA, 2877 bp, Artificial Sequence
  derived and/or modified sequence
atggccgaggccagaaagagaagagagctgctgcccctgatctaccaccacctgctgagagccggctacgtgagagccgccagagaggtgaaggagcagagcggccagaagtgcttcctggcccagcccgtgaccctgctggacatctacacccactggcagcagaccagcgagctgggcagaaagagaaaggccgaggaggacgccgccctgcaggccaagaagaccagagtgagcgaccccatcagcaccagcgagagcagcgaggaggaggaggaggccgaggccgagaccgccaaggccacccccagactggccagcaccaacagcagcgtgctgggcgccgacctgcccagcagcatgaaggagaaggccaaggccgagaccgagaaggccggcaagaccggcaacagcatgccccaccccgccaccggcaagaccgtggccaacctgctgagcggcaagagccccagaaagagcgccgagcccagcgccaacaccaccctggtgagcgagaccgaggaggagggcagcgtgcccgccttcggcgccgccgccaagcccggcatggtgagcgccggccaggccgacagcagcagcgaggacaccagcagcagcagcgacgagaccgacgtggagggcaagcccagcgtgaagcccgcccaggtgaaggccagcagcgtgagcaccaaggagagccccgccagaaaggccgcccccgcccccggcaaggtgggcgacgtgaccccccaggtgaagggcggcgccctgccccccgccaagagagccaagaagcccgaggaggagagcgagagcagcgaggagggcagcgagagcgaggaggaggcccccgccggcaccagaagccaggtgaaggccagcgagaagatcctgcaggtgagagccgccagcgcccccgccaagggcacccccggcaagggcgccacccccgccccccccggcaaggccggcgccgtggccagccagaccaaggccggcaagcccgaggaggacagcgagagcagcagcgaggagagcagcgacagcgaggaggagacccccgccgccaaggccctgctgcaggccaaggccagcggcaagaccagccaggtgggcgccgccagcgcccccgccaaggagagccccagaaagggcgccgcccccgccccccccggcaagaccggccccgccgtggccaaggcccaggccggcaagagagaggaggacagccagagcagcagcgaggagagcgacagcgaggaggaggcccccgcccaggccaagcccagcggcaaggccccccaggtgagagccgccagcgcccccgccaaggagagccccagaaagggcgccgcccccgccccccccagaaagaccggccccgccgccgcccaggtgcaggtgggcaagcaggaggaggacagcagaagcagcagcgaggagagcgacagcgacagagaggccctggccgccatgaacgccgcccaggtgaagcccctgggcaagagcccccaggtgaagcccgccagcaccatgggcatgggccccctgggcaagggcgccggccccgtgccccccggcaaggtgggccccgccacccccagcgcccaggtgggcaagtgggaggaggacagcgagagcagcagcgaggagagcagcgacagcagcgacggcgaggtgcccaccgccgtggcccccgcccaggagaagagcctgggcaacatcctgcaggccaagcccaccagcagccccgccaagggccccccccagaaggccggccccgtggccgtgcaggtgaaggccgagaagcccatggacaacagcgagagcagcgaggagagcagcgacagcgccgacagcgaggaggcccccgccgccatgaccgccgcccaggccaagcccgccctgaagatcccccagaccaaggcctgccccaagaagaccaacaccaccgccagcgccaaggtggcccccgtgagagtgggcacccaggcccccagaaaggccggcaccgccaccagccccgccggcagcagccccgccgtggccggcggcacccagagacccgccgaggacagcagcagcagcgaggagagcgacagcgaggaggagaagaccggcctggccgtgaccgtgggccaggccaagagcgtgggcaagggcctgcaggtgaaggccgccagcgtgcccgtgaagggcagcctgggccagggcaccgcccccgtgctgcccggcaagaccggccccaccgtgacccaggtgaaggccgagaagcaggaggacagcgagagcagcgaggaggagagcgacagcgaggaggccgccgccagccccgcccaggtgaagaccagcgtgaagaagacccaggccaaggccaaccccgccgccgccagagcccccagcgccaagggcaccatcagcgcccccggcaaggtggtgaccgccgccgcccaggccaagcagagaagccccagcaaggtgaagccccccgtgagaaacccccagaacagcaccgtgctggccagaggccccgccagcgtgcccagcgtgggcaaggccgtggccaccgccgcccaggcccagaccggccccgaggaggacagcggcagcagcgaggaggagagcgacagcgaggaggaggccgagaccctggcccaggtgaagcccagcggcaagacccaccagatcagagccgccctggcccccgccaaggagagccccagaaagggcgccgcccccaccccccccggcaagaccggccccagcgccgcccaggccggcaagcaggacgacagcggcagcagcagcgaggagagcgacagcgacggcgaggcccccgccgccgtgaccagcgcccaggaccaggagagcagctag

SEQ ID NO: 23340 - DNA, 2877 bp, Artificial Sequence
  derived and/or modified sequence
atggcagaggcgagaaagagacgagagttactgccactgatttatcaccacctgctccgcgccgggtacgttcgagctgcccgcgaagtgaaagagcagtctggacaaaagtgcttcctggcccagccagtgacacttctggacatatacacccactggcaacagacctcggagttgggtcggaaaagaaaggcggaagaggatgccgcgctgcaggctaaaaaaaccagggtgtcggacccgatcagcactagcgagtcttcggaggaggaggaagaggccgaagcagagacagcgaaagcaaccccccggctggcatccaccaacagcagtgtactaggggccgatctgcctagttccatgaaggagaaggcaaaagccgagaccgagaaagccggcaagaccggtaacagcatgcctcaccctgcaactggaaaaaccgtcgctaacctgttgtccgggaagagtcctagaaagagcgctgaaccttctgccaatacaacacttgtaagcgagactgaggaggagggatctgtgcctgccttcggcgccgctgccaaaccggggatggttagtgcaggccaggccgattcaagctcagaggacacatcctcttcttccgacgagaccgacgttgagggcaagccgtcagtgaaacctgcccaggttaaagcatcaagcgtgtccacaaaagaatcccccgcacgcaaagccgctccggcccctgggaaggtcggtgacgtcactcctcaggttaagggtggcgccctgccacctgccaaacgtgctaagaaaccggaagaggagtccgaaagctctgaagaaggatccgaatctgaggaggaagctccagcgggaacccgtagccaggtaaaagctagcgaaaagatattgcaagtgagagcagccagcgctcccgcaaagggaacccctggaaagggagctactccagcacctccgggaaaagccggggctgtggcatcccagacgaaagcagggaagcctgaggaagactctgagagttccagcgaggagagctccgatagtgaagaagagactcccgctgctaaagctttgctgcaggctaaggcttccgggaagacatcccaagttggcgccgcttcagctcctgctaaagaatcaccccggaaaggcgccgccccagcacctccaggtaaaacaggacctgcagttgctaaggctcaggccggaaaacgcgaggaagacagtcaatcaagctccgaagaatctgatagtgaggaagaggctccggcacaggcgaaaccatctgggaaggccccacaagtgagagcagcctcagcccctgcaaaggagtcccctcgtaagggcgccgctccagccccgcctcgaaagaccggtccggctgccgcccaagtgcaggtgggtaagcaggaagaagactcaaggtcgtcctcggaagaatccgacagcgacagggaggccttggcggcaatgaatgcagctcaggtgaagcccctcggaaagagtccacaggtaaagccagcatcaacaatgggtatgggccctctgggtaaaggcgctggccctgtgccacctggaaaggtgggtcctgccactccctcagctcaggtgggcaagtgggaagaagattccgagtcaagctctgaagagtcttcggacagctctgatggtgaggtcccgactgccgtggctccagcacaggaaaaatcccttggaaacattctgcaggccaaacctacaagctctcctgccaaggggcccccgcagaaggcgggacctgtagccgttcaagttaaagctgaaaaacccatggataactccgagagctcagaggagagttctgatagcgcagatagcgaagaagccccagccgcaatgactgctgcacaagccaaacccgccttaaagattccccagacaaaggcttgtcccaaaaagacgaacacaacagcctcagcaaaggtcgctcccgtgcgtgtgggaactcaagcccctcgaaaggccggaaccgctacaagtcccgctgggtcgagcccggccgtggccggcgggactcagcgccccgccgaggactcatcgagctcagaggaatctgatagcgaggaggagaaaactggcctggccgtaactgttggacaagcgaagagcgtgggcaaaggactgcaggttaaggccgcttctgttcccgttaaggggtccctgggtcagggcactgccccggtgcttccaggtaagacgggaccaacagtaacgcaggtgaaagccgagaagcaagaggatagcgaaagtagtgaggaagagtcggactcagaagaggctgctgcttctccagcacaggtaaaaacttcagtcaagaagacgcaggcaaaagcaaaccccgctgctgcccgagcaccaagcgctaaggggacaatctcggccccggggaaagtcgttactgccgctgcccaggcaaagcaacgatctccctccaaggtgaagccccccgtgagaaacccacagaattccaccgtgctggcaaggggtcccgcatccgtgccaagcgtaggcaaggctgtagccacagccgcccaggcccagaccggccccgaggaggactccggatccagcgaagaggaatcagacagcgaagaggaggcagagaccttggcccaggtgaaaccgagtggaaagactcaccagattcgggccgccctggcccccgcaaaagaatcgccaaggaagggcgccgcacctacgcccccaggtaagacagggccaagtgccgcccaggccggcaagcaggacgattctggaagcagctcagaagagtccgattctgacggtgaggcccccgctgcggtcacctccgcacaggatcaggagagcagttag

SEQ ID NO: 23341 - DNA, 2877 bp, Artificial Sequence
  derived and/or modified sequence
atggccgaggccaggaagagaagagagctgctgcccctcatctaccaccacctgctgcgggccggctacgtgcgggccgcccgggaggtgaaggagcagagcggccagaagtgcttcctggcccagcctgtgaccctgctggacatctacacccactggcagcagaccagcgagctgggcaggaagaggaaggccgaggaggatgctgccctgcaggccaagaagaccagggtgtctgaccccatcagcaccagcgagagcagcgaggaggaggaggaggccgaggccgagacagccaaggccaccccccggctggccagcaccaacagctctgtgctgggcgctgacctgcccagctccatgaaggagaaggccaaggccgagacagagaaggccggcaagacaggcaacagcatgccccacccagccaccgggaagacagtggccaacctgctgagcggcaagagccccaggaagtctgctgagcccagcgccaacaccaccctggtgtctgaaacagaggaggagggctctgtgcctgccttcggggctgctgccaagccaggcatggtgtctgctggccaggccgacagcagcagcgaggacaccagcagcagcagtgatgaaacagatgtggagggcaagcccagcgtgaagccagcccaggtgaaggccagctctgtgtccaccaaggagagccctgccaggaaggccgccccagcccctgggaaggtgggagatgtgaccccccaggtgaagggcggggccctgcccccagccaagagggccaagaagccagaggaggagagcgagagcagcgaggagggcagcgagagcgaggaggaggccccagctggcaccaggagccaggtgaaggccagcgagaagatcctgcaggtgcgggccgccagcgccccagccaagggcaccccaggaaaaggagccaccccagcccctcctgggaaggccggggctgtggccagccagaccaaggccggcaagccagaagaagattctgagagcagcagcgaggagagcagtgacagcgaggaggagaccccagctgccaaggccctgctgcaggccaaggccagcggcaagaccagccaggtgggcgccgccagcgccccagccaaggagagccccaggaagggggccgccccagcccctcctgggaagacaggccctgctgtggccaaggcccaggccggcaagcgggaggaggacagccagagcagcagcgaggagagtgacagcgaggaggaggccccagcccaggccaagcccagcggcaaggccccccaggtgcgggccgccagcgccccagccaaggagagccccaggaaaggagctgccccagccccacccaggaagacaggccctgctgctgcccaggtgcaggtgggcaagcaggaggaggacagccgcagcagcagcgaggagagtgacagcgaccgggaggccctggccgccatgaatgctgcccaggtgaagcccctgggcaagagcccccaggtgaagccagccagcaccatgggcatgggccccctgggcaaaggagctggccctgtgcccccaggcaaggtgggccctgccaccccatctgcccaggtgggcaagtgggaggaggacagcgagagcagcagcgaggagagcagtgacagcagtgatggagaggtgcccacagctgtggccccagcccaggagaagagcctgggcaacatcctgcaggccaagcccaccagcagccctgccaagggccccccccagaaggccggccctgtggccgtgcaggtgaaggccgagaagcccatggacaacagcgagagcagcgaggagagcagtgacagcgctgacagcgaggaggccccagctgccatgacagctgcccaggccaagccagccctgaagatcccccagaccaaggcctgccccaagaagaccaacaccacagccagcgccaaggtggcccctgtgcgggtgggcacccaggcccccaggaaggccggcacagccaccagccctgctggcagcagccctgctgtggccggcggcacccagaggcctgctgaggacagcagcagcagcgaggagagtgacagcgaggaggagaagacaggcctggccgtgacagtgggccaggccaagtctgtgggcaagggcctgcaggtgaaggccgcctctgtgcctgtgaagggcagcctgggccagggcacagcccctgtgctgcccgggaagacaggccccaccgtgacccaggtgaaggccgagaagcaggaggacagcgagagcagcgaggaggagagtgacagcgaggaggccgccgccagccctgcccaggtgaagacctctgtgaagaagacccaggccaaggccaacccagctgctgcccgggcccccagcgccaagggcaccatcagcgcccctgggaaggtggtgacagctgctgcccaggccaagcagaggagccccagcaaggtgaagccccctgtgaggaacccccagaacagcacagtgctggcccggggccctgcctctgtgcccagcgtgggcaaggctgtggccacagctgcccaggcccagacaggccctgaggaggacagcggcagcagcgaggaggagagtgacagcgaggaggaggccgagaccctggcccaggtgaagcccagcggcaagacccaccagatccgggccgccctggccccagccaaggagagccccaggaaaggagctgcccccaccccacctgggaagacaggccccagcgctgcccaggccggcaagcaggatgacagcggcagcagcagcgaggagagtgacagtgatggagaggccccagctgctgtgaccagcgcccaggaccaggagagcagctag

SEQ ID NO: 23342 - DNA, 2877 bp, Artificial Sequence
  derived and/or modified sequence
atggccgaggcccggaagcggcgggagctgctgcccctgatctaccaccacctgttacgcgccggctacgtgcgagccgccagagaagtgaaagagcagtctgggcagaaatgcttcttggcacagcccgtcacactgctcgacatctatacacactggcagcagacaagtgagctgggacgaaagagaaaggcagaggaggacgccgcactccaagccaagaagacccgggtgtctgatccgatcagtacatctgaatcgtccgaggaagaagaggaggcagaggcagaaacagccaaagcaaccccgcgcctggcctcgaccaatagtagcgtcttaggagcagacctgccctcctcgatgaaggagaaggctaaagccgaaactgagaaagccgggaaaacgggtaactctatgcctcaccccgctactggaaagacggtggccaacctcctctctggtaagtcccctcgtaagagcgcagagcccagcgccaatacaaccctggtgtctgagacagaggaggaagggagcgtgcccgcttttggggccgccgctaagccgggcatggtgagtgcgggccaggctgattccagcagcgaggatacatcaagcagctctgatgagactgacgtggaagggaagccatccgttaagcctgcccaggtcaaagcgtcctcagtgagcacaaaggaatcgcctgctcgaaaagccgcccctgcacctggaaaagtgggcgatgttacccctcaagtgaaaggaggtgcccttcctcctgccaagagagccaagaagccggaagaagagtctgaatcgagtgaagagggaagcgaatctgaggaggaagctcccgccggcaccagatcccaagtgaaagcttcagagaaaatactgcaggtgagggccgcctcggcccctgcaaaggggaccccgggcaaaggggccactcctgcgcccccaggaaaagctggagcagtggctagccaaacaaaggccgggaaacctgaggaagacagcgagtcctcttctgaggagtcctctgactctgaagaggagacccccgcagctaaggcacttttgcaggccaaggccagcggcaagacctcccaggtcggagcggcaagcgcacccgcgaaagagagcccccgcaaaggagccgccccggcacctccaggaaaaactggacctgcagtggcaaaagcccaagccggaaagcgggaggaggacagccaatcatccagcgaggagagtgactccgaggaggaagcgccagcccaggccaagccctccgggaaggcgccacaagtgagagccgcctccgcacctgccaaagaaagccctaggaagggcgctgcccccgctcctccaaggaagaccggtcccgcagcggcccaggtgcaggtcggcaagcaagaggaggattcacggagctcgagcgaagagtctgacagcgaccgtgaggcgctggctgcaatgaacgcagcccaggtgaagccactggggaagtcaccacaggtgaaacccgctagtactatgggaatggggcctctgggcaagggagctggaccagtccctccgggtaaggttggtcctgccaccccttccgctcaggtggggaagtgggaggaggactcagagtcaagctcagaagagtccagcgattcatccgacggggaggttcccacagcagtcgcccctgcccaggagaagtctctcgggaacatcctccaagctaaacccacaagctctcctgccaagggacctccccaaaaggctggacctgttgctgtgcaggttaaagccgaaaaacccatggataattccgagtccagcgaagaatcgtctgattcagccgactctgaggaggctcccgcagccatgactgctgcccaggccaaaccggccctcaagattcctcagaccaaggcatgcccaaagaagacaaacactacagctagtgctaaggtggcaccagtcagagtgggcacacaggccccccgcaaagccggcaccgctacctcacccgctgggtcttctccagcagtggcaggggggacacagagaccagcggaggattcctcctcgtctgaggagtccgatagtgaagaggagaagaccggactggccgttacagtgggacaggccaagtcagtggggaaagggcttcaggtgaaggcagccagtgttcctgttaaaggcagcctgggacagggaaccgctcccgtcctgcctgggaagacgggcccaaccgtgacacaggtgaaagctgagaagcaagaagattcagagagtagtgaagaagaaagtgacagcgaagaagcagccgcctctccagcacaagtgaagaccagcgtgaagaagactcaagctaaagccaaccctgcagccgctcgagcgcccagcgccaaggggacaatcagcgcccccggtaaggtcgtgacagcagcagctcaggcaaagcagcggagtccctctaaggtgaaacctccagtcaggaacccacaaaacagtaccgtactcgcccgggggcctgcaagcgtcccctccgtgggaaaagccgtggccaccgcggctcaggctcagaccggccccgaggaggatagtgggagttctgaggaagagtccgactctgaagaggaggccgaaacactcgcacaggtcaagccttctggcaagacccatcagatcagggcagcgctggcgccagctaaggagtcccccaggaaaggagccgcccccacacctccaggtaagacaggaccttccgccgcgcaggcgggtaagcaggacgattctggctcttcaagcgaagaatccgattcagacggcgaagcaccagcagccgtgacttcagcacaggaccaggagtcaagctag

SEQ ID NO: 23343 - DNA, 2877 bp, Artificial Sequence
  derived and/or modified sequence
atggccgaagccaggaagaggagggagctcttgcctctgatataccaccatctacttagagccggatatgtcagggcggctcgggaggtcaaggaacaaagcggacagaaatgctttctcgctcaacctgttactcttctggatatttacacccattggcagcagacttctgaactcggaagaaagcggaaggcagaagaggacgcagcactacaggccaagaaaacgagggtctctgatccaatcagtacatccgagtccagtgaagaggaagaagaggcagaggccgaaacagcaaaggccacgccaaggctcgcttcaactaactcaagcgttctgggagcagatctcccatcctcaatgaaagagaaggcgaaagctgagacggaaaaggccggaaaaactggtaattccatgccacatccagcgacagggaaaactgttgccaatttactgtccggcaaaagcccgagaaagagcgctgaaccttcagctaacaccaccttagtaagtgagacagaagaggaaggctccgtgcccgcattcggcgctgccgcaaaaccaggcatggtgtctgccggacaggccgatagctcttccgaagatactagctctagctctgatgaaaccgacgtggagggaaagccctcagttaaacccgctcaagttaaggcttcgtccgtcagtaccaaagagtcccccgctcgtaaggctgcccctgcccctgggaaggtgggtgatgtgacccctcaagtgaaaggtggggcactccccccagctaagagagctaaaaagcccgaggaggagtcagagagcagcgaagaagggtcagagagcgaagaggaagctccagccggaactagatcccaggttaaggctagtgagaagattctgcaggttcgcgctgcgagtgctcccgcaaaaggaactcccggaaagggggctactccagccccacccggtaaggcgggagctgtggcttcccagactaaagccggaaaaccggaggaagactccgaatctagtagtgaagagtcttccgatagcgaagaggagacgcccgcagctaaagctctgttacaagccaaggcatccgggaaaacttctcaggtcggtgctgcctcagcccctgccaaggagagtccaaggaagggcgcagctcctgctcctcccggtaaaacaggcccagctgtcgctaaagcacaagccggaaaacgggaagaagatagtcagtcctcatccgaagagagtgacagcgaagaggaggcgcctgctcaggctaagccatcaggtaaagctccacaggtccgggctgcctctgctcccgctaaggaatcccccaggaaaggtgccgcacctgcaccccctaggaaaacgggaccagctgcagcacaggttcaggtgggaaagcaggaggaggattctagatcctcatccgaagagtccgattcagatcgtgaagccttggccgctatgaatgcagcacaggtgaaaccgctggggaagagtcctcaagttaagcccgctagtaccatgggcatggggccacttggcaagggggcaggacctgtgccccctggtaaagtgggacccgcaacccccagcgcccaggtgggcaaatgggaagaggactctgaaagcagtagcgaagagtcttcagatagcagcgacggggaggtaccgacagctgtggcccctgctcaggagaaaagcctgggaaacattctgcaggccaagcctaccagcagccctgcgaaagggcctccacagaaggccggtcccgtggccgtccaagtaaaagctgaaaaaccaatggacaatagcgaaagctctgaggagagtagcgacagtgccgactctgaagaggcacctgccgcaatgaccgcagctcaggcgaaacctgcactgaaaatcccacagactaaagcttgcccaaagaaaaccaacacaaccgcctctgctaaggtggctcccgtgagagtaggaacccaggcccctagaaaagccggaaccgcaacatctcccgctggtagctctcccgctgttgcgggtggaacacagcgccctgccgaggattccagcagttctgaagaaagcgactcagaggaagagaaaactggcctcgcagtcaccgtaggtcaggcaaagtccgtgggcaaaggcttgcaggtcaaagcggctagcgtcccagtgaaaggctcattaggccagggtacagctccggttctgccgggaaaaaccgggcctaccgtgacacaggtcaaagccgagaaacaggaagacagcgaatcaagtgaggaagaatcagacagtgaggaagcagccgcttctcctgcccaggtgaagacctccgttaagaagacccaggccaaggccaatcctgctgcagccagggcaccctccgcgaaaggcaccatttcagctccaggaaaggtggttacagccgctgcacaggccaagcagcggagtcccagcaaagtgaaaccaccagtgagaaacccccagaactccacggtgctcgccagggggcctgcgagtgttccttccgtggggaaggcagtggccacggccgcacaggcgcagactgggccagaggaggatagcggcagcagcgaggaggagtctgattcagaggaggaggcggagaccctggcccaagtaaaaccatccggtaagacccaccagatccgggctgcgctcgccccagctaaggagagccctagaaaaggcgcagcccctactccaccagggaagaccgggccatctgcagcccaagccggaaaacaagatgatagcggaagctcttctgaggagtccgacagtgatggagaggctccagctgcagttactagcgcccaggaccaagagtcaagttag

SEQ ID NO: 23344 - DNA, 3400 bp, Artificial Sequence
  derived and/or modified sequence
aggtagccggccggccgggggtcgcgggtatggccgaggccaggaagcggcgggagctacttcccctgatctaccaccatctgctgcgggctggctatgtgcgtgcggcgcgggaagtgaaggagcagagcggccagaagtgtttcctggctcagcccgtaacccttctggacatctatacacactggcaacaaacctcagagcttggtcggaagcggaaggcagaggaagatgcggcactgcaagctaagaaaacccgtgtgtcagaccccatcagcacctcggagagctcggaagaggaggaagaagcagaagccgaaaccgccaaagccaccccaagactagcatctaccaactcctcagtcctgggggcggacttgccatcaagcatgaaagaaaaagccaaggcagagacagagaaagctggcaagactgggaattccatgccacaccctgccactgggaagacggtggccaaccttctttctgggaagtctcccaggaagtcagcagagccctcagcaaatactacgttggtctcagaaactgaggaggagggcagcgtcccggcctttggagctgctgccaagcctgggatggtgtcagcgggccaggccgacagctccagcgaggacacctccagctccagtgatgagacagacgtggaggggaaaccctcagtaaaaccagcccaggtcaaagcctcatcagtttctactaaggagtctccagcaagaaaggcggccccagcccctgggaaggtgggggatgtgacaccccaggtcaaaggaggggccctgcccccagccaagagggccaagaagccagaagaggagtcagagagtagtgaggagggatctgaaagtgaggaggaggcccctgcagggacacgaagccaggtaaaggcctctgaaaaaattctccaggtcagagctgcctcagcccctgccaaggggacccctgggaaaggggctaccccagcaccccctgggaaggcaggggctgtagcctcccagaccaaggcagggaagccagaggaggactcagagagcagcagcgaggagtcatctgacagtgaggaggagacgccagctgccaaggccctgcttcaggcgaaggcctcaggaaaaacctctcaggtcggagctgcctcagcccctgccaaggagtcccccaggaaaggagctgccccagcgccccctgggaagacagggcctgcagttgccaaggcccaggcggggaagcgggaggaggactcgcagagcagcagcgaggaatcggacagtgaggaggaggcgcctgctcaggcgaagccttcagggaaggccccccaggtcagagccgcctcggcccctgccaaggagtcccccaggaaaggggctgccccagcacctcctaggaaaacagggcctgcagccgcccaggtccaggtggggaagcaggaggaggactcaagaagcagcagcgaggagtcagacagtgacagagaggcactggcagccatgaatgcagctcaggtgaagcccttggggaaaagcccccaggtgaaacctgcctctaccatgggcatggggcccttggggaaaggcgccggcccagtgccacccgggaaggtggggcctgcaaccccctcagcccaggtggggaagtgggaggaggactcagagagcagtagtgaggagtcatcagacagcagtgatggagaggtgcccacagctgtggccccggctcaggaaaagtccttggggaacatcctccaggccaaacccacctccagtcctgccaaggggccccctcagaaggcagggcctgtagccgtccaggtcaaggctgaaaagcccatggacaactcggagagcagcgaggagtcatcggacagtgcggacagtgaggaggcaccagcagccatgactgcagctcaggcaaaaccagctctgaaaattcctcagaccaaggcctgcccaaagaaaaccaataccactgcatctgccaaggtcgcccctgtgcgagtgggcacccaagccccccggaaagcaggaactgcgacttctccagcaggctcatccccagctgtggctgggggcacccagagaccagcagaggattcttcaagcagtgaggaatcagatagtgaggaagagaagacaggtcttgcagtaaccgtgggacaggcaaagtctgtggggaaaggcctccaggtgaaagcagcctcagtgcctgtcaaggggtccttggggcaagggactgctccagtactccctgggaagacggggcctacagtcacccaggtgaaagctgaaaagcaggaagactctgagagcagtgaggaggaatcagacagtgaggaagcagctgcatctccagcacaggtgaaaacctcagtaaagaaaacccaggccaaagccaacccagctgccgccagagcaccttcagcaaaagggacaatttcagcccctggaaaagttgtcactgcagctgctcaagccaagcagaggtctccatccaaggtgaagccaccagtgagaaacccccagaacagtaccgtcttggcgaggggcccagcatctgtgccatctgtggggaaggccgtggctacagcagctcaggcccagacagggccagaggaggactcagggagcagtgaggaggagtcagacagtgaggaggaggcggagacgctggctcaggtgaagccttcagggaagacccaccagatcagagctgccttggctcctgccaaggagtcccccaggaaaggggctgccccaacacctcctgggaagacagggccttcggctgcccaggcagggaagcaggatgactcagggagcagcagcgaggaatcagacagtgatggggaggcaccggcagctgtgacctctgcccaggaccaggagtcttcttgaatcccatgagctctgcccaggaccctctctcaagcacctgtggcataccttcatgtgctccactgcacccagagcttaagccacagtcctgctcaggctacacctccaagggtgggaccaggcccaccttatcttcctgtactccagaggcccaagtcagccatgctggtgtggtccaagcttctgtgtgaaccctggcccttccatcagacagcattaccctttgtcctcctctagccccaagctcccagaagcttctgccaggcacctcagagcaccagctcccctgtcccagggcctaaccacagatcctggagttctgcaacctccagaccagagcggtctcatgaaccacctccccttgaatatcacataccacattgttatcaattcatcagtaaggtcagatgctgtttgcacacctccagcaatagggtgctcactgcctctcactttccaatggcacagattacaaaagtaaagaacaaccacca

SEQ ID NO: 23345 - protein, 610 aa, Artificial Sequence
  derived and/or modified sequence
MSGQSLTDRITAAQHSVTGSAVSKTVCKATTHEIMGPKKKHLDYLIQCTNEMNVNIPQLADSLFERTTNSSWVVVFKSLITTHHLMVYGNERFIQYLASRNTLFNLSNFLDKSGLQGYDMSTFIRRYSRYLNEKAVSYRQVAFDFTKVKRGADGVMRTMNTEKLLKTVPIIQNQMDALLDFNVNSNELTNGVINAAFMLLFKDAIRLFAAYNEGIINLLEKYFDMKKNQCKEGLDIYKKFLTRMTRISEFLKVAEQVGIDRGDIPDLSQAPSSLLDALEQHLASLEGKKIKDSTAASRATTLSNAVSSLASTGLSLTKVDEREKQAALEEEQARLKALKEQRLKELAKKPHTSLTTAASPVSTSAGGIMTAPAIDIFSTPSSSNSTSKLPNDLLDLQQPTFHPSVHPMSTASQVASTWGGFTPSPVAQPHPSAGLNVDFESVFGNKSTNVIVDSGGFDELGGLLKPTVASQNQNLPVAKLPPSKLVSDDLDSSLANLVGNLGIGNGTTKNDVNWSQPGEKKLTGGSNWQPKVAPTTAWNAATMNGMHFPQYAPPVMAYPATTPTGMIGYGIPPQMGSVPVMTQPTLIYSQPVMRPPNPFGPVSGAQIQFM

SEQ ID NO: 23346 - DNA, 1833 bp, Artificial Sequence
  derived and/or modified sequence
atgtccggccagagtcttacagaccgcataactgcagcccaacacagcgtaacaggtagtgctgtgtcaaaaacagtatgcaaggcaaccacacacgagatcatgggacctaaaaaaaaacacctagattacttgatccagtgcactaatgaaatgaatgtgaatatccctcagttagccgacagcctgttcgagcgaacgaccaactcttcttgggtggtggtattcaagtcccttattaccacccaccatcttatggtctacggtaatgagcgatttatacagtacttggctagcaggaacaccctttttaaccttagcaactttttggacaagtccgggttgcagggctacgacatgagtacattcatcaggcggtatagtagatatctcaacgaaaaagctgtgtcgtaccgccaggtcgccttcgatttcactaaggtgaaacgaggggctgatggcgtaatgagaacaatgaataccgaaaaactccttaagaccgtgccaatcatccagaatcagatggatgctctactggactttaatgtgaactctaatgagttaaccaatggagtaattaacgctgccttcatgctgctctttaaggatgctattagactgtttgcggcctataatgagggaatcatcaatctgctcgagaagtacttcgacatgaagaaaaatcaatgcaaagagggcctcgacatatacaagaaattcctcacgcgaatgacgagaatttctgagttcttgaaagtcgccgaacaagtgggtatcgaccgcggcgatatacctgatctctcccaggccccttccagcctgcttgacgcactggaacagcacctcgcctctctggaggggaaaaagatcaaggactctaccgcagcttcccgggctacaaccctgtcgaacgcagtgagttctctggcctcaactgggctgagcttgacaaaagtggatgaacgcgagaaacaggccgcactggaggaggagcaagctaggcttaaagccttaaaggagcagaggctcaaagagctggccaaaaaacctcacacgtctctgaccaccgccgcctcccctgtttcgacctccgccggaggaatcatgaccgctcccgctatcgatatcttttccactccgtcctccagcaatagtacttccaaactgcccaatgatctgctggacctgcagcaacctacattccacccaagcgtccaccccatgtccactgcctctcaggtagcatcaacctggggagggttcacgccttcaccggtggctcagccccatccatcggctggcctgaatgtagactttgagtctgtattcggcaacaaatctacaaacgtgatcgtggatagtggcgggttcgacgagctcggggggctgctgaagcccaccgtggccagtcaaaaccagaacttaccagtggccaaattgcctcccagcaagctggtgtctgatgacttagattccagcctggctaacttggttggaaatcttgggattgggaatggcaccactaaaaatgatgtaaactggagtcagcctggagaaaagaagctgacaggcggcagcaattggcagcccaaggtcgcccctacaactgcttggaacgcagccaccatgaatgggatgcactttccacaatacgcccctcccgtaatggcctacccagcgacaaccccgaccggcatgatcggctatgggatcccccctcagatgggcagcgtgcccgtcatgacccagcctactctgatttattctcaacccgtgatgaggcctcctaacccatttggccccgtgtcaggcgctcaaatacagtttatgtag

SEQ ID NO: 23347 - DNA, 1833 bp, Artificial Sequence
  derived and/or modified sequence
atgagcggccagagcctgacagaccgcatcacagctgcccagcacagcgtgacaggcagcgctgtgtccaagacagtgtgcaaggccaccacccatgagatcatgggccccaagaagaagcacctggactacctgatccagtgcaccaatgagatgaatgtgaacatcccccagctggccgacagcctgtttgagaggaccaccaacagctcctgggtggtggtgttcaagagcctcatcaccacccaccacctgatggtgtatggaaatgaacgcttcatccagtacctggccagcaggaacaccctcttcaacctgagcaacttcctggacaagagcggcctgcagggctatgacatgagcaccttcatccgccgctacagccgctacctgaatgagaaggctgtgtcctaccggcaggtggcctttgacttcaccaaggtgaagagaggagcagatggagtgatgaggaccatgaacacagagaagctgctgaagacagtgcccatcatccagaaccagatggatgccctgctggacttcaacgtgaacagcaatgagctgaccaacggggtcatcaatgctgccttcatgctgctcttcaaggatgccatccggctgtttgctgcctacaatgaaggcatcatcaacctgctggagaagtactttgacatgaagaagaaccagtgcaaggagggcctggacatctacaagaagttcctgaccaggatgacccgcatcagcgagttcctgaaggtggccgagcaggtgggcatcgacagaggagacatcccagacctgagccaggcccccagcagcctgctggatgccctggagcagcacctggccagcctggagggcaagaagatcaaggacagcacagctgccagccgggccaccaccctgagcaatgctgtgagcagcctggccagcacaggcctgagcctgaccaaggtggatgagcgggagaagcaggccgccctggaggaggagcaggcccggctgaaggccctgaaggagcagaggctgaaggagctggccaagaagccccacaccagcctgaccacagctgccagccctgtgtccaccagcgctgggggcatcatgacagccccagccatcgacatcttcagcacccccagcagcagcaacagcaccagcaagctgcccaatgacctgctggacctgcagcagcccaccttccaccccagcgtgcaccccatgagcacagccagccaggtggccagcacctggggcggcttcacccccagccctgtggcccagccccaccccagcgctggcctgaatgtggactttgaatctgtgtttggaaacaagagcaccaacgtgattgtggacagcggcggctttgatgagctgggcggcctgctgaagcccaccgtggccagccagaaccagaacctgcctgtggccaagctgccccccagcaagctggtgtctgatgacctggacagcagcctggccaacctggtgggcaacctgggcattggaaatggcaccaccaagaatgatgtgaactggagccagcctggagagaagaagctgactggaggcagcaactggcagcccaaggtggcccccaccacagcctggaatgctgccaccatgaatggcatgcacttcccccagtatgcccctcctgtgatggcctacccagccaccacccccaccggcatgattggctacggcatccccccccagatgggctctgtgcctgtgatgacccagcccaccctcatctacagccagcctgtgatgaggcctcccaacccctttggacctgtgtctggggcccagatccagttcatgtag

SEQ ID NO: 23348 - DNA, 1833 bp, Artificial Sequence
  derived and/or modified sequence
atgagcggccagagcctgaccgaccggatcaccgccgcccagcacagtgtgacaggctcagcggtctcgaaaacggtctgcaaggccacaacccacgagatcatgggccctaagaaaaagcatcttgactacttgattcagtgtaccaatgaaatgaatgttaatataccacagctcgcagattcactgttcgagcgaactacgaatagctcatgggtagtggtcttcaaatcgcttatcaccactcaccaccttatggtctacggcaacgaaaggttcattcagtacctcgccagcaggaatacgcttttcaacctaagcaactttttggataagagcggactgcagggctatgatatgtctacctttatacgtcggtactctaggtacctgaacgagaaggcggtgagttacaggcaggtggcctttgatttcacaaaagtaaaacggggagcagacggcgtgatgcgaacgatgaatacagagaaattgctcaaaaccgtgcccatcatccagaaccagatggacgcattactcgacttcaacgtaaattcaaatgaattgacaaatggggtaatcaatgctgcctttatgctgttattcaaggatgcaatccgtttatttgccgcctacaacgagggcattattaacctcctggaaaaatatttcgatatgaagaagaatcaatgtaaagaaggtttagatatctacaagaagttcttgactcggatgacaaggatctctgaattcttgaaggtagcagaacaagtaggtatcgaccgaggcgacataccagatctgtcacaggctccctctagcttacttgacgcactagagcagcacctcgcctctctagaaggaaagaaaatcaaggattccacggccgcatctagagccaccacgttgtctaatgccgtgtcaagcctcgcatccactgggctgtccctgaccaaagtagacgaaagggaaaaacaggcagcacttgaagaggagcaggcacggcttaaagctctgaaggaacagcgcctgaaagagctcgcaaagaaacctcacacttctctgaccacagctgccagtcctgtttctacgagtgccgggggcataatgaccgcccctgcgatcgacatcttctctacaccttcctcttctaatagcacctccaagctgcctaacgatttgcttgatctccagcagcccacatttcacccgtcagtccaccccatgtcaacagcaagccaggtggcctctacttgggggggttttaccccctctcccgtagcgcagcctcatccatcagctggcttgaatgtcgactttgagagcgtattcggtaacaaaagtacgaatgtgatagttgattctggcggattcgacgaactgggtggcttactgaaaccaacggtggccagtcagaaccagaatctccctgtcgctaaactccccccttccaaactagtgagcgatgacctcgacagcagtctggccaacctggtagggaacctggggatagggaacggaaccactaaaaatgacgtgaactggtctcaacccggcgaaaaaaagcttaccggtggaagcaactggcagccaaaagtcgcccccaccactgcctggaacgccgcgaccatgaatggcatgcactttcctcagtacgccccccccgtcatggcatacccagccacaacacccaccggcatgatcggttacggaatccctccccagatggggtcagtgccagtcatgacacagccaacactcatctatagccagcccgtgatgcgacctcctaacccattcggtccagtcagcggagcacagatccagttcatgtag

SEQ ID NO: 23349 - DNA, 3474 bp, Artificial Sequence
  derived and/or modified sequence
ctcttaccctgcccggctccagctgacccgggaaggggtgggctgaactgaggcgggggcaagggagtgcccgacatcttgtccgactccgcgggtgacacgagccggttctctctggactggtggcagcgcgcggccccgaaccgcgccccaggccggcaggcggggaaggagccggtgggggtagggggtgcggtggggggtggggaccctccggctcttgggggtcccagtccccgccggctgctgagcgggtggggtggtggaggagctgcagagatgtccggccagagcctgacggaccgaatcactgccgcccagcacagtgtcaccggctctgccgtatccaagacagtatgcaaggccacgacccacgagatcatggggcccaagaaaaagcacctggactacttaattcagtgcacaaatgagatgaatgtgaacatcccacagttggcagacagtttatttgaaagaactactaatagtagttgggtggtggtcttcaaatctctcattacaactcatcatttgatggtgtatggaaatgagcgttttattcagtatttggcttcaagaaacacgttgtttaacttaagcaattttttggataaaagtggattgcaaggatatgacatgtctacatttattaggcggtatagtagatatttaaatgagaaagcagtttcatacagacaagttgcatttgatttcacaaaagtgaagagaggggctgatggagttatgagaacaatgaacacagaaaaactcctaaaaactgtaccaattattcagaatcagatggatgcacttcttgattttaatgttaatagcaatgaacttacaaatggggtaataaatgctgccttcatgctcctgttcaaagatgccattagactgtttgcagcatacaatgaaggaattattaatttgttggaaaaatattttgatatgaaaaagaaccaatgcaaagaaggtcttgacatctataagaagttcctaactaggatgacaagaatctcagagttcctcaaagttgcagagcaagttggaattgacagaggtgatataccagacctttcacaggcccctagcagtcttcttgatgctttggaacaacatttagcttccttggaaggaaagaaaatcaaagattctacagctgcaagcagggcaactacactttccaatgcagtgtcttccctggcaagcactggtctatctctgaccaaagtggatgaaagggaaaagcaggcagcattagaggaagaacaggcacgtttgaaagctttaaaggaacagcgcctaaaagaacttgcaaagaaacctcatacctctttaacaactgcagcctctcctgtatccacctcagcaggagggataatgactgcaccagccattgacatattttctacccctagttcttctaacagcacatcaaagctgcccaatgatctgcttgatttgcagcagccaacttttcacccatctgtacatcctatgtcaactgcttctcaggtagcaagtacatggggaggattcactccttctccagttgcacagccacacccttcagctggccttaatgttgactttgaatctgtgtttggaaataaatctacaaatgttattgtagattctgggggctttgatgaactaggtggacttctcaaaccaacagtggcctctcagaaccagaaccttcctgttgccaaactcccacctagcaagttagtatctgatgacttggattcatctttagccaaccttgtgggcaatcttggcatcggaaatggaaccactaagaatgatgtaaattggagtcaaccaggtgaaaagaagttaactgggggatctaactggcaaccaaaggttgcaccaacaaccgcttggaatgctgcaacaatgaatggcatgcattttccacaatacgcaccccctgtaatggcctatcctgctactacaccaacaggcatgataggatatggaattcctccacaaatgggaagtgttcctgtaatgacgcaaccaaccttaatatacagccagcctgtcatgagacctccaaacccctttggccctgtatcaggagcacagatacagtttatgtaacttgatggaagaaaatggaattactccaaaaagacaagtgctcaagcagcaaaatccttacttccagcaaaatccaaactgctgtctcttaaatctcttaaactctcttcttccattagaatgctacaagtaactcagtgaaggcccatgaaggaaattgggactagtttataggagaacgtatcaatacagtttataaagccaagaattgctatgatttaagactaagatctgtctttttggtgactaacccttcaattctttcaactcctgttaatacccataatcagtaacctatcaagaaaagcccttatttggaaagtgtgaaatttgtatttggaaaagctgcctggagagaagaactgtgtcctttactgtatttcaacaggactcttttgggggatcaaaattaaaattcctaattatgcattatctttcttttctccagtcctcacaaatacagaaacaataactgaaattaacttttctttttttaaaaaaaattatattcagtttgcagtagacattccttaagtatttgtatttatttatgattatcaattttacataacattaatattgtatcagacctccttatgaaaatgagtatggatgtgcacagtatgtttgatttttatccacaagaatgaatctgattcagaatgcttttctcagctgacatacagagcactaaatattttaaggcaagtccataggtctgaatctcttaagaattctcggcctctgtgggatttagggaagcattataaatgcattaatccttatagtcaattctgtgcctaggattttgccagggaacagttcactgactaggaaaagcactacattttaaattcagcattagtgcattgggaaggatctttactgctttgtgcttggcatgtcattattttccatttgacattagggcctttccaaaatgaatgtgaggaattgctttcacttcaagactttccttcttttcactaaaactctagaaggtgttacaagggggagggaaggggggcaaagtccttgaacattttctttggctcgtgccatgttatgatcatataccttttaaataaggggaaatagtatctttaaagttaatgtctagccaagagtttagtaaacgaagaattaaactgcactgttgatcggtgctttgtgtaaatacatctttaacatttgggtggagaggggccttaagaaggacagttcattgtaggaaagcaattctgtacatgagtttaagcattcttgttgcattgtctctgcagattctatttttgtttacaatattaaaatgtatgttagcaaaatgggtggattttcaaataaaatgcagcttccacaaaa

SEQ ID NO: 23350 - DNA, 1833 bp, Artificial Sequence
  derived and/or modified sequence
atgtcaggacagtccctgacagacagaataaccgcagcccaacatagtgtaactgggagcgcggtaagcaagacagtgtgcaaggccactacacatgaaatcatgggcccaaaaaaaaaacacttggattacctgattcagtgtacaaatgagatgaacgttaacatcccacagctcgcagattccctcttcgagcgcactaccaatagttcatgggtggtggtattcaaaagcctgatcacaacacaccatcttatggtgtacggtaacgaaaggtttatccaatacttggcctccagaaacaccctgtttaatctgtccaacttcctcgacaaatccggactgcaaggatatgatatgagcacctttatccggaggtacagccgctatttgaatgagaaggctgtgtcataccgccaggtggcctttgacttcacaaaggtcaagcgaggtgccgacggagtgatgcggacaatgaatacggaaaagcttctgaagacagttcccataatccaaaaccagatggatgccctgttagactttaacgtgaacagtaacgaattgactaacggtgttatcaatgcggcttttatgctgctgttcaaggatgccattcgactgttcgccgcatataatgagggaatcattaacttgttggagaagtacttcgacatgaagaagaatcagtgcaaggaggggctcgatatttataagaaattcttaactcgaatgacgcgcatcagtgaatttctgaaggtggccgaacaagtgggcatcgacaggggtgacattcccgatctgtctcaggctcccagctccctcctggatgccctcgaacaacacctggccagcctggaaggaaaaaagattaaggattccactgccgcaagccgagccaccacccttagtaatgccgtctcgtcactggcatccaccggcctttctttgaccaaagtggatgagcgggaaaagcaggccgcattggaagaggaacaggcccgtcttaaagccctgaaggaacagaggctgaaagaactcgccaagaagccacatacttcattaactaccgccgcaagcccggtgtctacatctgccggaggaatcatgacagcacctgccatcgacatattcagcaccccctcctcctctaactccacctccaagctgccaaacgacctcttggacttgcagcagcctacctttcacccctccgtccacccgatgtcaactgcatctcaggttgccagcacttggggcggatttaccccctcccccgtggctcagccacacccctctgccggactgaatgtagacttcgagtctgtgttcggcaacaaatcaacaaatgtgatcgtggacagcgggggtttcgacgaactcgggggactactcaagccgacggtggcttcgcagaaccagaatcttcccgttgctaagctgcctccctcaaagttggtgagtgacgacctggattcaagtctggccaacctggttgggaatctggggataggtaatggcactaccaaaaacgatgttaactggagccagcccggagagaaaaagctgaccggtggttcaaattggcagcccaaagtggctcctaccacagcgtggaatgccgcaaccatgaacgggatgcacttccctcaatacgcacctcccgtaatggcctacccagccacgaccccgactggaatgattggttacgggattcccccacagatggggtccgtgcctgtgatgacgcagcctaccttaatttactctcaaccggtgatgcgcccaccaaatccattcgggcctgtttccggagcccaaattcagttcatgtag

SEQ ID NO: 23351 - DNA, 1833 bp, Artificial Sequence
  derived and/or modified sequence
atgagcggccagagcctgaccgacagaatcaccgccgcccagcacagcgtgaccggcagcgccgtgagcaagaccgtgtgcaaggccaccacccacgagatcatgggccccaagaagaagcacctggactacctgatccagtgcaccaacgagatgaacgtgaacatcccccagctggccgacagcctgttcgagagaaccaccaacagcagctgggtggtggtgttcaagagcctgatcaccacccaccacctgatggtgtacggcaacgagagattcatccagtacctggccagcagaaacaccctgttcaacctgagcaacttcctggacaagagcggcctgcagggctacgacatgagcaccttcatcagaagatacagcagatacctgaacgagaaggccgtgagctacagacaggtggccttcgacttcaccaaggtgaagagaggcgccgacggcgtgatgagaaccatgaacaccgagaagctgctgaagaccgtgcccatcatccagaaccagatggacgccctgctggacttcaacgtgaacagcaacgagctgaccaacggcgtgatcaacgccgccttcatgctgctgttcaaggacgccatcagactgttcgccgcctacaacgagggcatcatcaacctgctggagaagtacttcgacatgaagaagaaccagtgcaaggagggcctggacatctacaagaagttcctgaccagaatgaccagaatcagcgagttcctgaaggtggccgagcaggtgggcatcgacagaggcgacatccccgacctgagccaggcccccagcagcctgctggacgccctggagcagcacctggccagcctggagggcaagaagatcaaggacagcaccgccgccagcagagccaccaccctgagcaacgccgtgagcagcctggccagcaccggcctgagcctgaccaaggtggacgagagagagaagcaggccgccctggaggaggagcaggccagactgaaggccctgaaggagcagagactgaaggagctggccaagaagccccacaccagcctgaccaccgccgccagccccgtgagcaccagcgccggcggcatcatgaccgcccccgccatcgacatcttcagcacccccagcagcagcaacagcaccagcaagctgcccaacgacctgctggacctgcagcagcccaccttccaccccagcgtgcaccccatgagcaccgccagccaggtggccagcacctggggcggcttcacccccagccccgtggcccagccccaccccagcgccggcctgaacgtggacttcgagagcgtgttcggcaacaagagcaccaacgtgatcgtggacagcggcggcttcgacgagctgggcggcctgctgaagcccaccgtggccagccagaaccagaacctgcccgtggccaagctgccccccagcaagctggtgagcgacgacctggacagcagcctggccaacctggtgggcaacctgggcatcggcaacggcaccaccaagaacgacgtgaactggagccagcccggcgagaagaagctgaccggcggcagcaactggcagcccaaggtggcccccaccaccgcctggaacgccgccaccatgaacggcatgcacttcccccagtacgccccccccgtgatggcctaccccgccaccacccccaccggcatgatcggctacggcatccccccccagatgggcagcgtgcccgtgatgacccagcccaccctgatctacagccagcccgtgatgagaccccccaaccccttcggccccgtgagcggcgcccagatccagttcatgtag

SEQ ID NO: 23352 - protein, 159 aa, Artificial Sequence
  derived and/or modified sequence
MSSPQRRKAMPWALSLLLMGFQLLVTYAWCSEEEMGGNNKIVQDPMFLATVEFALNTFNVQSKEEHAYRLLRVLSSWREDSMDRKWRGKMVFSMNLQLRQTVCRKFEDDIDNCPFQESLELNNVRQGISFPQVHSCGCCMGCGVGTGAADKAIPRDKGK

SEQ ID NO: 23353 - DNA, 480 bp, Artificial Sequence
  derived and/or modified sequence
atgtcctctccccaaagacggaaagctatgccttgggctctgagccttttgctcatggggttccagctcttggtgacctatgcttggtgttccgaggaggagatgggtggcaacaacaagatcgtgcaggatccgatgtttctagccacagtggaatttgccttaaacactttcaatgtccagagtaaagaggagcacgcttatcggctgctgcgggtgctttccagctggcgggaagatagcatggaccgaaagtggcgcggaaaaatggtcttcagcatgaatctgcagctgcggcaaaccgtctgccgcaaattcgaagatgatatagataattgccccttccaagagagcttggagctcaataatgtgcggcaggggattagctttccacaagtccatagctgtggatgttgcatgggctgtggggtgggcacgggtgcagcagacaaagccatccctcgcgataagggtaagtag

SEQ ID NO: 23354 - DNA, 480 bp, Artificial Sequence
  derived and/or modified sequence
atgtcttccccacagcgccgaaaagctatgccatgggccctttccctcttgcttatgggatttcaacttcttgtcacctatgcgtggtgttctgaggaagaaatggggggcaacaataagatagtccaggatcccatgttcctggccaccgtggagttcgccctgaatacctttaatgtgcaatcaaaagaagagcacgcttatcgactccttcgagttctgtcatcatggagagaggattcaatggatcgcaaatggcggggaaagatggtattctctatgaacctgcagctacggcagacggtgtgtagaaaatttgaggatgatatcgacaattgccctttccaagagagcctcgaacttaataatgtgcggcaaggaataagcttccctcaggtgcacagttgcggatgctgcatgggctgcggcgtcgggacaggtgcggcggataaggcaatacctcgagacaaaggaaaatag

SEQ ID NO: 23355 - DNA, 480 bp, Artificial Sequence
  derived and/or modified sequence
atgtccagtcctcagagacgtaaagccatgccctgggccctgtctctcctgctaatgggatttcagctgttggtcacttatgcctggtgctccgaggaggaaatgggcggaaacaacaaaatcgtgcaagatccaatgtttttggctaccgtagaattcgcgttaaacaccttcaacgtccagtctaaggaagaacatgcttaccggctgttgcgcgtgctgagcagctggcgtgaagacagcatggacaggaaatggagaggaaagatggtgttctcaatgaatctgcaactgcgtcagacggtgtgcaggaagttcgaggacgacattgataactgcccctttcaggaatcgctcgaactgaacaacgtcagacaaggaatctcattcccccaagtgcacagttgcggatgctgcatgggttgtggggtgggaacaggtgccgcagataaagctataccccgcgacaaaggaaaatag

SEQ ID NO: 23356 - DNA, 480 bp, Artificial Sequence
  derived and/or modified sequence
atgagcagcccccagagaagaaaggccatgccctgggccctgagcctgctgctgatgggcttccagctgctggtgacctacgcctggtgcagcgaggaggagatgggcggcaacaacaagatcgtgcaggaccccatgttcctggccaccgtggagttcgccctgaacaccttcaacgtgcagagcaaggaggagcacgcctacagactgctgagagtgctgagcagctggagagaggacagcatggacagaaagtggagaggcaagatggtgttcagcatgaacctgcagctgagacagaccgtgtgcagaaagttcgaggacgacatcgacaactgccccttccaggagagcctggagctgaacaacgtgagacagggcatcagcttcccccaggtgcacagctgcggctgctgcatgggctgcggcgtgggcaccggcgccgccgacaaggccatccccagagacaagggcaagtag

SEQ ID NO: 23357 - DNA, 480 bp, Artificial Sequence
  derived and/or modified sequence
atgagttccccccagcgacgcaaggccatgccatgggccctttctcttctgctaatgggttttcagcttctcgtgacttacgcctggtgctccgaagaagaaatgggcggtaataataagatagtgcaggaccccatgttcctggccaccgttgagttcgccctaaacaccttcaatgttcaatccaaagaagagcacgcttatcgccttcttcgcgtactgagctcatggagggaggactccatggaccggaaatggcgcggtaaaatggtgttcagtatgaacctacagttgcgacaaaccgtgtgcagaaagttcgaggatgacattgacaattgccccttccaggagagcctggaactgaacaatgtacgccagggcatcagtttcccccaggtacattcctgtggctgctgtatgggctgcggcgtgggtacaggtgcagcagacaaggccatcccccgtgacaaagggaaatag

SEQ ID NO: 23358 - DNA, 480 bp, Artificial Sequence
  derived and/or modified sequence
atgagcagcccccagaggaggaaggccatgccctgggccctgagcctgctgctgatgggcttccagctgctggtgacctacgcctggtgcagcgaggaggagatgggcggcaacaacaagatcgtgcaggaccccatgttcctggccaccgtggagtttgccctgaacaccttcaacgtgcagagcaaggaggagcacgcctaccgcctgctgcgggtgctgagctcctggagagaagattccatggacaggaagtggaggggcaagatggtgttctccatgaacctgcagctgcggcagacagtgtgcaggaagtttgaagatgacatcgacaactgccccttccaggagagcctggagctgaacaacgtgcggcagggcatctccttcccccaggtgcacagctgtggctgctgcatgggctgcggcgtgggcaccggggctgctgacaaggccatcccccgggacaagggcaagtag

SEQ ID NO: 23359 - DNA, 1592 bp, Artificial Sequence
  derived and/or modified sequence
ggagcctgcatcatgtcgagtccgcagaggaggaaggctatgccctgggcactgtcactgcttctcatgggcttccagctcctggtgacttatgcctggtgttctgaagaggaaatgggtggtaataataaaatagtccaggatcctatgttcctcgccacagtggagtttgccttgaacactttcaacgtgcagagcaaggaggagcatgcctacaggctgttgcgcgtcctgagttcatggagggaggatagcatggacagaaagtggcgaggtaagatggtgttctccatgaatctgcaactgcgccaaaccgtatgtaggaaatttgaagatgacattgacaactgcccttttcaagaaagcctggagctgaacaacgtaagacagggcatcagctttcctcaggtccacagctgtggatgctgcatggggtgtggtgtgggcacaggagcagctgacaaagccattccgagggacaaagggaagtgagcccacagcaggctgtaccaggctgccctgcttgtgccttagtgggaagcccagtgaggcattaagcccaggggttcactttcaggcccctggccaatctgagtttcctgattctgccctctgacaccattgcagctgcctgcacctgggccacatggccttcagaaccttctctctggtcttcctccccacttcttccctgccttctagagaaagagcctggagacaatggtgacaatgtctgtgggtacttttctcagggtttccctaccctgccctagacccaaaagtggtggaggctgagaagaagccccactgccctcgctcctaggccctgctgagctgcagcacctgctctaggggacgagctccaagcaaagcctggctctgggaaaacttcccattcttagtcaacccccttattgtaagattaacaaataggtaactaattgcctaagtctgggaactgcttccactgggacaaaacattctcctgctgctcttggatgcagggatcacaccaggacagcctggggttcccctgaggggcacgggctggaggaggaggcatggcacaagtgaccctggctaaggagggagggagcctcaaatcacgttgtagttcaggattggcctcaggctcaggctagacctgaaggccagagccacgtggcacaattgctggccccaggaatgggcaaggtggagatggaacctgtgttgagggcagatgccacaagattcccgaacctccccaaaccccgccctactgtctcttcctgtttgttccctcggaccttcagctgcttcttcactgttgaaaccatgccctggaagacatattttgaactcctgaacaagacctgctcagaggggctctcctgagtggaagccactcacatgcctggccacatgctgccccctcccccgtggacaccagctgttcccaggagttgacatatcagtggctgagcagctccgtgcatatttgttctcttattttgcaagtgtctgaggttttatgacttggcattttagaaaatcctcactgtccaggttcctcaagtagaataggtcattaaacatcagcatttgcagaa

SEQ ID NO: 23360 - DNA, 480 bp, Artificial Sequence
  derived and/or modified sequence
atgagcagcccccagcggcggaaggccatgccctgggccctgagcctgcttctcatgggattccagctcctagtcacttacgcatggtgctcagaggaagaaatgggggggaataacaagatcgtgcaggacccaatgttcttagccacagtggagttcgccctgaataccttcaatgtacagtcgaaggaggagcacgcgtacagattattgcgcgtcctatccagctggagggaggatagcatggaccgcaagtggcgtgggaaaatggtgttctccatgaacttgcagctcagacagaccgtgtgtaggaagtttgaggacgatatcgacaactgtccgttccaggagagcttagagcttaacaatgttcgacaaggaatatctttcccccaagtacactcttgtggttgctgcatggggtgtggggtgggcacaggagcagccgacaaggctatccctcgggataagggcaagtag

SEQ ID NO: 23361 - RNA, 480 nt, Artificial Sequence
  derived and/or modified sequence
augucuuccccacagcgccgaaaagcuaugccaugggcccuuucccucuugcuuaugggauuucaacuucuugucaccuaugcgugguguucugaggaagaaauggggggcaacaauaagauaguccaggaucccauguuccuggccaccguggaguucgcccugaauaccuuuaaugugcaaucaaaagaagagcacgcuuaucgacuccuucgaguucugucaucauggagagaggauucaauggaucgcaaauggcggggaaagaugguauucucuaugaaccugcagcuacggcagacgguguguagaaaauuugaggaugauaucgacaauugcccuuuccaagagagccucgaacuuaauaaugugcggcaaggaauaagcuucccucaggugcacaguugcggaugcugcaugggcugcggcgucgggacaggugcggcggauaaggcaauaccucgagacaaaggaaaauag

SEQ ID NO: 23362 - RNA, 480 nt, Artificial Sequence
  derived and/or modified sequence
auguccaguccucagagacguaaagccaugcccugggcccugucucuccugcuaaugggauuucagcuguuggucacuuaugccuggugcuccgaggaggaaaugggcggaaacaacaaaaucgugcaagauccaauguuuuuggcuaccguagaauucgcguuaaacaccuucaacguccagucuaaggaagaacaugcuuaccggcuguugcgcgugcugagcagcuggcgugaagacagcauggacaggaaauggagaggaaagaugguguucucaaugaaucugcaacugcgucagacggugugcaggaaguucgaggacgacauugauaacugccccuuucaggaaucgcucgaacugaacaacgucagacaaggaaucucauucccccaagugcacaguugcggaugcugcauggguuguggggugggaacaggugccgcagauaaagcuauaccccgcgacaaaggaaaauag

SEQ ID NO: 23363 - protein, 1474 aa, Artificial Sequence
  derived and/or modified sequence
MARLAAVLWNLCVTAVLVTSATQGLSRAGLPFGLMRRELACEGYPIELRCPGSDVIMVENANYGRTDDKICDADPFQMENVQCYLPDAFKIMSQRCNNRTQCVVVAGSDAFPDPCPGTYKYLEVQYDCVPYKVEQKVFVCPGTLQKVLEPTSTHESEHQSGAWCKDPLQAGDRIYVMPWIPYRTDTLTEYASWEDYVAARHTTTYRLPNRVDGTGFVVYDGAVFYNKERTRNIVKYDLRTRIKSGETVINTANYHDTSPYRWGGKTDIDLAVDENGLWVIYATEGNNGRLVVSQLNPYTLRFEGTWETGYDKRSASNAFMVCGVLYVLRSVYVDDDSEAAGNRVDYAFNTNANREEPVSLTFPNPYQFISSVDYNPRDNQLYVWNNYFVVRYSLEFGPPDPSAGPATSPPLSTTTTARPTPLTSTASPAATTPLRRAPLTTHPVGAINQLGPDLPPATAPVPSTRRPPAPNLHVSPELFCEPREVRRVQWPATQQGMLVERPCPKGTRGIASFQCLPALGLWNPRGPDLSNCTSPWVNQVAQKIKSGENAANIASELARHTRGSIYAGDVSSSVKLMEQLLDILDAQLQALRPIERESAGKNYNKMHKRERTCKDYIKAVVETVDNLLRPEALESWKDMNATEQVHTATMLLDVLEEGAFLLADNVREPARFLAAKENVVLEVTVLNTEGQVQELVFPQEEYPRKNSIQLSAKTIKQNSRNGVVKVVFILYNNLGLFLSTENATVKLAGEAGPGGPGGASLVVNSQVIAASINKESSRVFLMDPVIFTVAHLEDKNHFNANCSFWNYSERSMLGYWSTQGCRLVESNKTHTTCACSHLTNFAVLMAHREIYQGRINELLLSVITWVGIVISLVCLAICISTFCFLRGLQTDRNTIHKNLCINLFLAELLFLVGIDKTQYEIACPIFAGLLHYFFLAAFSWLCLEGVHLYLLLVEVFESEYSRTKYYYLGGYCFPALVVGIAAAIDYRSYGTEKACWLRVDNYFIWSFIGPVSFVIVVNLVFLMVTLHKMIRSSSVLKPDSSRLDNIKSWALGAIALLFLLGLTWAFGLLFINKESVVMAYLFTTFNAFQGVFIFVFHCALQKKVHKEYSKCLRHSYCCIRSPPGGTHGSLKTSAMRSNTRYYTGTQSRIRRMWNDTVRKQTESSFMAGDINSTPTLNRGTMGNHLLTNPVLQPRGGTSPYNTLIAESVGFNPSSPPVFNSPGSYREPKHPLGGREACGMDTLPLNGNFNNSYSLRSGDFPPGDGGPEPPRGRNLADAAAFEKMIISELVHNNLRGSSSAAKGPPPPEPPVPPVPGGGGEEEAGGPGGADRAEIELLYKALEEPLLLPRAQSVLYQSDLDESESCTAEDGATSRPLSSPPGRDSLYASGANLRDSPSYPDSSPEGPSEALPPPPPAPPGPPEIYYTSRPPALVARNPLQGYYQVRRPSHEGYLAAPGLEGPGPDGDGQMQLVTSL

SEQ ID NO: 23364 - DNA, 4425 bp, Artificial Sequence
  derived and/or modified sequence
atggccagactggccgccgtgctgtggaacctgtgcgtgaccgccgtgctggtgaccagcgccacccagggcctgagcagagccggcctgcccttcggcctgatgagaagagagctggcctgcgagggctaccccatcgagctgagatgccccggcagcgacgtgatcatggtggagaacgccaactacggcagaaccgacgacaagatctgcgacgccgaccccttccagatggagaacgtgcagtgctacctgcccgacgccttcaagatcatgagccagagatgcaacaacagaacccagtgcgtggtggtggccggcagcgacgccttccccgacccctgccccggcacctacaagtacctggaggtgcagtacgactgcgtgccctacaaggtggagcagaaggtgttcgtgtgccccggcaccctgcagaaggtgctggagcccaccagcacccacgagagcgagcaccagagcggcgcctggtgcaaggaccccctgcaggccggcgacagaatctacgtgatgccctggatcccctacagaaccgacaccctgaccgagtacgccagctgggaggactacgtggccgccagacacaccaccacctacagactgcccaacagagtggacggcaccggcttcgtggtgtacgacggcgccgtgttctacaacaaggagagaaccagaaacatcgtgaagtacgacctgagaaccagaatcaagagcggcgagaccgtgatcaacaccgccaactaccacgacaccagcccctacagatggggcggcaagaccgacatcgacctggccgtggacgagaacggcctgtgggtgatctacgccaccgagggcaacaacggcagactggtggtgagccagctgaacccctacaccctgagattcgagggcacctgggagaccggctacgacaagagaagcgccagcaacgccttcatggtgtgcggcgtgctgtacgtgctgagaagcgtgtacgtggacgacgacagcgaggccgccggcaacagagtggactacgccttcaacaccaacgccaacagagaggagcccgtgagcctgaccttccccaacccctaccagttcatcagcagcgtggactacaaccccagagacaaccagctgtacgtgtggaacaactacttcgtggtgagatacagcctggagttcggcccccccgaccccagcgccggccccgccaccagcccccccctgagcaccaccaccaccgccagacccacccccctgaccagcaccgccagccccgccgccaccacccccctgagaagagcccccctgaccacccaccccgtgggcgccatcaaccagctgggccccgacctgccccccgccaccgcccccgtgcccagcaccagaagaccccccgcccccaacctgcacgtgagccccgagctgttctgcgagcccagagaggtgagaagagtgcagtggcccgccacccagcagggcatgctggtggagagaccctgccccaagggcaccagaggcatcgccagcttccagtgcctgcccgccctgggcctgtggaaccccagaggccccgacctgagcaactgcaccagcccctgggtgaaccaggtggcccagaagatcaagagcggcgagaacgccgccaacatcgccagcgagctggccagacacaccagaggcagcatctacgccggcgacgtgagcagcagcgtgaagctgatggagcagctgctggacatcctggacgcccagctgcaggccctgagacccatcgagagagagagcgccggcaagaactacaacaagatgcacaagagagagagaacctgcaaggactacatcaaggccgtggtggagaccgtggacaacctgctgagacccgaggccctggagagctggaaggacatgaacgccaccgagcaggtgcacaccgccaccatgctgctggacgtgctggaggagggcgccttcctgctggccgacaacgtgagagagcccgccagattcctggccgccaaggagaacgtggtgctggaggtgaccgtgctgaacaccgagggccaggtgcaggagctggtgttcccccaggaggagtaccccagaaagaacagcatccagctgagcgccaagaccatcaagcagaacagcagaaacggcgtggtgaaggtggtgttcatcctgtacaacaacctgggcctgttcctgagcaccgagaacgccaccgtgaagctggccggcgaggccggccccggcggccccggcggcgccagcctggtggtgaacagccaggtgatcgccgccagcatcaacaaggagagcagcagagtgttcctgatggaccccgtgatcttcaccgtggcccacctggaggacaagaaccacttcaacgccaactgcagcttctggaactacagcgagagaagcatgctgggctactggagcacccagggctgcagactggtggagagcaacaagacccacaccacctgcgcctgcagccacctgaccaacttcgccgtgctgatggcccacagagagatctaccagggcagaatcaacgagctgctgctgagcgtgatcacctgggtgggcatcgtgatcagcctggtgtgcctggccatctgcatcagcaccttctgcttcctgagaggcctgcagaccgacagaaacaccatccacaagaacctgtgcatcaacctgttcctggccgagctgctgttcctggtgggcatcgacaagacccagtacgagatcgcctgccccatcttcgccggcctgctgcactacttcttcctggccgccttcagctggctgtgcctggagggcgtgcacctgtacctgctgctggtggaggtgttcgagagcgagtacagcagaaccaagtactactacctgggcggctactgcttccccgccctggtggtgggcatcgccgccgccatcgactacagaagctacggcaccgagaaggcctgctggctgagagtggacaactacttcatctggagcttcatcggccccgtgagcttcgtgatcgtggtgaacctggtgttcctgatggtgaccctgcacaagatgatcagaagcagcagcgtgctgaagcccgacagcagcagactggacaacatcaagagctgggccctgggcgccatcgccctgctgttcctgctgggcctgacctgggccttcggcctgctgttcatcaacaaggagagcgtggtgatggcctacctgttcaccaccttcaacgccttccagggcgtgttcatcttcgtgttccactgcgccctgcagaagaaggtgcacaaggagtacagcaagtgcctgagacacagctactgctgcatcagaagcccccccggcggcacccacggcagcctgaagaccagcgccatgagaagcaacaccagatactacaccggcacccagagcagaatcagaagaatgtggaacgacaccgtgagaaagcagaccgagagcagcttcatggccggcgacatcaacagcacccccaccctgaacagaggcaccatgggcaaccacctgctgaccaaccccgtgctgcagcccagaggcggcaccagcccctacaacaccctgatcgccgagagcgtgggcttcaaccccagcagcccccccgtgttcaacagccccggcagctacagagagcccaagcaccccctgggcggcagagaggcctgcggcatggacaccctgcccctgaacggcaacttcaacaacagctacagcctgagaagcggcgacttcccccccggcgacggcggccccgagccccccagaggcagaaacctggccgacgccgccgccttcgagaagatgatcatcagcgagctggtgcacaacaacctgagaggcagcagcagcgccgccaagggcccccccccccccgagccccccgtgccccccgtgcccggcggcggcggcgaggaggaggccggcggccccggcggcgccgacagagccgagatcgagctgctgtacaaggccctggaggagcccctgctgctgcccagagcccagagcgtgctgtaccagagcgacctggacgagagcgagagctgcaccgccgaggacggcgccaccagcagacccctgagcagcccccccggcagagacagcctgtacgccagcggcgccaacctgagagacagccccagctaccccgacagcagccccgagggccccagcgaggccctgcccccccccccccccgccccccccggcccccccgagatctactacaccagcagaccccccgccctggtggccagaaaccccctgcagggctactaccaggtgagaagacccagccacgagggctacctggccgcccccggcctggagggccccggccccgacggcgacggccagatgcagctggtgaccagcctgtag

SEQ ID NO: 23365 - DNA, 4425 bp, Artificial Sequence
  derived and/or modified sequence
atggctagactcgcagcagtattatggaacctgtgcgtaaccgctgtcttagtcacaagcgcgacacagggactgtccagggccggacttccttttggcttgatgcggagagagcttgcttgcgagggctaccccatcgagctccggtgtcctggatccgacgtgatcatggttgagaatgcgaactatggtaggaccgatgacaagatctgtgacgcagacccatttcaaatggaaaatgtccagtgctacctgcctgatgcctttaagattatgtcacagcgctgcaacaaccgaacccagtgtgtcgtcgttgccggcagtgacgcctttccagacccttgccctggtacctacaagtatctggaggtgcagtacgactgcgtgccttacaaggtcgagcagaaagtgtttgtttgtcctgggacgcttcaaaaggtgctcgaacccacctctacccacgaatcagagcatcagtctggtgcctggtgtaaagacccccttcaggcaggggatcgtatatatgtgatgccctggatcccgtaccggacggacacattgaccgaatacgctagttgggaagactacgtcgctgcgagacacacaacaacatatagactccctaacagagttgacggcacaggttttgtggtttacgacggcgcggttttctataacaaagagcggacgagaaacatcgtcaagtacgatctccgcactcggatcaagagcggcgagaccgtgataaataccgctaactaccatgatacttccccctacagatggggcggaaaaacagacatcgatctcgcagtagacgagaacggcctatgggtgatctacgccacagaaggaaataacggcaggctggtggtgagtcagctgaatccctatactttgaggtttgaaggcacatgggaaaccggctacgacaaaaggtcagctagtaatgctttcatggtgtgtggcgttttgtatgttcttcggtccgtgtacgtggacgatgactctgaggcagcaggaaatcgggttgattatgcattcaataccaacgccaatcgggaggaacccgtcagtctgacgtttcccaatccataccagtttatttcatccgtggattataatccccgagacaaccagctgtacgtatggaataactactttgtggtcaggtactctttggaatttggtccccccgacccttctgccggcccagcaacatcccccccactgtccacaacaaccaccgctcgaccgacccctttgactagcaccgcttcccccgcagccactacccccctccggcgcgcacctctgaccacgcaccccgtgggtgccattaaccaactgggtccggatcttccgcccgccacagcgcccgtgccctctacaagaagacctccagctcccaatcttcatgtgagcccagaactgttttgtgagcctcgcgaggttcggcgtgtacagtggccagccacccagcaagggatgctggtcgaacgcccctgtccaaaaggtacccgaggtatcgcatcttttcagtgtctcccagcactaggcctgtggaacccccggggtcctgatctgagcaattgcacttcgccgtgggtcaaccaggtggcacaaaagattaaatccggtgaaaatgcggccaatatcgcatcagaattggccaggcatacaagaggttctatttacgcgggcgatgtcagcagttcagtcaaactgatggagcagttgctagatatcttagatgcccagctgcaagctctgcggccgatcgaaagggagtcagcagggaagaactacaacaagatgcacaaaagagagcggacatgcaaggattacattaaagcggtcgtggaaacagtagataacctgctacggcctgaagcgttggaaagctggaaagatatgaacgctaccgagcaggttcacactgctacaatgctgctggacgtactcgaagaaggagcttttctgctcgccgataacgtcagggaacccgccagatttctcgcagctaaggagaacgtggtgctcgaagtcactgtactgaatacggagggacaggtccaggagttggtgtttcctcaggaggagtaccccaggaagaactccatccaactgagcgcgaaaacaataaaacagaatagtcgtaatggcgtcgtgaaagtggtgtttatcctatataataatctcggcctgtttctgagtactgagaatgccacagtgaagcttgctggggaagccggccccgggggcccgggaggggcatcactggttgtgaacagccaggtgatcgcagcatccataaacaaggaatcctctcgagtgttcctgatggaccccgtaatatttactgttgcacacctcgaggacaaaaaccactttaatgctaattgctctttctggaattactcggagcgatccatgctgggctattggtcaacacagggctgtcgactggtggaatctaacaaaactcacacaacttgtgcttgttcgcatttgactaacttcgctgtgctgatggcccacagggaaatctaccagggcaggattaacgaactgctgctttctgtaattacgtgggtgggcatcgtcatcagtctcgtttgcctcgccatatgcatctctaccttctgcttccttcgaggcttgcagactgaccgcaatacgatacacaagaatctatgtattaacctttttttggcagaactgctgttcctggtcggaattgataagacccagtatgagatcgcatgcccaatcttcgcgggactacttcattatttttttctcgcagcctttagctggctctgtcttgaaggagtacacctttacttgctgctcgtggaggtctttgagtcggagtattcaaggactaagtactattacctaggcggctattgcttccctgccctcgttgtaggaatcgcggcagccatcgactaccgatcttacggcactgaaaaggcctgttggctaagggtggacaattactttatatggtctttcatcgggccggtgagctttgtgatcgtcgtgaacctggtctttctgatggtcacattacataaaatgatccggtcaagcagtgtactgaagcccgactctagccgcctggacaatatcaagtcgtgggccctgggagcgatagcccttttgttcctcctgggcctcacttgggcttttggcctgcttttcattaacaaagagtccgtggtaatggcttacctcttcactactttcaacgcctttcaaggcgtgtttattttcgtctttcactgtgccctgcagaaaaaagtacacaaggaatattccaagtgcctccggcatagttactgttgtatccggagtcctccaggaggcacgcacgggagcctgaaaacgtctgccatgcgcagtaataccaggtactacacggggacgcagtcccgcattagacgcatgtggaatgataccgtgaggaagcaaactgaatcaagctttatggcgggggatatcaattccaccccaaccctgaaccgtggcacaatgggcaaccacttgctgactaatcccgttctacaacctaggggcggaacatccccctataataccttgattgctgagtcagtcgggttcaatccctcctcccctcctgtgtttaactcaccaggatcttaccgggagcccaagcatcctctgggcgggcgagaggcatgtgggatggacacactgcctttgaacggaaactttaacaatagttacagcttgcgatccggggactttccacccggcgatggtggtccggagcctccccgtggcagaaacctcgctgacgctgcggccttcgagaagatgatcatatcagaattggtccataataacctccgggggtctagcagtgcggctaagggtcctcccccacctgaacccccggtgccacccgtacccggcgggggtggcgaggaggaggcgggcggacccggcggcgcggacagagccgagatagaactactgtataaggccttggaggagcctctgttgcttccacgggcccaatctgtactctatcaaagtgacctggatgagtcagagagctgcaccgcagaggacggagcaacctctagacccttaagcagtcctcctggccgcgatagcctgtatgcctctggcgcaaacctgcgcgatagcccatcataccctgactctagtcccgaaggaccgagcgaggctctgcccccccctccccccgctccaccaggcccacccgagatttactacacatccagaccccctgccctcgtggctcgaaatcccctgcagggatattatcaggtgcgacggccatctcacgaaggctacttagccgcccccggcctggagggtcctggccccgacggagacggtcagatgcagctcgttaccagcctatag

SEQ ID NO: 23366 - DNA, 7834 bp, Artificial Sequence
  derived and/or modified sequence
ggtcggcggcggtgctgggccaggggaaggaagggacacggaggccgccctcgtcccgccacctcctacccgcttccccccagccccggctccgggagatgtgccgggcggggggcccgggttcgccgagccgcaggagagacacgctgggccgaccccagagaggcgctggacaggctggtggtccaggccgtggtgcctgccaggtgatgtggggcaaagccccccgcacaggccactgagagctccggacacgcacccggctgccaccatggcccgcctagccgcagtgctctggaatctgtgtgtcaccgccgtcctggtcacctcggccacccaaggcctgagccgggccgggctcccgttcgggctgatgcgccgggagctggcgtgtgaaggctaccccatcgagctgcggtgccccggcagcgacgtcatcatggtggagaatgccaactacgggcgcacggacgacaagatttgcgatgctgaccctttccagatggagaatgtgcagtgctacctgccggacgccttcaagatcatgtcacagaggtgtaacaaccgcacccagtgcgtggtggtcgccggctcggatgcctttcctgacccctgtcctgggacctacaagtacctggaggtgcagtacgactgtgtcccctacaaagtggagcagaaagtcttcgtgtgcccagggaccctgcagaaggtgctggagcccacctcgacacacgagtcagagcaccagtctggcgcatggtgcaaggacccgctgcaggcgggtgaccgcatctacgtgatgccctggatcccctaccgcacggacacactgactgagtatgcctcgtgggaggactacgtggccgcccgccacaccaccacctaccgcctgcccaaccgcgtggatggcacaggctttgtggtctacgatggtgccgtcttctacaacaaggagcgcacgcgcaacatcgtcaagtatgacctacggacgcgcatcaagagcggggagacggtcatcaataccgccaactaccatgacacctcgccctaccgctggggcggaaagaccgacattgacctggcggtggacgagaacgggctgtgggtcatctacgccactgagggcaacaacgggcggctggtggtgagccagctgaacccctacacactgcgctttgagggcacgtgggagacgggttacgacaagcgctcggcatccaacgccttcatggtgtgtggggtcctgtacgtcctgcgttccgtgtacgtggatgatgacagcgaggcggctggcaaccgcgtggactatgccttcaacaccaatgccaaccgcgaggagcctgtcagcctcaccttccccaacccctaccagttcatctcctccgttgactacaaccctcgcgacaaccagctgtacgtctggaacaactatttcgtggtgcgctacagcctggagttcgggccgcccgaccccagtgctggcccagccacttccccacccctcagcacgaccaccacagccaggcccacgcccctcaccagcacagcctcgcccgcagccaccaccccgctccgccgggcacccctcaccacgcacccagtgggtgccatcaaccagctgggacctgatctgcctccagccacagccccagtccccagcacccggcggcccccagccccgaatctacacgtgtcccctgagctcttctgcgagccccgagaggtacggcgggtccagtggccggccacccagcagggcatgctggtggagaggccctgccccaaggggactcgaggaattgcctccttccagtgtctaccagccttggggctctggaacccccggggccctgacctcagcaactgcacctccccctgggtcaaccaggtggcccagaagatcaagagtggggagaacgcggccaacatcgccagcgagctggcccgacacacccggggctccatctacgcgggggacgtctcctcctctgtgaagctgatggagcagctgctggacatcctggatgcccagctgcaggccctgcggcccatcgagcgcgagtcagccggcaagaactacaacaagatgcacaagcgagagagaacttgtaaggattatatcaaggccgtggtggagacagtggacaatctgctccggccagaagctctggagtcctggaaggacatgaatgccacggagcaggtgcacacggccaccatgctcctcgacgtcctggaggagggcgccttcctgctggccgacaatgtcagggagcctgcccgcttcctggctgccaaggagaacgtggtcctggaggtcacagtcctgaacacagagggccaggtgcaggagctggtgttcccccaggaggagtacccgagaaagaactccatccagctgtctgccaaaaccatcaagcagaacagccgcaatggggtggtcaaagttgtcttcatcctctacaacaacctgggcctcttcctgtccacggagaatgccacagtgaagctggccggcgaagcaggcccgggtggccctgggggcgcctctctagtggtgaactcacaggtcatcgcagcatccatcaacaaggagtccagccgcgtcttcctcatggaccctgtcatcttcaccgtggcccacctggaggacaagaaccacttcaatgctaactgctccttctggaactactcggagcgttccatgctgggctactggtcgacccaaggctgccgcctggtggagtccaacaagacccataccacgtgtgcctgcagccacctcaccaacttcgctgtgctcatggctcaccgtgagatctaccagggccgcatcaacgagctgctgctgtcggtcatcacctgggtgggcattgtgatctccctggtctgcttggccatctgcatctccaccttctgcttcctgcgggggctgcagaccgaccgcaacaccatccacaagaacctgtgcatcaacctcttcctggctgagctgctcttcctggtcgggatcgacaagactcagtatgagattgcctgccccatcttcgccggcctgctgcactatttcttcctggctgccttctcctggctgtgcctggagggcgtgcacctctacctgctactagtggaggtgtttgagagcgagtattcccgcaccaagtactactacctgggtggctactgcttcccggccctggtggtgggcatcgcggctgccattgactaccgcagctacggcaccgagaaggcctgctggctccgagtggacaattacttcatctggagtttcatcgggccagtctccttcgttatcgtggtcaacctggtgttcctcatggtgaccctgcacaagatgatccgaagctcatctgtgctcaagcccgactccagccgcctggacaacattaaatcctgggcgctgggggccatcgcgctgctgttcctgctgggcctcacctgggctttcggcctcctcttcatcaacaaggagtcggtggtcatggcctatctcttcaccaccttcaacgccttccagggggtcttcatcttcgtctttcactgcgccttacagaagaaggtgcacaaggagtacagcaagtgcctgcgtcactcctactgctgcatccgctccccacccgggggcactcacggatccctcaagacctcagccatgcgaagcaacacccgctactacacagggacccagagccgaattcggaggatgtggaatgacactgtgaggaaacagacggagtcctccttcatggcgggtgacatcaacagcacccccaccctgaaccgaggtaccatggggaaccacctgctgaccaaccccgtgctgcagccccgtgggggcaccagtccctacaacaccctcatcgccgagtcagtgggcttcaatccctcctcgccccctgtcttcaactccccagggagctaccgggaacccaagcaccccttgggaggccgggaagcctgtggcatggacaccctgcccctgaacggcaacttcaataacagttactccttgcgaagtggggatttccctcccggggatgggggccctgagccgccccgaggccggaacctagccgatgcggcggcctttgagaagatgatcatctcagagctggtgcacaacaacctgcgggggagcagcagcgcggccaagggccctccaccgcctgagccccctgtgccacctgtgccagggggcgggggcgaggaagaggcgggcgggcccgggggtgctgaccgggccgagattgaacttctctataaggccctggaggagcctctgctgctgccccgggcccagtcggtgctgtaccagagcgatctggacgagtcggagagctgcacggccgaggacggcgccaccagccggcccctctcctcccctcctggccgggactccctctatgccagcggggccaacctgcgggactcaccctcctacccggacagcagccctgaggggcccagtgaggccctgcccccaccccctcccgcaccccccggcccccccgaaatctactacacctcgcgcccgccagccctggtggcccggaatcccctgcagggctactaccaggtgcggcgtcctagccacgagggctacctggcagccccaggccttgaggggccagggcccgatggggacgggcagatgcagctggtcaccagtctctgagggcacctcatggaccaggggctggtggcccaggccagggagggaaccctgggcagggctctggtgggagagggagacagatggaggcagtggctggtgggccactctctccaggtgcccctcagccatgggccctacagtcccctcaggggactctaacctgggggcctgaggtgccagggttcacagacagggtttcccaccagccacacgcaccagctctatttgggggaagtgtagtgaggaggagcccagaggaccccaggggagtgaggagggagaacttggaagggtgcagcccacttccagactctcccctctcccacccttctaccctgtgaagggaaatgagggctttagtttcctgggcagggaggggcagcttctgaggttgccaaaggcccccactggatggaacctgttagctgctcctctccgcagccagaaatgctgccggctgcacccagagggagcagtgaggcaggacagatggacaggttcctcctgcgctgtaattccctgctccctggagactgggaaaaggccgcagggcagggggactgggcggtggtggctggtggtttaaaggttgaactttctctgaagctcctttccccttgctcttggtccctgccccgcaagcaaacctgccccctctgcctcccagtgcacccaatgaccccctcccttggggcgactcctgatgaagcacaactccccgcagggcccccagcccacaggggtggccatatttgggcagttcccagtcctgtgggctcggctatctggggagcagattttgggtctggatctccctggggagtgggtcctgggcttggatctttccctagggggccctcttactccttcctctctcctcctccttccccattgctgtaaatatttcaacgaaatggaaaagaaaaaaaaaagacaaaaaaaaaaaaaaagaaaagaaaaaaaatctcatcacttgaagccaccgggagcctgcggcccgggccagcccgggctttctccggagcagagcagcgctgctggcctggcagccaggacttctccgtgtacgtgcatccccagtccccgccggggcgggcgggccgccagagcagctttttacaatccagagacagaaaacaaaatctagatgcaacagcgaaacaaagaacccatttccttcctggcaccctcctttcctgctccgcctgcccggcatcatcagcccttctggggcgtgtacctctcactgcctgccccaggaccagaggcctgtctcccccttccctccccaccggcccgggggagacctcttcacacccaaagatgctttgtcaagatggctgcgctgtccctttgagttcctgcttcttgtatattgctctggggactctcgccggggaagatggggctgatttcccacctagagaggttgatggcagaaggaaaatggggaggcactggggttgtggagggcatgggtatggctgaggagggtgctgggaacggcaaggcggtctgggggatggggaggggcaaaggtgagagatcaccttccctatcctccaccttcccgcagggaagacgaagccaggtgccagggctggggtcgggacacccatgttctgggcggcttgaccccaaatcccagaccccggaagctccaggctcgggatgtgtcctgagcacctgtcccggccccctcctctccagcctgtcaggccagcctccccagcccccttccctcaactctaggggcagcatagccccaggccaccctagcccagcccctgcattgccgtttccccagaggtggcccctccacctctgctctgacctctccccatctctctgcccctccttttctcacaagtgccatgagttttcaaacatcttcgggtctcagcctgctgctgccatgaactttgttgggttaagggggaggggctctaggaaggaactggggggaaggggacaggtaggtggctggagggaccctttttgctgctagaaagcccctcccttctcccggggagctggggctggcttgtccccatcaattaggggagaaggggtcagaccaaagatggtggtttgtcccgtgtaagggaacaggtgtggggaagaggtggggttgggttccaactctggctttttctggtagaaaggcctaacccattacaccagaagaccatgggtgaagtctagatggggaggagaagtgaggccagggacagtcttgccagacgactctgaggagggcaagggacagttccatggcccttcccggactgcactaggctgggagctctgttgtgtggaggggtggtcagaggtctgtgaagagcgggcaggaggcatgagcaggcgaggagctggcctgtcccgggaagcagcccagcctgtggctgcccccgacaccaggaggagggccaggagagttccagggggctgaggcacacagagaggccaacttcctccctgcccagccttccttgtatctctccagactcggacaatcaaagggagagagggtgtatcgggtcctgttccagccggcatcgccgggtggcttccaggcctcagagctgtgtggcagggccccctgctggggctggacatcactgcagtccagtgcaaagccgcccccagagcccaggtgtccccccaacctaaccagacctggtgccttgacgcccccaccccagctgggacggtacagagaagggtcttggtttcctctcctactcccttccttaggctcctgaactcgtttgctcctaaatcttgttaattctttttctctggattttggtttcttttggctttcccttgccttcccctttctctgtctccaacactctttccccatgtctttctggctgtctctatgttcctcttctcttatcctcaactttctgtccattcgggcctcctccccacctcccacgccccagcccctccctccttggtctccttttcgatatgccaaaccaattttgggtcgagtgcatttaacgagaacaaaacaaaaggctcataacaacaagaacgtttcagaaaaaaacaaaaagttttaaaaaaattgttgagtcaaaaagtcaaacaataaagaaattaagatttcttggaatgacaaga

SEQ ID NO: 23367 - DNA, 4425 bp, Artificial Sequence
  derived and/or modified sequence
atggcccggctggccgctgtgctgtggaacctgtgtgtgacagctgtgctggtgaccagcgccacccagggcctgagccgggccggcctgcccttcggcctgatgaggcgggagctggcctgtgagggctaccccatcgagctgcgctgccccggcagtgatgtgatcatggtggagaatgccaactacggccgcacagatgacaagatctgtgatgctgaccccttccagatggagaatgtgcagtgctacctgcctgatgccttcaagatcatgagccagcgctgcaacaacagaacccagtgtgtggtggtggccggcagtgatgccttcccagacccctgccccggcacctacaagtacctggaggtgcagtatgactgtgtgccctacaaggtggagcagaaggtgtttgtgtgccccggcaccctgcagaaggtgctggagcccaccagcacccatgagagcgagcaccagagcggggcctggtgcaaggaccccctgcaggccggggaccgcatctacgtgatgccctggatcccctacagaacagacaccctgacagaatatgcctcctgggaggactatgtggccgcccggcacaccaccacctaccgcctgcccaacagagtggatggcaccggctttgtggtgtatgatggagctgtgttctacaacaaggagaggaccagaaatattgtgaagtatgacctgcggacccgcatcaagagcggggagaccgtcatcaacacagccaactaccatgacaccagcccctaccgctggggcggcaagacagacatcgacctggccgtggatgaaaatggcctgtgggtgatctatgccacagagggcaacaacggccgcctggtggtgtcccagctgaacccctacaccctgcgctttgagggcacctgggagaccggctatgacaagaggtctgccagcaatgccttcatggtgtgtggggtgctgtatgtgctgcggtctgtgtatgtggatgatgattctgaggccgccggcaacagagtggactatgccttcaacaccaatgccaaccgggaggagcctgtgtccctgaccttccccaacccctaccagttcatcagctctgtggactacaacccccgggacaaccagctgtatgtgtggaacaactactttgtggtgcgctacagcctggagtttggccccccagaccccagcgctggccctgccaccagcccccccctgagcaccaccaccacagcccggcccacccccctgaccagcacagccagccctgctgccaccacccccctgcggcgggcccccctgaccacccaccctgtgggcgccatcaaccagctgggccctgacctgcccccagccacagcccctgtgcccagcacccggcggcccccagcccccaacctgcacgtgtccccagagctgttctgtgagccccgggaggtgcggcgggtgcagtggccagccacccagcagggcatgctggtggagcggccctgccccaagggcacccggggcatcgccagcttccagtgcctgcctgccctgggcctgtggaacccccggggccctgacctgagcaactgcaccagcccctgggtgaaccaggtggcccagaagatcaagagcggggagaatgctgccaacatcgccagcgagctggcccggcacacccggggcagcatctatgctggagatgtgagcagctctgtgaagctgatggagcagctgctggacatcctggatgcccagctgcaggccctgcggcccatcgagcgggagagcgctgggaagaactacaacaagatgcacaagcgggagaggacctgcaaggactacatcaaggctgtggtggagaccgtggacaacctgctgcggcctgaggccctggagagctggaaggacatgaatgccacagagcaggtgcacacagccaccatgctgctggatgtgctggaggagggcgccttcctgctggccgacaacgtgcgggagcccgcccgcttcctggccgccaaggaaaatgtggtgctggaggtgacagtgctgaacacagagggccaggtgcaggagctggtgttcccccaggaggagtaccccaggaagaacagcatccagctgagcgccaagaccatcaagcagaacagcagaaatggagtggtgaaggtggtgttcatcctgtacaacaacctgggcctcttcctgagcacagaaaatgccaccgtgaagctggccggggaggccggccctgggggccctgggggcgccagcctggtggtgaacagccaggtgattgctgccagcatcaacaaggagagcagcagggtcttcctgatggaccccgtcatcttcaccgtggcccacctggaggacaagaaccacttcaatgccaactgcagcttctggaactacagcgagaggtccatgctgggctactggagcacccagggctgccgcctggtggagagcaacaagacccacaccacctgtgcctgcagccacctgaccaactttgctgtgctgatggcccaccgggagatctaccagggccgcatcaatgagctgctgctgagcgtcatcacctgggtgggcatcgtcatcagcctggtgtgcctggccatctgcatcagcaccttctgcttcctgcggggcctgcagacagacaggaacaccatccacaagaacctgtgcatcaacctcttcctggccgagctgctcttcctggtgggcatcgacaagacccagtatgaaattgcctgccccatctttgctggcctgctgcactacttcttcctggccgccttctcctggctgtgcctggagggcgtgcacctgtacctgctgctggtggaggtgtttgagagcgagtacagcaggaccaagtactactacctgggcggctactgcttccctgccctggtggtgggcattgctgctgccatcgactaccgctcctatggaacagagaaggcctgctggctgcgggtggacaactacttcatctggagcttcatcggccctgtgtcctttgtgattgtggtgaacctggtgttcctgatggtgaccctgcacaagatgatccgcagcagctctgtgctgaagccagacagcagccggctggacaacatcaagtcctgggccctgggcgccatcgccctgctcttcctgctgggcctgacctgggccttcggcctgctcttcatcaacaaggagagcgtggtgatggcctacctgttcaccaccttcaatgccttccagggcgtcttcatctttgtgttccactgtgccctgcagaagaaggtgcacaaggagtacagcaagtgcctgcggcacagctactgctgcatccgcagccccccaggcggcacccacggcagcctgaagaccagcgccatgaggagcaacacccgctactacacaggcacccagagccgcatccggaggatgtggaatgacacagtgaggaagcagacagagagcagcttcatggccggggacatcaacagcacccccaccctgaacagaggcaccatgggcaaccacctgctgaccaaccctgtgctgcagccccggggcggcaccagcccctacaacaccctgattgctgagagcgtgggcttcaaccccagcagcccccctgtgttcaacagccctggcagctaccgggagcccaagcaccccctgggcggccgggaggcctgtggcatggacaccctgcccctgaatggaaacttcaacaacagctacagcctgcggagcggggacttccccccaggagatggcggccctgagcccccccggggcaggaacctggctgatgctgctgcctttgagaagatgatcatcagcgagctggtgcacaacaacctgcggggcagcagcagcgctgccaagggccccccacctcctgagccccctgtgccccctgtgcctgggggcggcggggaggaggaggccggcggccctggaggagctgacagagctgagattgagctgctgtacaaggccctggaggagcccctgctgctgccccgggcccagagcgtgctgtaccagagcgacctggatgaaagtgagagctgcacagcagaagatggagccaccagccggcccctgagcagccccccaggccgggacagcctgtatgccagcggggccaacctgcgggacagccccagctacccagacagcagccctgagggccccagcgaggccctgcccccacctcctccagcccctcctggccccccagagatctactacaccagccggcccccagccctggtggccaggaaccccctgcagggctactaccaggtgcggcggcccagccatgagggctacctggccgcccctggcctggagggccctggcccagatggagatggccagatgcagctggtgaccagcctgtag

SEQ ID NO: 23368 - DNA, 4425 bp, Artificial Sequence
  derived and/or modified sequence
atggcccggctggccgccgtgctgtggaacctgtgcgtgaccgccgtgcttgtcacgagcgcaacacaagggctctcacgagctggcctcccctttggcctcatgcggagagaactcgcctgcgagggctatccgattgagctgcggtgccccgggtctgatgtcatcatggtggagaacgcgaactacggacgaactgatgataaaatatgtgacgcagatccttttcagatggaaaatgtgcagtgttatctcccagacgcctttaaaatcatgagccagcgctgtaacaaccgaacacagtgtgtggtcgtggctggatctgatgcttttcccgatccttgtcctggaacatacaaatatcttgaagtgcagtatgattgcgttccttacaaggtcgaacaaaaagtctttgtatgccctggcaccctccagaaggtgctggaaccgacttctacccatgagtcggagcaccagtctggggcctggtgcaaggaccccctgcaagctggggatcgcatctatgtcatgccgtggatcccatatcgaactgataccctaacagaatacgcttcctgggaggattacgtggcagcaagacacactacaacatacaggctgccaaaccgggtcgacggaaccgggtttgtggtgtacgacggtgctgttttttacaacaaagaaagaacccgtaatatagtgaagtacgatctgcgaacccggattaagagcggtgaaactgtgataaacaccgccaattatcacgacacaagcccctaccgatggggtggtaagactgatattgatcttgccgtggatgaaaacggcctatgggtgatctatgccactgagggcaacaatggcagactggtggtctctcaactgaacccatatacccttcgcttcgagggcacatgggaaacaggttatgataagagaagtgcatcaaatgcgttcatggtgtgtggcgttttgtacgtgctgcggtccgtgtacgtggacgacgacagtgaggccgccggcaatcgggtcgactacgcattcaacaccaatgcaaatcgcgaagagcccgtgtccctgacctttcctaatccataccagttcatatcaagcgtcgactataatccaagggacaaccagctctatgtgtggaataactacttcgtggtgcgctatagtctcgagttcggccctcctgacccttctgctggaccagccaccagtccacctctgtctactaccaccacagcccggcccacccctcttactagtacggcatcccccgccgccacaacaccgctgcggcgtgcacccttgactactcacccagtgggagccattaaccagttgggcccagacttaccccccgctacggcccccgttccttccacccggcggccacctgctccaaacttgcacgtgagtccagagctattttgtgagccacgggaagtgcgtagggtgcaatggccagctacccagcagggtatgctcgtggaaagaccttgtcctaagggtacaagaggcattgcctcctttcagtgtctacctgccttaggcttgtggaatcctagaggcccagacctgtccaattgtacaagtccttgggtgaaccaagtggcccagaaaatcaaatctggcgagaatgcagcaaacatagctagtgagctcgcacgccacacccgcggatccatttacgctggcgatgtaagcagcagcgtgaagctgatggaacagctgctggatatcctggatgctcagctgcaagcactcagacccattgaaagggaatccgctggaaagaactacaataaaatgcataagcgcgagaggacatgcaaagattacattaaagccgtggtggagacggtggacaatctactgaggcccgaggctctcgagagttggaaagatatgaacgcaaccgaacaggttcacacagctactatgttactcgatgttctcgaggagggcgccttcctcttagcagataacgtgagagagcccgccaggttcttggctgcgaaagaaaacgttgtgctcgaggtgactgtcctgaatacagaaggacaagtacaagagctcgtttttcctcaagaggagtaccctaggaagaattcgattcaactgtctgcgaaaacgattaagcaaaacagtcgtaatggtgtggtgaaagtcgtttttatcctctacaacaacctggggctcttcctgagtaccgaaaatgctaccgtgaaactagcgggagaggcgggacctgggggaccagggggggcatccctggtcgttaattctcaggtgatcgcggcttcgatcaacaaggaatctagccgcgtgtttcttatggatccagtgatattcacagtcgcccacttggaagataaaaatcacttcaatgcaaactgttcgttttggaactattctgagagatctatgctcggatattggtccacacagggatgccgacttgtcgagtcaaacaagactcacacgacatgtgcttgtagccatctcactaactttgcggtgcttatggcacacagggagatttaccagggacgcatcaatgagctgcttttgagtgtgattacatgggtggggattgtgataagcctggtgtgtctggccatatgtatatcaacgttttgtttcctgcgtggcttgcagacggaccggaatactatccataagaacctctgtatcaacctatttctcgcagaactgctctttctggttggcatcgacaagacccagtatgagatcgcttgcccaatattcgccggactgctacactacttcttcctggctgccttctcctggctgtgtttagagggtgttcacttatatctgctgctggtcgaagtcttcgagagcgagtactcccgaactaagtactactaccttggaggctactgcttccctgcgcttgtggttgggatcgctgctgctattgattaccggagttacggcactgaaaaggcatgctggttgcgagtggataactattttatctggtctttcataggccctgtttcttttgtgattgtggtcaatttagtttttctgatggtgacgttgcataagatgattagatcatcctccgtgctcaaacccgattcaagcagattggacaatatcaagagctgggctctcggagcaatcgctctgttatttcttctgggtttaacatgggccttcggattgctcttcataaataaagagagcgtagtaatggcatacttatttacaacttttaatgccttccagggcgtttttatcttcgtgttccactgcgcattgcagaagaaggtgcacaaagaatattccaaatgtctgcggcactcatattgttgcatacgcagccccccgggcggtactcacggatcccttaagacatctgccatgcggtccaatacgcgctattatactggcactcagtctagaattcgaaggatgtggaatgataccgtgcggaaacaaactgagagttcctttatggctggagacatcaatagtacacctacactcaataggggaaccatgggtaatcacctcttgaccaacccagttctacagccaagaggaggtacctcgccttataacactttgatcgctgagagtgtgggtttcaaccctagtagccccccagtgtttaactctcccgggtcttaccgtgaacccaagcatccccttggaggccgggaggcatgcggcatggacaccctgccgctgaatggtaattttaacaactcctatagcctgagaagtggagattttccgcccggagatggcggccccgagcctcccagaggcaggaatttggccgatgccgctgcttttgagaagatgattataagcgaactggtgcacaacaacctgcgcgggtcttctagcgcagccaaaggtcccccacccccggaaccaccggtacctccagttcccggaggaggcggcgaggaagaagcgggaggccccggaggtgccgacagagccgaaattgaactcctgtataaggcattagaggaacctctgctgttaccaagagcacaaagcgtgctatatcaaagcgatctggacgaaagcgagagctgtaccgccgaggacggcgccacctctagaccactgagctcgcctccagggcgggattcactgtatgcctcaggggccaatcttagagattcgccctcttatccagattcttcaccggagggtcccagcgaagccttaccacccccccccccagcgccccctgggccccctgagatttactatacttcacgtcctccagccctcgtcgccagaaacccattgcaaggctactaccaggtacggagaccatcacatgaaggctacctcgcggcccccggcctggaggggcccggaccagatggcgacggacagatgcaactcgtgaccagcctttag

SEQ ID NO: 23369 - DNA, 4425 bp, Artificial Sequence
  derived and/or modified sequence
atggccaggttggctgccgtattgtggaatctgtgcgtgaccgcagtactggtgactagcgcaactcagggtttaagccgcgcaggcctgccatttggtctcatgcgtagggaattagcgtgtgaaggataccccattgagctgaggtgcccagggtcagacgttattatggtagagaatgccaactatggcaggaccgatgataaaatttgtgacgctgacccgtttcaaatggaaaatgtccagtgttatctccccgatgcctttaagattatgtctcagcgatgtaataaccggactcagtgcgtcgtggtggccggtagcgacgcatttccggatccatgtcctggcacctacaagtacctggaggtgcagtatgactgcgtgccctataaggtcgaacagaaagtgtttgtgtgtccaggcactctgcagaaagtcctggagccgactagtacccatgaaagcgagcatcaaagtggcgcttggtgtaaggatcccctccaggcgggtgaccgcatatacgtcatgccttggattccttaccgaaccgacactttgacagaatatgcctcctgggaggactacgtggccgcacgtcacacgacgacatatcgtttgccgaatcgagtggacggcacaggctttgtcgtgtacgacggagccgtgttctacaataaagagcgaacacgcaacatcgtgaagtacgacctcaggaccagaatcaaaagtggcgaaactgtcatcaacacagctaattaccacgatacctctccctacagatggggtggcaagacagatatagacctggcagtggacgagaacggcctgtgggtgatctacgcgaccgaggggaataacgggagactggtggtgtctcagcttaatccatacacacttcgattcgagggaacatgggaaacaggatacgacaagcggtcggctagcaatgcctttatggtttgtggagttttgtacgtgttgaggtcagtgtatgtcgatgacgattcggaagccgctgggaacagggtcgattacgcattcaatactaatgccaatagggaagaacccgttagcctgacgttccctaacccataccagtttatatcctcagtcgattataacccgagagacaatcagctgtacgtatggaataactattttgtggtgaggtatagtctcgaatttgggccacccgacccgtcggctggccctgccacttctccccctctgtctaccactaccaccgcaaggcctacacctctcacaagcaccgcaagccctgcggcaaccactcccctcagacgagccccactcaccacccacccagtgggggcaataaaccagctgggaccagacctcccccctgcaactgctccggtgcccagtaccagacggcctccggcaccaaacttgcatgtgtctcccgagctgttttgtgagccaagagaggtccggcgagttcagtggccagccacccaacagggcatgctggtcgaaagaccatgtcccaaaggaaccagaggcattgccagctttcaatgcctgcctgccctggggctttggaaccctcgtggcccagacctctccaattgtacaagcccctgggtaaatcaggtggctcagaagatcaagagcggggagaatgccgctaatattgccagcgagctggctcggcatactagaggctctatctacgctggtgacgtgtcatcttcggtcaagctgatggagcagcttctggacatattggacgctcaactgcaagctctgcgcccaatcgagcgagagagtgcgggtaaaaactacaataaaatgcacaagcgtgagcggacttgcaaagactatatcaaggcagtcgtggagacagtcgataatctgctgcgccctgaagccctggagtcctggaaggatatgaacgccactgagcaggtgcacacagctacgatgctcctagatgtccttgaggaaggagctttccttttggccgataatgtgcgggagcccgcacggttcctggccgctaaggagaacgtcgtcctggaagtgaccgtgctcaatacagagggacaggtgcaggagctagtgttcccccaagaggagtaccctcgaaaaaactctattcaactgtccgcgaagactattaaacagaattcaaggaacggagttgtgaaagtggtgttcattctgtacaataatctgggcctctttctctcgactgaaaacgccacagtgaagctggccggtgaggccggtcctggtgggccaggtggcgcttcccttgtggtaaatagtcaagttatcgccgcaagtatcaacaaggagtctagtagagtgtttcttatggacccagtcatctttactgtggcccaccttgaggacaaaaatcatttcaacgccaattgctcattttggaattattcagagcgaagcatgctgggctattggagcacccagggttgtagactggtggaatccaacaagactcacactacctgcgcttgttcccacctaacaaactttgcagttctcatggcacaccgtgagatataccagggtcggatcaatgagctgcttctttcagtcattacatgggtcggcattgtcatatcactcgtgtgcttggctatatgcatctctaccttctgtttcctgcgcggtctgcagacagatcgcaatacaattcataaaaacctttgtattaacttatttctggctgagctactgtttcttgttggaatcgacaagactcagtacgagattgcctgtcctatatttgctggtctattgcattactttttcttggcggctttctcctggctgtgccttgaaggtgtccacctctacctgctgttagttgaggtgttcgagtcagagtactcacggactaagtattactacttaggaggctactgcttcccagccctagttgtcgggatagctgccgctatagattatcggtcctatggcactgagaaagcctgctggctgcgcgtggacaattactttatctggtccttcattggacctgtgagtttcgtgatagtggtaaatctggtctttttgatggtgacactccacaagatgataaggtcgagctccgttttaaaaccagacagtagccgtctggataacataaagtcatgggcattgggcgctatcgcgcttctgtttctgctggggctcacatgggcatttggactgttgtttataaacaaggagtcagtcgtgatggcctacctgttcacgacattcaacgctttccaaggcgtgtttatctttgtgtttcattgtgccctccaaaagaaagttcataaggaatattccaagtgtttgagacatagttactgctgcataagaagccctcccggaggtactcacggctcacttaaaactagtgccatgagaagcaacaccaggtactacactggcacacagtcccggatcaggcgtatgtggaatgataccgtgcgcaagcaaactgagtctagcttcatggccggagatattaatagcacccccactctgaacagggggaccatgggcaaccacttgttgaccaacccggtcctacagccaagggggggaacaagcccgtataatactctcattgccgagtcagtgggtttcaaccccagctcaccccctgtttttaattcccccggaagctatagagagcccaaacacccattagggggaagggaagcttgcggcatggatacactgcccttgaacggtaatttcaacaactcttattctctgcgttctggcgactttccgccaggcgatggagggcctgagccccctagagggcgaaatctggccgacgctgccgcttttgaaaagatgattatctctgaattagtgcacaacaacctcaggggcagctcatcagctgcaaagggccctcccccaccagagcctcccgtgcccccagtgcccggtggaggtggggaagaagaagcaggcggtccaggcggtgctgatagggccgaaattgagctgctttacaaagccctcgaagagccactgctactgcctagggcccagagcgtgttataccagagtgacctggatgagagcgaaagctgtacagccgaagacggtgctaccagtaggcctttgtcatctcccccaggtcgcgattcactgtatgcctctggcgctaatctacgggactctccctcttaccccgactcctcacctgaaggcccaagtgaagctctgcctccacctccaccagccccaccgggacctccagagatctattatactagccggcctcccgctctcgtagctagaaacccgctgcaggggtattaccaagtgcgaaggccaagccacgaggggtatctggctgccccaggccttgaaggccctgggcctgacggggatgggcagatgcagcttgtaacatccctgtag

SEQ ID NO: 23370 - protein, 834 aa, Artificial Sequence
  derived and/or modified sequence
MEDGFSSYSSLYDTSSLLQFCNDDSASAASSMEVTDRIASLEQRVQMQEDDIQLLKSALADVVRRLNITEEQQAVLNRKGPTKARPLMQTLPLRTTVNNGTVLPKKPTGSLPSPSGVRKETAVPATKRLNRSVSLLNACKLNRSTPSNIKRTSSSERVSPGGRRESNGDSRGNRNRTGSTSSSSSGKKNSESKPKEPVFSAEEGYVKMFLRGRPVTMYMPKDQVDSYSLEAKVELPTKRLKLEWVYGYRGRDCRNNLYLLPTGETVYFIASVVVLYNVEEQLQRHYAGHNDDVKCLAVHPDRITIATGQVAGTSKDGKQLPPHVRIWDSVTLNTLHVIGIGFFDRAVTCIAFSKSNGGTNLCAVDDSNDHVLSVWDWQKEEKLADVKCSNEAVFAADFHPTDTNIIVTCGKSHLYFWTLEGSSLNKKQGLFEKQEKPKFVLCVTFSENGDTITGDSSGNILVWGKGTNRISYAVQGAHEGGIFALCMLRDGTLVSGGGKDRKLISWSGNYQKLRKTEIPEQFGPIRTVAEGKGDVILIGTTRNFVLQGTLSGDFTPITQGHTDELWGLAIHASKSQFLTCGHDKHATLWDAVGHRPVWDKIIEDPAQSSGFHPSGSVVAVGTLTGRWFVFDTETKDLVTVHTDGNEQLSVMRYSPDGNFLAIGSHDNCIYIYGVSDNGRKYTRVGKCSGHSSFITHLDWSVNSQFLVSNSGDYEILYWVPSACKQVVSVETTRDIEWATYTCTLGFHVFGVWPEGSDGTDINAVCRAHEKKLLSTGDDFGKVHLFSYPCSQFRAPSHIYGGHSSHVTNVDFLCEDSHLISTGGKDTSIMQWRVI

SEQ ID NO: 23371 - DNA, 2505 bp, Artificial Sequence
  derived and/or modified sequence
atggaagacggttttagctcatattcaagtctttacgataccagttccttgctgcagttctgtaacgacgatagcgcctcggcagcctccagtatggaagttactgatcgcatcgccagtcttgagcagcgcgtgcaaatgcaggaggatgacattcagctattgaagtccgccttggccgatgtcgttaggagacttaacatcactgaagagcaacaggctgttctaaaccgtaaagggcctactaaggctcggcctttgatgcagactttacccttgcgtacaacggtgaataatgggaccgtgttgcctaaaaagcccacaggttctctgccatctccatcgggtgtccgaaaggaaacagccgtgcctgctacgaagcgcctcaatcgctccgtgagcctcctgaatgcctgcaagctcaatcggagtacaccatccaatatcaaacgaacatccagctcagagagagtcagccccggcgggaggcgggaaagcaacggagacagcagaggtaatcgcaatcggaccggtagcacctcttcgagcagtagcggaaaaaagaatagcgaatccaaacctaaagagcccgtttttagcgctgaagaaggatatgtgaaaatgtttttacggggccgccctgttacaatgtatatgcctaaagatcaggtggactcctactccttagaggccaaggtggaactccctaccaagcgtctgaagctagaatgggtctacggctatcgaggtagggactgccgcaataacttatatctccttcctactggtgagaccgtctacttcattgccagcgtcgttgtgctgtataatgttgaagaacagctgcagcggcactacgccggccacaacgatgacgtgaagtgtctggccgtccaccccgacaggattaccatcgccacgggccaggtcgctggcacatcaaaagatgggaagcaattacctccccatgttcggatctgggattcagtcactttgaacacactccatgtgattggcataggattctttgaccgggcagttacatgtatcgccttttccaagtccaacggcggaacgaacctctgcgctgtcgatgactctaatgatcacgtgctgtcggtttgggattggcaaaaagaggaaaagcttgctgatgtgaaatgctcgaacgaagccgtatttgctgccgactttcacccaactgataccaacatcatcgttacctgtggcaagtctcacctgtacttctggactctggagggctcatctcttaataaaaaacagggcctgttcgaaaaacaggagaaacctaagttcgtgctctgcgtaactttcagtgaaaacggcgatactataacgggagactcttccgggaacatcttggtctggggtaagggcacaaacaggatcagttacgctgttcagggtgcccatgaggggggcattttcgctctgtgcatgttgcgcgatggcactctggtctcaggaggaggtaaggacaggaagctaatcagctggtcaggtaattaccagaagcttcggaagaccgagattcctgagcaattcgggcccattcgcaccgtggctgaaggaaaaggcgatgtcatcctgattgggactaccaggaacttcgtgctgcagggtaccctgtcaggggactttactcctatcactcagggacacacagatgagctgtggggactcgcaatccatgcttctaagtcgcagttccttacctgcggccacgataaacacgccaccttgtgggacgctgttggacataggcctgtctgggataaaatcatcgaggatcctgctcaatccagcggctttcaccccagtggcagcgttgttgctgtgggcacgttgacagggaggtggttcgttttcgacactgagaccaaagatctcgtcaccgtccatacagatggcaacgaacagcttagcgtgatgcggtactcgcccgatggcaatttccttgccatcggttcccatgataattgcatatatatctacggagtatccgacaacgggaggaagtacacacgcgtgggcaagtgctccggccactccagctttattacacatttagactggtccgttaattcccagttcctcgtgagtaacagtggcgactatgagattttatattgggtgccctccgcctgtaaacaggttgtgtctgtcgagactacccgagacatcgagtgggccacatacacctgcaccctgggtttccatgtctttggcgtatggccggagggatctgacggtacagatattaatgccgtgtgccgcgcccacgaaaaaaagctgctcagtactggggacgattttggaaaagtacacttgttttcttacccctgctctcagtttagagcaccatcccatatctatggaggccacagttctcatgtgaccaacgtcgattttctgtgcgaagattctcatctgatctcaacgggcggcaaggacaccagcatcatgcagtggcgagtcatctag

SEQ ID NO: 23372 - DNA, 2505 bp, Artificial Sequence
  derived and/or modified sequence
atggaagatggattcagctcatattcaagcttatatgacacatccagtctgcttcagttctgtaatgatgactcagctagcgcagctagtagtatggaggtcaccgaccgaatcgcctcactggagcaacgggtgcagatgcaggaggacgacattcagctgctgaagagcgctctagcagatgtggttcgacgtctgaatatcacagaagaacagcaggcagtcttaaataggaagggcccaacaaaggctcgccccttgatgcagaccctgcccttgcggacgaccgtcaataatggtaccgtcttaccaaagaaacccactggcagtttgccatctccctccggcgtgcgcaaagaaaccgctgtcccggccaccaaaagactgaatagatccgtgtctctgttgaacgcatgtaaactcaaccggagtacaccttcaaacattaagcggacttcaagtagtgagcgagtgtcaccaggggggcgtcgggaatctaatggcgacagtagggggaaccggaataggaccgggtcaactagttctagctcttctggaaagaaaaattctgagtctaagccgaaagaaccagtttttagtgccgaagaaggctatgtcaaaatgttcctgcgaggacggcctgtcactatgtatatgcccaaagatcaggtggattcctactctctagaggccaaggtcgaactgccgacgaagcgtttgaagctcgagtgggtttatggctataggggacgagactgccgaaacaatctgtacctgcttccgaccggcgagacagtgtactttatcgcctctgtggtagtgctctataatgttgaggaacaattacagaggcactatgcagggcataatgacgatgtgaagtgcctggccgttcacccagaccggataactatagctaccggtcaagtggctggaacttcaaaagatggaaaacaacttccaccacacgtgcgcatatgggattcggtgacactgaacactcttcacgtaatcgggattgggttctttgatcgggcagtcacatgcatagccttctcaaagtccaatggaggtaccaacctgtgcgcagttgacgattctaacgatcatgtcctgtccgtctgggactggcaaaaggaagagaagctcgccgacgtgaaatgttcaaatgaggctgtcttcgccgctgactttcaccctacagatactaacattatagtgacttgcgggaagagccacctctacttttggacccttgaaggtagttctttgaataaaaaacagggcctcttcgagaagcaggagaagccaaaattcgtgctgtgcgtgacattctcagagaatggcgatacaattacgggggatagcagtggtaatatactggtctggggtaaggggaccaaccggatcagctacgctgtgcaaggagcgcacgaggggggaatcttcgctctgtgtatgctgcgggacggcacgctggtctctggaggtggtaaagacagaaagttaattagctggagcggcaattatcagaagctgaggaagaccgaaatacccgagcagtttggccccattcgcactgtcgcggagggcaaaggggatgtaattctcattggcactacaagaaattttgtgcttcagggcacactatccggggattttacaccgatcacccaggggcatacagacgagctatggggactggccatccacgccagcaaaagccagttcctgacttgtgggcatgacaagcatgctactctgtgggacgctgttggccacaggcccgtgtgggacaagatcattgaagaccccgcccagagcagcggcttccacccatctgggtcagtcgtggccgtgggcacgctgacaggccgctggtttgtgttcgatacagagacaaaagacctggtgaccgtgcacaccgatggcaatgaacagcttagtgttatgaggtactcaccggatggaaatttcctggctataggatctcacgataattgcatatacatctatggcgtgtctgacaacgggaggaaatatacccgtgtggggaaatgtagtggccactcatcctttattacacatctggattggagcgttaactcccagttccttgtatcaaattccggcgattacgagatcctctattgggtgccctcagcatgcaaacaggtggtgtctgtggaaaccacacgcgatatcgaatgggccacctacacttgtactctcggctttcacgtattcggggtttggcccgagggctctgacggcaccgatatcaacgcggtgtgccgcgcacatgaaaagaagttgctcagtacaggagatgacttcggtaaggtgcatctcttttcatacccctgttctcagtttcgggccccgtcccatatctacgggggacattcttcccacgttactaacgtggacttcttatgtgaagactcacatctgatcagtacaggaggcaaagatacaagcatcatgcagtggcgcgtaatttag

SEQ ID NO: 23373 - DNA, 2505 bp, Artificial Sequence
  derived and/or modified sequence
atggaggatggcttcagcagctacagcagcctgtatgacaccagcagcctgctgcagttctgcaatgatgattctgccagcgctgccagctccatggaggtgacagaccgcatcgccagcctggagcagagggtgcagatgcaggaggatgacatccagctgctgaagagcgccctggctgatgtggtgcggcggctgaacatcacagaggagcagcaggccgtgctgaacaggaagggccccaccaaggcccggcccctgatgcagaccctgcccctgcggaccaccgtgaacaatggaacagtgctgcccaagaagcccaccggcagcctgcccagccccagcggcgtgaggaaggagacagctgtgcctgccaccaagaggctgaacagatctgtgtccctgctgaatgcctgcaagctgaacagaagcacccccagcaacatcaagaggaccagcagcagcgagcgggtgtcccctgggggcagaagagagagcaatggagacagccggggcaacagaaacagaacaggcagcaccagcagcagcagcagcggcaagaagaacagcgagagcaagcccaaggagcctgtgttttctgctgaggagggctacgtgaagatgttcctgcggggccggcctgtgaccatgtacatgcccaaggaccaggtggacagctacagcctggaggccaaggtggagctgcccaccaagaggctgaagctggagtgggtgtatggctaccggggccgggactgcaggaacaacctgtacctgctgcccaccggggagaccgtgtacttcatcgcctctgtggtggtgctgtacaacgtggaggagcagctgcagaggcactacgccggccacaatgatgatgtgaagtgcctggccgtgcacccagaccgcatcaccatcgccaccggccaggtggccggcaccagcaaggatggcaagcagctgccccctcatgtgcgcatctgggacagcgtgaccctgaacaccctgcacgtgattggcatcggcttctttgacagagctgtgacctgcatcgccttcagcaagagcaatggaggcaccaacctgtgtgctgtggatgacagcaatgaccacgtgctgtctgtgtgggactggcagaaggaggagaagctggctgatgtgaagtgcagcaatgaggccgtgtttgctgctgacttccaccccacagacaccaacatcatcgtgacctgtgggaagagccacctgtacttctggaccctggagggcagcagcctgaacaagaagcagggcctgtttgagaagcaggagaagcccaagtttgtgctgtgtgtgaccttctctgaaaatggagacaccatcactggagacagcagcggcaacatcctggtgtggggcaagggcaccaaccgcatctcctatgctgtgcagggcgcccacgagggcggcatctttgccctgtgcatgctgagagatggcaccctggtgtctgggggcggcaaggacaggaagctgatctcctggagcggcaactaccagaagctgaggaagacagagatccctgagcagtttggccccatcagaacagtggccgagggcaaaggagatgtgatcctgattggcaccaccaggaactttgtgctgcagggcaccctgagcggggacttcacccccatcacccagggccacacagatgagctgtggggcctggccatccacgccagcaagagccagttcctgacctgtggccatgacaagcacgccaccctgtgggatgctgtgggccacaggcctgtgtgggacaagatcattgaagatcctgcccagagcagcggcttccaccccagcggctctgtggtggccgtgggcaccctgaccggccgctggtttgtgtttgacacagagaccaaggacctggtgacagtgcacacagatggaaatgagcagctgtctgtgatgagatacagcccagatggcaacttcctggccatcggcagccatgacaactgcatctacatctacggcgtgtctgacaatggaaggaagtacaccagggtgggcaagtgcagcggccacagcagcttcatcacccacctggactggagcgtgaacagccagttcctggtgagcaacagcggggactatgagatcctgtactgggtgcccagcgcctgcaagcaggtggtgtctgtggagaccacccgggacatcgagtgggccacctacacctgcaccctgggcttccacgtgtttggagtgtggccagagggcagtgatggaacagacatcaatgctgtgtgccgggcccacgagaagaagctgctgagcactggagatgactttgggaaggtgcacctgttctcctacccctgcagccagttccgggcccccagccacatctatggaggccacagcagccacgtgaccaacgtggacttcctgtgtgaggacagccacctgatcagcactggaggcaaggacaccagcatcatgcagtggagggtcatctag

SEQ ID NO: 23374 - DNA, 2505 bp, Artificial Sequence
  derived and/or modified sequence
atggaggacggcttcagcagctacagcagcctgtacgacaccagctccttattacaattttgcaacgatgactccgctagcgccgcatcatctatggaagtcacagacagaatcgctagtctagagcaaagggtgcaaatgcaggaagatgatatccaacttctgaagtctgcactggctgacgttgttagacgcctgaacataacagaggagcagcaggcagtgctgaatcgtaaaggccctacaaaggctcggcccctgatgcagactctccctcttaggaccactgtcaacaacggaacggtcctgcctaaaaagcctaccgggagcctccctagcccttctggtgttcgcaaggagacagctgtgccggccactaaaagactcaacagaagcgtttccctcttgaatgcttgcaagctgaacagaagtacaccgtcaaatatcaaacgtacctccagctccgagcgagtaagcccaggcggacgccgtgaaagcaacggggactctaggggaaacagaaatagaaccggatcaacatccagctcctcttcaggaaaaaagaacagcgagagtaaaccaaaagagcccgtgttcagcgccgaggagggctatgttaagatgttcctacgcggacggccggtgaccatgtatatgcccaaagaccaggtggatagctactcactggaggctaaagtagaactgccgaccaagcgcctcaaactggaatgggtatacggctatcggggtagggactgtagaaacaacctatatctacttccaacaggggaaacagtgtattttatcgcctccgtagtagtgctatataacgtggaggagcaactgcagaggcactatgctgggcataatgacgacgtcaagtgcctggctgtccaccctgacagaattacaatcgctacaggccaggtcgccggcacgtctaaggacggaaagcaactgcctccacatgtgcggatttgggattctgtaacactcaatacgctgcacgtcatcgggattggcttctttgatagagcggtgacctgtatcgcattctcaaagagtaatggcgggacaaatttatgcgcagtcgacgattcaaatgatcatgttctctctgtctgggactggcagaaggaagagaagctcgccgatgtgaaatgttccaacgaggcggtatttgcagcagactttcacccaactgacaccaacatcatcgtcacttgtggaaagtcacatctgtatttctggacattagagggcagctccttgaataagaaacagggcttgttcgagaagcaggagaaacccaagttcgttctgtgtgtcaccttttccgagaatggcgatactattaccggcgactctagcggtaacatcctggtctgggggaaaggcactaatcgaatctcttatgccgtccagggagcgcatgagggtggcatctttgcactctgcatgctgcgggacggcactctcgtttcagggggaggtaaggacagaaaactaatctcctggtcaggtaactatcaaaagttgagaaagacggagatcccggagcagtttggaccaatccgcacggtggctgagggaaaaggcgacgtgattctcattggaaccaccagaaatttcgttctacaggggactctgtctggtgattttacaccaattacacagggtcatacagatgagctttgggggctcgccatccatgcaagcaagtcacaatttctgacttgtggccatgataaacacgctactctatgggacgcagtggggcaccgcccggtgtgggataagatcatcgaagatccagctcagagcagtggtttccaccctagtggatctgtagttgctgtggggacattgacaggacgctggttcgtgtttgacacggagaccaaagacttggtgacggttcacacggatgggaacgagcagctctccgtcatgcgatattcacctgacggaaacttcctggcgatcggctctcacgacaactgcatctatatttacggggtctctgataacggccggaaatatacacgggtcgggaagtgctcaggacattcatcctttatcacccacctcgactggagcgttaacagccagttcctcgtgtccaattccggcgactacgaaatcctctattgggtccctagcgcctgtaaacaagttgtcagtgtggagacaactcgagatatagaatgggctacctatacatgtacgctgggcttccatgtgttcggcgtttggcccgagggcagcgatggaactgatatcaatgccgtgtgtcgtgcacacgagaagaaattgctcagcactggcgatgacttcggtaaggtgcacctcttctcctatccatgctcccagtttcgcgcaccctctcacatctacggaggacactctagccacgtgacaaatgtcgattttctatgtgaagatagccacctgataagcactggcggaaaagataccagcatcatgcaatggcgagtcatctag

SEQ ID NO: 23375 - DNA, 2505 bp, Artificial Sequence
  derived and/or modified sequence
atggaggacggcttcagcagctacagcagcctgtacgacaccagctcactcctccagttttgcaatgacgacagcgcaagcgccgcctctagcatggaggtcactgacaggattgcgagcctcgagcagagagtgcagatgcaggaggatgacattcaactgttgaaatctgcgcttgccgacgtggtacgccgtctgaatattacagaagagcagcaggcagtactgaaccgaaaggggcccaccaaagcacgaccactcatgcagacccttccactccggacaaccgtgaataatggaacagtgctcccgaaaaagcccactgggtcgttgcccagtccatcaggcgtcaggaaggagacagcagtgccagccaccaagaggttgaacaggtctgtctcgctgctgaatgcttgtaaactgaatcggtctactccatccaatataaaaagaacaagcagttctgaacgtgtaagcccggggggtcggagggagagcaatggtgattcccggggcaaccgtaacagaaccggctctacgagctcaagctcatcaggcaagaaaaactccgagtccaaacccaaggaaccggtcttctcagcagaggaagggtatgtcaagatgtttttgaggggtaggccagtgactatgtacatgccaaaggaccaggtagactcgtattccctggaggctaaggtggagctgcctacgaagcgtctcaagctagagtgggtttacggatacagaggtagagactgtaggaacaacctatacctcctgcccacgggcgagactgtctatttcatcgcaagcgtggtcgtgctgtacaacgtcgaggagcagctgcagcgacattatgccggtcataatgacgacgtgaaatgcctggcggttcacccggaccgcattacgatcgcaacaggccaagtggctggcacctctaaagacggcaaacaacttcccccccacgtgaggatctgggactccgtgactctaaacacccttcatgtgatcggtatagggtttttcgaccgcgccgtgacctgtatcgcttttagcaagtctaacggtggaaccaacctgtgcgccgtcgacgactctaatgatcatgtactcagtgtttgggattggcagaaagaagagaagttagccgatgttaaatgtagcaacgaagcagtgttcgccgcagatttccatccaactgacacaaacatcatagtcacttgcggaaagagtcacctgtacttttggacattggaaggtagctctcttaataagaagcaggggctgttcgagaagcaggagaagcccaaatttgtgctttgcgtgacgttcagtgaaaacggagacacgataacaggtgactcctccggcaacatacttgtgtggggaaaggggaccaatcgcattagttacgcagtgcagggcgctcacgagggcggcatctttgctctgtgtatgttgagagacgggaccctggtatctggcggcgggaaagatcgtaaactgatcagctggtctggaaattaccagaagctgagaaagacggagattcctgaacagtttggccctatccgaacagttgcagagggtaagggcgacgtcatcttgatcggcactacacggaactttgttctgcaggggacgctgagtggggatttcaccccaattacccagggccacacagatgagctgtgggggttggccatccatgcttctaagagccaatttctcacatgcggccatgacaaacacgctacactgtgggacgctgtgggacatcgtccagtctgggacaaaatcatcgaggatcctgctcaatcatccggtttccaccctagcgggtcagtggtcgccgtgggcacacttaccggtagatggtttgttttcgacacggaaactaaggatctggtcacagtgcatactgacggaaacgagcagctgagcgttatgagatatagcccagatgggaatttcctggcgattggctcccacgataactgcatctacatatacggcgtgtctgataacgggcgcaagtacacacgggtaggaaagtgctctgggcactcttcttttattacacacctggactggagcgtcaattcccagttcctggtgtcgaactctggggactacgaaatcctctattgggtgccgtcagcttgcaagcaggttgtgtcggtagagacaacgcgcgatattgagtgggctacctacacgtgcacgctgggattccatgtttttggcgtctggcctgaaggctcagacggaactgatatcaacgcagtttgccgagcccacgagaaaaagttactgagtacgggcgacgattttggcaaagtacatctgttttcttacccgtgttctcagtttagagctccttcccatatctatggcggacactcctcacatgtgaccaacgttgattttctgtgtgaagacagccacttgatttccacgggaggaaaggataccagcatcatgcagtggcgagtaatttag

SEQ ID NO: 23376 - DNA, 2505 bp, Artificial Sequence
  derived and/or modified sequence
atggaagacggtttttcctcctatagctccttgtacgacacgagctccttactccagttttgcaacgatgatagtgctagcgccgcttcatccatggaagtcacggatcgaatagcatctctggagcagagagtgcaaatgcaggaggacgatatacagttgttaaaatccgctttagctgacgtcgtgcggcgactcaacattaccgaggaacagcaggccgttctcaacagaaaaggtcctacaaaagcccgacctttgatgcaaactcttcccctgagaaccacagtgaataacggaaccgtcctgccaaaaaagcctaccgggtcactgcctagccctagcggagtgcgtaaagagacagcagtgcctgcaaccaagaggctcaaccgatcagtgtctctccttaacgcctgcaagttgaacaggagtacaccgagcaatatcaaacgtacctcatcatcagagagggtcagccctgggggacgtcgcgaatccaatggggactccaggggaaacagaaaccggactggctccacctccagctcctcaagcgggaagaaaaatagtgagtccaaacccaaggaacctgtgttctccgccgaggaaggatacgtgaaaatgtttttgcgcggacggcctgtgaccatgtacatgccgaaggaccaagtggacagttactctctggaagctaaagtcgaattgccgactaagcgactgaagctggagtgggtgtacgggtaccggggacgggattgcaggaataacttgtaccttctgcccaccggcgagacagtgtactttatcgcatccgtggtggttctgtacaatgtggaagagcagctgcaaaggcactacgctggccacaacgacgacgtgaagtgtttggccgtacaccccgatcgcattacaatcgccacaggccaggtcgctggcacgtctaaggatgggaagcagctgcctccacacgtgagaatctgggactccgtcactctcaacaccctgcacgttatagggatcgggttttttgaccgggctgtaacttgtatcgcattctcaaaatcaaacggcggtaccaacctctgcgctgtggatgattctaatgaccacgtcctgtccgtgtgggattggcagaaggaagaaaagcttgcagatgtgaaatgctccaatgaggccgtgtttgccgctgactttcatcccacagatacaaacattatcgtgacctgcggtaagtcccacttatacttctggacactggaagggagctcgctcaataaaaaacagggactgttcgagaagcaggagaagccaaaattcgttctctgcgttaccttctcagaaaatggtgataccattacgggcgacagttccggcaacatcttagtgtggggcaagggaactaatcgaatttcctacgccgtgcagggagcacacgaagggggaatctttgcactctgcatgctgagagatggaactcttgtgagcggtggtggcaaagatcgcaagctgatcagttggagtgggaattatcaaaaactgaggaagacggaaatcccagaacagttcggcccaattaggacagtagctgaggggaagggtgacgtgatcctcatcgggaccacccgcaatttcgtccttcaaggtacgctgagcggagacttcaccccaatcacccaaggccacactgatgagctctggggcctcgcaatacacgccagtaagtcacagtttctcacctgcgggcacgacaagcacgcaaccctgtgggatgctgtcgggcaccgaccagtgtgggataagattatcgaggatccagcacagtccagcggctttcacccgagcggatcagtagtcgcagttggaacattaaccgggcgttggtttgtcttcgacactgagaccaaagacctcgtcaccgtgcacacggacggtaacgaacagttaagtgttatgagatactcccctgatggcaacttcctggccataggttctcatgataattgcatctatatctacggcgtgagcgacaatggaaggaaatacactagagtgggaaaatgctccggccacagtagttttattacacacctcgactggtctgttaattctcagtttctcgtgagtaatagtggggactacgagatcctatactgggtaccatcagcctgcaagcaagtcgttagcgtcgaaacaacacgggacatcgagtgggccacctacacttgcacactcggcttccatgtgtttggagtctggccggagggttccgacggtaccgatattaatgccgtgtgcagggcgcacgagaagaaattgctgagcaccggcgatgactttggaaaggtacacctcttctcatatccgtgctctcagttccgggctcccagccacatctatggcggacactcatcacacgtcacaaacgtggatttcctctgcgaggacagccatttaatcagcacaggcggtaaggacacctcaattatgcaatggagagtgatctag

SEQ ID NO: 23377 - DNA, 2505 bp, Artificial Sequence
  derived and/or modified sequence
atggaggacggcttttcatcatatagttccctgtatgacacgagctctctgctgcagttctgcaacgacgattcagcaagtgccgcttccagcatggaggtgacggatcgcatagcgtccctggaacagcgggtccagatgcaagaagatgacattcagctgctgaagagtgctctggcggatgttgtcagacgtctgaacatcacggaggagcagcaggcagtcctaaaccgcaaaggccctactaaggcccgacctcttatgcagacgctccccttacgtacaacagttaacaatggaacagtgttgcccaaaaaaccaaccgggagtctgcccagcccgtctggcgtgcgcaaggaaactgccgtaccagcaactaaaagacttaatcgaagtgtctccttgctcaatgcctgtaaactgaatcgtagtacacctagcaacatcaagcgcacgtcttcttccgagagggtgagtcctgggggacgtagggagtctaatggcgacagtaggggaaatcgcaatcgtactggtagtacaagctctagctcttccggcaaaaagaactctgagagcaaaccaaaggaaccagtgttttctgcagaggaaggctatgtaaagatgttcttgagaggccgacctgtgaccatgtacatgcctaaggaccaggtggacagttattccctggaggctaaggtggaattgcctaccaaaaggctcaagctagagtgggtatacgggtaccgcggtagggactgcagaaacaacctctacctgctccccacaggagaaaccgtgtattttattgcttcggtcgtcgtcctgtacaacgtcgaagagcaactgcagcgccactatgctggccacaatgacgacgtgaagtgcttggctgttcatccagaccggatcacaatcgccaccggccaggttgcaggcacatctaaggatggtaagcagctacctcctcacgtgcggatctgggactccgttactttaaatactttgcacgtaatcgggatcggtttcttcgatcgggctgtcacctgtatagccttctccaaaagtaacggaggcacaaatctttgcgccgttgatgactccaatgaccatgtgttgagtgtgtgggattggcaaaaagaggagaaactcgcagatgtgaagtgctccaacgaggccgtgttcgccgctgactttcaccctaccgacaccaatattattgtgacatgtgggaaatcacacctttatttttggactctcgagggatcttctctcaataagaagcaagggctcttcgagaaacaggagaagcccaagtttgtactctgtgttactttcagtgagaatggagacaccatcacaggcgactcaagtggcaatattctggtgtggggtaaaggaaccaatcgaatctcttatgcagttcaaggcgcacacgaaggtgggatatttgctctgtgtatgctaagggacgggacgttggtgtcgggtggcggaaaggatagaaaactcatctcctggtctggaaattaccagaaactgcgtaagaccgagattccagaacaatttggccctattcgtaccgtggcagaaggcaagggtgatgtcatattaatcggcacaacacggaacttcgtgctgcagggaaccttatctggggactttactcctattactcaggggcatacagacgagttgtggggcttagcgatccatgcttctaaatcacaattcctcacttgcggacacgataaacatgctacgctatgggatgccgttggccataggcccgtgtgggacaaaatcattgaggaccctgcccagtcctccggcttccatccttccgggtcagtcgtcgccgtcggaaccctcacaggtcgatggttcgtgttcgacaccgaaactaaggacctggtgacggtacacaccgacggcaacgaacagttatcagtcatgcgatactcccccgacggaaactttctggcaataggatcacatgacaactgcatctacatctacggagtaagcgataacggccgaaaatataccagggttggcaagtgctctggacacagctcattcatcactcacctcgactggtccgtgaattcacagttcttggtgtccaatagcggtgactacgagattctgtattgggtcccttctgcatgcaaacaggtagtctccgttgaaacgacacgggatatcgagtgggccacttacacttgcacgcttggtttccacgtgttcggggtctggccagaggggtcagacggcacagatattaacgccgtgtgcagggcccacgaaaagaaacttctgtccacaggggacgatttcggtaaggtgcacttattctcctacccttgcagccagtttcgcgctccaagtcacatttacggtggccacagcagccatgtgacaaatgtggactttttgtgcgaggactctcacctcatcagcactggcggtaaagacacgtcaatcatgcagtggcgcgtcatctag

SEQ ID NO: 23378 - DNA, 2505 bp, Artificial Sequence
  derived and/or modified sequence
atggaggacggcttcagcagctacagcagcctgtacgacaccagcagcctgctgcagttctgcaacgacgacagcgccagcgccgccagcagcatggaggtgaccgacagaatcgccagcctggagcagagagtgcagatgcaggaggacgacatccagctgctgaagagcgccctggccgacgtggtgagaagactgaacatcaccgaggagcagcaggccgtgctgaacagaaagggccccaccaaggccagacccctgatgcagaccctgcccctgagaaccaccgtgaacaacggcaccgtgctgcccaagaagcccaccggcagcctgcccagccccagcggcgtgagaaaggagaccgccgtgcccgccaccaagagactgaacagaagcgtgagcctgctgaacgcctgcaagctgaacagaagcacccccagcaacatcaagagaaccagcagcagcgagagagtgagccccggcggcagaagagagagcaacggcgacagcagaggcaacagaaacagaaccggcagcaccagcagcagcagcagcggcaagaagaacagcgagagcaagcccaaggagcccgtgttcagcgccgaggagggctacgtgaagatgttcctgagaggcagacccgtgaccatgtacatgcccaaggaccaggtggacagctacagcctggaggccaaggtggagctgcccaccaagagactgaagctggagtgggtgtacggctacagaggcagagactgcagaaacaacctgtacctgctgcccaccggcgagaccgtgtacttcatcgccagcgtggtggtgctgtacaacgtggaggagcagctgcagagacactacgccggccacaacgacgacgtgaagtgcctggccgtgcaccccgacagaatcaccatcgccaccggccaggtggccggcaccagcaaggacggcaagcagctgcccccccacgtgagaatctgggacagcgtgaccctgaacaccctgcacgtgatcggcatcggcttcttcgacagagccgtgacctgcatcgccttcagcaagagcaacggcggcaccaacctgtgcgccgtggacgacagcaacgaccacgtgctgagcgtgtgggactggcagaaggaggagaagctggccgacgtgaagtgcagcaacgaggccgtgttcgccgccgacttccaccccaccgacaccaacatcatcgtgacctgcggcaagagccacctgtacttctggaccctggagggcagcagcctgaacaagaagcagggcctgttcgagaagcaggagaagcccaagttcgtgctgtgcgtgaccttcagcgagaacggcgacaccatcaccggcgacagcagcggcaacatcctggtgtggggcaagggcaccaacagaatcagctacgccgtgcagggcgcccacgagggcggcatcttcgccctgtgcatgctgagagacggcaccctggtgagcggcggcggcaaggacagaaagctgatcagctggagcggcaactaccagaagctgagaaagaccgagatccccgagcagttcggccccatcagaaccgtggccgagggcaagggcgacgtgatcctgatcggcaccaccagaaacttcgtgctgcagggcaccctgagcggcgacttcacccccatcacccagggccacaccgacgagctgtggggcctggccatccacgccagcaagagccagttcctgacctgcggccacgacaagcacgccaccctgtgggacgccgtgggccacagacccgtgtgggacaagatcatcgaggaccccgcccagagcagcggcttccaccccagcggcagcgtggtggccgtgggcaccctgaccggcagatggttcgtgttcgacaccgagaccaaggacctggtgaccgtgcacaccgacggcaacgagcagctgagcgtgatgagatacagccccgacggcaacttcctggccatcggcagccacgacaactgcatctacatctacggcgtgagcgacaacggcagaaagtacaccagagtgggcaagtgcagcggccacagcagcttcatcacccacctggactggagcgtgaacagccagttcctggtgagcaacagcggcgactacgagatcctgtactgggtgcccagcgcctgcaagcaggtggtgagcgtggagaccaccagagacatcgagtgggccacctacacctgcaccctgggcttccacgtgttcggcgtgtggcccgagggcagcgacggcaccgacatcaacgccgtgtgcagagcccacgagaagaagctgctgagcaccggcgacgacttcggcaaggtgcacctgttcagctacccctgcagccagttcagagcccccagccacatctacggcggccacagcagccacgtgaccaacgtggacttcctgtgcgaggacagccacctgatcagcaccggcggcaaggacaccagcatcatgcagtggagagtgatctag

SEQ ID NO: 23379 - DNA, 4064 bp, Artificial Sequence
  derived and/or modified sequence
aaccggcagcagcagccgccacagcagggccggccccagcgccagcgccggtcgcggtcgggctcagctcagtgtgtggtgagcggcggcggcgcggccgggccggggagcgggcgcggcccggcggcctcagcatggaggacggcttctccagctacagcagcctgtacgacacgtcctcgctgctccagttctgcaacgatgacagcgcttctgctgcaagtagcatggaggtgacagaccgcattgcttcactggagcagagagtccagatgcaagaagacgacatccagctgctcaaatcagctctagctgatgtggttcggcggctgaacattactgaggaacagcaggccgtgcttaacaggaaaggacctaccaaagcaagaccactgatgcagaccctgcctttaagaaccacggtcaacaatggcactgtgttaccaaagaaacctactggctctctaccatccccctccggggtcaggaaagaaactgctgtgccagcaaccaaaagattaaacagatctgtgagtcttctcaatgcttgcaaactgaatagatcgacaccaagtaacatcaagaggaccagctcttctgaacgagtgtctcctgggggtcgaagggaaagcaatggggattccagaggaaaccggaatcgcacaggctccaccagcagctcttccagtggcaaaaagaacagtgaaagcaaacccaaggagcctgtattcagtgcagaagaaggctatgtaaaaatgtttcttcgtggacgccctgttaccatgtacatgcccaaagatcaagtggattcttacagcttggaagcaaaagtagaacttccaaccaagagactcaagctggaatgggtctatgggtacaggggtcgagactgccgtaacaacctgtacttgcttccgacgggagagaccgtctacttcatcgcatccgtggtggtgttatacaacgtggaggagcaactgcagaggcattacgctggccacaacgatgacgtgaagtgcctagcagttcatcctgatcggatcacgatagcaacaggacaagttgcgggcacatcgaaggatggaaaacaattgcccccacatgtgcgcatctgggattctgtgacattgaatactctccacgtcattggaataggtttttttgaccgagcagtcacctgtattgcattctcaaaatctaatggaggaaccaatctctgtgctgtggatgactccaacgaccatgtgctctctgtatgggactggcagaaagaagaaaaactagcagatgtgaagtgctctaatgaagctgtgtttgctgcggatttccaccccacggacaccaacatcatagttacttgtggaaaatcacatctctacttttggacactagaaggaagctcccttaataagaagcaaggattattcgagaaacaagaaaagccaaagtttgtcctctgtgtgactttctctgaaaacggtgacaccattactggagattcaagtggcaacatcttagtatggggaaaaggtacaaatcgaataagctatgcagttcagggggcccatgagggtggcatttttgcactttgtatgttaagagatggcacactggtgtcgggaggtgggaaagaccgaaagctcatttcttggagcggaaactatcaaaaacttcgtaaaacggagattccagaacagtttggtccaatacggacagtggccgaggggaaaggcgatgtgatcttgattggcacaactcgaaactttgtcctgcagggcactctgtcaggggacttcacacccattactcagggtcacactgatgagctctggggactggccatccatgcctcaaaatctcagttcttgacctgtgggcatgacaagcatgccactctctgggacgctgtgggtcaccgtcccgtctgggacaaaataatagaggatccagctcagtcttctggttttcatccttcagggtctgtggttgcagtcggaacactcactgggaggtggtttgtgtttgacacagaaacaaaagacttggtcaccgttcacacagatggaaacgaacagctctctgtaatgcgatactcaccagatgggaatttcttagccataggctcacatgacaactgcatctatatatatggcgttagtgacaacgggaggaagtacacgcgagtgggcaagtgctcgggtcattccagcttcattactcacctggactggtctgtaaactcacagttcctcgtgtcaaattccggagactacgaaatcctctactgggttccctctgcctgtaagcaagtcgtaagtgtggaaactacaagagacattgaatgggctacctatacctgcactttgggattccatgtttttggagtgtggccagaaggctcggacggaaccgacatcaatgccgtctgtcgggcccatgagaagaaactcctgtcaacaggcgacgactttggcaaagtgcacctcttctcatacccctgctcgcagttcagggctccaagccacatctacggcgggcacagcagccatgtcaccaatgtcgatttcctctgtgaagacagccacctcatctccacgggcgggaaagacacaagcatcatgcagtggcgcgtcatttagtacccaccgagagctgtggggagcagcatgggcaaggaagacacagactcgcattacccttggtcactgtgatttctgttttgtttaaaaaattcttacaaacctcaggaaaactgtgccctccgccggctaccttagcttagcgtgtcagcgggcgccacagcggatcagcggttccgtgttcacttttgttgtacaatatatgacacagtgcacattgaataccaacaaggttgcaacgtttacattatagccacatcaacagaagtaactggtatattcttagtaacttttctatgaactcttcaaaaatggtcacagaatgccttttaaaacattgtatataatcttcactgtttcaccatctagcttgctaagtcaaatatttatgatgataatgaggtactgaaccacgatggctgttgaggaattggtcctaaaaggacagatcacttcagaagagtgaataactgatttgcacagctgaatcaggagacacaaagatgagactgtgtttggttacattttccaaagtttcattgcattctcccttggggaggctgtgagagagggcttgtatccctcttgtgctaagcagactctactcctaactgacttcaatatttcagcagggtacacaggcgtttccaagtttcagtgacaccgtcctgcctaaccagatgcggtcagcctcttcacacccacctggcttgcatcccccatcccttgttcacacgccctgattcacggtgagacattttgccaccttcttgtgtatattacttggcatgagatgatattgtacttgtataggattctagcaattcataataaatatgtaagactaggctttactgtcttatgcttatggacattgtatatttgtattttatgaccaagtagaccaagtcagaaagatctctctcgagcgtaccataaacctgcagagagaagtctcgaaaggctccaccaggtaccaagggcagctgcttttcctgtcttttgtgcatgggcgacccattacagtatgagataagattgagttctgatgcgttaaacggaggtggcagaaatttgtcaagaaggccttatccatttcgattgtgtgacagattgaaatttattgtttacattggggaatgtatctcaaatttttaaatagaagagtaataaacagactttaaagcaaatattaagatttttactcattcaaggcaagtaaatgaatggaattatctgagctctatggcactggttgtttagagtgactgatgaagtgcaactttcaaaaacatttttgatgacatcaccagcctactgcagaagtgcagggcaccagtaaacaccatgtattattgaagatgaatctgtttgtatgtatccttgtcaaatatattctataatgaaataaaatctgaaaagtgg

SEQ ID NO: 23380 - DNA, 3955 bp, Artificial Sequence
  derived and/or modified sequence
agcgccggtcgcggtcgggctcagcatggaggacggcttctccagctacagcagcctgtacgacacgtcctcgctgctccagttctgcaacgatgacagcgcttctgctgcaagtagcatggaggtgacagaccgcattgcttcactggagcagagagtccagatgcaagaagacgacatccagctgctcaaatcagctctagctgatgtggttcggcggctgaacattactgaggaacagcaggccgtgcttaacaggaaaggacctaccaaagcaagaccactgatgcagaccctgcctttaagaaccacggtcaacaatggcactgtgttaccaaagaaacctactggctctctaccatccccctccggggtcaggaaagaaactgctgtgccagcaaccaaaagattaaacagatctgtgagtcttctcaatgcttgcaaactgaatagatcgacaccaagtaacatcaagaggaccagctcttctgaacgagtgtctcctgggggtcgaagggaaagcaatggggattccagaggaaaccggaatcgcacaggctccaccagcagctcttccagtggcaaaaagaacagtgaaagcaaacccaaggagcctgtattcagtgcagaagaaggctatgtaaaaatgtttcttcgtggacgccctgttaccatgtacatgcccaaagatcaagtggattcttacagcttggaagcaaaagtagaacttccaaccaagagactcaagctggaatgggtctatgggtacaggggtcgagactgccgtaacaacctgtacttgcttccgacgggagagaccgtctacttcatcgcatccgtggtggtgttatacaacgtggaggagcaactgcagaggcattacgctggccacaacgatgacgtgaagtgcctagcagttcatcctgatcggatcacgatagcaacaggacaagttgcgggcacatcgaaggatggaaaacaattgcccccacatgtgcgcatctgggattctgtgacattgaatactctccacgtcattggaataggtttttttgaccgagcagtcacctgtattgcattctcaaaatctaatggaggaaccaatctctgtgctgtggatgactccaacgaccatgtgctctctgtatgggactggcagaaagaagaaaaactagcagatgtgaagtgctctaatgaagctgtgtttgctgcggatttccaccccacggacaccaacatcatagttacttgtggaaaatcacatctctacttttggacactagaaggaagctcccttaataagaagcaaggattattcgagaaacaagaaaagccaaagtttgtcctctgtgtgactttctctgaaaacggtgacaccattactggagattcaagtggcaacatcttagtatggggaaaaggtacaaatcgaataagctatgcagttcagggggcccatgagggtggcatttttgcactttgtatgttaagagatggcacactggtgtcgggaggtgggaaagaccgaaagctcatttcttggagcggaaactatcaaaaacttcgtaaaacggagattccagaacagtttggtccaatacggacagtggccgaggggaaaggcgatgtgatcttgattggcacaactcgaaactttgtcctgcagggcactctgtcaggggacttcacacccattactcagggtcacactgatgagctctggggactggccatccatgcctcaaaatctcagttcttgacctgtgggcatgacaagcatgccactctctgggacgctgtgggtcaccgtcccgtctgggacaaaataatagaggatccagctcagtcttctggttttcatccttcagggtctgtggttgcagtcggaacactcactgggaggtggtttgtgtttgacacagaaacaaaagacttggtcaccgttcacacagatggaaacgaacagctctctgtaatgcgatactcaccagatgggaatttcttagccataggctcacatgacaactgcatctatatatatggcgttagtgacaacgggaggaagtacacgcgagtgggcaagtgctcgggtcattccagcttcattactcacctggactggtctgtaaactcacagttcctcgtgtcaaattccggagactacgaaatcctctactgggttccctctgcctgtaagcaagtcgtaagtgtggaaactacaagagacattgaatgggctacctatacctgcactttgggattccatgtttttggagtgtggccagaaggctcggacggaaccgacatcaatgccgtctgtcgggcccatgagaagaaactcctgtcaacaggcgacgactttggcaaagtgcacctcttctcatacccctgctcgcagttcagggctccaagccacatctacggcgggcacagcagccatgtcaccaatgtcgatttcctctgtgaagacagccacctcatctccacgggcgggaaagacacaagcatcatgcagtggcgcgtcatttagtacccaccgagagctgtggggagcagcatgggcaaggaagacacagactcgcattacccttggtcactgtgatttctgttttgtttaaaaaattcttacaaacctcaggaaaactgtgccctccgccggctaccttagcttagcgtgtcagcgggcgccacagcggatcagcggttccgtgttcacttttgttgtacaatatatgacacagtgcacattgaataccaacaaggttgcaacgtttacattatagccacatcaacagaagtaactggtatattcttagtaacttttctatgaactcttcaaaaatggtcacagaatgccttttaaaacattgtatataatcttcactgtttcaccatctagcttgctaagtcaaatatttatgatgataatgaggtactgaaccacgatggctgttgaggaattggtcctaaaaggacagatcacttcagaagagtgaataactgatttgcacagctgaatcaggagacacaaagatgagactgtgtttggttacattttccaaagtttcattgcattctcccttggggaggctgtgagagagggcttgtatccctcttgtgctaagcagactctactcctaactgacttcaatatttcagcagggtacacaggcgtttccaagtttcagtgacaccgtcctgcctaaccagatgcggtcagcctcttcacacccacctggcttgcatcccccatcccttgttcacacgccctgattcacggtgagacattttgccaccttcttgtgtatattacttggcatgagatgatattgtacttgtataggattctagcaattcataataaatatgtaagactaggctttactgtcttatgcttatggacattgtatatttgtattttatgaccaagtagaccaagtcagaaagatctctctcgagcgtaccataaacctgcagagagaagtctcgaaaggctccaccaggtaccaagggcagctgcttttcctgtcttttgtgcatgggcgacccattacagtatgagataagattgagttctgatgcgttaaacggaggtggcagaaatttgtcaagaaggccttatccatttcgattgtgtgacagattgaaatttattgtttacattggggaatgtatctcaaatttttaaatagaagagtaataaacagactttaaagcaaatattaagatttttactcattcaaggcaagtaaatgaatggaattatctgagctctatggcactggttgtttagagtgactgatgaagtgcaactttcaaaaacatttttgatgacatcaccagcctactgcagaagtgcagggcaccagtaaacaccatgtattattgaagatgaatctgtttgtatgtatccttgtcaaatatattctataatgaaataaaatctgaaaagtgg

SEQ ID NO: 23381 - protein, 341 aa, Artificial Sequence
  derived and/or modified sequence
MSDSEKLNLDSIIGRLLEGSRVLTPHCAPVQGSRPGKNVQLTENEIRGLCLKSREIFLSQPILLELEAPLKICGDIHGQYYDLLRLFEYGGFPPESNYLFLGDYVDRGKQSLETICLLLAYKIKYPENFFLLRGNHECASINRIYGFYDECKRRYNIKLWKTFTDCFNCLPIAAIVDEKIFCCHGGLSPDLQSMEQIRRIMRPTDVPDQGLLCDLLWSDPDKDVQGWGENDRGVSFTFGAEVVAKFLHKHDLDLICRAHQVVEDGYEFFAKRQLVTLFSAPNYCGEFDNAGAMMSVDETLMCSFQILKPADKNKGKYGQFSGLNPGGRPITPPRNSAKAKK

SEQ ID NO: 23382 - DNA, 1026 bp, Artificial Sequence
  derived and/or modified sequence
atgagtgacagcgagaaactgaacctggacagcatcatcggaagattgctagaggggagccgggtgcttacaccgcattgtgcccccgtacagggctccaggcccggaaagaatgtgcagttgactgagaacgagattcggggactatgcctgaaaagccgcgagatctttctcagtcaacccatccttttggagttggaggctccacttaagatttgcggagatatccacggacaatattacgacctgcttaggttgtttgagtacggcggattcccacctgaaagcaactacctgttcctaggagactacgtggaccgcggcaaacaatcccttgaaactatatgcttgctactggcttacaaaatcaaataccctgagaacttcttcctgctgagaggcaaccatgagtgcgccagtattaaccgcatctatggcttctacgacgaatgcaagcgtcgctacaacataaagctatggaaaacatttactgactgcttcaattgtctgcccatcgctgctatcgtcgatgagaaaatcttttgttgccacggcggtttaagcccggatctacagtccatggaacagatcagacgtattatgagaccgactgacgtcccagaccagggcttgctttgcgatttgctgtggagtgacccagataaagacgtgcagggttggggcgaaaacgatagaggagtcagctttacattcggtgcagaagtagtcgcaaagtttctacataaacacgatctggacctgatttgtagagcacaccaggtcgtggaagatggatatgaatttttcgccaaaaggcaactagtgactctgttctctgcccctaattactgtggcgagttcgacaatgcgggcgctatgatgtccgtggacgagactctgatgtgtagtttccagatcctcaaacctgcagacaagaataagggcaaatatgggcagtttagtggcttgaacccgggaggacgcccaatcacgcccccacggaattctgccaaggcgaagaaatag

SEQ ID NO: 23383 - DNA, 1026 bp, Artificial Sequence
  derived and/or modified sequence
atgtctgacagcgagaagctgaacctggacagcatcatcggccgcctgctggagggcagccgggtgctgaccccccactgtgcccctgtgcagggcagcaggcctgggaagaatgtgcagctgacagaaaatgagatccggggcctgtgcctgaagagccgggagatcttcctgagccagcccatcctgctggagctggaggcccccctgaagatctgtggggacatccacggccagtactatgacctgctgcggctgtttgaatatggaggcttccccccagagagcaactacctgttcctgggggactatgtggaccggggcaagcagagcctggagaccatctgcctgctgctggcctacaagatcaagtacccagagaacttcttcctgctgcggggcaaccatgaatgtgccagcatcaaccgcatctacggcttctatgatgagtgcaagaggcgctacaacatcaagctgtggaagaccttcacagactgcttcaactgcctgcccatcgccgccatcgtggatgagaagatcttctgctgccacggcggcctgagcccagacctgcagagcatggagcagatccgccgcatcatgaggcccacagatgtgcctgaccagggcctgctgtgtgacctgctgtggagcgaccctgacaaggatgtgcagggctggggagaaaatgacagaggagtgtccttcaccttcggggctgaggtggtggccaagttcctgcacaagcatgacctggacctgatctgccgggcccaccaggtggtggaggatggctatgagttctttgccaagaggcagctggtgaccctcttcagcgcccccaactactgtggggagtttgacaatgctggggccatgatgtctgtggatgagaccctgatgtgcagcttccagatcctgaagccagctgacaagaacaagggcaagtatggccagttcagcggcctgaaccctgggggccggcccatcaccccacccaggaacagcgccaaggccaagaagtag

SEQ ID NO: 23384 - DNA, 1026 bp, Artificial Sequence
  derived and/or modified sequence
atgagcgacagcgagaagctgaacctggacagcatcatcggccggctactagagggcagtcgtgtcctgactccacactgcgcacccgtgcagggatcccgtccaggcaaaaacgtccagttaaccgaaaatgaaatccgcggcctatgcctcaaatctagggaaatatttttgagccagcccatacttctcgagctggaggccccattgaagatctgcggcgacattcatggtcaatattatgacttactcagactgttcgaatatggaggtttcccgcctgagtccaattatcttttcctgggagattacgttgatcgagggaaacagagccttgaaactatctgcctgttgctcgcgtataaaataaagtacccagagaactttttcctgctgcgtggtaaccatgagtgtgcaagtatcaatagaatctatggattttacgacgaatgtaagagaagatacaacataaagctgtggaaaacattcaccgattgtttcaattgtctgccgattgcggccattgttgacgaaaagatcttttgctgtcacggaggtctgagcccagatctccaatctatggaacagatacggagaatcatgaggcctactgacgtcccagaccaaggactgttgtgcgacctcctctggtcagatccagataaagatgtccaggggtggggggagaatgatagaggagttagttttaccttcggtgccgaagtggtcgcaaagttcctccacaagcatgacctggacctcatctgccgggcacaccaggtggtcgaggacggatatgagttttttgctaagcgccaacttgtgaccctgttcagcgcgccaaactattgcggcgagttcgataacgccggggcgatgatgtccgtggatgaaaccttgatgtgttcgttccagatactcaagccagcagacaaaaataaaggtaaatatggccagtttagcggtctcaaccccgggggcagaccgattacaccccctcggaactcagctaaagcaaaaaagtag

SEQ ID NO: 23385 - DNA, 1026 bp, Artificial Sequence
  derived and/or modified sequence
atgtctgacagcgagaaactgaacctggacagtattataggaagacttctggaaggatccagagttctgactcctcattgcgccccagtccagggctcccggccaggaaaaaacgtgcaactgactgagaacgagattcggggtctgtgcctgaagtccagggagattttcctcagccagcccattctgctggagctggaggcacctcttaagatctgcggcgacattcacggccagtattacgatctgttaagactgttcgaatacggaggattccctcctgaaagcaactacctttttcttggcgactacgtcgacagagggaagcagtcgctggagacaatttgcctgttgttggcatataagatcaagtatcccgaaaacttcttcttgttgagaggaaatcatgagtgtgcgtctattaacaggatttatgggttctacgatgaatgcaaacggaggtacaacatcaagttgtggaaaaccttcaccgattgctttaattgcctccctattgctgcaattgtggatgagaagattttctgctgccacggaggtttgtccccagatctccaaagtatggaacagattagacggatcatgcggccaaccgatgtcccagaccaggggctactctgcgatcttctctggtcagacccagacaaagatgtgcagggctggggggaaaatgaccgcggtgtgtcttttaccttcggcgcagaggtcgtggccaagtttctccacaaacatgatctggaccttatctgcagagctcaccaggtggtggaagatggctatgagttcttcgctaaacggcaactggtcaccctgtttagcgcacctaactattgcggcgaattcgacaatgctggagctatgatgagcgtggacgaaactctcatgtgttcttttcagatcttaaagcccgctgataaaaataagggaaagtacggacagttttccggtcttaaccccggtggacgccctattacaccccctagaaactccgcaaaagcaaaaaaatag

SEQ ID NO: 23386 - DNA, 1389 bp, Artificial Sequence
  derived and/or modified sequence
gcggcgccgccatgtccgacagcgagaagctcaacctggactcgatcatcgggcgcctgctggaagggtccagggtcctgacaccccattgcgccccagtgcagggctcgcggcctggcaagaatgtacagctgacagagaacgagatccgcggtctgtgcctgaaatcccgggagatttttctgagccagcccattcttctggagctggaggcacccctcaagatctgcggtgacatacacggccagtactacgaccttctgcgactatttgagtatggcggtttccctcccgagagcaactacctctttctgggggactatgtggacaggggcaagcagtccttggagaccatctgcctgctgctggcctataagatcaagtaccccgagaacttcttcctgctccgtgggaaccacgagtgtgccagcatcaaccgcatctatggtttctacgatgagtgcaagagacgctacaacatcaaactgtggaaaaccttcactgactgcttcaactgcctgcccatcgcggccatagtggacgaaaagatcttctgctgccacggaggcctgtccccggacctgcagtctatggagcagattcggcggatcatgcggcccacagatgtgcctgaccagggcctgctgtgtgacctgctgtggtctgaccctgacaaggacgtgcagggctggggcgagaacgaccgtggcgtctcttttacctttggagccgaggtggtggccaagttcctccacaagcacgacttggacctcatctgccgagcacaccaggtggtagaagacggctacgagttctttgccaagcggcagctggtgacacttttctcagctcccaactactgtggcgagtttgacaatgctggcgccatgatgagtgtggacgagaccctcatgtgctctttccagatcctcaagcccgccgacaagaacaaggggaagtacgggcagttcagtggcctgaaccctggaggccgacccatcaccccaccccgcaattccgccaaagccaagaaatagcccccgcacaccaccctgtgccccagatgatggattgattgtacagaaatcatgctgccatgctgggggggggtcaccccgacccctcaggcccacctgtcacggggaacatggagccttggtgtatttttcttttctttttttaatgaatcaatagcagcgtccagtcccccagggctgcttcctgcctgcacctgcggtgactgtgagcaggatcctggggccgaggctgcagctcagggcaacggcaggccaggtcgtgggtctccagccgtgcttggcctcagggctggcagccggatcctggggcaacccatctggtctcttgaataaaggtcaaagctggattctc

SEQ ID NO: 23387 - DNA, 1026 bp, Artificial Sequence
  derived and/or modified sequence
atgagcgacagcgagaagctgaacctggacagcatcatcggcagactgctggagggcagcagagtgctgaccccccactgcgcccccgtgcagggcagcagacccggcaagaacgtgcagctgaccgagaacgagatcagaggcctgtgcctgaagagcagagagatcttcctgagccagcccatcctgctggagctggaggcccccctgaagatctgcggcgacatccacggccagtactacgacctgctgagactgttcgagtacggcggcttcccccccgagagcaactacctgttcctgggcgactacgtggacagaggcaagcagagcctggagaccatctgcctgctgctggcctacaagatcaagtaccccgagaacttcttcctgctgagaggcaaccacgagtgcgccagcatcaacagaatctacggcttctacgacgagtgcaagagaagatacaacatcaagctgtggaagaccttcaccgactgcttcaactgcctgcccatcgccgccatcgtggacgagaagatcttctgctgccacggcggcctgagccccgacctgcagagcatggagcagatcagaagaatcatgagacccaccgacgtgcccgaccagggcctgctgtgcgacctgctgtggagcgaccccgacaaggacgtgcagggctggggcgagaacgacagaggcgtgagcttcaccttcggcgccgaggtggtggccaagttcctgcacaagcacgacctggacctgatctgcagagcccaccaggtggtggaggacggctacgagttcttcgccaagagacagctggtgaccctgttcagcgcccccaactactgcggcgagttcgacaacgccggcgccatgatgagcgtggacgagaccctgatgtgcagcttccagatcctgaagcccgccgacaagaacaagggcaagtacggccagttcagcggcctgaaccccggcggcagacccatcaccccccccagaaacagcgccaaggccaagaagtag

SEQ ID NO: 23388 - protein, 92 aa, Artificial Sequence
  derived and/or modified sequence
MDELLRERDILNKNMLKAVNATQKQTDLVKLHEQAKRNLEGEIQNYKDEAQKQRKIIFHLEKERDRYINQASDLTQKADSVRMPWPLDKGKW

SEQ ID NO: 23389 - protein, 872 aa, Artificial Sequence
  derived and/or modified sequence
MAEEKGGKQVLEESAFEEMERDFQGVLHELSGDKSLEKFRIEYERLHAVMKKSYDNEKRLMAKCRELNAEIVVNSAKVATALKLSQDDQTTIASLKKEIEKAWKMVDSAYDKEQKAKETILALKEEIVNLTKLVEQGSGLSMDQHSNIRDLLRFKEEVTKERDQLLSEVVKLRESLAQTTEQQQETERSKEEAEHAISQFQQEIQQRQNEASREFRKKEKLEKELKQIQADMDSRQTEIKALQQYVQKSKEELQKLEQQLKEQKILNERAAKELEQFQMRNAKLQQENEQHSLVCEQLSQENQQKALELKAKEEEVHQMRLDIGKLNKIREQIHKKLHHTEDQKAEVEQHKETLKNQIVGLEREVEASKKQAELDRKAMDELLRERDILNKNMLKAVNATQKQTDLVKLHEQAKRNLEGEIQNYKDEAQKQRKIIFHLEKERDRYINQASDLTQKVLMNMEDIKVRETQIFDYRKKIAESEIKLKQQQNLYEAVRSDRNLYSKNLVEAQDEITDMKRKLKIMIHQVDELKEDISAKESALVKLHLEQQRIEKEKETLKAELQKLRQQALETKHFIEKQEAEERKLLRIIAEADGERLRQKKELDQVISERDILGSQLVRRNDELALLYEKIKIQQSVLNKGESQYNQRLEDMRILRLEIKKLRREKGILARSMANVEELRQEFFHMQRELLKERTRCRALEEELENPLNVHRWRKLEASDPNAYELIQKIHTLQKRLISKTEEVVEKELLLQEKEKLYMELKHVLARQPGPEAAEQLKLYRRTLHDKKQQLKVLSSELNMYEVQSKEYKYEVEKLTNELQNLKKKYLAQKRKEQLQKNKDTAPMDNTFLMVKPNGPGFTGGGFPLRSTKMTF

SEQ ID NO: 23390 - DNA, 2619 bp, Artificial Sequence
  derived and/or modified sequence
atggccgaggagaagggcggcaagcaggtgctggaggagagcgccttcgaggagatggagagagacttccagggcgtgctgcacgagctgagcggcgacaagagcctggagaagttcagaatcgagtacgagagactgcacgccgtgatgaagaagagctacgacaacgagaagagactgatggccaagtgcagagagctgaacgccgagatcgtggtgaacagcgccaaggtggccaccgccctgaagctgagccaggacgaccagaccaccatcgccagcctgaagaaggagatcgagaaggcctggaagatggtggacagcgcctacgacaaggagcagaaggccaaggagaccatcctggccctgaaggaggagatcgtgaacctgaccaagctggtggagcagggcagcggcctgagcatggaccagcacagcaacatcagagacctgctgagattcaaggaggaggtgaccaaggagagagaccagctgctgagcgaggtggtgaagctgagagagagcctggcccagaccaccgagcagcagcaggagaccgagagaagcaaggaggaggccgagcacgccatcagccagttccagcaggagatccagcagagacagaacgaggccagcagagagttcagaaagaaggagaagctggagaaggagctgaagcagatccaggccgacatggacagcagacagaccgagatcaaggccctgcagcagtacgtgcagaagagcaaggaggagctgcagaagctggagcagcagctgaaggagcagaagatcctgaacgagagagccgccaaggagctggagcagttccagatgagaaacgccaagctgcagcaggagaacgagcagcacagcctggtgtgcgagcagctgagccaggagaaccagcagaaggccctggagctgaaggccaaggaggaggaggtgcaccagatgagactggacatcggcaagctgaacaagatcagagagcagatccacaagaagctgcaccacaccgaggaccagaaggccgaggtggagcagcacaaggagaccctgaagaaccagatcgtgggcctggagagagaggtggaggccagcaagaagcaggccgagctggacagaaaggccatggacgagctgctgagagagagagacatcctgaacaagaacatgctgaaggccgtgaacgccacccagaagcagaccgacctggtgaagctgcacgagcaggccaagagaaacctggagggcgagatccagaactacaaggacgaggcccagaagcagagaaagatcatcttccacctggagaaggagagagacagatacatcaaccaggccagcgacctgacccagaaggtgctgatgaacatggaggacatcaaggtgagagagacccagatcttcgactacagaaagaagatcgccgagagcgagatcaagctgaagcagcagcagaacctgtacgaggccgtgagaagcgacagaaacctgtacagcaagaacctggtggaggcccaggacgagatcaccgacatgaagagaaagctgaagatcatgatccaccaggtggacgagctgaaggaggacatcagcgccaaggagagcgccctggtgaagctgcacctggagcagcagagaatcgagaaggagaaggagaccctgaaggccgagctgcagaagctgagacagcaggccctggagaccaagcacttcatcgagaagcaggaggccgaggagagaaagctgctgagaatcatcgccgaggccgacggcgagagactgagacagaagaaggagctggaccaggtgatcagcgagagagacatcctgggcagccagctggtgagaagaaacgacgagctggccctgctgtacgagaagatcaagatccagcagagcgtgctgaacaagggcgagagccagtacaaccagagactggaggacatgagaatcctgagactggagatcaagaagctgagaagagagaagggcatcctggccagaagcatggccaacgtggaggagctgagacaggagttcttccacatgcagagagagctgctgaaggagagaaccagatgcagagccctggaggaggagctggagaaccccctgaacgtgcacagatggagaaagctggaggccagcgaccccaacgcctacgagctgatccagaagatccacaccctgcagaagagactgatcagcaagaccgaggaggtggtggagaaggagctgctgctgcaggagaaggagaagctgtacatggagctgaagcacgtgctggccagacagcccggccccgaggccgccgagcagctgaagctgtacagaagaaccctgcacgacaagaagcagcagctgaaggtgctgagcagcgagctgaacatgtacgaggtgcagagcaaggagtacaagtacgaggtggagaagctgaccaacgagctgcagaacctgaagaagaagtacctggcccagaagagaaaggagcagctgcagaagaacaaggacaccgcccccatggacaacaccttcctgatggtgaagcccaacggccccggcttcaccggcggcggcttccccctgagaagcaccaagatgaccttctag

SEQ ID NO: 23391 - DNA, 1535 bp, Artificial Sequence
  derived and/or modified sequence
ggtttccgctcggggcgggcgatagagacagcgcgtcgcgcctttagcttctttcccagactccggcccagctcctgcgatctccacagcagcctctgaggccgcccccagagagcatcaggatggctgaggaaaagggtggaaagcaagtcctggaagaatctgcatttgaagaaatggaaagagattttcagggagttctccatgaactttctggagacaaaagtttggaaaaatttcggattgaatatgagaggcttcatgctgtcatgaaaaagtcttatgacaatgaaaagcgtctgatggccaaatgcagagagctaaatgcagagattgtagtgaattctgcgaaggtcgccactgcccttaagctctctcaggatgatcagaccaccattgcatccctaaagaaggaaattgaaaaggcctggaagatggtggactcagcctatgacaaagagcagaaggccaaggagacgattcttgctctgaaagaggaaatagtgaacctgaccaaactagtggagcaggggtctggactgtcaatggaccagcatagcaacatccgagatttactgaggttcaaagaagaagtgacaaaggagagagaccagctcttatcagaagtggtaaaattacgagaatccctagctcagaccactgaacagcagcaggaaacagagcgatcaaaagaggaggctgaacatgccatcagtcagttccaacaagaaatccagcaacgtcagaacgaagcttcccgggagttccggaagaaggaaaaactagagaaagagctcaagcagattcaggcagacatggacagcaggcagacagaaataaaagccctgcagcagtatgtgcagaagagcaaggaggagcttcagaagctggagcagcagctgaaggagcagaagatattgaatgagagagctgcaaaggaactcgagcaatttcagatgagaaatgctaaacttcagcaagagaatgaacagcacagtttggtctgtgagcagctatcccaggaaaaccaacagaaggcgttggagctcaaagccaaagaggaagaagtccatcaaatgcgccttgacatcgggaagctcaacaaaatcagagaacaaattcataagaaattgcaccacaccgaagatcaaaaggcagaagtcgaacagcacaaagaaaccctaaaaaatcagattgtgggattagagagagaggtagaggcttcaaagaaacaagcagaacttgacagaaaggcaatggacgagcttctaagagaaagggacatactaaataagaacatgcttaaggcggtcaatgcgacccagaagcagacagacttggtaaagctccatgaacaagccaagaggaacctggagggagaaatccagaactacaaggatgaggctcagaagcagagaaagatcatctttcatctggaaaaggagcgtgaccggtacatcaaccaagccagtgaccttacgcaaaaggctgactctgtcaggatgccctggcctctggacaaagggaaatggtga

SEQ ID NO: 23392 - DNA, 3313 bp, Artificial Sequence
  derived and/or modified sequence
gcgccgagcgcgggtttccgctcggggcgggcgatagagacagcgcgtcgcgcctttagcttctttcccagactccggcccagctcctgcgatctccacagcagcctctgaggccgcccccagagagcatcaggatggctgaggaaaagggtggaaagcaagtcctggaagaatctgcatttgaagaaatggaaagagattttcagggagttctccatgaactttctggagacaaaagtttggaaaaatttcggattgaatatgagaggcttcatgctgtcatgaaaaagtcttatgacaatgaaaagcgtctgatggccaaatgcagagagctaaatgcagagattgtagtgaattctgcgaaggtcgccactgcccttaagctctctcaggatgatcagaccaccattgcatccctaaagaaggaaattgaaaaggcctggaagatggtggactcagcctatgacaaagagcagaaggccaaggagacgattcttgctctgaaagaggaaatagtgaacctgaccaaactagtggagcaggggtctggactgtcaatggaccagcatagcaacatccgagatttactgaggttcaaagaagaagtgacaaaggagagagaccagctcttatcagaagtggtaaaattacgagaatccctagctcagaccactgaacagcagcaggaaacagagcgatcaaaagaggaggctgaacatgccatcagtcagttccaacaagaaatccagcaacgtcagaacgaagcttcccgggagttccggaagaaggaaaaactagagaaagagctcaagcagattcaggcagacatggacagcaggcagacagaaataaaagccctgcagcagtatgtgcagaagagcaaggaggagcttcagaagctggagcagcagctgaaggagcagaagatattgaatgagagagctgcaaaggaactcgagcaatttcagatgagaaatgctaaacttcagcaagagaatgaacagcacagtttggtctgtgagcagctatcccaggaaaaccaacagaaggcgttggagctcaaagccaaagaggaagaagtccatcaaatgcgccttgacatcgggaagctcaacaaaatcagagaacaaattcataagaaattgcaccacaccgaagatcaaaaggcagaagtcgaacagcacaaagaaaccctaaaaaatcagattgtgggattagagagagaggtagaggcttcaaagaaacaagcagaacttgacagaaaggcaatggacgagcttctaagagaaagggacatactaaataagaacatgcttaaggcggtcaatgcgacccagaagcagacagacttggtaaagctccatgaacaagccaagaggaacctggagggagaaatccagaactacaaggatgaggctcagaagcagagaaagatcatctttcatctggaaaaggagcgtgaccggtacatcaaccaagccagtgaccttacgcaaaaggtccttatgaacatggaagacataaaagttcgtgaaacacagatttttgactacaggaaaaaaatagctgaatcagagattaaattaaaacagcaacagaacctatatgaagctgtgagatcagacagaaatctgtatagcaaaaatctggttgaggctcaggatgaaataacagatatgaagagaaagttaaagattatgatccatcaggtagatgagctgaaagaagacatctctgccaaagagtccgcacttgtgaagctgcacctggaacagcagcgaatagaaaaggaaaaggaaacattgaaggctgagctgcagaagctgagacaacaagccctggagacaaaacactttattgaaaagcaagaagctgaagagagaaaactcctgcgaataattgctgaggctgacggggagaggttgagacagaagaaggaattagaccaggtcatcagtgagagagatatcctggggtctcagcttgttcggcgcaatgatgagttagctttgctctatgagaagatcaagatccaacagtctgtgctgaataaaggggagagccagtacaaccagaggttggaggacatgagaatcctcagacttgagatcaagaagcttcgccgggaaaaggggattcttgccaggagtatggctaatgttgaagaactcagacaggagttttttcacatgcaaagagaattgttgaaggagaggacacgctgccgagccctggaggaggagctggagaatcccctgaatgtgcacagatggaggaagctcgaggccagcgaccccaatgcatatgagctgatacagaaaattcacaccctgcagaagcgtctcatcagcaagactgaagaggtggttgaaaaagagctgctcctccaggaaaaggagaaactctacatggaactaaagcacgtcttggcccgccagcctggacctgaggctgcggaacagctgaagctgtaccgacgcacgctgcatgacaagaagcagcagctgaaagttttgtcttcagaattgaatatgtatgaagtacagagcaaagaatataaatatgaggtagagaaacttaccaatgagctccagaatttaaagaagaaatacctcgctcagaaacgtaaagaacaacttcaaaaaaacaaggacacagcacccatggataacaccttcttaatggtcaaaccaaatggtcctggttttactgggggcggatttcctctcaggtcaaccaaaatgacgttctaacctgaagctgctggctgtttccagttgaacaactcatgaaatctgctctgggacattttgggggaatctcaaagtccttggatcatagaactgagtgctgagaatccaggatggaaagaaatgcagaactatcatagtcacatacatataagagggatggtgttttgtctggttcacgttgatattaacagatcataattctctctgttcagttaggctgacctattgcatgaagcaaatcttttgttgctaccccattgattgaaatgtactagaccttaatttctttattacagacattggtgtacttgaaggttttatatttaaaagtatttttgaaatgcaatgtgtcccctctcaccttattaacaataatctattttaattattcctcattaacaagtcattgcatgagatgagaaagaaggacaaactcttaagaatttaaaaagtgttttgagaatgatttctatatggaatttcttttcaggcccggaatgggaaaatctattccaaagagacacactaataaatacttcattataaaaaataaaaaagaa

SEQ ID NO: 23393 - DNA, 2619 bp, Artificial Sequence
  derived and/or modified sequence
atggccgaggagaagggcgggaaacaggtactggaggagtcagccttcgaggaaatggagcgtgactttcaaggggttctgcacgaactctccggcgacaaatccttggaaaagtttagaatcgaatatgagcgattacatgcagtgatgaagaaatcctatgataatgagaagcgcttgatggcgaaatgccgcgaattgaatgcagaaatagttgtcaattcggcgaaggtggcgactgcgctgaaattaagtcaagatgaccagacaaccatcgcctctctcaaaaaggagatcgagaaggcgtggaagatggtcgactcagcttacgataaagaacagaaggcaaaagaaactatcctggctctcaaggaagaaattgtcaatctcacaaaactagtcgaacaggggagcggcctgagcatggatcagcactccaatattcgcgacttactgaggtttaaggaagaagtcaccaaggagcgcgaccagctgttgagcgaggttgtaaagcttcgcgagtctctcgctcagaccacagagcagcagcaggagaccgaacggtcaaaggaagaggccgaacacgcgatctcccagttccaacaggaaatacagcagcggcagaatgaggcctctcgcgagtttaggaaaaaagaaaagctggaaaaggagctcaaacagattcaggcagatatggactctcggcagacggagatcaaagccctccaacagtatgtgcagaagtcaaaggaggagctccagaaactggaacagcagttgaaggagcagaaaattctgaatgaacgagccgctaaagaactagagcagttccaaatgcgaaacgccaagctgcagcaggagaacgagcagcacagcctcgtgtgtgagcagcttagccaggaaaatcaacaaaaagccctggagttgaaagcaaaagaggaagaggtgcaccagatgcggctagacattgggaagctgaataagatccgggagcagattcataagaagttgcaccataccgaagatcagaaggccgaggtggagcaacataaagagaccctaaaaaaccagatcgtgggactcgaaagggaggttgaggcatcaaagaaacaggctgaactggataggaaggccatggacgaactgctgagggagagagacattctcaataagaacatgttgaaggccgtaaacgcgacccagaaacagacggacctcgtgaagctgcatgaacaagctaaaaggaatcttgaaggtgagattcagaattacaaggatgaggcccaaaagcagagaaagattatcttccatttagaaaaggaacgagacagatatatcaaccaggcctctgatcttactcagaaggtgctcatgaacatggaggacattaaggtgcgcgaaacacagatcttcgactacaggaaaaaaattgccgagtctgaaatcaagctgaaacagcagcagaacctctatgaggctgttaggagcgaccgtaatttgtacagtaagaatctcgtcgaggctcaggatgagattactgacatgaagagaaaattgaagattatgatccaccaggtggatgaactgaaagaggacatcagtgccaaggagagcgctctagtgaaactacatctggagcaacagcgaattgagaaagagaaagagaccctgaaagcagagctccagaaactgcggcaacaggccctcgaaaccaaacactttattgagaagcaggaagcagaagagagaaagttgctgaggattattgcagaagctgatggtgagaggttaaggcaaaaaaaggagctagatcaggtgatctcggaaagagatatactgggctctcagctggtccgccgaaacgatgagctggctcttctgtacgaaaagatcaagatccagcagtccgtgctgaacaagggcgaaagccaatataaccaaaggctggaggacatgagaattcttaggctcgagatcaagaagctgcggcgtgagaaaggcattttggcaaggagtatggccaacgtcgaggagctgagacaggagttcttccacatgcagcgcgaactcctaaaggagcggactcgctgtagggccctggaagaggagctggagaaccctctgaatgtccaccgatggcgcaaacttgaagctagcgatcctaacgcttatgaactgatccagaaaatccacactctgcagaaacggctcatttcaaagaccgaagaggtggtcgagaaagaacttttactgcaagaaaaggagaaattgtatatggagctgaaacacgtacttgcgcgacagcctgggcctgaagccgccgagcaattgaagctgtataggcgcacactgcacgacaagaaacagcagctgaaggttctgagcagtgagctaaacatgtatgaggtgcagtctaaggaatacaagtacgaggtagaaaaacttactaacgaactgcagaatctgaagaaaaaatatctcgctcaaaagcgaaaagaacaattacagaagaacaaagatacagctcccatggacaataccttcttgatggtaaaaccaaacggacctggatttaccgggggcgggtttccgctgaggtccaccaaaatgacattctag

SEQ ID NO: 23394 - DNA, 2619 bp, Artificial Sequence
  derived and/or modified sequence
atggccgaggagaagggcggcaagcaggtgctggaggagagcgcctttgaggagatggagcgggacttccagggcgtgctgcacgagctgagcggggacaagagcctggagaagttcagaattgaatatgagcggctgcatgctgtgatgaagaagagctatgacaatgagaagaggctgatggccaagtgccgggagctgaatgctgagatcgtggtgaacagcgccaaggtggccacagccctgaagctgagccaggatgaccagaccaccatcgccagcctgaagaaggagattgagaaggcctggaagatggtggacagcgcctatgacaaggagcagaaggccaaggagaccatcctggccctgaaggaggagatcgtgaacctgaccaagctggtggagcagggcagcggcctgtccatggaccagcacagcaacatccgggacctgctgcgcttcaaggaggaggtgaccaaggagcgggaccagctgctgtctgaggtggtgaagctgcgggagagcctggcccagaccacagagcagcagcaggagacagagaggagcaaggaggaggccgagcacgccatcagccagttccagcaggagatccagcagaggcagaatgaggccagccgggagttcaggaagaaggagaagctggagaaggagctgaagcagatccaggccgacatggacagccggcagacagagatcaaggccctgcagcagtatgtgcagaagagcaaggaggagctgcagaagctggagcagcagctgaaggagcagaagatcctgaatgaaagagctgccaaggagctggagcagttccagatgagaaatgccaagctgcagcaggagaatgagcagcacagcctggtgtgtgagcagctgagccaggagaaccagcagaaggccctggagctgaaggccaaggaggaggaggtgcaccagatgaggctggacatcggcaagctgaacaagatccgggagcagatccacaagaagctgcaccacacagaggaccagaaggccgaggtggagcagcacaaggagaccctgaagaaccagatcgtgggcctggagcgggaggtggaggccagcaagaagcaggccgagctggacaggaaggccatggatgagctgctgcgggagcgggacatcctgaacaagaacatgctgaaggctgtgaatgccacccagaagcagacagacctggtgaagctgcacgagcaggccaagaggaacctggagggggagatccagaactacaaggatgaggcccagaagcagaggaagatcatcttccacctggagaaggagcgggaccgctacatcaaccaggccagtgacctgacccagaaggtgctgatgaacatggaggacatcaaggtgcgggagacccagatctttgactacaggaagaagattgctgagagcgagatcaagctgaagcagcagcagaacctgtatgaagctgtgcggagtgacaggaacctgtacagcaagaacctggtggaggcccaggatgagatcacagacatgaagaggaagctgaagatcatgatccaccaggtggatgagctgaaggaggacatcagcgccaaggagagcgccctggtgaagctgcacctggagcagcagagaattgagaaggagaaggagaccctgaaggccgagctgcagaagctgcggcagcaggccctggagaccaagcacttcatcgagaagcaggaggccgaggagaggaagctgctgcgcatcatcgccgaggctgatggagagcggctgcggcagaagaaggagctggaccaggtgatcagcgagcgggacatcctgggcagccagctggtgagaagaaatgatgagctggccctgctgtatgagaagatcaagatccagcagagcgtgctgaacaagggggagagccagtacaaccagaggctggaggacatgaggatcctgcggctggagatcaagaagctgcggcgggagaagggcatcctggcccgctccatggccaacgtggaggagctgcggcaggagttcttccacatgcagcgggagctgctgaaggagaggacccgctgccgggccctggaggaggagctggagaaccccctgaatgtgcaccgctggaggaagctggaggccagtgaccccaatgcctatgagctgatccagaagatccacaccctgcagaagaggctcatcagcaagacagaggaggtggtggagaaggagctgctgctgcaggagaaggagaagctgtacatggagctgaagcacgtgctggcccggcagcccggccctgaggccgctgagcagctgaagctgtacagaaggaccctgcatgacaagaagcagcagctgaaggtgctgagcagcgagctgaacatgtatgaggtgcagagcaaggagtacaagtatgaggtggagaagctgaccaatgagctgcagaacctgaagaagaagtacctggcccagaagaggaaggagcagctgcagaagaacaaggacacagcccccatggacaacaccttcctgatggtgaagcccaacggccctggcttcaccggcggcggcttccccctgcggagcaccaagatgaccttctag

SEQ ID NO: 23395 - DNA, 2619 bp, Artificial Sequence
  derived and/or modified sequence
atggccgaggagaagggcggcaagcaggtgctggaggagagcgccttcgaggagatggaacgtgatttccagggcgtgttgcacgagctgtcaggagacaagtctctggaaaagttcaggattgaatatgaacggctccatgcagttatgaaaaaatcttacgataacgagaaacgcttaatggcaaagtgtcgggaactgaacgcggagatcgtggtgaattccgcaaaagttgccaccgccttaaaattgtctcaagatgaccagaccaccatcgcatccctgaaaaaggaaatcgagaaagcctggaagatggtggactcggcctatgataaggagcagaaggctaaggaaacaatcctggccctgaaggaggaaatagtgaatctcaccaagctggttgagcaaggcagcggtctctctatggatcagcatagcaacatacgggatttgctgcggtttaaggaggaagtcaccaaggaacgggaccaactgctgtctgaggttgttaagctgcgagagtctctcgcccagaccacagagcagcagcaggagacagagaggtctaaggaggaggcggaacatgctatttctcagttccagcaagagatccagcagagacaaaacgaggcatctcgagaatttcgcaaaaaggagaagctggaaaaagagcttaagcagattcaggccgacatggactcgcgccaaacagagattaaagcactacaacagtacgtgcaaaagtcgaaagaagagctgcagaaattggagcagcagttgaaagagcaaaagattctgaatgaaagggctgcaaaggaactggagcaattccaaatgaggaatgcaaaattgcaacaggagaacgagcagcattcactcgtctgtgaacaactgagtcaggagaatcagcagaaggctctggagctcaaggctaaggaagaagaggtgcaccagatgcggctggatattgggaagcttaacaagatccgtgaacagattcacaagaaactgcaccataccgaggaccagaaggccgaggttgaacagcataaggagaccctcaaaaatcagatcgtgggactggagagagaggtagaggcatctaagaagcaagcagagctggaccgcaaggccatggacgagttgcttagagagagagatatcctcaataagaacatgcttaaagcagtgaatgcaactcagaaacagacagatctggttaagctgcacgagcaggccaaacgaaatcttgagggagagattcagaactacaaggatgaagcacagaagcagaggaagattatatttcacctggagaaggagcgcgaccggtacatcaaccaggctagtgatctgacccagaaggtcctgatgaacatggaggacatcaaggttcgcgaaacccagattttcgattaccgcaaaaaaatcgcagaatccgaaatcaagctgaagcagcagcagaatctctacgaagcggtacgcagtgacaggaatctttactccaagaatttggtcgaggcgcaggacgaaatcactgatatgaagcggaagttgaaaatcatgatccaccaggtggatgagctgaaagaagacatcagtgccaaggaatcagcgcttgtaaagctgcacctggaacagcaacgcattgaaaaggagaaggagacgctcaaagccgaacttcagaagctgagacagcaagcactggagacaaagcatttcatcgagaagcaagaggccgaggagcggaagcttttaagaataatcgccgaagcagatggagagcgcctgaggcagaagaaggaactggaccaggtgattagcgaaagagacatcctcggctcgcagttggtcagacgcaatgacgagctcgccctgctttacgagaagataaagattcagcagagcgtactgaacaagggcgagtcccagtataaccagcggttagaggatatgcggatactgaggttggagattaagaagctgcgaagagaaaaagggattctcgcacgaagtatggcgaatgtggaagagctccggcaagaatttttccatatgcagagagaactcctgaaggagcggacacgctgtagggctctggaagaagagttggaaaatcccttgaacgttcatagatggcggaaacttgaggcatccgaccctaacgcctacgaattgattcagaaaattcacaccctccagaaacgtctgatctctaagaccgaagaggtggttgaaaaagagctcctgctgcaggaaaaggagaagctgtatatggaactaaaacatgtgctggccaggcagcctggccctgaagccgccgaacagctcaaactctacaggcggacactgcacgataaaaagcagcagttgaaagttctgtcttccgagctcaacatgtacgaagtgcaaagcaaagagtataaatacgaggtcgagaagctgacaaacgagctgcagaacctgaagaagaagtatctagctcaaaagcggaaggaacaactgcaaaagaacaaggacacagccccaatggacaacaccttcctgatggtgaagccgaacggcccgggattcactggcgggggatttcccctgaggtctaccaagatgaccttctag

SEQ ID NO: 23396 - DNA, 2619 bp, Artificial Sequence
  derived and/or modified sequence
atggccgaggaaaagggtggcaagcaggtcttggaggagtcagccttcgaggagatggagagagattttcaaggcgtattgcacgaactgtctggcgataagagcctggagaagtttagaattgagtatgaaagactgcacgccgtaatgaagaagtcctacgataacgaaaaaaggctgatggcaaagtgtagagagctgaacgccgagattgtagtgaactctgccaaagtggcaaccgcactgaaattgagccaagatgatcagacaactattgcctctctgaaaaaggaaatagagaaggcttggaaaatggtcgatagtgcttatgacaaggagcagaaggccaaggaaaccatccttgcactcaaggaagagattgtgaatttgaccaagcttgtggaacaaggtagcgggctttccatggatcaacacagtaacataagggacctacttcgattcaaagaagaggttacaaaggaaagagatcagttgctctcggaggttgtcaagctccgcgaaagcttggcgcagaccacggagcaacagcaagagaccgagcgcagcaaggaagaagctgagcacgctatcagccagttccagcaagaaattcagcagcgccagaacgaagcttcccgggaatttcggaagaaagaaaaattggagaaggagctcaagcagatccaggctgacatggatagtagacaaacggaaatcaaggcactccaacagtatgttcagaaatctaaggaggagctccaaaagctggaacagcagctaaaggaacagaagattttgaatgaacgcgctgccaaggaacttgagcagtttcaaatgcgcaacgccaaacttcagcaagaaaacgaacagcactccctggtgtgcgagcagctcagccaagagaatcaacaaaaagcgctggagctcaaggctaaagaggaggaggtgcatcaaatgagactggacattggtaagcttaacaagatcagggaacagatccataagaagctccaccatacagaggaccaaaaggccgaagttgaacagcacaaagaaaccctcaaaaaccagattgtgggattagaacgcgaagtggaggcctccaagaagcaggccgaactggacagaaaagcaatggacgaactcctgcgcgagcgggacattttgaataagaatatgctcaaggccgtaaacgcgactcagaaacagaccgacctcgttaagttgcacgagcaggccaagcgaaatctggagggagagatacagaactacaaggacgaggcacagaaacaaaggaagatcatctttcaccttgagaaagagagagacaggtacatcaatcaagctagcgaccttacacaaaaagtgctgatgaatatggaggacattaaggttcgtgagacacaaattttcgattatcgaaagaagatcgctgagtctgagattaaactcaaacagcaacagaacctgtatgaagcagtgaggagcgatcggaatctgtacagtaaaaatctggtagaagctcaggatgaaattaccgacatgaaaaggaaacttaagattatgattcaccaggtggatgaactgaaagaagatatctccgcaaaagaatctgctttagtcaagctacatctggaacagcaacgcattgagaaggagaaggagactctaaaggccgaactacagaaactgcgacagcaagccctggagaccaagcacttcatcgagaaacaggaggccgaagagaggaaactgctccggatcatcgcggaggccgacggggagaggctgaggcagaaaaaagagctcgaccaagtgatctccgaacgggacatacttgggtcacaactggtgaggaggaacgatgaacttgccctgctatacgaaaaaattaaaattcagcaatcagtgctaaataagggagagagccagtacaaccagcgccttgaggatatgaggattctgcggcttgaaatcaagaaactgcggcgtgagaaagggatcctggcacgctcgatggccaatgtcgaagaattgcggcaggagttttttcacatgcagcgtgaattgctgaaagaacgtacccggtgtcgggcactggaggaagagctggagaatcctctcaacgtgcacaggtggagaaaattagaagccagtgatcctaacgcctacgaactgatccagaaaattcacactctacaaaaacggttaatctccaagactgaggaagttgtagaaaaagagcttttgctccaggagaaagagaaactttacatggaactgaaacacgtgcttgcgagacagcctggtcccgaggctgccgagcagctgaaactctacaggcggactcttcacgataagaagcagcagttgaaggtgctgagctcggagctgaacatgtatgaggtccagagcaaagagtataagtacgaggtggaaaagctcacgaatgaactgcagaacttgaagaagaaataccttgcccagaagaggaaagagcagttgcagaagaacaaagataccgctcccatggacaacacctttctgatggtgaagcctaacgggcctggtttcaccggcggtgggtttcctcttaggagcactaagatgactttttag

SEQ ID NO: 23397 - DNA, 384 bp, Artificial Sequence
  derived and/or modified sequence
atgagacacaaccagatgtgctgcgagaccccccccaccgtgaccgtgtacgtgaagagcggcagcaacagaagccaccagcccaagaagcccatcaccctgaagagacccatctgcaaggacaactggcaggccttcgagaagaacacccacaacaacaacaagagcaagagacccaagggcccctgcctggtgatccagagacaggacatgaccgccttcttcaagctgttcgacgacgacctgatccaggacttcctgtggatggactgctgctgcaagatcgccgacaagtacctgctggccatgaccttcgtgtacttcaagagagccaagttcaccatcagcgagcacaccagaatcaacttcttcatcgccctgtag

SEQ ID NO: 23398 - DNA, 384 bp, Artificial Sequence
  derived and/or modified sequence
atgagacacaaccagatgtgctgtgagacgcctcccacggttactgtttacgtgaagagtggttctaatcggtcccatcaaccgaagaagcccatcacgcttaaaagaccgatatgtaaggacaactggcaggcttttgaaaaaaacacacacaacaacaacaaatccaagaggcccaagggaccatgccttgtgatccagcggcaggacatgacagcttttttcaaattatttgacgacgacctgattcaggatttcctgtggatggactgttgttgtaaaatcgctgacaaatatctgttagctatgacattcgtgtattttaagagagccaaattcaccatcagcgagcataccaggatcaacttttttatcgccttatag

SEQ ID NO: 23399 - DNA, 384 bp, Artificial Sequence
  derived and/or modified sequence
atgaggcacaaccagatgtgctgtgagaccccacccaccgtgacagtgtatgtgaagagcggcagcaacagaagccaccagcccaagaagcccatcaccctgaagaggcccatctgcaaggacaactggcaggcctttgagaagaacacccacaacaacaacaagagcaagaggcccaagggcccctgcctggtgatccagaggcaggacatgacagccttcttcaagctgtttgatgatgacctgatccaggacttcctgtggatggactgctgctgcaagattgctgacaagtacctgctggccatgacctttgtgtacttcaagagggccaagttcaccatcagcgagcacacccgcatcaacttcttcatcgccctgtag

SEQ ID NO: 23400 - DNA, 384 bp, Artificial Sequence
  derived and/or modified sequence
atgcggcacaaccagatgtgctgcgagaccccccccaccgtgaccgtgtacgtaaaaagcggatctaaccgctctcatcagccgaagaaaccgatcactttaaaaagacctatctgtaaggataactggcaggcttttgaaaaaaatacccacaataataacaagtctaagcgcccgaaggggccgtgcttggtgattcagagacaggacatgaccgccttcttcaagttgtttgacgacgacctgattcaggactttctgtggatggattgctgttgtaagatagcagataaatacctcctggctatgacgtttgtgtacttcaagagggcgaagtttactatttcagagcacacccgtattaacttcttcatagctctgtag

SEQ ID NO: 23401 - DNA, 384 bp, Artificial Sequence
  derived and/or modified sequence
atgaggcacaatcagatgtgttgcgagacccctcctaccgttacagtttacgttaaatctggatcaaatcgaagtcatcagcccaaaaaacccattacattaaagcgtccgatttgcaaagataactggcaggcgttcgaaaaaaacacacacaataacaacaagagcaagcgccctaagggcccttgtctggtgattcagcgacaggatatgaccgcttttttcaaactctttgacgacgacctcatccaggattttttatggatggactgttgttgtaagatagctgacaaatatctcctcgccatgacatttgtgtatttcaagcgggctaaattcaccatttcagagcacacccggatcaattttttcatcgcgctctag

SEQ ID NO: 23402 - DNA, 758 bp, Artificial Sequence
  derived and/or modified sequence
gttgcccggccctctcccgcgcagccccgggcttccgcaggtacctgtgctcgcccccgggaaggggcctcgcaggcgaatctccagtttcgagtgtgcccggtccctgggttcgctcgccggcgaccccaccgcccgccttagatgagaaggcagcgctccagcctcgtcctcacgccgcctcccgtgggcgccctcagctgccttcgcggcgacgacacacgcgctccccgcagcgggctctgggctgagggacctggcgagggaggcagtggccgcgcagtccttccttcagaagggaaatttctgagggtcaggaaggggaatctgtacctcactccttgaacaccaaggaaggaatattgggaaaccaaaatgaggcacaatcagatgtgttgtgagacaccacctactgtcactgtttatgtaaaatcagggtcaaatagatcacatcagcctaaaaagcccattactctgaagcgtcctatttgtaaagataattggcaagcatttgaaaaaaatacacataataacaacaaatctaaacgccccaaaggaccttgtctggttatacagcgtcaggatatgactgctttctttaaattatttgatgacgatttaattcaagatttcttgtggatggactgctgctgtaaaattgcagacaagtatcttttggctatgacctttgtttatttcaagagggctaaatttactataagtgagcataccaggataaatttctttattgctctgta

SEQ ID NO: 23403 - protein, 4557 aa, Artificial Sequence
  derived and/or modified sequence
MDIIMGHCVGTRPPACCLILLLFKLLATVSQGLPGTGPLGFHFTHSIYNATVYENSAARTYVNSQSRMGITLIDLSWDIKYRIVSGDEEGFFKAEEVIIADFCFLRIRTKGGNSAILNREIQDNYLLIVKGSVRGEDLEAWTKVNIQVLDMNDLRPLFSPTTYSVTIAESTPLRTSVAQVTATDADIGSNGEFYYYFKNKVDLFSVHPTSGVISLSGRLNYDEKNRYDLEILAVDRGMKLYGNNGVSSTAKLYVHIERINEHAPTIHVVTHVPFSLEKEPTYAVVTVDDLDDGANGEIESVSIVAGDPLDQFFLAKEGKWLNEYKIKERKQIDWESFPYGYNLTLQAKDKGSPQKCSALKAVYIGNPTRDTVPIRFEKEVYDVSISEFSPPGVVVAIVKLSPEPIDVEYKLSPGEDAVYFKINPRSGLIVTARPLNTVKKEVYKLEVTNKEGDLKAQVTISIEDANDHTPEFQQPLYDAYVNESVPVGTSVLTVSASDKDKGENGYITYSIASLNLLPFVINQFTGVISTTEELDFESSPEIYRFIVRASDWGSPYRHESEVNVTIRIGNVNDNSPLFEKVACQGVISYDFPVGGHITAVSAIDIDELELVKYKIISGNELGFFYLNPDSGVLQLKKSLTNSGIKNGNFALRITATDGENLADPMSINISVLHGKVSSKSFSCRETRVAQKLAEKLLIKAKANGKLNLEDGFLDFYSINRQGPYFDKSFPSDVAVKEDLPVGANILKIKAYDADSGFNGKVLFTISDGNTDSCFNIDMETGQLKVLMPMDREHTDLYLLNITIYDLGNPQKSSWRLLTINVEDANDNSPVFIQDSYSVNILESSGIGTEIIQVEARDKDLGSNGEVTYSVLTDTQQFAINSSTGIVYVADQLDRESKANYSLKIEARDKAESGQQLFSVVTLKVFLDDVNDCSPAFIPSSYSVKVLEDLPVGTVIAWLETHDPDLGLGGQVRYSLVNDYNGRFEIDKASGAIRLSKELDYEKQQFYNLTVRAKDKGRPVSLSSVSFVEVEVVDVNENLHTPYFPDFAVVGSVKENSRIGTSVLQVTARDEDSGRDGEIQYSIRDGSGLGRFSIDDESGVITAADILDRETMGSYWLTVYATDRGVVPLYSTIEVYIEVEDVNDNAPLTSEPIYYPVVMENSPKDVSVIQIQAEDPDSSSNEKLTYRITSGNPQNFFAINIKTGLITTTSRKLDREQQAEHFLEVTVTDGGPSPKQSTIWVVVQVLDENDNKPQFPEKVYQIKLPERDRKKRGEPIYRAFAFDRDEGPNAEISYSIVDGNDDGKFFIDPKTGMVSSRKQFTAGSYDILTIKAVDNGRPQKSSTARLHIEWIKKPPPSPIPLTFDEPFYNFTVMESDRVTEIVGVVSVQPANTPLWFDIVGGNFDSAFDAEKGVGTIVIAKPLDAEQRSIYNMSVEVTDGTNVAVTQVFIKVLDNNDNGPEFSQPNYDVTISEDVLPDTEILQIEATDRDEKHKLSYTVHSSIDSISMRKFRIDPSTGVLYTAERLDHEAQDKHILNIMVRDQEFPYRRNLARVIVNVEDANDHSPYFTNPLYEASVFESAALGSAVLQVTALDKDKGENAELIYTIEAGNTGNMFKIEPVLGIITICKEPDMTTMGQFVLSIKVTDQGSPPMSATAIVRISVTMSDNSHPKFIHKDYQAEVNENVDIGTSVILISAISQSTLIYEVKDGDINGIFTINPYSGVITTQKALDYERTSSYQLIIQATNMAGMASNATVNIQIVDENDNAPVFLFSQYSGSLSEAAPINSIVRSLDNSPLVIRATDADSNRNALLVYQIVESTAKKFFTVDSSTGAIRTIANLDHETIAHFHFHVHVRDSGSPQLTAESPVEVNIEVTDVNDNPPVFTQAVFETILLLPTYVGVEVLKVSATDPDSEVPPELTYSLMEGSLDHFLIDSNSGVLTIKNNNLSKDHYMLIVKVSDGKFYSTSMVTIMVKEAMDSGLHFTQSFYSTSISENNTNITKVAIVNAVGNRLNEPLKYSILNPGNKFKIKSTSGVIQTTGVPFDREEQELYELVVEASRELDHLRVARVVVRVNIEDINDNSPVFVGLPYYAAVQVDAEPGTLIYQVTAIDKDKGPNGEVTYVLQDDYGHFEINPNSGNVILKEAFNSDLSNIEYGVTILAKDGGKPSLSTSVELPITIVNKAMPVFDKPFYTASVNEDIRMNTPILSINATSPEGQGIIYIIIDGDPFKQFNIDFDTGVLKVVSPLDYEVTSAYKLTIRASDALTGARAEVTVDLLVNDVNDNPPIFDQPTYNTTLSEASLIGTPVLQVVSIDADSENNKMVHYQIVQDTYNSTDYFHIDSSSGLILTARMLDHELVQHCTLKVRSIDSGFPSLSSEVLVHIYISDVNDNPPVFNQLIYESYVSELAPRGHFVTCVQASDADSSDFDRLEYSILSGNDRTSFLMDSKSGVITLSNHRKQRMEPLYSLNVSVSDGLFTSTAQVHIRVLGANLYSPAFSQSTYVAEVRENVAAGTKVIHVRATDGDPGTYGQISYAIINDFAKDRFLIDSNGQVITTERLDRENPLEGDVSIFVRALDGGGRTTFCTVRVIVVDENDNAPQFMTVEYRASVRADVGRGHLVTQVQAIDPDDGANSRITYSLYSEASVSVADLLEIDPDNGWMVTKGNFNQLKNTVLSFFVKAVDGGIPVKHSLIPVYIHVLPPETFLPSFTQSQYSFTIAEDTAIGSTVDTLRILPSQNVWFSTVNGERPENNKGGIFVIEQETGTIKLDKRLDRETSPAFHFKVAATIPLDKVDIVFTVDVDIKVLDLNDNKPVFETSSYDTIIMEGMPVGTKLTQVRAIDMDWGANGQVTYSLHSDSQPEKVMEAFNIDSNTGWISTLKDLDHETDPTFTFSVVASDLGEAFSLSSTALVSVRVTDINDNAPVFAQEVYRGNVKESDPPGEVVAVLSTWDRDTSDVNRQVSYHITGGNPRGRFALGLVQSEWKVYVKRPLDREEQDIYFLNITATDGLFVTQAMVEVSVSDVNDNSPVCDQVAYTALLPEDIPSNKIILKVSAKDADIGSNGYIRYSLYGSGNSEFFLDPESGELKTLALLDRERIPVYSLMAKATDGGGRFCQSNIHLILEDVNDNPPVFSSDHYNTCVYENTATKALLTRVQAVDPDIGINRKVVYSLADSAGGVFSIDSSSGIIILEQPLDREQQSSYNISVRATDQSPGQSLSSLTTVTITVLDINDNPPVFERRDYLVTVPEDTSPGTQVLAVFATSKDIGTNAEITYLIRSGNEQGKFKINPKTGGISVSEVLDYELCKRFYLVVEAKDGGTPALSAVATVNINLTDVNDNPPKFSQDVYSAVISEDALVGDSVILLIAEDVDSQPNGQIHFSIVNGDRDNEFTVDPVLGLVKVKKKLDRERVSGYSLLVQAVDSGIPAMSSTATVNIDISDVNDNSPVFTPANYTAVIQENKPVGTSILQLVVTDRDSFHNGPPFSFSILSGNEEEEFVLDPHGILRSAVVFQHTESLEYVLCVQAKDSGKPQQVSHTYIRVRVIEESTHKPTAIPLEIFIVTMEDDFPGGVIGKIHATDQDMYDVLTFALKSEQKSLFKVNSHDGKIIALGGLDSGKYVLNVSVSDGRFQVPIDVVVHVEQLVHEMLQNTVTIRFENVSPEDFVGLHMHGFRRTLRNAVLTQKQDSLRIISIQPVAGTNQLDMLFAVEMHSSEFYKPAYLIQKLSNARRHLENIMRISAILEKNCSGLDCQEQHCEQGLSLDSHALMTYSTARISFVCPRFYRNVRCTCNGGLCPGSNDPCVEKPCPGDMQCVSYEASRRPFLCQCPPGKLGECSGHTSLSFAGNSYIKYRLSENSKEEDFKLALRLRTLQSNGIIMYTRANPCIILKIVDGKLWFQLDCGSGPGILGISGRAVNDGSWHSVFLELNRNFTSLSLDDSYVERRRAPLYFQTLSTESSIYFGALVQADNIRSLTDTRVTQVLSGFQGCLDSVILNNNELPLQNKRSSFAEVVGLTELKLGCVLYPDACKRSPCQHGGSCTGLPSGGYQCTCLSQFTGRNCESEITACFPNPCRNGGSCDPIGNTFICNCKAGLTGVTCEEDINECEREECENGGSCVNVFGSFLCNCTPGYVGQYCGLRPVVVPNIQAGHSYVGKEELIGIAVVLFVIFILVVLFIVFRKKVFRKNYSRNNITLVQDPATAALLNKSNGIPFRNLRGSGDGRNVYQEVGPPQVPVRPMAYTPCFQSDSRSNLDKIVDGLGGEHQEMTTFHPESPRILTARRGVVVCSVAPNLPAVSPCRSDCDSIRKNGWDAGTENKGVDDPGEVTCFAGSNKGSNSEVQSLSSFQSDSGDDNAYHWDTSDWMPGARLSDIEEVPNYENQDGGSAHQGSTRELESDYYLGGYDIDSEYPPPHEEEFLSQDQLPPPLPEDFPDQYEALPPSQPVSLASTLSPDCRRRPQFHPSQYLPPHPFPNETDLVGPPASCEFSTFAVSMNQGTEPTGPADSVSLSLHNSRGTSSSDVSANCGFDDSEVAMSDYESVGELSLASLHIPFVETQHQTQV

SEQ ID NO: 23404 - protein, 1254 aa, Artificial Sequence
  derived and/or modified sequence
MDIIMGHCVGTRPPACCLILLLFKLLATVSQGLPGTGPLGFHFTHSIYNATVYENSAARTYVNSQSRMGITLIDLSWDIKYRIVSGDEEGFFKAEEVIIADFCFLRIRTKGGNSAILNREIQDNYLLIVKGSVRGEDLEAWTKVNIQVLDMNDLRPLFSPTTYSVTIAESTPLRTSVAQVTATDADIGSNGEFYYYFKNKVDLFSVHPTSGVISLSGRLNYDEKNRYDLEILAVDRGMKLYGNNGVSSTAKLYVHIERINEHAPTIHVVTHVPFSLEKEPTYAVVTVDDLDDGANGEIESVSIVAGDPLDQFFLAKEGKWLNEYKIKERKQIDWESFPYGYNLTLQAKDKGSPQKCSALKAVYIGNPTRDTVPIRFEKEVYDVSISEFSPPGVVVAIVKLSPEPIDVEYKLSPGEDAVYFKINPRSGLIVTARPLNTVKKEVYKLEVTNKEGDLKAQVTISIEDANDHTPEFQQPLYDAYVNESVPVGTSVLTVSASDKDKGENGYITYSIASLNLLPFVINQFTGVISTTEELDFESSPEIYRFIVRASDWGSPYRHESEVNVTIRIGNVNDNSPLFEKVACQGVISYDFPVGGHITAVSAIDIDELELVKYKIISGNELGFFYLNPDSGVLQLKKSLTNSGIKNGNFALRITATDGENLADPMSINISVLHGKVSSKSFSCRETRVAQKLAEKLLIKAKANGKLNLEDGFLDFYSINRQGPYFDKSFPSDVAVKEDLPVGANILKIKAYDADSGFNGKVLFTISDGNTDSCFNIDMETGQLKVLMPMDREHTDLYLLNITIYDLGNPQKSSWRLLTINVEDANDNSPVFIQDSYSVNILESSGIGTEIIQVEARDKDLGSNGEVTYSVLTDTQQFAINSSTGIVYVADQLDRESKANYSLKIEARDKAESGQQLFSVVTLKVFLDDVNDCSPAFIPSSYSVKVLEDLPVGTVIAWLETHDPDLGLGGQVRYSLVNDYNGRFEIDKASGAIRLSKELDYEKQQFYNLTVRAKDKGRPVSLSSVSFVEVEVVDVNENLHTPYFPDFAVVGSVKENSRIGTSVLQVTARDEDSGRDGEIQYSIRDGSGLGRFSIDDESGVITAADILDRETMGSYWLTVYATDRGVVPLYSTIEVYIEVEDVNDNAPLTSEPIYYPVVMENSPKDVSVIQIQAEDPDSSSNEKLTYRITSGNPQNFFAINIKTGSCSVAQAGMQWHDHSSLQSRTPGFKGYPCLSLLSSWDYRHAPPCPATFLNS

SEQ ID NO: 23405 - DNA, 19030 bp, Artificial Sequence
  derived and/or modified sequence
gatggaagtatgatgtgatggatataattatgggacactgtgtgggcacacggcctcctgcttgttgcctcatcctcctgcttttcaagcttttggccactgtctcccaggggctgccagggactggacccctgggcttccacttcacacattccatttataatgctaccgtgtatgagaactcagcagcaaggacctacgtcaacagccagagtagaatgggcatcaccttaatagatctatcctgggatatcaaatacagaatagtgtccggagacgaggaaggctttttcaaagcagaggaagtcatcattgcagatttctgttttctcagaataagaactaaaggtggcaattctgccatattaaatagggaaatccaggataattatttattgatagtaaaaggttctgtcagaggagaggatttggaagcatggaccaaagtgaatatacaggttttagatatgaatgatctgagacctttgttttcacccacaacatactctgttaccatagcagaaagcacacctctaaggactagtgttgcccaggtgactgcaacagacgcagatattggttccaatggagaattctactactactttaaaaataaagttgatctcttttcagttcaccccacgagtggtgtcatctccttaagtggtcgattaaattatgatgaaaagaataggtatgatctggaaattttggctgtggaccggggaatgaaactgtatgggaacaatggagtgagcagtactgcaaagctttatgttcacattgagcgcataaatgaacatgccccaacaatccatgtagtcactcatgttcctttctcgttggaaaaagagccaacatatgcagtggtgacagttgatgacttagatgatggagcgaatggagagatcgaatctgtttccattgtggctggggatcctttagatcagttcttcctggctaaggaaggaaagtggttgaatgagtacaagattaaggagaggaagcagattgactgggagagctttccctatggctacaatctcactcttcaagcaaaagacaagggatctcctcaaaaatgttcagcattaaaggcagtctacattggcaaccccacaagagacactgtccccattagatttgaaaaagaagtgtacgatgtgagcataagtgaattttcccctcctggtgtcgtggttgctatagtaaaattaagtcctgaaccgatagatgtggaatacaaattatctcctggtgaggatgcagtgtactttaaaattaatcctcggtcgggtctgattgttacagcacggccactgaatactgttaagaaggaggtttataaactggaggtgacaaacaaggaaggagatttaaaagcacaggtcaccatcagcatagaagatgcaaatgaccacaccccagaatttcagcaaccactgtatgatgcttatgtgaatgaaagtgtcccagtgggaaccagcgttctaacagtttcagcttctgataaggataaaggagaaaatgggtacatcacctatagtatcgctagcctgaatttgttaccatttgtcattaatcagtttacaggtgttattagcacaactgaagaactggattttgaatcctccccagaaatttacagattcattgttagagcctctgactggggttcaccataccgccatgaaagtgaggtcaatgtgactattcgaataggaaatgtcaacgacaacagccctctctttgaaaaagtggcttgccagggagttatttcatatgactttccagttggtggtcacatcacagcagtctcagcgatcgatatcgatgaacttgaacttgtaaagtacaaaatcatttctggaaatgaacttggcttcttttatttaaacccagattctggtgttttacagcttaaaaaatcactgacaaattctggcattaaaaatggcaattttgccctcagaattacagcaactgatggagagaatcttgcagaccccatgtctattaacatttcagtcctacatgggaaagtgtcttcaaagagcttcagttgcagagaaactcgtgtggctcaaaagctggcagagaaactactcattaaggcaaaagcaaatgggaaactgaatctggaagatggatttcttgacttttattcaattaatagacagggaccatattttgacaagtcttttccttctgatgtggctgtaaaggaggatctgccagttggtgctaacattctgaagattaaagcctatgatgccgactctggcttcaatggaaaagtgctatttacaatatcagatggaaatacggatagttgctttaatattgatatggagactgggcagcttaaagtccttatgcccatggatcgagaacacacagacctctatctccttaatatcaccatctatgacttaggtaatccacagaaatcgtcatggagactgctgaccatcaatgtggaggatgctaatgacaatagcccagtttttattcaagacagttactcagttaacattcttgaaagttcaggcattggtactgaaatcattcaagtggaagccagagacaaagacttaggttctaatggtgaagtgacttactcagtcttgacagatacacagcagtttgccatcaatagctcaactggaatcgtttatgtagccgaccagttggaccgggaatccaaagccaattattctttgaaaatagaagccagggacaaggcagagagtggtcagcagctgttttcagttgtcactcttaaagtttttttagatgatgtcaatgactgctccccagctttcattcccagtagctatagtgtgaaggttcttgaagatctccctgttggcactgtcattgcttggcttgagacccatgatccagatcttggactggggggtcaagtgcgctattctttggtcaatgactataatgggagatttgaaatagataaagcaagtggtgccatccgcttgagcaaagagcttgattatgagaaacagcagttctataaccttactgtgcgggccaaagacaaagggcggcctgtctctctgtcatctgtttcctttgttgaggtggaagtggtggatgtcaatgaaaacctccacactccctatttcccagactttgctgttgttggatctgtaaaggaaaactcacgcattggaacaagcgtgctgcaggtgactgctcgagatgaagactccggaagggatggagagatccagtactccatcagggatggcagtggtcttggaaggttcagtatagacgacgagagtggggtcatcactgccgcagacattcttgatcgggagacaatggggtcatactggctaacagtgtatgccacagacaggggcgttgttccactctactccaccattgaggtctacattgaagttgaagatgtgaatgacaatgccccgctgacctcagaacctatatattatcctgttgtcatggaaaactctccaaaggacgtatctgtcattcagatccaggctgaagatcctgactccagttccaatgaaaaactgacatacaggattacaagtggaaatcctcagaatttttttgccatcaatatcaaaacaggtctgattacaacaacttcaaggaaattggatcgagaacagcaggcagaacattttctggaggtgactgtgacagatggtggtccctctccaaaacagtcaaccatttgggtggtggttcaggttctagatgaaaatgacaacaagccccagttcccagagaaggtctaccagatcaagctgccagaacgtgaccgaaagaagagaggagaaccgatttacagggcttttgcatttgatagagatgagggccccaacgcagaaatctcctacagtattgtggatgggaatgatgacggaaagttctttattgaccctaaaactgggatggtttcttctagaaagcagtttacagcaggcagttatgacatcctaacgataaaggcagtggacaatgggcgcccacagaaatcctccacggcccgcctccacattgaatggattaagaaaccacccccttcacctataccattgaccttcgatgagccgttttataacttcacagtcatggaaagtgatagagtgactgaaattgtaggggtggtgtctgtgcagccagctaacacccctctgtggtttgacatagttggggggaattttgacagcgcttttgatgcagagaagggtgttgggacaattgtcatcgcaaaacctttggatgcagagcagaggtccatctataatatgagtgtggaagtcaccgatgggacaaatgttgctgttactcaggtatttatcaaagtgctggataataatgataatggcccagaattctctcagccgaattacgatgtgacaatttccgaggatgtgcttccagacacggagatcctgcagattgaagccacagatagagatgagaagcacaagctgagctacactgttcatagcagcatcgactccatcagcatgagaaaattccggattgaccctagcactggcgtgctctatactgccgagaggctggaccatgaggcccaggacaagcacattctcaacataatggtcagagatcaggagtttccttatcgaagaaacttggcccgagtcattgtgaatgtggaggatgctaatgatcacagtccttattttaccaacccactgtatgaagcgtctgtgtttgaatctgctgctctgggatcagctgttctgcaagtgacggctctggacaaagacaaaggagaaaatgcagaactcatatataccatagaagcagggaacactgggaacatgtttaagatcgaaccggtcctaggcatcatcaccatttgcaaagaaccagacatgacgacgatgggtcagtttgtcctatccatcaaagtcacagatcagggatccccgccaatgtctgctactgcaattgtgcgcatttccgtcaccatgtctgacaattctcaccccaagttcattcacaaagactaccaagcagaagtaaatgaaaatgttgacattggaacatcagtcattctaatctctgccatcagtcaatctaccctcatttatgaagtcaaagatggagacattaatgggatctttaccataaatccatattctggagtcatcaccactcagaaggccctggattatgagcgcacatcctcttatcaactcatcattcaggccaccaatatggcaggaatggcttccaatgctacagtcaatattcagattgttgatgaaaatgataatgccccagtttttctcttttctcaatactcaggcagcctaagtgaggctgccccaattaatagcattgtcaggagcttggataacagcccactggtgattcgagccacagatgctgacagcaaccggaatgctctgcttgtgtatcagattgtggagtcaacagcaaaaaagtttttcacggtggactccagtacaggtgcaatcagaacaattgccaacctggaccatgaaaccattgcccatttccattttcatgtgcatgtgagagacagtggtagcccccaactgactgcagagagtcccgttgaagtcaacattgaggtgacagatgtgaatgataacccacctgtttttactcaggctgtgtttgagactatcttacttctacctacctatgttggagtggaggttctgaaagttagtgccacagatcctgactctgaggtaccccctgaactgacatacagcctaatggaaggcagtttggatcattttttaattgactcaaacagtggagtacttaccataaaaaacaacaacctctccaaggatcactacatgctgatagttaaggtgtctgatggaaagttctacagtacctccatggtcaccatcatggttaaagaagccatggacagcggcctccactttacacaaagcttctattccacctcaatctcagagaacaacactaacataaccaaagttgctattgtcaatgcagttggaaatcgccttaatgagcccttaaaatacagcatcttaaacccaggaaataagttcaagataaaatctacctcaggggtcattcagacgactggagtcccctttgaccgtgaagaacaagagttatatgagctggtggtagaagccagccgtgagctggaccatctgcgtgtggccagagtggtggtcagggttaacattgaagacataaatgacaattctccagtctttgtgggcctcccatactatgctgctgttcaagtggatgcggaacccgggactctgatttatcaggtgacagccattgacaaagataaaggtccaaatggagaagtgacctatgtcctgcaggatgactatggccactttgaaattaaccctaattcagggaatgttattttaaaggaagcattcaactctgacttgtccaacattgagtatggagtcaccatcctagccaaggatggcggaaaaccttctttgtctacatctgtggagcttcccatcactattgtcaacaaagcaatgcctgtgtttgataagcccttttatacagcatctgtcaatgaagacatcagaatgaacacacccatcctaagcatcaatgccaccagtccagaaggccaaggcatcatatatatcattatcgatggggacccttttaaacagtttaacattgactttgacactggggtcctgaaagttgttagccctttggattatgaagttacatctgcttacaagctgacaataagagccagcgacgcccttactggtgctagggctgaagtcactgttgacttgctagttaatgatgtaaatgacaacccccctattttcgatcagcctacatacaatacaacactatcagaagcatctcttattgggacacctgttttacaagttgtctctattgatgcagactcagaaaacaataaaatggtacattatcagattgtccaggatacctacaatagcacagattattttcacatagatagctcaagtggcttaatcctgacagcacgaatgctggaccatgagttagtacaacactgcactttgaaagtcagatcaatagatagtggcttcccatcactgagcagtgaggttctcgttcatatctacatctctgatgtaaatgacaaccctccagtttttaatcagctcatttatgagtcatatgtgagtgaattagccccccggggccattttgtaacctgtgtacaagcctctgatgcagacagctctgattttgaccggttggaatatagcattttatctgggaatgaccggacgagctttctgatggacagcaagagtggagttatcacattgtccaaccatcggaagcagcggatggagcctctgtacagtctcaatgtgtctgtctctgatgggttgttcaccagcactgcacaggtgcatattagggtacttggggctaacttgtacagccctgccttttcacaaagcacatacgtagctgaggtgagagagaacgtggctgcaggaacaaaggtaattcatgttcgagccacagatggtgatccagggacttatgggcagatcagctatgccatcatcaatgactttgccaaggatcgattcctcatagacagcaatgggcaggtcatcaccacagaaaggctagaccgggaaaaccctctagaaggggatgttagtatttttgtgagggcccttgatggtggagggagaacaactttctgcactgtgagagtgattgttgtggatgaaaatgacaatgctccccagttcatgacagtggaatatagagccagtgtcagggcagatgttggaaggggccacttggtcactcaagttcaagccatagatcccgatgatggagcaaattcaaggattacttattccctctatagcgaggcctctgtttcagtggccgacctcctggaaatcgatcctgacaatggctggatggtcacaaagggtaattttaaccagctgaaaaatacagtgctttcgttctttgtcaaagcagtagatgggggcatcccagtaaagcactccctcattcctgtctatatccacgtcttgccccctgaaacgttcttgccatcattcacccagtctcagtattcctttaccattgcagaagatacagccattgggagtacagtggacaccctgaggattttgcccagtcagaatgtctggttcagcacagttaatggggaacggccagaaaataacaaagggggcatattcgtcatagaacaggaaacaggcactattaagcttgacaaacgccttgaccgtgaaaccagcccagctttccactttaaagtagcagccactatacccctggacaaagtagacattgtgtttactgtggatgtagatatcaaggtattggatttgaatgacaacaagccagtctttgaaacttcaagctatgacaccattataatggaagggatgcctgttggcaccaaactcacacaagtgagagctattgatatggactggggagccaatggacaagtcacttactccctccactcggattcccagcccgaaaaggtaatggaagcattcaatattgacagcaacacgggctggatcagtaccttgaaggacctagatcacgagacagaccccacattcaccttctctgtggtggcctctgaccttggagaggcattctctctttcctccacggccttggtctctgtcagagtgacagatataaatgacaatgcaccagtcttcgcgcaggaagtgtaccgagggaatgtgaaggagagcgacccaccgggcgaggtggtagccgtcctcagcacctgggacagagacacatccgacgttaatcgccaagtgagctaccatattacaggaggaaaccctcgaggaaggtttgctctgggcctggtgcaaagtgagtggaaggtctatgtgaagaggcctctagacagagaagaacaggacatttactttctcaatatcactgccactgatgggctttttgtcacacaggccatggtggaagtgagcgtcagtgatgtgaatgacaatagcccagtgtgtgatcaggttgcatatacagcattacttcctgaagacattccatcaaataaaatcatcctgaaagtcagtgcaaaggatgctgatattggatccaatggatatatacgatactcactctatggatctggaaacagtgaattttttctagatccagaaagtggcgagttaaaaaccttggctctgttggaccgggagaggatccccgtgtacagcctgatggccaaggccactgacgggggtggcaggttctgccagtccaacatccacctaatcctggaggatgtgaatgataacccccctgtgttttcttctgaccactacaacacctgtgtctatgagaacacagccaccaaggctctgttgaccagagttcaagccgtggaccccgacattggcatcaataggaaggtcgtgtactccctggcagactcagctggtggggtcttctccattgacagctcatctggcatcatcatcctggagcagccactggaccgtgagcagcagtcttcgtacaacatcagcgtgcgggccactgaccagagtcctggacagtccctgtcctctctcactactgtcaccatcaccgttctggacattaatgacaacccccctgtgtttgagaggagggactacctggtgacggtgcctgaggacacctcccctggcacccaagtccttgctgtttttgccaccagcaaagatattggcacaaatgctgagatcacttatctcatccggtctgggaacgaacaagggaaatttaagatcaaccccaagacagggggtatttctgtctctgaagtcctggactatgaattatgcaaaaggttttacctggtagtggaagccaaagatgggggcaccccagctctcagcgctgtggccactgtcaacatcaacctcacagatgttaatgacaaccctcccaagttcagccaagacgtctacagtgcggttatcagtgaagacgccttggtgggagactctgtcattttgctaatagcagaagatgtagacagccagcccaacggacagattcatttttccattgtgaatggagatcgggacaatgaatttactgtagatcctgtcttgggacttgtgaaagttaagaagaaattggaccgggaacgggtgtctggatactctctgcttgtccaggccgtagacagtggcattcctgcaatgtcatcaactgcaactgtcaacattgatatttctgatgtgaatgacaacagcccggtgtttacacctgccaactatactgctgtgattcaggaaaataagccagtgggcaccagcatcttgcagctggtggtgacagacagagactcctttcacaatgggcctcccttttcattctctattttgtcgggaaatgaagaggaggagtttgtgttggaccctcatgggatcttgcggtcggctgtggtcttccagcacacagagtctctggaatacgtgttgtgtgtccaggcaaaggattcaggcaaaccccagcaagtttctcacacttacatccgcgtgcgagtcattgaggaaagcacccacaagcccacagccattcccctggaaattttcattgtcaccatggaggatgactttcctggtggggtcattgggaagattcatgccacagatcaagacatgtatgatgtgctcacatttgccctgaaatcggagcagaaaagcttatttaaagtgaacagtcacgatgggaaaatcatcgccctgggaggcctggacagcggcaagtatgtcctgaatgtgtctgtgagtgatggtcgcttccaggtacccattgatgtggtcgtgcatgtggagcagttggtgcatgagatgctgcagaacactgtcaccatccgctttgaaaatgtgtcccctgaggacttcgtggggctgcacatgcatgggttccggcgcaccctgcggaatgcagtcctcacccagaagcaggacagcctgcgcatcatcagcatccagcccgtggcaggcaccaaccaactggacatgctgtttgcggtggagatgcacagcagcgagttctacaagccagcctacctgatccagaagctgtccaatgctagaagacacctggagaatatcatgcgcatctcagccatcttggagaagaactgctcagggctggactgtcaggaacagcattgtgagcaaggcttgtcactcgattcccacgcgctcatgacctacagcacggctcgcatcagctttgtgtgtccgcgtttctacaggaacgtgcgttgcacctgcaatggaggactgtgtccggggtccaacgatccttgtgtggagaagccgtgtccaggggacatgcagtgtgtcagttatgaagccagcaggagaccgttcctctgccagtgtccaccagggaagctcggagagtgctcagggcacacttctctcagctttgctggaaacagttacatcaaatatcggctttctgaaaatagcaaagaagaggatttcaaactagctctgcgtcttcgaacactgcaaagcaatgggattataatgtacaccagagcaaatccctgcataattctgaagattgtggatggcaagctgtggttccagctggactgcggcagcggccctggaatcttgggcatctcgggccgtgctgtcaacgacgggagctggcactcggtcttcctggagctcaaccgcaatttcacgagcctgtccctggatgacagctacgtggagcggcgccgggcgcccctctacttccagacgctgagcactgagagtagcatctacttcggcgccctggtgcaagcggataacatccgcagcctgactgacacgcgggtcacgcaggtgctcagcggcttccagggctgcctggactcggtgatactgaataacaatgagctgccgctgcagaacaagcgcagcagcttcgcggaggtggtgggcctgacggagctgaagctgggctgcgtgctctatcccgacgcctgcaagcgcagcccgtgccagcacgggggcagctgcactggcctgccatcggggggctatcagtgtacctgtctctcacagtttacggggagaaactgtgaatctgagattacagcctgcttcccaaacccctgccggaatggaggatcctgcgatccaataggaaacactttcatctgcaattgtaaagctgggctcactggagtcacgtgtgaggaggacatcaatgagtgcgaacgagaggagtgtgagaacggaggctcctgcgtgaacgtgttcggctccttcctctgcaactgcacgccgggctacgtgggccagtactgcgggctgcgccccgtggtggtacccaatatccaggctggccactcctacgtggggaaggaggagctcatcggcatcgccgtggtcctcttcgtcatcttcatcctggtggttctcttcatagtcttccgcaagaaggtcttccgcaagaactactcccgcaacaacatcacgctagtgcaggacccggccaccgccgccctgcttaacaagagcaatggcatcccgttccggaacctgcgcggcagtggggacggccgcaacgtctaccaggaggtggggcccccgcaggtccccgtgcgccccatggcctacacaccctgcttccagagtgactccaggagcaacctggataagatcgtggacgggctgggaggcgagcaccaggaaatgaccacgtttcaccctgagtcgccccgcatcctgacagcccggcggggcgtggtcgtgtgcagtgtggcccccaacctccccgccgtgtcaccctgccgctccgactgcgactccatccggaagaatggctgggacgcgggaactgagaacaaaggggttgatgacccgggagaagtgacctgctttgcaggtagtaataaaggcagcaactctgaagttcagtccctcagctccttccagtcagattctggtgacgacaatgcctatcactgggacacctctgattggatgccaggggcccgcctgtcggacatagaggaagtgcccaactatgagaaccaggatggagggtctgcacaccaggggagcacacgggagctggagagcgattactacctgggtggttatgacattgacagtgaatacccaccccctcatgaagaggagttcttgagtcaggaccagctgcctcctcctctcccggaggacttcccagaccaatatgaggccctgccaccctcccagcctgtctccctggccagcacactgagcccagactgcaggagaaggccccagtttcatcctagccagtatctccctcctcacccattccccaacgaaacggatttggtgggcccgcctgccagctgtgaatttagtacttttgctgtgagcatgaaccagggcacagagcccacaggcccagcagacagcgtgtctctgtccttgcacaattccagaggcacctcatcctcggatgtgtctgccaactgcggctttgacgattccgaagtagccatgagtgactacgagagcgtgggagagctcagcctcgccagccttcacattccctttgtggagactcagcatcagactcaagtgtagacatcacatcttgggtacttcaccctgtttgttacagaaaagtggaagcagattggctgggcttctgtcccagtggagcattgtctgtggaatgagaagggaatactgtatttttccactagaaacttcttcacaagtcatactgtcccaacaagcaagcttgattccagttgggtgaaaatgaaaggctcagaaattgtttttgagaggtgactggtaatccttgatgtaggtacctatgttcacagctaaaaatgcaaagagggaaaaattatttcacccactaagttatacagccagtcttgtatggctttgtgcagtattgtgccctggaaagtgttacagcatcagtccttgcagtattaaaaactggcaacaatcaaagaggcattgttgcatgtaattttgagccaatgaaatgaaaatagtagtaatgattgttggaaaagttagtctcttaggcgaaagagaagagaaacaaatattattaaacaaaccagaaaatgggctgaagccttttaaatcaactctatttttttgataagctgcccaattttcagctataaaattaggcttgaataacatgtttagtatgctcagttatttctgtttgtttgtgttaagcatccaatctaatatagttgggttttatgatcttcaagaaaggtatcaatgaagagcaacatgaggctttttgggttccatttggtgggtgggggaggaagttaaagttgtttgaacattagaaagaatgtgattatctggttggttttgtgttttctggtaaatattccagttggtaaatctaacattgctacagaagttggctttgttcatatagcttctctacaattagatatttttagaagtttaagcaaaactcacaaattcaggggggaaaaaagaaaaaacgataccttcaaagtttgcggcctagataatcacaattcttcataatgcagaggaaaggtgtctgttattctaaatcggtagcatcaccattataaatacaattatgttaagaaaagaggaaagtagactagttattgtgtataaattataatagtgtgtgtgtgtctgggcctatgtacaaatatgtgcttgcactcagtaaggctgctcttgaggaaagctaatgtgaaggttttgggaaatggaccatgttgaaaattctgccggcgagcatggcatacctttcaatttctctgatctctatggtgttagagaaacatcaaatgccatattttactctggttcagttaactttattttggtactgccaataaagcaaaattgtgcttttttttttttttctcaagacagagtcttgctctgtcacccaggctagagtgcaatggcatgatctcagctcactgcaatctccacctcctgggttcaagcgattctcctgcctcagcctcccaggttgctggggttacaggtgtgtgccaccacgcctggctaattttttgtatttttagtagagatggggtttcaccatgttggccaggctggtctcaaactcctgacctcgtaatccacctgccgtggcctcccaaagtgctgggattacaggcatgagccaccgtgcccagcccaaaactgtgctttttaaaaacagtattttgttataattttccagaacttacctctgttttaaaagtgtgtaatgtttgattacaccctgggattcccttctcatctgtgggctttggccatgatttccaaaattaacaggagaatcattccactggaaatataacaatccagtcctcaaaactgaaagttgacaggttgagggactttccttttttgcttcaatcagattacggccgcctgtgcagtggccatggtaaatatatgcatatttgcactatctgcttaatgagcaaatctgtgtccacagtttctgatgacatatggcattggtgtgtaaattgtactgtccctagtctgtgcattattcactcagacatatttttagttatttcaattgcgtttaatccacttcttttttatgagtcagtgtttctgaatgtttatgcaaaaaaaaaaatcctttttcattcccaaactttctaagtaagtggatacactacacttcacaagttttccagcctttctcttcctgtctcttggtcagacctactcatggaggtattatccacactgtgatcttgaaataaatgaatttcactaaggctgctttcgagaacaaagtctttggtatttttcttatgtaagaagcacatttgcaagaatcatggaaaaaaatgacaaactaatggcctagaatagagtgactgctacactttaagtaatgcaatgacataaaaaccatcaaagtaaaaccaacatgtcatttcctgcccccaggaaatattagaatgagattaatgctgatgagtccctactgcttacacagcatctctttgagggagaatgcctgactgacacagtaatgaaagaataaatagatcctaatgcagtcatgaagccactgaagaaaattgtgcccaccctttgctgtgacctatataaaatatctctttctttgggatatcatcccctgattttctgcagaatagctctgcagctaaatatataccaggcaagcatgtattgtgttttgatttattatctttaaacacatgatatctcttcactttttggaaagttagatttctctgtagattatgaaatgctttgcagtcaggccaagatgctactaggtggggatgatcactaattcaaaaaagctggaagaatcctatttgctagtccaaactccttattttatcaaagaggaaacatacccagagtgggaaagagacttgcccaagcccacagaggaagttaattcgcttaacaaggagtagaacccatccatctagccaatattctttttacatcatattgttcacccctacactgccttgagcatgggagtcacctggttctgatggaccctctgacttccaccattccttctttggaatatgctataaaagaaaattcatggagaatatttttctgaaagcctcatgatcttatgtttccttgcagtccccctagggagaggggttatagaattcatacatttctgtagacattcatcgaaatgctgcttttgccaaatgaatgtttgtataatagggatgaaatgataattacagagttcagctcagaccagtcatcagttgtagtgaaactttgattatactgttacctactggttgcatttttggttttggttttgcatttttttcttcccacaaacactggctactctttgtcctaccccctccaccatgatgaaccatgtggaaactatttaaatcaattaatgtctttctcatttttcgaacatgtatgtgccacctcctggaagccatttcccataatctgttgtaggcactttactagtattgcacacattctggttaggttgagaatagctagactcttggtgctcgtcatatagtaagcaagaacttgggagtaataaaaggtgaataaaatgcatgcttcatttattccctttcctctatgaatattttgctgctgcattctagtctatgccagctttccatgtacccttggcctgcctattcatgaaatgccatataaaagacttaggaacatgagtaggtggtccatgctttgaggttcatccaattagggaataaatgtgaaaggctggaaagggaactagtttctgggatttgcctggaacttcccttggacattactagcacattctggaaaaaaagcaagttgaacatatctaccatcagtcctctcctacttacttcccaccccaccctatccactacccccactgatgctatgtttgcatcatcaaagtcaggggaattgagaaaagagattatcaaaataaattattaaaatccagaaaacagttttatgtgaagtaattcaggaagatctagtgttcattttgcatggattgtccagataattggctcttcactccgctgccttcccagtgcacaggtattgctaaagtggttaggctttaatgttttatgtttttagtttcaaactatgggaaatggagatttgaagaggcatttattccttgtcatcattttgtgtgctctgtgagaaggtggttatatgtttttgctggtttgtgtcccacagtgttcaactgcacattattctgatgaaaatccacaatgtctttgagcttctggttgtgtaatgctggggtttaaagtcaccatttgtgggtttggcatcaattaatatttagccagctggctaagagataggaaaagaatatgatatttctttccttatgtaataatgaaaagcaataattacaagtaggtaataatacacaaaggccataattagtctcttctagtgtttagaatgcacttgagaatcgtagagtcatttggagcgtgtttggaccaattagtatgtactgtagtacccttctggcaaacaaataactgaattgctactatttaacaatcttatgagcccacactactgcattttgggagtggcaaatgtgtttggaaatggaagcagttctttttaagcactgtatcagagagattgtcttgtacgtttgcctgttgcaaacaggctggtttgtaaaagatgtatgttttggtgtttgaaatgtttataaaattgtatataaatggtttcaattttccaggcttttgtagatactatatttgatgcctatcaggatgctttaatttggggggtcgaatataattgtaagtcatccacgctgttggtctgcaaacttttgaggtaactacacacacacacacacacacaaggattttagatttgaaaatgatgttttttactcatttcaaaatgtactgtaacctttctttggttcttactgttttcatttaactttctctgttttcaagaaaaattgtctttattgacatttgtaaaaaagaatgtgttttgcccagttattaagtattttatttttatgcaatttcagaatcacaatgaggtatgccatttcttcatatacatgcacattcacctcaacttgcacacacatcacacaccaaaccttatgcaaaggggaaagctaacacttagagtggattttgtcccttaaggaaatggattgttcctgcatatattgctggtggcagtattcagtcttgtgttctttttctaaaaaaaaagaaaagaaaagaaaaaaaaaacaaaagcaaacaaaaaaaaagacagccaaaaaaaagaaacaacaacaacaaaaaaaaacacaacagtgtacaggtttgtaactgccaaaatttgatggttaaaacaagttttcaagt

SEQ ID NO: 23406 - DNA, 13674 bp, Artificial Sequence
  derived and/or modified sequence
atggacatcattatggggcattgtgtggggactcgtccccctgcttgctgcctcatactgctactgttcaaactgttggctaccgtctcccagggcttgcctggtacgggaccgcttgggttccatttcacacactctatctacaacgccaccgtgtatgaaaactctgccgcaaggacctacgtcaacagccagtcccgcatgggaatcaccctgatcgacttaagttgggatattaagtatcgaatcgttagcggagacgaggaaggattctttaaagcggaagaggtaattatcgccgacttctgctttctgcggatccgaacaaaaggcgggaattcagcaatcctcaatcgcgagatccaggacaattatctgttgatcgtcaaggggagcgtgcgaggcgaggatctggaagcctggaccaaagttaatatacaggttctggacatgaacgacctgcgccccctgttcagcccaaccacctatagtgttactattgccgaatcgacacctctccggacttccgtggctcaggtaacagccaccgatgccgatatcgggagcaatggggagttttactactattttaaaaacaaagtggacctgttttcggttcatccaacttccggagtcataagcctgagcgggcgtctgaattacgacgagaaaaatagatatgaccttgaaatactcgcggtcgatcgcggtatgaagttatatgggaacaatggagtcagcagtacagctaagctgtatgtccatatagaaaggattaatgaacatgcaccaacgattcacgtcgtgacacacgtgccatttagcttggaaaaagagcctacctacgcggtcgtcaccgttgacgacctagacgacggtgcaaatggcgagatcgaatcggtgtcaattgtggcgggagatcccctagatcagttcttcctcgccaaagagggtaagtggctcaacgagtataaaatcaaggaaaggaagcagatcgactgggaaagttttccctatggttacaatctaactttacaagccaaagacaaaggcagcccacaaaaatgcagtgccctgaaggctgtgtacatcgggaacccaaccagagatacagtgcctatacgtttcgagaaagaagtgtatgacgttagcatatctgagttctcgccaccaggcgtcgtggtggccatagtaaagctgtcccctgagcccattgacgtggaatacaaattgagccccggagaagacgccgtctacttcaaaataaaccctcgtagcgggctgatcgtgacggcgcgccctctgaacaccgtgaagaaagaggtgtataagctcgaggtcacaaacaaagaaggagatctaaaggcccaagttaccatcagcatcgaagatgccaatgatcacactcctgaatttcaacaacccctgtacgacgcctatgtgaacgagtcggtaccagtcggaacttcagtgctgaccgtatctgcttcagacaaagataagggagaaaacggttatattacctactcaattgccagcctgaatctcctgcctttcgtcattaatcagttcaccggcgtgatatctacaacagaagaactggacttcgaaagtagcccagagatatatcgatttatcgtccgcgcttccgattggggtagtccttatcgacacgaaagtgaggtcaacgttaccatccggattggcaacgtgaatgacaacagtcccttgtttgagaaggtagcatgtcagggagtgattagctacgactttcctgtgggagggcacatcaccgctgtgagcgctattgacatcgatgagctcgagttggtgaaatataaaattattagtgggaatgaactcggctttttctatttgaatcccgactccggggtgcttcaactgaaaaagagtctcacaaactctggtattaagaacggtaactttgctttacgaataaccgctaccgatggggaaaaccttgctgatccaatgtcgatcaacatttccgtcctgcacggtaaggtgagttctaaatcattcagttgtcgagagactagagtcgcccaaaaactggcagagaagttacttattaaggcgaaggcaaacgggaagctcaacctggaagatggatttctggacttttatagcatcaaccgccaggggccgtatttcgacaagagcttcccatcagatgtggccgtgaaagaagacctgcctgtaggcgcaaacatcctgaagatcaaagcgtacgatgccgacagtggattcaacggcaaagtactgttcacaatctcagacgggaataccgattcatgcttcaacatcgatatggagacagggcagctgaaagtcttgatgccgatggatagagagcacaccgatctgtacctgctaaacatcacgatttatgacctgggaaatccacagaaatccagctggcgcttactcacaattaacgtagaggatgcaaacgacaatagccctgtatttatacaggacagctactcagtgaacattctcgaaagttcaggaattgggaccgaaataatccaggtagaagcaagagacaaggatcttggcagtaatggcgaagtgacttactccgtgttaactgatacacagcagtttgccatcaacagtagcaccgggattgtttacgtggccgaccagctggatagagaatctaaagcaaactactccctcaaaattgaggcccgcgataaagccgagtcaggacagcagctctttagcgtcgtaacgcttaaggtgtttcttgatgatgtgaacgactgctcccccgctttcataccctcatcttactcagtaaaagtgctggaggatctccccgtgggtaccgtcatcgcttggctcgaaacgcatgaccctgatctaggcttgggcggccaggtgcgctacagcctggtcaatgactacaacggcaggttcgagatcgacaaagcctcaggagccatccgcctcagtaaagagctggattacgagaaacagcagttttataacctaactgtgagagccaaagataagggccgcccggtaagcttgtcttccgtttccttcgtggaagtggaggtggtcgacgtcaacgagaacctgcataccccttacttccccgactttgccgtcgtggggagcgtgaaagagaacagccgaatcggcacatcggtattacaagtaacggcgcgcgacgaggacagcggcagagacggtgaaatacagtacagcatacgcgacggcagcggcctgggcaggttttccatcgacgatgagagcggtgtcattaccgccgctgacatcctggatcgggaaacaatgggctcttattggctcactgtctatgccaccgatcggggcgtggtgcccctctactccacaattgaggtgtatatcgaggttgaggatgtgaatgataacgccccgctcacgtcggaacccatctactatcccgttgtgatggagaatagtcccaaggacgtctccgttattcagattcaggcagaggacccagacagttcgagcaacgagaaactcacctatcggatcacatccggcaatccacagaactttttcgccatcaacatcaaaaccggattaatcaccaccaccagcagaaaactagatcgcgaacaacaggccgaacatttcctggaagtcaccgtgaccgatgggggcccaagcccgaagcagtcaaccatttgggtggtggtgcaagtgctggatgagaatgacaataaaccccagtttcccgaaaaggtctatcagattaagctacctgagcgagatcggaagaaaagaggggaaccaatttacagagctttcgctttcgatcgcgacgaaggccctaacgcagagattagttatagtatcgtcgacggaaacgatgacggcaaattctttatcgacccaaagacgggtatggtgtcatctaggaagcagttcacagccggctcttacgatatcttgacaatcaaggccgtagacaatggccggcctcagaaatctagtaccgctcgacttcacatcgaatggattaagaaaccaccgccaagtcctatcccactcacattcgacgagccattctataacttcacagtcatggaaagtgaccgagtgacggagatcgtgggggtcgtctccgtgcagcccgcaaatacacctttgtggttcgatatagttggaggcaacttcgactccgccttcgacgcagaaaagggagtggggacaattgtgatcgctaaaccactggacgcggagcagcggtccatttataatatgagtgtggaagtcacagacggtactaacgtcgccgtgactcaggtctttattaaggtgttggataacaacgacaatggcccagaattttcccagcccaattatgacgttacaatcagcgaggacgtgcttcctgacactgagatactgcagatcgaagccactgatcgggacgagaaacacaagctgagttacacagttcactcttccatagatagtatcagcatgcgcaaattccgaattgatcccagcacaggggtcctttacacagcagaacgactagaccacgaagcccaggataaacatatcctgaacataatggtgcgggatcaagagttcccttaccgccgcaacttggctcgggtaatcgtaaacgtcgaagatgccaacgaccattccccttactttacaaatcctctttacgaagcatcagtgtttgagtccgctgccctgggatcagcggtgctacaggtgaccgccctggataaggataaaggggaaaacgcagaactgatttatacgattgaggccggcaatactggcaatatgtttaaaatcgagccagtcctgggaattatcactatttgtaaggagcccgatatgacgaccatgggccagttcgtactctcgatcaaggtgacagatcagggtagtcctccgatgagtgccactgccatcgtcagaatctccgtgaccatgtcagataactcacatcctaaattcattcacaaggactatcaagcagaggtgaatgaaaatgtggacattgggaccagtgtgattctgatttcagctatctctcagagtacgctaatttacgaagtgaaagatggtgatattaatgggatttttaccataaatccatactcaggggttattacaacccagaaggctctcgactacgagagaaccagctcctaccagctcattattcaggctaccaacatggctggcatggcctccaacgcaactgtgaatatacagatcgttgacgaaaacgataacgcccctgtctttttattctctcagtactcgggaagtctgagcgaagctgctccgattaatagcatcgtgagaagccttgacaattccccacttgttatccgcgccaccgatgccgattccaatcgtaacgctttgttagtctaccagattgtcgagagcactgcaaaaaagttcttcaccgtggactcttctaccggggccatccgcactatcgccaacttggatcacgaaacgattgcccacttccactttcatgtgcatgtcagggactctggatctccacagctgaccgccgaaagcccagtcgaagtgaatatcgaggtgactgatgtcaacgacaacccaccagtttttacgcaagccgtgtttgagaccatcctcctgctgccaacttacgtaggagtggaagttttgaaggtgagcgcgacagatcccgactctgaggtgcccccagaacttacatatagtctgatggaaggatccttagaccacttcctcatcgatagcaattccggcgtcctcaccatcaagaacaacaacttaagtaaggaccactacatgctgatcgtcaaggtgtccgatggtaagttctacagcaccagcatggtgactatcatggtgaaagaagccatggatagtggactccacttcacccagtctttttactcaacttccatttctgagaacaacacaaatatcacaaaggtggctattgtcaacgcagtcggtaatcgcttaaacgagccactgaaatattcgatcctgaacccaggcaataagtttaagatcaaatcaacttccggggtcatccagaccacaggagttccctttgatcgggaagagcaggagctgtatgaactcgtggtcgaagcctccagggagctcgatcacctacgcgttgcccgggtagtcgtaagggtaaacattgaagatatcaatgacaatagtcccgtctttgtagggcttccctattacgcagccgttcaggtggatgcggagcccggcactcttatctatcaggtgactgcaatcgacaaggacaagggccctaacggcgaggtgacgtacgtgttgcaggatgattacggacactttgagattaaccctaattctgggaatgtcatactgaaagaggcgttcaattctgatttaagcaacatcgagtatggtgtcacaattcttgctaaagatgggggcaaaccctctctgagcacttccgtggaactaccaatcaccatcgttaataaagctatgccagtctttgacaaaccattttatactgcaagtgttaatgaggacattcgaatgaatacacccatcctctccataaacgcaacaagccccgaaggacaggggattatctacattataatcgacggggatccctttaagcaattcaacatagacttcgacaccggcgtcctgaaggtagtgtcgccacttgactatgaagttacttccgcatataaattgaccatcagagcatccgacgcgcttacaggggccagagctgaagtcactgtggatctcctcgtcaacgatgtgaacgataaccccccaatatttgatcagccgacatataacaccaccctgagtgaggcttcccttattggaacccccgtcctgcaggtagtgagtatcgacgccgactccgagaacaataaaatggtacattaccagatagtccaggacacatataattccactgattattttcacattgacagtagctcagggctgattctcacagcccggatgctggatcatgaactagtacaacactgcaccctgaaggtgaggtcgatagactctggctttccatccctctcctccgaagtcctggtgcatatatatataagcgacgtgaatgataacccgccggtttttaatcagctcatttatgagtcttatgtgagcgagctggcaccacggggccatttcgtgacttgcgtacaagcctccgatgccgactcctccgactttgatcgcctggagtactctatcttgtcaggaaatgacagaacaagtttccttatggactcgaaatcgggagtgataaccctgtctaaccacaggaagcagcgcatggagccgttgtactcgctaaacgtttctgttagtgatggtctgttcaccagtacagcacaggtccacatcagagttctgggagcgaacttatattctccagccttcagtcagagtacttacgttgccgaagtaagggagaatgtcgccgccggaaccaaggtgatccacgtcagagcaactgacggagaccccgggacatacggacaaatctcgtacgctataattaacgattttgctaaggatcgctttttgatcgatagtaacggtcaggtgataacaactgagagactggatagggagaaccctctagaaggtgatgtgagcatattcgtgcgggctttagatggaggcgggaggaccactttctgcaccgtaagggttatcgtcgtggacgaaaacgacaacgcgccacagttcatgacagtggaatacagggcctccgttcgggcagatgtaggtcggggacatctagttacacaagtgcaggctattgatcctgacgatggggcaaacagtcgcataacgtatagcttatactccgaagcctctgtttctgtggccgatcttctggagattgatcctgataacggttggatggtaacaaagggcaatttcaaccagctgaagaataccgtactgtctttttttgttaaagcagtagatggcggaattccagtaaaacattctctgatcccagtttacattcatgttctgcctccagaaacctttctgccttcttttacacagagtcagtatagtttcaccatcgctgaggatactgctataggttctacggtagacacgttgcggattctcccaagccagaatgtgtggtttagcaccgtgaacggtgagcgccccgagaacaataagggcggcatcttcgtcattgaacaggagactggaacaattaagctggacaaacgtctggaccgcgagacatcccctgcttttcacttcaaagtggctgccactataccactggacaaggttgacatagtgttcacagtggatgttgatatcaaggtcctcgacctcaatgataacaagcccgtttttgagacctccagttacgatacgatcattatggaaggaatgcctgtaggcaccaagcttacccaggttcgcgccatcgacatggactggggcgctaatgggcaggtcacctattcactccactccgacagtcaacctgagaaagtgatggaggcttttaatatcgactcaaatacaggatggattagtaccctcaaggacctggaccacgagacggatccaacattcacgtttagtgtggtcgcgagtgacctgggagaggccttctcattgagctcaactgctctcgtgtctgtgcgcgttacagatatcaacgataacgcccctgttttcgcccaggaagtgtaccggggtaacgtgaaagaaagcgatcctccaggggaggtcgttgcggtactatctacttgggatcgggatacaagcgacgttaatcggcaggtttcgtaccatattaccgggggaaatccacgcggcagattcgcacttggactggtgcagtccgaatggaaggtttatgtgaaacggcctctggatcgcgaggagcaagacatatactttctaaacatcactgcaactgatggcctgtttgtgactcaggcaatggtggaggtgagcgtaagtgatgtcaacgataacagcccagtttgtgatcaggtggcttacaccgccttgttgcccgaagatatacccagcaataagatcattctgaaggtgtccgcgaaggacgccgatatcgggagcaacgggtacatcagatacagcctctatggaagcggtaattcagaatttttcctcgatcccgagtcgggtgaacttaagacattggccttgctggatagggagcgtatacccgtgtactccctgatggctaaagccacagacggagggggacgtttttgccaatctaatattcatctgatcctcgaggatgtaaatgacaaccctcccgtgttcagctctgatcattacaatacttgtgtgtacgagaacaccgccaccaaggcactgctgacccgcgtgcaagcagtagatccggatattggaattaatcggaaagtagtatactccctggctgattccgccggaggcgtattcagcatcgacagctccagcgggatcatcatactggaacaacccctggacagagagcagcagagcagttataacattagcgtaagggcaaccgatcaaagtcctggtcaaagtctctccagtttgacaacagtcacaatcaccgttcttgatatcaacgataaccctcctgtgtttgaacgtagggattacttggtgaccgtccccgaagacaccagtcccgggacccaggttttagcagttttcgctacctccaaggacattggaacaaatgccgagatcacttacctcattcgttccgggaacgaacaggggaaattcaaaatcaaccccaagaccggagggatatctgtctctgaagtgctggactatgaactctgcaaaaggttttatctggtcgtagaggctaaggacgggggaactccagccctcagcgccgtcgcaaccgttaacatcaacctgacagacgtcaacgacaatccccccaagttcagtcaagacgtgtatagtgccgttatcagcgaggatgccctagtgggcgattccgtgattctgctgattgccgaggatgtcgactcccaacccaacggtcagattcactttagcattgtcaatggtgatcgcgataatgagttcaccgttgaccccgtcttaggacttgtaaaggtcaagaaaaagctcgatcgggagagagtctccggttacagcctcctcgtgcaagcggtagattccggaattccggccatgtcctctaccgctaccgtgaatattgacatctccgacgtgaacgacaattcacctgtgttcacccccgcaaactatactgctgttatccaggaaaataaacctgtgggcacttcgatactgcaattggtggtgacggatcgggattctttccacaatggcccgcccttttccttcagtatactgagtggtaatgaagaagaagagtttgtgctggacccacacggtatcctgagaagcgctgtggtcttccaacatacggagagtctcgagtatgtcctctgtgtgcaggccaaagactcaggtaaaccacagcaggtctcacacacgtatatcagggtcagggtcatagaggagtccacccataaacctactgcgatacctttggagatcttcattgtgaccatggaggacgacttcccgggcggagtgatcggaaagatccacgccaccgatcaggatatgtacgacgtgcttacatttgcattgaagagcgagcagaagtctctgttcaaggttaatagccacgacgggaagatcatagccctcggtggtttggatagtggtaaatacgtcctgaacgtgagcgtctctgacggccgcttccaagtgcccattgacgtagtagtccacgtggagcagcttgtgcacgaaatgctgcagaacactgtcactataaggtttgagaacgtctctccagaagatttcgtaggtcttcacatgcacggctttcgtagaaccctaagaaatgccgtgctgacacagaaacaggattctctgaggattatctctattcagccagtggctggcactaaccagctggacatgctgtttgcagtggagatgcacagcagtgagttctataaaccagcatacctgatccaaaaactgtctaatgcaaggagacatctggagaacatcatgcgtattagcgccattctggagaagaactgctctggccttgattgccaggagcagcattgcgagcagggcctctcccttgacagccacgctctcatgacatactctactgctaggattagcttcgtctgccccagattctatcggaatgtgcgctgtacctgtaatggcggcctgtgtccaggaagtaatgacccctgcgtggagaagccatgtcccggtgacatgcagtgtgtgagctacgaggcgtcaagaagaccttttctctgccagtgcccccctggtaaacttggggagtgtagcggacacacttcactgtccttcgctggcaatagctacattaaataccgtttgtcagaaaactctaaagaagaggattttaagctggccctgagactcaggacccttcagagcaacggcattattatgtacacgagggcaaacccatgcattatactgaagatcgtcgacgggaagctgtggtttcagctggactgtggctccggacctggtatactgggaatctccggaagggccgtcaatgatgggtcctggcatagtgtatttctagagctgaatcgtaacttcacctccctgagcctggatgacagttacgtggaaaggcgccgagccccactctactttcagaccctttctactgagtcctccatctactttggagctctcgtacaggcggataatataaggagtcttaccgacactagggttactcaggtgctcagcggctttcagggctgtcttgatagcgtgatcctcaacaataatgagctcccactccagaacaaacggagctccttcgctgaagtggtaggccttacagagctaaaactagggtgtgtcctttatcctgatgcctgtaaaagaagtccctgccagcatgggggcagttgtacaggccttccaagtgggggctatcagtgcacgtgtttgtctcagtttactggcaggaactgcgagtctgagatcaccgcctgtttccccaatccctgccgaaatggcggctcttgcgatcctatcgggaacactttcatctgtaactgtaaggccgggctcacaggcgtcacttgcgaggaagatattaacgagtgtgaaagagaggagtgcgagaatgggggatcatgcgtgaatgtgtttggcagttttctgtgtaactgtactcccgggtacgtgggtcaatactgcggcttgagacctgtggtggtacccaacatccaagccgggcacagctacgttggcaaggaagagttgatcggaatcgcggtcgtgctctttgttatcttcatcctcgtggtgttgttcatagtgttccggaaaaaggtgtttcggaagaactatagtaggaataacataacactggttcaggatccagccacagctgctctgctgaacaaatctaatggtattcctttccgcaatctcagaggatcaggtgatggcaggaacgtgtaccaggaggtaggccccccccaggtgcctgtccgacctatggcttatacaccctgctttcaaagcgacagcagatccaacctcgacaaaatcgttgacggtctgggaggagagcatcaggaaatgaccacattccatcctgagtcaccaaggattcttaccgcccgacgaggcgtggtagtttgcagtgtcgcccccaatctgccagccgtcagtccctgtcgatccgattgtgacagcatccgtaagaatggatgggatgccggaacagaaaacaagggcgtggacgaccctggcgaggtgacttgctttgcaggatcaaataagggctctaacagcgaggtccagagtctgtcctcattccaatcagactctggcgatgataacgcctaccattgggacacaagtgattggatgcccggggctagactgagcgatatcgaagaggtgcccaattacgaaaatcaggacggaggatcagcccatcaggggtcaacccgggaactcgagtcagattactacttgggagggtacgacatcgactctgagtacccacccccgcacgaggaggagtttctgtctcaggaccagttgcctccacctctgcctgaggatttcccagatcagtacgaagcactgccacctagccagcccgtatcattggctagtaccctatcgcccgactgcaggaggcgtcctcagttccacccgagtcagtacctcccccctcacccattcccgaacgagacagacctcgtaggaccacctgcctcttgtgagttcagtacctttgcggtctccatgaaccagggcacagagcctaccggcccagccgatagcgttagtctgtcattgcacaattctcggggaacatcctcctcagacgtttctgcgaattgcgggtttgatgacagcgaggttgccatgagtgattacgagtcggtgggagagctctcccttgcatccttgcacatccccttcgttgaaacacagcaccagacccaggtatag

SEQ ID NO: 23407 - DNA, 3765 bp, Artificial Sequence
  derived and/or modified sequence
atggatattatcatggggcactgtgtgggcactcggccacctgcctgctgcttgattttgctgctgtttaagttgttagctaccgtgagccagggattaccagggaccggtcctctgggatttcactttacacacagtatatataacgccaccgtttatgagaattctgcagctagaacatacgtcaactctcagtctaggatggggattacattgattgacctaagctgggatatcaagtataggattgtgagcggagatgaagaaggattctttaaagccgaggaggtgattatcgccgacttctgcttcctgagaattcgcaccaaaggtggcaacagcgccattctgaacagagagattcaggacaattatctcctgatcgttaaaggttcagtgaggggggaggatctcgaggcttggactaaagtgaatatccaggtcctggacatgaacgatctaagacccctattctctccgaccacatacagcgtcaccattgcagagagcacgccacttcggaccagcgttgcacaggttactgcgaccgacgccgacatcgggagcaatggcgaattctactactacttcaaaaataaggttgatttgtttagtgttcatcctacgtctggagtaatatccttgagcgggcgtctgaattatgacgaaaaaaaccgctacgaccttgagatactggccgtagatcggggtatgaagctttatggtaataatggagtctctagtacagccaagttgtatgtgcacattgaacggataaatgagcatgccccaaccattcacgttgtgacacatgttccattctcgttggaaaaggagcccacctacgcggtggtcacagtcgatgacctggacgatggagccaatggagaaatagaaagcgtaagcatagtggccggggatcctctggatcagtttttcctcgcgaaagagggtaagtggttgaatgagtacaagatcaaagaaaggaaacagattgattgggagagcttcccctacgggtataacttaactctccaggctaaggacaaggggagcccacagaaatgctctgctctcaaggcagtatatattggcaatcccacaagggacacagttccgatccgtttcgagaaggaggtgtacgatgtaagtatctccgaattttccccccctggcgtggtggtggcaattgtcaaactgagcccggagcccattgatgtcgagtacaagctgtcaccaggtgaggacgcggtatactttaaaatcaaccctcgcagcggtctgatagtgacagctcgacccctcaacacagtaaagaaggaagtgtacaaactggaggtcactaataaagaaggcgacttaaaggcccaagtaaccatctccattgaagacgctaacgaccatacacccgaattccagcagcctctgtacgatgcatatgtgaacgaaagcgtccctgtgggcactagcgttctaactgtatctgctagtgacaaagacaaaggggaaaatgggtatattacttatagcatcgcttctcttaatctgcttccttttgtgatcaatcagtttaccggagtgatctcaacaaccgaggagctggattttgagagcagtcccgagatatatagattcattgtgcgcgcttccgattggggcagtccttataggcacgagtctgaggtgaatgtgacaatccggatcgggaacgtgaatgacaacagtccgctttttgagaaggtcgcctgccagggcgttattagttacgacttccctgttggaggacatatcactgccgtgtccgcaatcgacattgacgaattggagctcgtgaagtataagataatttcaggcaatgaactggggttcttttaccttaacccggatagtggcgtgctgcagctgaagaaaagtctgacaaattcgggcataaagaacgggaattttgctctccgaataaccgcaaccgacggggagaacttagccgatccaatgagcattaatatctcggtcttacatggtaaagtgtcatccaagtctttctcttgtagggagacaagagtcgcccagaagctcgctgaaaagctgttgatcaaggcaaaagcgaatggtaaattgaacctcgaggatggctttctggacttttattccattaaccgtcagggaccttattttgacaaatccttcccctccgacgtggcggtaaaagaagacctgccagtcggggccaacattcttaagattaaggcctacgatgcagacagtggctttaacggcaaagtactgtttactatttccgacgggaacactgactcgtgctttaatatagacatggagacaggccagttgaaggtccttatgcccatggatcgcgaacacaccgacctgtacctactgaacatcacaatctacgatcttggcaacccccagaaaagctcctggcgtctcctgacaataaacgtcgaggacgctaatgataactccccggtattcattcaggattcttatagcgtgaacatcctagagtctagcggcatcggaaccgaaatcatccaggtggaagcccgagataaagatcttgggtctaatggagaagttacgtactccgtcctgacagacacacagcagtttgctatcaattcctcaaccggaatcgtgtatgtggccgatcaactggaccgggaaagtaaggcgaactacagcctgaaaatcgaagcacgggataaggcagaatcaggccagcaactgttttccgtggtgaccctgaaggtcttcttagatgatgtgaacgactgctcccccgccttcatccccagtagttatagcgtgaaagttctggaagacctgcctgtgggcacggtcattgcgtggttagaaacgcacgaccctgacctcggccttggagggcaggtgcgctactctctcgtcaacgattacaacggccgctttgagattgacaaagctagcggagccattcgactgagtaaagagctggactacgagaagcagcagttctacaacctcacagtcagggcaaaagacaaagggagaccggtgagcctctcatccgtatcctttgtggaggtcgaggtcgttgatgttaacgagaatctgcatacaccctatttccctgactttgccgtggtaggttcagtgaaagagaactcccggattggtacgagtgtcctgcaagtgactgcccgcgatgaggacagtgggagggatggagagattcagtactccatccgcgacggctccggactgggtcgcttctcaatcgacgatgaatccggagtgattaccgccgctgacatcctggacagagagacaatgggtagctattggttaactgtctacgcaaccgataggggagtcgtgccgctttactccaccattgaggtttatatcgaggtggaagacgtcaacgacaacgctcctctgactagcgagccgatctattaccctgtggtgatggaaaactcacctaaggatgtgtcagtgattcaaattcaggccgaagacccagactccagcagtaatgaaaagctgacatataggatcacgtcgggcaaccctcagaactttttcgccattaacataaagacaggctcttgtagtgtggcccaggccgggatgcagtggcacgatcactcgagtttacagtcaaggacccctgggttcaagggctatccttgcctgtcacttctctctagctgggactaccgacatgccccaccttgccccgcaacattcctcaacagttag

SEQ ID NO: 23408 - DNA, 13674 bp, Artificial Sequence
  derived and/or modified sequence
atggacatcatcatgggccactgtgtgggcacccggcccccagcctgctgcctgatcctgctgctcttcaagctgctggccaccgtgtcccagggcctgcccggcaccggccccctgggcttccacttcacccacagcatctacaatgccaccgtgtatgagaacagcgctgcccggacctacgtgaacagccagagcaggatgggcatcaccctgattgacctgtcctgggacatcaagtacagaattgtgtctggagatgaggagggcttcttcaaggccgaggaggtgatcatcgctgacttctgcttcctgcgcatccgcaccaagggcggcaacagcgccatcctgaaccgggagatccaggacaactacctgctgattgtgaagggctctgtgcggggggaggacctggaggcctggaccaaggtgaacatccaggtgctggacatgaatgacctgcggcccctcttcagccccaccacctacagcgtgaccatcgccgagagcacccccctgcggacctctgtggcccaggtgacagccacagatgctgacatcggcagcaatggagagttctactactacttcaagaacaaggtggacctcttctctgtgcaccccaccagcggggtcatcagcctgagcggccgcctgaactatgatgagaagaacagatatgacctggagatcctggccgtggaccggggcatgaagctgtatggcaacaacggggtgagcagcacagccaagctgtatgtgcacatcgagcgcatcaatgagcacgcccccaccatccacgtggtgacccacgtgcccttcagcctggagaaggagcccacctatgctgtggtgacagtggatgacctggatgatggagccaatggagaaattgagagcgtgtccatcgtggccggggaccccctggaccagttcttcctggccaaggagggcaagtggctgaatgagtacaagatcaaggagaggaagcagattgactgggagagcttcccctacggctacaacctgaccctgcaggccaaggacaagggcagcccccagaagtgcagcgccctgaaggctgtgtacatcggcaaccccacccgggacacagtgcccatccgctttgagaaggaggtgtatgatgtgtccatcagcgagttcagccccccaggagtggtggtggccatcgtgaagctgagccctgagcccattgatgtggagtacaagctgagccctggagaagatgctgtgtacttcaagatcaaccccaggagcggcctgattgtgacagcccggcccctgaacacagtgaagaaggaggtgtacaagctggaggtgaccaacaaggagggggacctgaaggcccaggtgaccatcagcattgaagatgccaatgaccacaccccagagttccagcagcccctgtatgatgcctacgtgaatgaatctgtgcctgtgggcacctctgtgctgactgtgtctgccagtgacaaggacaagggagaaaatggctacatcacctacagcatcgccagcctgaacctgctgccctttgtgatcaaccagttcaccggggtcatcagcaccacagaggagctggactttgagagcagccctgagatctaccgcttcatcgtgcgggccagtgactggggcagcccctacagacatgagagcgaggtgaatgtgaccatcagaattggaaatgtgaatgacaacagccccctgtttgagaaggtggcctgccagggcgtcatctcctatgacttccctgtgggcggccacatcacagctgtgtctgccattgatattgatgagctggagctggtgaagtacaagatcatctctggaaatgagctgggcttcttctacctgaacccagacagcggcgtgctgcagctgaagaagagcctgaccaacagcggcatcaagaatggaaactttgccctgcgcatcacagccacagatggagagaacctggccgaccccatgagcatcaacatctctgtgctgcacggcaaggtgagcagcaagagcttcagctgccgggagaccagggtggcccagaagctggccgagaagctgctgatcaaggccaaggccaacgggaagctgaacctggaggatggcttcctggacttctacagcatcaaccggcagggcccctactttgacaagagcttccccagtgatgtggccgtgaaggaggacctgcctgtgggcgccaacatcctgaagatcaaggcctatgatgctgacagcggcttcaacgggaaggtgctcttcaccatcagtgatggcaacacagacagctgcttcaacatcgacatggagaccggccagctgaaggtgctgatgcccatggaccgggagcacacagacctgtacctgctgaacatcaccatctatgacctgggcaacccccagaagagctcctggaggctgctgaccatcaacgtggaggatgccaatgacaacagccctgtgttcatccaggacagctacagcgtgaacatcctggagagcagcggcatcggcacagagatcatccaggtggaggcccgggacaaggacctgggcagcaatggagaggtgacctacagcgtgctgacagacacccagcagtttgccatcaacagcagcactggaattgtgtatgtggccgaccagctggaccgggagagcaaggccaactacagcctgaagattgaggcccgggacaaggccgagagcggccagcagctgttctctgtggtgaccctgaaggtgttcctggatgatgtgaatgactgcagccctgccttcatccccagcagctacagcgtgaaggtgctggaggacctgcctgtgggcaccgtgattgcctggctggagacccatgaccctgacctgggcctgggcggccaggtgcgctacagcctggtgaatgactacaacggccgctttgaaattgacaaggccagcggggccatccggctgagcaaggagctggactatgagaagcagcagttctacaacctgactgtgcgggccaaggacaagggccggcctgtgtccctgagctctgtgtcctttgtggaggtggaggtggtggatgtgaatgaaaacctgcacaccccctacttcccagactttgctgtggtgggctctgtgaaggagaacagccgcatcggcacctctgtgctgcaggtgacagccagagatgaggacagcggcagagatggagagatccagtacagcatcagagatggcagcggcctgggccgcttcagcattgatgatgaaagtggagtcatcacagctgctgacatcctggaccgggagaccatgggcagctactggctgactgtgtatgccacagaccggggcgtggtgcccctgtacagcaccatcgaggtgtacatcgaggtggaggatgtgaatgacaatgcccccctgaccagcgagcccatctactaccctgtggtgatggagaacagccccaaggatgtgtctgtcatccagatccaggctgaagatcctgacagcagcagcaatgagaagctgacctaccgcatcaccagcggcaacccccagaacttctttgccatcaacatcaagacaggcctcatcaccaccaccagcaggaagctggaccgggagcagcaggccgagcacttcctggaggtgacagtgacagatggcggccccagccccaagcagagcaccatctgggtggtggtgcaggtgctggatgaaaatgacaacaagccccagtttcctgagaaggtgtaccagatcaagctgcctgagcgggacaggaagaagagaggagagcccatctaccgggcctttgcctttgacagagatgagggccccaatgctgagatctcctacagcatcgtggatggaaatgatgatggcaagttcttcatcgaccccaagacaggcatggtgagcagcaggaagcagttcaccgctggcagctatgacatcctgaccatcaaggctgtggacaatggccggccccagaagagcagcacagcccggctgcacatcgagtggatcaagaagcccccacccagccccatccccctgacctttgatgagcccttctacaacttcaccgtgatggagagtgacagagtgacagagatcgtgggcgtggtgtctgtgcagcctgccaacacccccctgtggtttgatattgtgggcggcaactttgacagcgcctttgatgctgagaagggcgtgggcaccatcgtgattgccaagcccctggatgctgagcagaggagcatctacaacatgtctgtggaggtgacagatggcaccaacgtggccgtgacccaggtgttcatcaaggtgctggacaacaatgacaatggacctgagttcagccagcccaactatgatgtgaccatcagtgaagatgtgctgcctgacacagagatcctgcagatcgaggccacagacagagatgagaagcacaagctgagctacacagtgcacagcagcattgacagcatctccatgaggaagttcagaattgaccccagcactggagtgctgtacacagctgagcggctggaccacgaggcccaggacaagcacatcctgaacatcatggtgcgggaccaggagttcccctacagaagaaacctggcccgggtgattgtgaatgtggaggatgccaatgaccacagcccctacttcaccaaccccctgtatgaggcctctgtgtttgagagcgctgccctgggcagcgctgtgctgcaggtgacagccctggacaaggacaagggagaaaatgctgagctgatctacaccattgaagctggcaacacaggcaacatgttcaagattgagcctgtgctgggcatcatcaccatctgcaaggagccagacatgaccaccatgggccagtttgtgctgagcatcaaggtgacagaccagggcagcccccccatgtctgccacagccatcgtgcgcatctctgtgaccatgtctgacaacagccaccccaagttcatccacaaggactaccaggccgaggtgaatgaaaatgtggacatcggcaccagcgtcatcctgatcagcgccatcagccagagcaccctcatctatgaggtgaaggatggagacatcaatggcatcttcaccatcaacccctacagcggggtcatcaccacccagaaggccctggactatgaaagaaccagcagctaccagctgatcatccaggccaccaacatggccggcatggccagcaatgccaccgtgaacatccagatcgtggatgaaaatgacaatgcccctgtgttcctgttcagccagtacagcggcagcctgtctgaggccgcccccatcaacagcatcgtgcgcagcctggacaacagccccctggtgatccgggccacagatgctgacagcaacagaaatgccctgctggtgtaccagatcgtggagagcacagccaagaagttcttcaccgtggacagcagcactggagccatccgcaccatcgccaacctggaccacgagaccatcgcccacttccacttccacgtgcacgtgcgggacagcggcagcccccagctgacagctgagagccctgtggaggtgaacatcgaggtgacagatgtgaatgacaacccccctgtgttcacccaggccgtgtttgagaccatcctgctgctgcccacctacgtgggcgtggaggtgctgaaggtgtctgccacagatcctgacagcgaggtgcccccagagctgacctacagcctgatggagggcagcctggaccacttcctgattgacagcaacagcggcgtgctgaccatcaagaacaacaacctgagcaaggaccactacatgctgattgtgaaggtgtctgatggcaagttctacagcacctccatggtgaccatcatggtgaaggaggccatggacagcggcctgcacttcacccagagcttctacagcaccagcatcagcgagaacaacaccaacatcaccaaggtggccatcgtgaatgctgtgggcaaccggctgaatgagcccctgaagtacagcatcctgaaccctggcaacaagttcaagatcaagagcaccagcggggtcatccagaccaccggggtgccctttgaccgggaggagcaggagctgtatgagctggtggtggaggccagccgggagctggaccacctgcgggtggcccgggtggtggtgcgggtgaacatcgaggacatcaatgacaacagccctgtgtttgtgggcctgccctactatgctgctgtgcaggtggatgctgagcccggcaccctcatctaccaggtgacagccatcgacaaggacaagggccccaacggggaggtgacctacgtgctgcaggatgattatggccactttgagatcaaccccaacagcggaaatgtcatcctgaaggaggccttcaacagcgacctgagcaacatcgagtatggagtgaccatcctggccaaggatggcggcaagcccagcctgagcacctctgtggagctgcccatcaccatcgtgaacaaggccatgcctgtgtttgacaagcccttctacacagcctctgtgaatgaagacatccgcatgaacacccccatcctgagcatcaatgccaccagccctgagggccagggcatcatctacatcatcattgatggagaccccttcaagcagttcaacatcgactttgacacaggagtgctgaaggtggtgagccccctggactatgaggtgaccagcgcctacaagctgaccatccgggccagtgatgccctgactggagcccgggcagaggtgacagtggacctgctggtgaatgatgtgaatgacaacccccccatctttgaccagcccacctacaacaccaccctgtctgaggccagcctcatcggcacccctgtgctgcaggtggtgtccattgatgctgacagcgagaacaacaagatggtgcactaccagatcgtgcaggacacctacaacagcacagactacttccacatcgacagcagcagcggcctcatcctgacagccaggatgctggaccacgagctggtgcagcactgcaccctgaaggtgcgcagcattgattctggcttccccagcctgagcagcgaggtgctggtgcacatctacatcagtgatgtgaatgacaacccccctgtgttcaaccagctgatctatgagagctatgtgtctgagctggccccccggggccactttgtgacctgtgtgcaggccagtgatgctgacagcagtgactttgaccggctggagtacagcatcctgtctggaaatgacaggaccagcttcctgatggacagcaagagcggggtcatcaccctgagcaaccacaggaagcagaggatggagcccctgtacagcctgaatgtgtctgtgtctgatggcctcttcaccagcacagcccaggtgcacatccgggtgctgggcgccaacctgtacagccctgccttcagccagagcacctacgtggccgaggtgagagaaaatgtggccgccggcaccaaggtgattcatgtgcgggccacagatggagaccccggcacctacggccagatctcctatgccatcatcaatgactttgccaaggaccgcttcctgattgacagcaatggccaggtgatcaccacagagcggctggaccgggagaaccccctggagggagatgtgtccatctttgtgcgggccctggatggcggcggccgcaccaccttctgcaccgtgcgggtgattgtggtggatgaaaatgacaatgccccccagttcatgacagtggagtaccgggcctctgtgcgggcagatgtgggccggggccacctggtgacccaggtgcaggccattgatcctgatgatggagccaacagccgcatcacctacagcctgtacagcgaggcctctgtgtctgtggccgacctgctggagattgatcctgacaatggctggatggtgaccaagggcaacttcaaccagctgaagaacacagtgctgtccttctttgtgaaggctgtggatggcggcatccctgtgaagcacagcctcatccctgtgtacatccacgtgctgcccccagagaccttcctgcccagcttcacccagagccagtacagcttcaccatcgccgaggacacagccatcggcagcacagtggacaccctgcgcatcctgcccagccagaatgtgtggttcagcacagtgaatggagagaggcctgagaacaacaagggcggcatcttcgtcatcgagcaggagaccggcaccatcaagctggacaagaggctggaccgggagaccagccctgccttccacttcaaggtggccgccaccatccccctggacaaggtggacatcgtgttcaccgtggatgtggacatcaaggtgctggacctgaatgacaacaagcctgtgtttgagaccagcagctatgacaccatcatcatggagggcatgcctgtgggcaccaagctgacccaggtgcgggccatcgacatggactggggcgccaacggccaggtgacctacagcctgcacagcgacagccagcctgagaaggtgatggaggccttcaacatcgacagcaacacaggctggatcagcaccctgaaggacctggaccatgaaacagaccccaccttcaccttctctgtggtggccagtgacctgggggaggccttcagcctgagcagcacagccctggtgtctgtgcgggtgacagacatcaatgacaatgcccctgtgtttgcccaggaggtgtacagaggaaatgtgaaggagagtgaccccccaggagaggtggtggccgtgctgagcacctgggaccgggacaccagtgatgtgaaccggcaggtgtcctaccacatcactggaggcaacccccggggccgctttgccctgggcctggtgcagagcgagtggaaggtgtatgtgaagaggcccctggaccgggaggagcaggacatctacttcctgaacatcacagccacagatggcctgtttgtgacccaggccatggtggaggtgtctgtgtctgatgtgaatgacaacagccctgtgtgtgaccaggtggcctacacagccctgctgcctgaggacatccccagcaacaagatcatcctgaaggtgtctgccaaggatgctgacatcggcagcaatggctacatccgctacagcctgtatggcagcggcaacagcgagttcttcctggaccctgagagcggggagctgaagaccctggccctgctggaccgggagcgcatccctgtgtacagcctgatggccaaggccacagatggcggcggccgcttctgccagagcaacatccacctgatcctggaggatgtgaatgacaacccccctgtgttcagcagtgaccactacaacacctgtgtgtatgagaacacagccaccaaggccctgctgaccagggtgcaggccgtggaccctgacatcggcatcaacaggaaggtggtgtacagcctggccgacagcgctgggggcgtcttcagcattgacagcagcagcggcatcatcatcctggagcagcccctggaccgggagcagcagagcagctacaacatctctgtgcgggccacagaccagagccctggccagagcctgagcagcctgaccaccgtgaccatcaccgtgctggacatcaatgacaacccccctgtgtttgagcggcgggactacctggtgacagtgcctgaggacaccagccctggcacccaggtgctggccgtgtttgccaccagcaaggacatcggcaccaatgctgagatcacctacctgatccgctctggaaatgagcagggcaagttcaagatcaaccccaagacaggaggcatctctgtgtctgaggtgctggactatgagctgtgcaagcgcttctacctggtggtggaggccaaggatggcggcaccccagccctgtctgctgtggccaccgtgaacatcaacctgacagatgtgaatgacaacccccccaagttcagccaggatgtgtacagcgctgtgatcagtgaagatgccctggtgggggacagcgtcatcctgctgattgctgaagatgtggacagccagcccaacggccagatccacttcagcatcgtgaatggagaccgggacaatgagttcaccgtggaccctgtgctgggcctggtgaaggtgaagaagaagctggaccgggagcgggtgtctggctacagcctgctggtgcaggccgtggacagcggcatcccagccatgagcagcacagccaccgtgaacatcgacatcagtgatgtgaatgacaacagccctgtgttcaccccagccaactacacagctgtgatccaggagaacaagcctgtgggcaccagcatcctgcagctggtggtgacagaccgggacagcttccacaacggcccccccttctccttcagcatcctgtctggaaatgaggaggaggagtttgtgctggacccccacggcatcctgcggtctgctgtggtgttccagcacacagagagcctggagtatgtgctgtgtgtgcaggccaaggacagcggcaagccccagcaggtgagccacacctacatccgggtgcgggtcatcgaggagagcacccacaagcccacagccatccccctggagatcttcatcgtgaccatggaggatgacttccctgggggcgtcatcggcaagatccacgccacagaccaggacatgtatgatgtgctgacctttgccctgaagtctgagcagaagagcctcttcaaggtgaacagccatgatggcaagatcatcgccctgggcggcctggacagcggcaagtatgtgctgaatgtgtctgtgtctgatggccgcttccaggtgcccattgatgtggtggtgcacgtggagcagctggtgcatgagatgctgcagaacacagtgaccatccgctttgaaaatgtgtccccagaagattttgtgggcctgcacatgcacggcttccggaggaccctgagaaatgctgtgctgacccagaagcaggacagcctgcgcatcatcagcatccagcctgtggccggcaccaaccagctggacatgctgtttgctgtggagatgcacagcagcgagttctacaagccagcctacctgatccagaagctgagcaatgcccggcggcacctggagaacatcatgaggatcagcgccatcctggagaagaactgcagcggcctggactgccaggagcagcactgtgagcagggcctgagcctggacagccacgccctgatgacctacagcacagcccgcatcagctttgtgtgcccccgcttctacagaaatgtgcgctgcacctgcaatggaggcctgtgccccggcagcaatgacccctgtgtggagaagccctgccctggggacatgcagtgtgtgtcctatgaggccagcagaagacccttcctgtgccagtgccccccaggcaagctgggagaatgttctggccacaccagcctgagctttgctggcaacagctacatcaagtaccgcctgtctgagaacagcaaggaggaggacttcaagctggccctgcggctgcggaccctgcagagcaatggcatcatcatgtacacccgggccaacccctgcatcatcctgaagatcgtggatggcaagctgtggttccagctggactgtggcagcggccctggcatcctgggcatcagcggccgggctgtgaatgatggctcctggcacagcgtcttcctggagctgaacagaaacttcaccagcctgagcctggatgacagctatgtggagaggagaagagcccccctgtacttccagaccctgagcacagagagcagcatctactttggagccctggtgcaggccgacaacatccgcagcctgacagacaccagggtgacccaggtgctgagcggcttccagggctgcctggacagcgtcatcctgaacaacaatgagctgcccctgcagaacaagaggagcagctttgctgaggtggtgggcctgacagagctgaagctgggctgtgtgctgtacccagatgcctgcaagaggagcccctgccagcacggcggcagctgcaccggcctgcccagcggcggctaccagtgcacctgcctgagccagttcaccggcaggaactgtgagagcgagatcacagcctgcttccccaacccctgcagaaatggaggcagctgtgaccccatcggcaacaccttcatctgcaactgcaaggccggcctgactggagtgacctgtgaggaggacatcaatgaatgtgagcgggaggagtgtgaaaatggaggcagctgtgtgaatgtgtttggcagcttcctgtgcaactgcaccccaggctacgtgggccagtactgcggcctgcggcctgtggtggtgcccaacatccaggccggccacagctatgtgggcaaggaggagctgattggaattgctgtggtgctgtttgtgatcttcatcctggtggtgctcttcatcgtgttcaggaagaaggtgttcaggaagaactacagcaggaacaacatcaccctggtgcaggaccctgccacagctgccctgctgaacaagagcaatggcatccccttcaggaacctgcggggcagcggagatggaagaaatgtgtaccaggaggtgggccccccccaggtgcctgtgcggcccatggcctacaccccctgcttccagagcgacagccgcagcaacctggacaagatcgtggatggcctgggcggggagcaccaggagatgaccaccttccaccctgagagcccccgcatcctgacagccaggagaggagtggtggtgtgcagcgtggcccccaacctgcctgctgtgagcccctgccgcagtgactgtgacagcatcaggaagaatggctgggatgctggaacagagaacaagggcgtggatgatcctggagaggtgacctgctttgctggcagcaacaagggcagcaacagcgaggtgcagagcctgagcagcttccagagcgacagcggagatgacaatgcctaccactgggacaccagtgactggatgcctggggcccggctgagtgacatcgaggaggtgcccaactatgagaaccaggacggcggcagcgcccaccagggcagcacccgggagctggagagtgactactacctgggcggctatgacattgattctgagtacccacctcctcatgaggaggagttcctgagccaggaccagctgcccccacccctgcctgaggacttcccagaccagtatgaggccctgccccccagccagcctgtgtccctggccagcaccctgagcccagactgcagaagaagaccccagttccaccccagccagtacctgcccccccaccccttccccaatgaaacagacctggtgggccccccagccagctgtgagttcagcacctttgctgtgtccatgaaccagggcacagagcccaccggccctgctgacagcgtgtccctgagcctgcacaacagccggggcaccagcagcagtgatgtgtctgccaactgtggctttgatgacagcgaggtggccatgtctgactatgaatctgtgggggagctgagcctggccagcctgcacatcccctttgtggagacccagcaccagacccaggtgtag

SEQ ID NO: 23409 - DNA, 3765 bp, Artificial Sequence
  derived and/or modified sequence
atggacatcatcatgggccactgtgtgggcacccggcccccagcctgctgcctgatcctgctgctcttcaagctgctggccaccgtgtcccagggcctgcccggcaccggccccctgggcttccacttcacccacagcatctacaatgccaccgtgtatgagaacagcgctgcccggacctacgtgaacagccagagcaggatgggcatcaccctgattgacctgtcctgggacatcaagtacagaattgtgtctggagatgaggagggcttcttcaaggccgaggaggtgatcatcgctgacttctgcttcctgcgcatccgcaccaagggcggcaacagcgccatcctgaaccgggagatccaggacaactacctgctgattgtgaagggctctgtgcggggggaggacctggaggcctggaccaaggtgaacatccaggtgctggacatgaatgacctgcggcccctcttcagccccaccacctacagcgtgaccatcgccgagagcacccccctgcggacctctgtggcccaggtgacagccacagatgctgacatcggcagcaatggagagttctactactacttcaagaacaaggtggacctcttctctgtgcaccccaccagcggggtcatcagcctgagcggccgcctgaactatgatgagaagaacagatatgacctggagatcctggccgtggaccggggcatgaagctgtatggcaacaacggggtgagcagcacagccaagctgtatgtgcacatcgagcgcatcaatgagcacgcccccaccatccacgtggtgacccacgtgcccttcagcctggagaaggagcccacctatgctgtggtgacagtggatgacctggatgatggagccaatggagaaattgagagcgtgtccatcgtggccggggaccccctggaccagttcttcctggccaaggagggcaagtggctgaatgagtacaagatcaaggagaggaagcagattgactgggagagcttcccctacggctacaacctgaccctgcaggccaaggacaagggcagcccccagaagtgcagcgccctgaaggctgtgtacatcggcaaccccacccgggacacagtgcccatccgctttgagaaggaggtgtatgatgtgtccatcagcgagttcagccccccaggagtggtggtggccatcgtgaagctgagccctgagcccattgatgtggagtacaagctgagccctggagaagatgctgtgtacttcaagatcaaccccaggagcggcctgattgtgacagcccggcccctgaacacagtgaagaaggaggtgtacaagctggaggtgaccaacaaggagggggacctgaaggcccaggtgaccatcagcattgaagatgccaatgaccacaccccagagttccagcagcccctgtatgatgcctacgtgaatgaatctgtgcctgtgggcacctctgtgctgactgtgtctgccagtgacaaggacaagggagaaaatggctacatcacctacagcatcgccagcctgaacctgctgccctttgtgatcaaccagttcaccggggtcatcagcaccacagaggagctggactttgagagcagccctgagatctaccgcttcatcgtgcgggccagtgactggggcagcccctacagacatgagagcgaggtgaatgtgaccatcagaattggaaatgtgaatgacaacagccccctgtttgagaaggtggcctgccagggcgtcatctcctatgacttccctgtgggcggccacatcacagctgtgtctgccattgatattgatgagctggagctggtgaagtacaagatcatctctggaaatgagctgggcttcttctacctgaacccagacagcggcgtgctgcagctgaagaagagcctgaccaacagcggcatcaagaatggaaactttgccctgcgcatcacagccacagatggagagaacctggccgaccccatgagcatcaacatctctgtgctgcacggcaaggtgagcagcaagagcttcagctgccgggagaccagggtggcccagaagctggccgagaagctgctgatcaaggccaaggccaacgggaagctgaacctggaggatggcttcctggacttctacagcatcaaccggcagggcccctactttgacaagagcttccccagtgatgtggccgtgaaggaggacctgcctgtgggcgccaacatcctgaagatcaaggcctatgatgctgacagcggcttcaacgggaaggtgctcttcaccatcagtgatggcaacacagacagctgcttcaacatcgacatggagaccggccagctgaaggtgctgatgcccatggaccgggagcacacagacctgtacctgctgaacatcaccatctatgacctgggcaacccccagaagagctcctggaggctgctgaccatcaacgtggaggatgccaatgacaacagccctgtgttcatccaggacagctacagcgtgaacatcctggagagcagcggcatcggcacagagatcatccaggtggaggcccgggacaaggacctgggcagcaatggagaggtgacctacagcgtgctgacagacacccagcagtttgccatcaacagcagcactggaattgtgtatgtggccgaccagctggaccgggagagcaaggccaactacagcctgaagattgaggcccgggacaaggccgagagcggccagcagctgttctctgtggtgaccctgaaggtgttcctggatgatgtgaatgactgcagccctgccttcatccccagcagctacagcgtgaaggtgctggaggacctgcctgtgggcaccgtgattgcctggctggagacccatgaccctgacctgggcctgggcggccaggtgcgctacagcctggtgaatgactacaacggccgctttgaaattgacaaggccagcggggccatccggctgagcaaggagctggactatgagaagcagcagttctacaacctgactgtgcgggccaaggacaagggccggcctgtgtccctgagctctgtgtcctttgtggaggtggaggtggtggatgtgaatgaaaacctgcacaccccctacttcccagactttgctgtggtgggctctgtgaaggagaacagccgcatcggcacctctgtgctgcaggtgacagccagagatgaggacagcggcagagatggagagatccagtacagcatcagagatggcagcggcctgggccgcttcagcattgatgatgaaagtggagtcatcacagctgctgacatcctggaccgggagaccatgggcagctactggctgactgtgtatgccacagaccggggcgtggtgcccctgtacagcaccatcgaggtgtacatcgaggtggaggatgtgaatgacaatgcccccctgaccagcgagcccatctactaccctgtggtgatggagaacagccccaaggatgtgtctgtcatccagatccaggctgaagatcctgacagcagcagcaatgagaagctgacctaccgcatcaccagcggcaacccccagaacttctttgccatcaacatcaagacaggcagctgcagcgtggcccaggccggcatgcagtggcatgaccacagcagcctgcagagcaggaccccaggcttcaagggctacccctgcctgagcctgctgagctcctgggactacagacatgccccaccctgcccagccaccttcctgaacagctag

SEQ ID NO: 23410 - DNA, 13674 bp, Artificial Sequence
  derived and/or modified sequence
atggacatcatcatgggccactgcgtgggcacccggccccccgcctgctgtcttatcctgcttctgttcaaattactcgctaccgtttcgcagggcctcccaggaacaggacccttgggcttccactttacccattcaatttataatgccaccgtgtacgagaactctgccgcccgcacttatgttaactcgcaaagtagaatgggaataactttaatagacctgtcttgggacattaagtatagaatagtctccggagatgaggagggtttctttaaggcagaggaggtgatcatagctgacttctgctttctccggatcaggacgaaaggggggaattctgcgatcctgaacagggagattcaagataattacctgttgatcgtcaagggatctgtcagaggggaggatttggaagcgtggacaaaagtaaatatccaggtgctcgatatgaatgatctacggcccctgttctctcccacaacatactctgtgaccattgcagagtccacacccctgcgcacatccgtagctcaagtgaccgcaactgatgccgatatcggttcaaatggtgaattttactactacttcaaaaataaagtggatcttttttccgtccatccaacctcaggggtaatcagcctgtcaggccgcctgaactatgatgagaagaatcgctacgatctcgaaatcttagctgtggatagaggaatgaaattatacggcaacaatggggtgtctagcaccgcaaagttgtacgtgcacatcgaacgcataaacgagcacgcccccactatccacgtggtgactcacgttcctttttccctagagaaggaacctacctacgccgtggtcaccgtagatgacttagacgacggcgcaaacggagagatcgaatctgttagcatagtggccggcgaccccctcgaccagttcttccttgccaaagagggaaagtggcttaacgaatacaagatcaaagaaaggaagcagatcgactgggaatccttcccctacggctacaatctgactctccaggcgaaggataaaggtagcccacagaagtgcagtgcccttaaagctgtttacatcgggaaccctaccagggacacagttcctatcagattcgaaaaagaagtttacgatgtgtcgattagcgagttttctcctccgggtgtcgtcgtggcgatcgttaaactgtctcccgaacccatcgacgtggagtataagctatcccccggagaagacgcagtttactttaaaatcaatccaaggtcaggactgatcgtcacagcccggccattaaatactgtgaaaaaggaggtctataaactcgaagtgacaaacaaggaaggagacctgaaagctcaggttacaatttcaattgaagacgcaaacgaccatacccccgaatttcagcagccactttatgacgcatacgtgaacgaatctgttcccgtgggaacctccgttctcactgtgtccgcatcagacaaagacaagggagaaaatggctacattacctatagcattgcttcactgaacctgcttccctttgtaattaatcagttcacaggcgtgatcagtacaacagaggaactcgatttcgaatcctcccctgaaatatacaggtttattgtccgggcctcggactggggatctccctaccggcatgagagcgaggtgaacgttactattagaattggcaacgtcaacgacaattcacctctgttcgaaaaggtggcatgtcagggcgtgatcagctacgatttccctgtcggggggcacattaccgcagtttccgccattgatatcgacgaactcgagcttgtgaaatacaagatcatcagcggtaatgagcttggattcttctatctgaatcctgattcaggagttttgcagctgaaaaagagtctgactaacagtgggataaagaatggcaactttgccctgcgcataactgcaaccgacggggagaacctcgctgaccccatgtcaatcaatattagcgtcctgcacggaaaggtgtcgagtaaaagtttctcatgtcgggagactagggtggctcaaaagctggccgaaaagctccttatcaaagcaaaggcaaacggcaaactcaacctggaggacgggttccttgacttttactccatcaaccgtcagggcccgtattttgacaagtccttcccctcagatgtggccgtaaaagaagatctccctgtgggagctaatatccttaaaatcaaagcttatgatgcggactcaggcttcaatgggaaagttctgtttaccatctcggacggaaataccgattcttgcttcaacatcgatatggagactggtcagttgaaagtgctgatgcccatggatagagagcataccgatctgtacctgctcaatatcactatttatgatttagggaaccctcagaaaagcagttggcgactattgacaattaatgtggaagacgctaacgacaactcgcccgtttttatacaggatagctactcagtcaatattctggagtctagcgggatcggcacagagatcatacaagtggaggccagagacaaagatctcgggtctaatggggaagttacttattccgtgctaaccgatacccagcaattcgctattaatagcagtacaggtatcgtgtacgtggcagaccaactcgatcgcgaatctaaagccaactactccctcaagattgaagctcgggacaaggccgagtccgggcaacagctgttctcggtggtcaccctgaaggtcttccttgatgacgtgaacgattgcagccccgccttcattcccagctcctatagtgtgaaggtgctggaagacttgccagtcggcacagtgatcgcatggctggagactcacgatccggatctcggacttggcgggcaagtgcggtactcattagtgaacgactataatgggaggtttgaaattgacaaggctagtggcgccatacgcctgagcaaggagcttgattacgaaaagcagcagttttacaatctcaccgtccgggctaaagacaaaggccgtccagtatcactcagtagcgtaagttttgttgaagtggaagttgtcgatgtgaacgaaaacctgcataccccatacttccccgactttgccgtcgtggggagtgttaaggaaaactcccgaatcggaacaagcgtgctacaggttaccgccagagatgaggatagcggacgtgacggcgaaatccagtatagcattagagacggcagcggactgggccgattctctatcgacgacgaatcaggagtgatcacagcagccgatatcctggacagagaaaccatgggttcttattggctgacggtgtacgcgaccgaccgcggagtggtccctctctatagcactatcgaggtgtatattgaggtagaggacgtcaacgacaacgctccccttacctccgaacccatatactacccagtcgtgatggagaactcgcccaaagatgttagtgtgatccagatccaagctgaggatcccgactcgagttccaatgaaaaattgacgtatagaattacgtccggcaaccctcagaacttttttgccatcaacatcaagacaggcctgatcacgaccacttcccgtaaacttgacagggaacagcaggcagaacactttctggaggtgactgttactgatggaggcccatctccaaaacaatccacaatctgggtggtcgtgcaggttctggacgagaatgataataagcctcagtttcctgaaaaggtatatcaaataaagttacctgagcgtgataggaagaaaaggggggagcccatctatcgggccttcgcattcgacagagatgagggcccaaatgcggagatctcatacagcatcgtcgacggcaatgacgatggaaagttctttatcgaccctaagactgggatggtttcctcacgaaaacagttcacagcaggatcatacgatattttgactattaaggccgttgacaatggccggccccagaaaagctctacagcgcggctgcacatcgagtggataaagaaacctccaccatctcccattcccctgactttcgatgagccgttctacaattttacagtgatggaatcagacagggtgacagagatagtaggcgtcgtttcagttcaaccagccaatacgccactctggttcgatatcgtcgggggtaacttcgattcggcttttgacgcggaaaagggtgttggaaccatcgtcatcgcgaagcctctagatgccgaacagcggagtatatacaatatgtctgttgaggtgaccgatgggacgaatgtagctgtgacacaggtctttatcaaagtgttagacaacaacgataatggccctgaattttcccaacctaactacgatgtcaccatctctgaagatgtgctaccagatacagaaattctgcaaatcgaagcaactgaccgagacgagaaacacaaattgtcatatacggttcacagtagcattgactccatatcaatgcgcaagtttcggatcgacccgtctactggggtgttgtacactgctgagcgacttgaccacgaagcacaggataagcatatcctcaacatcatggtacgggatcaggagtttccatacagacgcaatttggctagggtgattgtcaacgttgaggatgctaacgaccattccccatacttcaccaatcctttatatgaggccagcgtgtttgagagcgccgcccttggcagtgcggtgctgcaggtcaccgccctggataaagataagggagaaaacgcagagctcatttacacgatcgaggccggaaacaccggcaacatgttcaaaatcgaacccgtgctaggtattatcacaatctgtaaggagcctgacatgactaccatgggccagtttgtgctgtccattaaagtgaccgaccagggcagccccccaatgtctgcgacggcaatagtgcgcatctcagttacaatgtcagacaacagtcacccgaaattcattcataaggactaccaggccgaggtcaatgaaaatgtggacatcggaacatcagtgatcttgatctccgccatatcccagtccactctgatctacgaagtcaaagatggtgatatcaatggcatttttacaattaatccctattccggggtgatcaccacccagaaagctctggattatgaaagaacttccagctatcagctcatcatccaagctaccaatatggctgggatggcatccaacgctaccgtaaacatccaaattgtggacgaaaatgataacgcccccgtttttctatttagtcaatatagcgggtcactatccgaggccgccccaatcaattctattgttcggagccttgataactctcctctggttatccgcgcaactgacgcggactccaatcgtaacgcattactggtgtaccagatcgtggagagcaccgcaaagaaattcttcacagttgattctagcactggcgcgatcaggactattgcaaatctggaccacgagaccattgcgcattttcactttcacgtgcacgttagagacagtggaagtccgcagttgacagccgagtccccggtggaagtcaatatcgaggtgaccgatgtcaacgacaatcccccagtctttacacaggcggtgtttgaaacgatcttacttttacccacctatgtgggagtggaagtgctgaaggtcagcgcaaccgacccggattccgaggtccctccagagctgacttatagccttatggaagggtcccttgatcacttcctgatcgatagtaacagcggcgtgctaacaatcaaaaacaataatctgagcaaagaccattatatgctgatcgttaaggtgagtgacggaaagttttactccaccagcatggttactatcatggtgaaagaggcgatggattccgggctgcactttacacagtctttctacagtacaagcatttcagaaaacaacactaatatcacgaaggttgccatcgtgaacgctgtgggcaacagactcaatgagcccctgaaatatagcatccttaacccaggcaataagttcaaaatcaagtccacgtccggagtaattcagaccactggggtgccgtttgatcgggaagagcaggagttatacgaactcgtcgtagaggcttcccgcgagttggaccacttaagggtcgcaagggtcgtcgtacgcgtaaacatagaggacattaacgataattcgccagttttcgtgggactcccctactacgcggccgtgcaggtggacgccgagcccggaaccctgatctaccaggtgactgccatcgataaggacaagggtccaaatggcgaagtgacatatgtgctccaggatgattatggtcacttcgaaatcaatcctaatagcggcaacgtgattcttaaagaggccttcaatagtgatctctccaacatagaatacggcgtgactattctggccaaagacggtggcaagcctagccttagcacaagcgtagagctaccgataaccatcgtcaataaagccatgccagtttttgataagcctttctataccgccagcgtgaacgaggacatccgcatgaacacacccatattatctataaacgccacgtcccccgaaggccagggaattatatacatcatcattgacggggacccattcaaacaattcaatattgacttcgacaccggggtgctgaaggtggtgtcccccctggactacgaggttacttcggcctacaaactaacaatcagggctagtgacgccctgacaggagccagggctgaggtgactgtcgatctcctcgtcaatgatgtcaacgacaatccacctattttcgatcagcccacctataacacaactctgagcgaggcttccctcatagggacccctgtcctgcaggtcgtgtcaatcgacgccgattcagagaacaataagatggttcactaccagatcgtgcaggatacttacaactccacagactatttccacatcgatagtagctccggtctcattctcacagccagaatgctcgaccatgaattagtgcagcattgtaccctgaaagtgaggagtatcgactcaggcttcccctctctgtcttctgaagtgttggttcatatctacatatccgacgttaatgacaatcccccagttttcaaccagctaatctacgagtcctacgtatccgagctggctcccagagggcacttcgttacttgtgtacaagcatccgacgcagattcctcagattttgatagattggagtactccatcctgagtggcaacgaccggacttcctttcttatggactccaaatcaggcgtcataactctgagcaaccatcgaaagcaacgtatggagcccctgtactcccttaacgtgtcagtgtcggatggcttgtttactagcacagcacaggtacacatcagagtgctgggagcaaacctctatagccccgcctttagccagtctacttatgtggccgaagtgagggagaacgttgcagcagggacaaaagtgatacatgttcgcgccaccgatggggaccccgggacctacggccagatttcctacgcaataataaatgattttgctaaggatcgctttctcatcgactccaatgggcaggtgattaccaccgaaagactagacagagaaaacccgctggagggagacgtttccatctttgtgagggctctggacggcggcggtaggacgacgttctgtacagttcgtgtcatcgttgtcgacgaaaacgataacgccccacagttcatgacagttgagtacagagcctcagttcgcgcagacgtgggacggggacatctagtgacacaggtacaagcaatcgatccagacgacggggcaaactcaagaattacatatagtctctactctgaagcctctgtatctgtggccgacttgctggaaatcgatcctgataatggctggatggtgaccaaagggaattttaatcaattaaaaaatactgtgctctcattcttcgtgaaggccgtcgacggcggcattccagtgaaacactcactgatacccgtatatatacacgtgctcccgcctgagacattcctcccctccttcacacagagccagtactctttcacaattgctgaagataccgcgatcggcagtacagtggacaccctgaggattcttccgtcccaaaatgtctggttctcaaccgtcaacggcgagagaccagaaaataataaagggggaatttttgtgattgagcaggaaaccgggaccattaaattggataaacgcttggacagagagacaagcccagctttccacttcaaggtggccgcaactattccactcgataaggtcgatattgtcttcacagtggacgtggacatcaaggtcctagatctcaatgacaacaagcctgtcttcgagacttcaagttacgatacgattatcatggagggaatgccagtgggtacaaagttgacccaggttcgagctattgatatggattggggcgcgaatgggcaggtgacatacagcctgcactccgacagtcaaccagagaaggtcatggaggctttcaacatagactcgaacaccggctggatcagtaccttgaaggatctggaccatgaaaccgaccccacgtttacattttctgtggtggcaagcgatcttggcgaggccttcagcctgtcaagcactgccctcgtgagcgtacgcgtgacagacattaacgataatgcccccgtattcgctcaggaagtctatcgaggcaatgtgaaggagtctgaccccccaggagaagtggtagcagtgctgtccacttgggatcgggatacctccgacgtgaaccggcaggtctcctatcacatcactggagggaatccgcgtgggcgtttcgctctgggactggtccagtcggagtggaaggtgtatgtgaagcggccacttgaccgggaggaacaagacatctactttctgaatatcactgctacggatggcctgttcgtgacccaggccatggtggaggtatccgtctcggacgtgaacgataattctccagtctgcgaccaagtggcatacactgcactcctaccggaagacatcccatcaaacaagattatcctcaaggtctccgccaaggacgcagacataggatctaatgggtatatcagatactcgctctatggtagcggaaactccgaattttttttagatcctgagtccggcgagctgaagaccctggcactccttgatagggagagaatcccagtatactccctcatggctaaggcaacagatggcggcggacgtttctgccagagcaatattcatctaattctggaagatgtgaacgacaaccctcctgtgtttagctccgaccactataatacctgcgtatatgagaacaccgcaactaaagcactgctgactcgtgtgcaggctgtcgatcccgatataggcatcaaccggaaggtggtgtatagtctggccgactccgcagggggcgttttttctatcgattcgtcctcgggtatcattattctcgaacaacccctggatcgcgagcaacagagtagctataatattagtgtgcgggcgacagatcagagcccaggccaatcactgtccagcctgaccacagtgaccatcactgtgctggatattaacgataaccctcctgtttttgaacggagggactatctggtcacagtcccggaggacacctcccctggcacgcaggtgcttgccgtgtttgcgacctcgaaggacataggtaccaatgccgagatcacttacctcatccggtctggaaatgaacagggaaaatttaagataaacccaaagaccggaggtattagtgtgagcgaagttctggattacgaactgtgcaaacggttctaccttgtggtggaggcaaaagatggcggaacaccagctcttagcgcggtggctaccgttaatattaatttgacggacgtgaacgacaacccccctaagttcagccaggacgtgtacagtgctgttatctcagaggacgccttagtgggagatagtgtgatcttgttaatagccgaggacgtggactcccagcccaatggccagattcattttagtatcgtgaacggcgatagagataatgaattcacagtggatcctgtgctgggcttggtaaaggtcaagaagaagctcgatcgcgagagagtctccggatatagcctgctcgtgcaggccgtcgatagcggcatccctgctatgagttcaactgctaccgtgaatatagatatcagcgatgtcaacgacaattcaccagtttttactccagccaactacaccgctgtcatacaggagaacaagccagtcgggactagcatattgcagctggtagtcaccgaccgcgatagctttcataacggcccccctttcagcttcagcattctgtcaggcaatgaggaggaagagttcgtgctggacccacacggcatccttcgatccgctgtggtctttcagcacaccgagtcactggaatacgttctgtgtgtgcaggccaaggactccggcaaaccacaacaagtatcccatacctatatccgggttagagtaatcgaagagtccactcacaagcctacggccattccgctcgaaattttcattgtcaccatggaggacgatttccctggcggcgttattggtaagatccacgcaacagatcaggacatgtacgacgtgttaacttttgctctcaagagcgagcaaaagagtctatttaaagtcaacagtcacgatggtaagataattgcactgggtggcttagacagcggcaaatatgtacttaacgtgtccgtatccgacggccgattccaggttcctattgatgttgttgtgcacgtcgagcagctggtgcatgaaatgttgcagaatacagtcaccatcagatttgaaaacgtttcacctgaagacttcgtgggactgcatatgcatggatttcggaggaccctacgaaacgcagtattgacacaaaagcaggactcgctcaggatcataagcattcagcctgtcgctgggaccaatcaactggatatgctcttcgccgtggaaatgcacagctcggaattctacaaaccagcctatctgatccagaagttatctaatgcccggcggcacctagaaaatatcatgcggataagcgcaatccttgaaaaaaattgctcgggcctagactgccaagagcagcactgcgagcagggacttagcctggattcccacgctcttatgacttactctaccgccaggatatcattcgtatgtcctcggttctatcggaatgtccgatgcacctgcaacggcggactctgccccggcagcaacgacccttgcgtggagaaaccctgtccaggtgacatgcaatgcgtgtcttacgaggccagcaggcggcccttcctctgccaatgtccccctggtaaactcggcgaatgctctggacatacttcgctgagtttcgcaggaaacagttacattaagtaccggctctccgaaaattccaaggaggaagattttaaactggctctgcgactgagaacccttcagagcaatggcataattatgtatacccgcgccaatccgtgcattatcctgaagattgtggatgggaagttatggttccagctggactgtggttctgggcctgggattttaggaatctcaggccgtgctgtaaacgacggctcatggcatagcgtcttcttggaactgaatcgcaacttcacctcactgtccctagacgactcctacgtagaacgaaggcgcgctccactgtactttcagacattaagtacggagtctagcatctatttcggcgccttggtccaggccgacaacatcagatcactaacagacactagagttactcaggtcctgtctggttttcaagggtgtctggactcggtcatccttaataataacgaactccctttacagaataagaggagctccttcgcagaagtcgtgggcttgactgagctaaagcttggttgcgttctttaccctgatgcttgtaagcggtcaccttgccagcacggaggttcctgtaccggtctgccatccggggggtaccagtgtacctgtttgagtcagtttaccggcaggaattgtgagtctgagattaccgcgtgctttcctaacccatgccgcaatgggggttcctgcgatccaatcggaaacaccttcatttgcaactgtaaggctggcctcaccggcgtcacttgcgaggaggacataaacgagtgtgaaagggaggagtgcgaaaacggcgggagttgcgtcaacgtgtttggctctttcctgtgcaattgcacccctgggtatgtggggcagtattgtggcttaagacccgtggtcgtgccaaacattcaggcgggtcactcttatgtcggtaaggaagagctgattggcatagctgtggtgctgtttgtaatcttcatcctcgtagtgctgttcattgtttttcggaagaaggtgtttcgcaaaaactatagccggaacaacatcactttggttcaggatccagccaccgctgctttgctgaacaagtctaacggaataccattccgcaatctgcgtgggtcaggtgacgggaggaatgtgtatcaggaagtcggccccccacaggtgcctgtgagacctatggcctatacaccctgttttcagagtgactctcggtctaacctggacaaaatcgtcgacggcctgggtggcgagcaccaggagatgaccaccttccacccggagtctcctcggatcctgaccgcccggcggggcgttgtggtgtgcagtgtggctcctaaccttccagccgtgagtccctgtcgctctgactgcgacagcatacgtaaaaacggctgggacgcaggaaccgagaacaaaggggtggatgatccaggggaagtaacttgttttgctgggtcaaacaaaggatcgaacagtgaggtgcaatccctgtccagtttccagagcgatagcggcgacgacaatgcctatcactgggacacctcagactggatgcctggcgcgcggctgagtgacatagaggaggtccctaactacgagaatcaggatggtggctccgcccaccagggttccactagggagctggagtctgactactacttgggcggttacgacatcgattcagagtaccctccaccacacgaagaggaattcctttcacaggaccagctccctccacctttgccagaagacttccccgatcaatatgaggcccttccgcctagccagcctgtgtcattggcctccaccctttccccggactgcagacggcggcctcagtttcaccctagccaatatctgcccccacacccctttccaaatgagaccgaccttgtgggtccacctgcgtcatgcgaattttccactttcgctgtgtcaatgaatcagggcacagagcctaccggacctgctgactctgtgtcactctctctgcacaacagccgcgggacgagcagtagtgatgtgtctgctaattgtgggttcgacgatagcgaagtggccatgtcagactacgagtccgtgggggaactcagccttgcctcactgcacatccctttcgtggagacccagcaccagacgcaggtttag

SEQ ID NO: 23411 - DNA, 3765 bp, Artificial Sequence
  derived and/or modified sequence
atggacatcatcatgggccactgcgtgggcacccggccccccgcctgctgcctgatcttacttctgttcaaactcctggctaccgtgtcgcaggggctccccggcacaggacccctgggcttccattttacccactcaatatacaacgcaacagtttacgaaaactctgcggccagaacgtatgttaacagccaatcaaggatggggatcaccctgattgatctgagctgggatatcaagtatcgcattgtatctggcgatgaggaaggcttctttaaggcagaagaagtgatcatagctgacttctgtttcctgagaattagaacaaaggggggaaacagcgctatcctgaatcgcgagattcaggacaactacctcctgattgtaaagggctccgtccgcggcgaggacctcgaagcatggacgaaggtgaatatacaggtgctggatatgaatgatctgcgccctctgtttagccccaccacatatagtgtaacgattgctgagagtacacccctgagaactagcgtcgcacaggtgaccgccaccgacgcggacatcggttcaaacggggagttttattactacttcaaaaacaaggttgatttgtttagcgtccatcctacatcaggagtgatctccctttccggaaggctgaattacgacgaaaagaacaggtatgatctagagatccttgccgtcgaccgaggaatgaaactgtacggaaataacggcgtttccagcaccgccaagctgtatgtacacatcgagcgtataaacgaacacgctcccactatccatgtggtgacacatgtgccatttagcctggagaaagaacccacctatgctgtggtgaccgtggacgatttggatgacggcgcaaatggggaaattgaaagtgtatcaatcgttgcaggggatcccctcgaccagttttttcttgccaaagagggtaaatggttgaatgagtacaagatcaaggaaaggaagcagattgattgggagtcttttccttatggttataatctgaccctgcaggccaaagataagggttccccgcagaagtgttcagccctgaaagccgtgtacattgggaaccccactcgagataccgtacccatcaggtttgagaaagaggtgtacgatgtatcaatctccgaatttagtccacctggggttgtggtcgcaatcgtgaaactgagccctgagccaatagatgtcgagtacaaactgagccccggagaagacgcagtgtactttaagatcaaccccagaagcggactgatcgtaacagcccgcccccttaatacagttaagaaggaggtctacaagcttgaggtcaccaataaggagggcgatcttaaagctcaagtcacaatttctatagaggacgcgaacgaccatacccccgaatttcagcagccattgtatgacgcatacgtgaacgaaagtgtgcctgtaggtacatcagtgctgacagtgtcggcttcggacaaggacaaaggcgagaacggttatataacctacagtattgccagcctgaacttgctgcctttcgtcatcaatcagttcaccggggtgattagtacgaccgaagaattggattttgagtcctctcctgaaatttatagattcatcgtccgcgcaagcgactggggttccccctacagacacgagagtgaggtgaatgtcacgatcaggattggcaacgtgaacgacaactcaccactttttgagaaagtggcatgccagggcgtaatatcctacgatttccctgtgggtggccatatcaccgcagtgagcgccatcgacatcgacgagctcgagttggtgaagtacaaaatcatctctggaaacgagcttgggttcttctacttaaatcctgactctggcgtgcttcagctgaagaagagcttaactaacagcggaatcaagaacggaaacttcgcactccgaatcaccgcaaccgacggcgaaaacctggcagaccccatgtcaatcaatatctctgtgctgcatggcaaggtgtccagcaagagtttctcatgccgggagactcgtgtcgcacagaagctggccgaaaaactcttgatcaaggcgaaagcgaacggcaaactgaatctggaggatggctttcttgacttctatagcataaatcgccagggtccctattttgacaagagctttccctctgacgtagcagtgaaagaagacctgcctgtcggtgcgaacattctgaagatcaaggcatacgacgcagactccggatttaacgggaaggtgctgttcaccatctctgatggcaacaccgactcctgtttcaatatagacatggagacaggccagctcaaagtgttgatgccaatggatagggagcataccgatctgtatctactcaacatcaccatctacgatctaggaaaccctcagaaatcctcctggcgactgctgaccattaatgtcgaagatgcaaatgacaactcaccagtctttatccaggattcttattcagtaaatatcctggagtctagcggaataggcacggagatcattcaggtagaggctcgcgacaaagatcttgggtctaatggggaggtgacatactctgtgttgacagatacccagcagttcgccataaattcctccacgggcatcgtctacgtggcagaccaacttgaccgtgagagcaaggcaaactactctcttaagatcgaggcaagagataaggctgagtccgggcagcagctattctcagttgtgacccttaaggtgtttctggacgatgtcaacgactgctcccccgccttcattccatcaagttacagtgtcaaggtcttagaggacctacctgtgggcactgtgatcgcctggctggagacgcacgaccccgatctgggcctggggggccaggttcggtactccctcgtcaatgattacaacggtcgttttgagattgacaaagcgtccggagccattcgcctatccaaagagcttgactatgagaaacaacagttctacaatttgactgttagggccaaggataagggccggcccgtcagcttgagcagtgtctccttcgtcgaggtggaagtcgtcgatgtgaacgagaatctgcacaccccatactttcctgactttgcagtcgtgggctccgtgaaggagaattcccggatcgggacctccgtgctgcaggtgactgccagggatgaggactccggcagagacggagaaattcagtacagcattagggatggttctggactagggcgcttttcaattgacgacgaaagcggggtgatcactgcggctgatattctggaccgggagactatgggtagctactggttaaccgtgtatgctacggaccgaggggtggtcccattgtacagcaccattgaggtgtacattgaggtggaggacgttaacgacaatgcccctctgacaagcgagcccatatattaccccgttgtgatggagaatagccctaaagacgtgtccgttatccagattcaggccgaggatcccgattctagctccaacgagaagctgacttatcgcataaccagcggcaacccgcagaatttcttcgctatcaatataaagactgggtcttgttctgtggctcaagccggcatgcagtggcacgaccactcttcccttcagagccggactcctggatttaaggggtatccatgtctgtctcttctttcttcatgggactatcgccatgctcctccctgtccggcgaccttcctcaattcttag

SEQ ID NO: 23412 - DNA, 13674 bp, Artificial Sequence
  derived and/or modified sequence
atggatattataatggggcactgcgttggcactagaccacccgcatgttgcctgatcttgctgcttttcaagctgctcgcaactgtgtcccagggactccctggtactggtcccttgggattccactttacacactctatatataacgcaaccgtgtacgaaaactccgcagccaggacctacgttaattcacaatcacgaatgggcattacattaatcgacctcagctgggatatcaaatataggattgtgtccggggacgaagaagggtttttcaaagccgaggaagtgataatcgccgacttctgcttcttgcggatccgcacaaaaggtggaaatagcgctattttgaatcgggagattcaagacaattacctgcttatcgtcaaaggctccgtgaggggcgaagatttggaggcttggactaaggtcaatatccaagtgctcgatatgaatgacctccgacctctattcagccctacgacttattcagtgacaatcgcagagtccaccccgttgcgcacctcagttgcccaggtgacagctaccgacgctgacatcgggagcaacggggagttctattactacttcaagaacaaggtggatttattttcagttcaccctaccagcggtgtgatatcactgtccggtcggttaaattacgatgagaagaaccggtacgatctagagattttggccgtagaccggggaatgaagctatatggaaacaacggcgtatcaagcaccgccaagctctacgtgcacatcgaacggataaatgagcacgcacctacaatccatgtggtgacccatgtgcctttctccctggagaaggaaccaacctacgccgttgtgaccgtggacgatttagacgacggagccaatggggaaatcgaatcagtgtctattgtggctggagaccccctagaccaattctttctcgctaaggaaggcaagtggcttaatgaatataaaatcaaagaacgtaaacagatcgactgggaatcttttccctacgggtataacctcactctgcaggctaaggacaaagggtccccccagaaatgcagtgctctgaaagctgtttacattggcaatcctacacgagacaccgtaccaatccgttttgagaaggaagtatacgatgtgagtatctctgagttcagtccgccaggagtggtggtggcaatcgtgaaattgtctcccgaacctatcgatgttgaatacaagctaagtcctggagaagacgctgtgtattttaagatcaaccctcgaagtggcctgattgtgaccgccaggcctctcaacacggtcaaaaaggaggtttataagctggaagtcacgaataaggaaggcgatctgaaagcacaggttactatttccatcgaggatgcaaatgaccatacacccgagtttcaacaaccgctgtatgatgcctacgtgaacgaatctgtgccagttggcacctcagtgctgactgtgagcgcgtctgataaggataagggggagaacggctacatcacctattctatagcttcccttaatctgctgccttttgtcattaaccaatttaccggcgtcatttctaccactgaagaacttgattttgaatcctcgcccgagatttaccgtttcatcgtccgggctagcgattggggctctccataccgccatgaatccgaggtgaacgtaaccatacgtattgggaacgtcaacgacaactccccgctgttcgagaaagtcgcatgtcagggtgtgatatcgtacgatttccctgtgggagggcatataacggccgtctctgccatcgacatcgatgaacttgagctcgtgaagtataaaatcatttcaggtaacgaactcggatttttttacttgaacccagatagtggcgtcttacagctcaaaaagagcctcaccaactccggcatcaagaacgggaatttcgccctgcggatcacagctaccgacggggaaaacctggctgatccgatgtctattaacatcagcgtgcttcatggaaaggtttcctctaagtccttctcatgtcgagaaacaagagttgcgcagaaactggctgaaaagctcctgatcaaagcaaaggctaacggaaagctgaatctcgaagacgggttcttggacttctattcgatcaatcggcaaggcccatacttcgataagtcgtttccttctgacgtcgcagtaaaggaggacctgccagtcggggctaacatcctgaaaatcaaagcctacgacgccgattctggctttaacgggaaggttctgtttaccatttctgacgggaataccgattcctgcttcaacattgacatggagaccggccagttgaaagtgcttatgcctatggatagggaacacaccgacctgtacctgctgaatattaccatttacgatctgggaaacccccagaagagttcatggcgcctgttgacgatcaatgtagaggacgccaatgacaattcaccagtgttcatccaagactcttactccgtaaatattttagaatcatctggcattggaacggagattattcaggtagaagctcgagataaggacctcggcagcaatggcgaggtgacgtactcagtacttaccgacacccagcagtttgccattaacagcagcaccgggattgtgtacgtggctgaccagctggacagggagagcaaagctaactatagcttaaagattgaggctagagataaagctgagagtggacagcagttattcagtgtggtgactctgaaggtgttcctggacgacgtgaacgattgcagcccagcattcattccttcctcttattctgtgaaggtgcttgaggatctcccggtgggaacggtgatcgcatggctcgaaactcacgacccagacctggggcttggtggacaggtgcggtactctctggtcaatgactacaacggaaggttcgagatcgacaaggcctccggagctatccgtctgtctaaagagctggactatgaaaagcagcagttctataacctcactgtgcgggctaaggacaaaggcagaccagtctccctttcgtctgtgtcattcgtggaggtggaagtggtagacgtcaacgaaaatctacataccccttactttccagattttgccgtagtcggctcggtgaaggagaattccaggatagggacctcggtcctacaggtaaccgctagggatgaagatagtggaagggacggggagatccagtattcgatacgggacggatccggcctcggacgcttttcaattgatgacgaaagtggtgtgattacggcagcagatatcttggatagggagaccatggggtcatactggctgaccgtatatgctacggaccgtggggttgtgcctttatattctaccatcgaggtatatatcgaagtagaggacgttaacgataatgccccattaacgtctgaaccgatttattacccagtcgtaatggaaaattcccccaaggatgtgtccgttatccagattcaagcagaggatccagacagctccagcaatgaaaaacttacttatcgcatcacctctggaaacccacagaacttctttgctattaacataaagacgggcctaatcacaaccacaagtcggaaactcgatcgggaacagcaggccgagcacttcctcgaggtgaccgtgacggacggcggtcccagccccaagcagagtacaatatgggtggtagtacaagtactggatgagaatgataataaacctcagtttcctgagaaggtctatcagatcaaattaccggaacgcgaccggaaaaaacgcggtgagcctatttaccgcgctttcgcatttgatcgggatgaggggccaaatgctgaaatctcctatagcattgtggacggcaacgacgacgggaaattcttcattgaccccaaaactggcatggtcagttcccggaaacagttcaccgcaggctcctacgacatcctaacaattaaggctgtcgacaatgggcgtccacagaagtcttctactgctcgtctccatatagaatggatcaaaaagccccctcctagccctattcccctgaccttcgatgagccattctataattttaccgtgatggaatccgaccgcgttacggaaatagtgggagtagtgtctgtccagcctgccaacactcccctgtggttcgatatagtggggggtaactttgactcagccttcgacgcagagaagggagtaggcactattgttatcgccaaaccacttgacgctgagcagagaagcatttataatatgagcgtagaggtaactgatggaacaaacgttgccgtgacgcaggtcttcataaaggttttagataataacgacaatggaccggagttttctcaaccaaattacgacgtgacaatttctgaggacgttctgcccgataccgaaatccttcaaattgaggctaccgacagagatgagaagcataaactcagctacaccgttcattcctcgatcgactcaatctctatgagaaaattcagaattgacccctctacgggcgtactttacacagcagagcgactcgaccacgaggcccaggataaacacatcttgaacattatggtcagagaccaggagttcccgtacagacggaacttggccagggtcatcgtgaatgtagaagacgccaatgatcatagcccctattttactaatcccctttacgaggcatctgtttttgaaagcgctgcacttggaagtgccgtgctgcaggttacggctctggataaggataaaggagaaaatgccgaacttatctacaccatcgaggccggaaacacgggcaacatgtttaaaatcgagccagtgctgggcatcattaccatctgtaaggagccagacatgactacaatgggtcaattcgtcctctctatcaaagtcacggatcagggatctccccctatgtcagctaccgcaattgttcgtatttccgtaacaatgtccgacaactcccacccaaagtttatccataaagactaccaggccgaggtaaacgaaaacgtagatattggcacctcagtcatccttatctctgccatttcccagtccaccctaatttacgaggttaaagatggcgacataaatggcattttcactattaatccctatagcggagttattaccacccagaaagctctagactatgagcgaactagctcatatcagctgattatacaagctacgaacatggccggaatggcatctaatgccacggtgaatattcagattgtggatgagaatgacaatgctcccgtttttcttttctcccagtactcgggaagtctaagtgaagcagccccaataaactcaatcgtcaggagcctggataattctccactggtcattagagccactgacgccgattcaaatagaaacgccctgttagtgtatcagatcgtggagagtacagcaaaaaagttctttaccgtggattccagcaccggtgcgatccgtaccattgccaaccttgaccacgaaacgatcgctcattttcatttccacgttcatgtcagggacagcgggtcaccacagctgacggccgaatcccctgtggaggtgaatatcgaggttacggatgtgaacgataatcccccagtgttcacccaggctgtgttcgaaaccattcttctgctgcccacttacgtgggggtagaggtactgaaagtctccgctacagatccagactcagaagtgccccctgagctgacctactccttgatggaagggtctctggatcactttctcatcgatagcaattcaggcgtcctgacaataaagaacaataacctgtcgaaggaccactatatgctgattgtgaaggtctccgacggcaaattttactcgaccagcatggtgactattatggtgaaggaggccatggactccggactgcattttacacagtctttctactcaacgtcaatcagcgagaataatactaatattaccaaagtagccatcgttaacgcagtggggaaccggcttaacgagcctctaaagtacagcatcctgaaccctgggaataaatttaaaattaagtcaacatcaggagtcattcagacaaccggtgtcccattcgaccgcgaggagcaagaactgtatgagttagtggtcgaggcctcccgcgagctggaccacctgcgcgtcgccagagtggtggtgagagtaaacatagaggacattaatgataacagtccagtcttcgtcggtctcccatattacgctgccgttcaggtagacgctgagccaggcactttgatctaccaggtgaccgctattgacaaagacaaggggccaaatggagaagtgacgtatgttttacaggatgattatggccattttgagatcaatcctaactccggcaacgtgatcctcaaagaagctttcaatagcgacttatccaacattgaatacggggtgaccatactggccaaggacgggggaaagccctctctctccactagtgtcgagcttcccattacaattgtcaataaggcaatgcccgtgttcgacaaaccgttctacactgcgtctgttaatgaggatatcagaatgaatacccccattttgtcaatcaatgcgacatctccggaggggcaaggaatcatctacattatcatcgacggagaccccttcaaacagtttaacattgacttcgataccggggtcctgaaagtggtgtcaccactcgactatgaagtgacgagtgcgtataagctgaccatccgagcttcagatgcattaaccggggcacgcgcagaagttacagtggatctccttgtaaatgatgtgaacgataacccccctatttttgatcagcccacttacaacactaccctttccgaggcctctttgatcggcactccagtgttacaggtggtgtctattgacgcagacagtgaaaacaataagatggtccattaccaaattgtacaggacacctacaattccaccgattattttcatatagactcaagcagtggcctgattctcactgcaaggatgctcgaccacgaactggtacagcactgcaccctgaaagtaaggtctattgatagtggtttcccttccttgtccagcgaagttctagtccacatctatatcagcgatgtgaacgacaatcctcctgtcttcaatcaactaatctatgagagctacgtgagcgaactggccccaaggggccactttgttacctgcgtgcaggcttctgacgctgatagctccgactttgatcgcctggaatactccattctgagcggaaatgaccggacaagttttcttatggacagcaagtcaggcgtgattaccctgtccaaccacaggaagcagcggatggagcccttgtattccttaaatgtgtccgtgtctgacgggttattcacctctacagctcaggttcacattcgggtccttggtgctaacctgtattcccctgcctttagccagtccacatacgttgctgaggtgcgggagaacgtggccgctggcacgaaagtgatccacgtgagggcaacggacggcgaccccggtacttacggacagattagctacgcgataattaatgactttgccaaggatcgttttcttatagacagcaacgggcaggtgataactaccgagcgcctcgatcgcgaaaacccactggagggagacgtgagcattttcgtaagggcattggatggcggaggcaggaccaccttctgcaccgtgagagtgatcgttgtggatgagaatgacaatgctcctcagtttatgacagtggaatatcgagctagcgtgcgggctgacgtaggtcggggacacttggtgactcaggtgcaggctatcgacccagatgatggagcaaactcaaggattacttatagcctatattccgaggcgtctgtgagtgttgccgacctcctggagatagatccggacaatggatggatggtcaccaaagggaatttcaaccagttaaagaatacagtcctgtccttctttgtcaaggcagtggatggtgggataccagtcaagcacagtctgatccccgtgtatattcacgtacttccccctgagactttcctgccgtcgtttacacagagtcagtactcattcactattgccgaagacacagccatcggtagcaccgtagacacgctcaggatactcccatcccaaaatgtgtggttttcgaccgtgaacggcgaaaggcctgagaacaacaaaggcggtatctttgtgatcgaacaagaaacaggcacaatcaagctggataagcgactggacagggagacctcgccagcctttcacttcaaagtggcagcaaccatcccacttgataaggttgacattgtcttcaccgtagatgtggatatcaaagtgctagacctcaatgataataagccagtgtttgagacctcctcttatgataccattattatggaagggatgcctgtgggcactaagttgactcaagtccgggcaattgatatggactggggggctaatggccaggtgacctactctctccactccgactcccagcccgagaaagttatggaagcctttaacatcgattctaatactggctggattagcactctcaaggacctggaccacgagacagacccgacgttcaccttctccgtcgtagctagcgacctaggcgaagcattttctcttagctctacagctttggttagcgttcgggtcaccgacataaatgacaacgcccctgtattcgcacaggaggtatacaggggtaatgtgaaagagtcagatcctcctggggaggtggttgcagtactgagtacctgggaccgagatacgtccgacgtcaacagacaggtgtcttatcacatcaccggcggaaatcctagagggcgtttcgcccttgggctggttcagtccgaatggaaagtgtacgtgaagcgaccgctagatcgtgaagagcaggatatctacttcttgaacataacagcaacagacggactgtttgtaacccaggctatggttgaggtctctgtgtccgacgttaatgataattcccccgtgtgtgaccaggtcgcttacacagccttgctgcctgaggatatacctagcaataagataattcttaaggttagcgccaaggacgcagatatcggcagtaatgggtatattcgttactctctgtatgggagcggtaactccgaattttttttagacccggagagcggagagctgaaaacactagcacttctggatagagagagaattcctgtttatagcctgatggccaaagccactgacggcggaggtagattttgccagagcaatatccaccttattctcgaggatgtgaatgacaaccccccagtgttctcctcagaccactacaatacatgcgtttatgagaatactgccaccaaggcactcctgacaagggttcaagctgtcgacccagatattggcattaatcgaaaagtggtgtacagcctggcggacagtgcgggtggcgtattttccattgactcctctagcggcataatcatccttgagcagcctttggatcgagaacagcagtccagctacaacatttcagtccgcgctaccgatcagagccccggacagtcacttagttcactgacaactgtgacaattacagttttggacataaacgacaacccaccagtgttcgagcgcagagattacctagtgactgtgcctgaggacacgagcccagggacccaagttctcgctgtctttgcaacttctaaggatatagggacgaatgctgaaattacctatctaatccggtctggtaacgagcaggggaaatttaaaattaaccctaaaacagggggaatctccgtgtccgaggttctggattatgagctttgtaaaaggttctacctagtggtagaggctaaggacgggggaacgcctgccctaagtgccgtcgctactgtgaatatcaatttgacggatgttaacgataaccctcccaagttctcccaggatgtctattcggccgtcattagcgaagatgcccttgtcggagacagtgtaatcttgctaattgccgaggacgtagattcccagcccaatgggcagatacacttcagcatagtgaacggggaccgggataatgagttcacggtggaccctgtgcttggactggtgaaagtgaaaaaaaagctcgatcgggaaagagtttctggttacagcctcctggtacaggccgtggacagcgggatccccgcaatgagtagcaccgcgacggtaaacatagatatctcggatgtgaacgacaattcccccgtgtttacgcccgcaaactacacagctgttattcaggagaataaaccagtgggaaccagcattctccaacttgtggtgactgacagagactctttccataatggcccacccttctccttctctatcctgtccggcaacgaagaggaagagttcgtactggatcctcacggtatcctgaggtcagcggtggtgtttcagcataccgagagccttgagtatgttctctgtgtgcaggccaaggacagtggcaaacctcagcaggtgtcccacacatacattcgggtgagagttattgaggaatccacccataagccaacagccatacccctcgaaatcttcattgttacaatggaggacgatttccccggaggtgtgatcggaaagattcacgccacagaccaggatatgtatgatgtgcttaccttcgctttaaagagcgaacagaagtccctgtttaaggttaacagtcacgatggaaaaattatagccttgggcggtctggatagcgggaagtacgtgctcaacgttagcgtttctgacgggaggttccaggttcccattgacgtggttgtccacgtggagcagctggttcacgaaatgctccagaataccgttacaatcagatttgagaatgtctcacccgaagatttcgtcggactgcatatgcatgggtttcggagaacgctgcggaatgccgtcctgacccagaaacaagacagcctgaggatcatcagtattcagcccgtggccggtaccaaccagttggatatgcttttcgccgtcgagatgcacagtagcgagttctataagcccgcatacctgatccagaagctgtccaatgcaagaagacatctcgaaaacattatgcgtattagcgccattctggaaaagaactgttccggtctagactgccaggaacagcactgcgaacaaggacttagtctcgattcccacgcgctgatgacctattctacagcgaggatcagcttcgtttgcccacggttttaccggaacgtgagatgcacatgtaacggaggcctctgtcctggatctaatgatccatgtgtagagaaaccatgcccaggtgacatgcagtgtgtgagttacgaagctagcaggcggcctttcctgtgtcagtgtccacccggaaagctgggagagtgtagcggtcatacgtccctcagttttgccggtaactcttacatcaagtacaggctgtcagagaactccaaggaggaagacttcaagttggccctccgacttcgcacactgcagagtaacggaataataatgtacacccgagctaacccgtgcatcattttaaagattgtagatggcaagctttggttccaattggactgtggcagtggtccaggcatattgggcataagtggccgtgcagtgaacgacggtagctggcattcagtcttcctagaactgaatcgtaatttcacctccctgtccttggacgactcctacgttgaacgcagacgtgctccgctgtactttcagacactgtccacggagagctccatatactttggcgctctggtccaggctgacaatatcaggtcactaactgatactcgggtgacccaggtcctgtctggctttcagggttgcctcgattcagtaattctcaacaacaacgagcttccactgcagaataagcggagcagttttgctgaggtagtgggccttaccgagctgaaactcgggtgtgtcttgtaccctgacgcttgtaagaggtccccatgtcagcacgggggttcatgtactgggcttccttcaggtggttatcagtgtacgtgcttaagccaattcacaggaaggaactgcgaatccgaaatcacagcctgtttcccaaacccgtgtcgcaacgggggatcctgcgacccaatcggcaacacgtttatctgtaattgcaaggccggactgaccggcgtcacgtgcgaagaggatatcaacgaatgcgagagagaggagtgcgaaaacggcggatcttgcgtgaacgtgttcggttcctttctgtgtaattgtacacccggatatgtgggccaatattgcggtctgcggccagtggttgtgccgaatattcaggccggtcattcatatgtgggaaaggaggagctaattgggattgctgttgtgctctttgtaattttcatcctggtggtgttatttatcgtctttagaaagaaagtttttagaaaaaattatagtcggaataacatcacccttgtgcaggatccagcgacggcagccctgctcaacaagtccaacggaataccgtttagaaatttgcgtggctccggtgacggtcggaacgtttaccaggaggttggtcccccacaggtcccagtccgccctatggcttacacaccctgtttccaatccgacagccggagcaatctggataagattgtggatggcctcggaggggagcatcaagaaatgacaacttttcacccagagagtccacgaatcctgactgcccgtcgtggagttgttgtgtgttccgttgcacctaaccttcccgcagtaagcccctgtcgaagcgattgcgactccatcaggaagaacgggtgggatgctggaaccgagaataaaggcgtggacgatcctggagaagtgacctgttttgccggtagcaataaaggctcaaacagcgaagtgcagtcactgagttccttccaatcagactctggggatgacaatgcctaccattgggatacatccgactggatgcccggagcccgtctgagcgatatcgaggaagtgccaaattacgaaaaccaggatggtggtagtgcccatcaggggtcaacacgggaactggaaagtgactactatctgggcggatatgatatagattcggagtaccctccacctcacgaggaggaatttctcagccaggatcagttaccaccccctctcccggaggatttccctgaccagtacgaggccctccctccatcacagccagtttctttggcctctacattgtctcccgactgtcgccgacgccctcaattccatccttcacagtacttgccaccacacccttttcccaacgagactgacctcgtgggccctcccgcttcctgtgagttcagcacgttcgccgttagcatgaaccagggtaccgagcctactggaccggctgacagtgtgagcctttcactacacaattcacgcggaacatcaagtagtgatgtctccgcgaattgcggtttcgacgacagcgaggtggctatgagtgactacgagagtgtcggggaattaagcttagcctctctgcatattcctttcgtcgagacacagcaccaaacccaggtctaa

SEQ ID NO: 23413 - DNA, 3765 bp, Artificial Sequence
  derived and/or modified sequence
atggacatcataatggggcattgcgtaggtacaagacccccagcctgttgtctgattctcctgttattcaaacttttagccactgttagtcaggggctacccggaacgggacccctgggattccactttactcactctatatacaatgcaacagtgtacgagaactctgcagcacgcacatatgtgaacagccagtcaagaatggggatcactctgattgatctgtcatgggacattaagtaccggattgtgagcggagatgaggagggcttcttcaaggcagaggaagtgatcatagcagatttctgcttccttagaatcagaactaagggagggaacagtgctatacttaacagagaaatccaggataattatctgctaatcgtgaagggaagcgtcaggggagaggacttagaggcttggaccaaggtgaacatccaggtgctggatatgaatgatctgcggcctctattcagccccacaacctacagtgtgacaattgctgaatctacccctctgaggacttccgtcgctcaggtgacagccacggatgctgacatcgggtccaatggtgagttttactattactttaagaataaagtggatctattctcagtccatccaacatcaggcgtgatttctttatccgggagattgaattacgatgagaaaaatagatacgacctggagattttggcagtggacaggggaatgaagttatatggcaataacggggtgtcttctacagccaagttgtacgtgcatattgagaggataaatgaacatgcccctaccatccacgttgtgactcacgtgccattttcccttgagaaagaacccacttacgccgtcgtaacagtcgatgatctcgacgacggggctaatggagagatagagagtgtgtctatcgtggccggagacccactggaccagttttttcttgcaaaggagggtaaatggttgaacgagtacaagataaaagagagaaagcagatagactgggaaagcttcccatacgggtataaccttacgctgcaggccaaagataagggttcaccccagaagtgttccgctttgaaagcggtctatatcggcaatcccaccagggacacggtgccgattaggtttgagaaagaggtttacgatgtctcgatcagcgagttttctcctcccggagtggtggtggcaattgtgaaactgagtcccgaacctatagatgtagagtacaaattgagcccaggcgaggacgccgtgtatttcaaaatcaacccgagatctggactgatcgtgacagcgcgaccactcaacacggttaaaaaagaggtatataagcttgaggttactaacaaggaaggggatctgaaagcccaggtcaccatctccatagaggatgctaacgatcatactcccgagtttcagcaaccgctgtacgacgcttacgttaacgagtctgttcctgttggcacttccgtgctgaccgtaagcgcttccgacaaggataaaggagagaacggctatatcacatactctatagcttctctgaacttgctccccttcgtgattaatcaatttaccggtgttatcagcaccactgaagagctggattttgagtccagcccggaaatctatcgcttcatcgtgcgagcttccgattgggggtccccataccgccatgagagtgaggtcaacgttacgattagaatcgggaatgttaatgataactctccattgtttgagaaggtggcctgtcagggcgtcatttcctatgattttcccgtgggcggtcacatcacagctgtgtctgctattgacatcgatgaactggaactggtgaaatataagattatttcaggcaatgaactcgggtttttctaccttaaccctgattccggggtccttcagttgaaaaaatctctgacaaatagcgggattaaaaatggcaacttcgccctgcgtatcacagccaccgatggggaaaacctggctgatccgatgagtataaacatttccgtgttgcatggcaaggtgtcctcaaagtccttctcatgcagagagacaagggtggcccaaaagcttgccgaaaaactcctgataaaggcaaaagccaatggcaaactgaatctggaggatggctttttggatttctattctatcaatcgccagggcccttacttcgataagagtttcccctcggacgttgctgtaaaagaggacctgcctgtaggggctaatattctcaaaattaaggcctatgacgcagattccgggtttaacggcaaggttctgtttactattagtgatggcaatactgacagctgctttaatatcgatatggagacgggtcagctgaaggtacttatgcccatggaccgggaacacaccgacctgtaccttttaaatataaccatctacgacttggggaatccacagaagtcctcatggcgcctcctgaccattaacgtcgaggatgcaaacgacaattcccccgtgtttatccaggattcatactctgtcaacatcctggagtcatccggcatcggtactgagattatccaggtggaggccagagataaggaccttggctccaacggggaggttacatatagcgttcttacggacacacagcagtttgctatcaacagcagcacaggaatagtgtatgtagccgaccagctggatagagaatccaaagctaattactcactgaaaattgaagctagagacaaggccgaatcggggcagcagctcttcagtgtagtcaccctgaaggtattcttggacgatgttaatgactgctctccagctttcataccctcatcgtatagcgtcaaggtgctggaggacctccccgtagggacggtgatcgcatggctggaaacccacgaccccgatctcggtctgggcggacaggtgaggtatagtctggtgaacgattataacggtcgcttcgagatagataaggccagcggcgctatcaggctgagcaaggagctggattatgaaaagcagcagttctacaatctcacagtgagggcaaaggataagggaagacccgtctcgctaagcagtgtgagtttcgtggaggtggaggttgtggacgtcaatgaaaacctccacaccccctatttcccagactttgctgtcgtcggtagcgtcaaagagaatagccgcatcggcacatcagtcctgcaagtgaccgctcgtgatgaggactccgggcgtgatggagaaatccagtactccatcagggacgggtctggcctgggtagatttagcatcgacgacgagtccggggtgatcacggcggcagacatactggaccgagaaacgatgggaagttactggctgacagtctacgccaccgaccgcggtgtcgtccctctgtattccaccatcgaggtgtacatcgaggttgaagacgtcaacgacaacgcccctcttacttctgagcccatttactatcccgtggttatggagaattctccaaaagatgtgagcgtgattcaaatccaagccgaagatccagattcctcatctaacgagaaacttacgtaccggataacaagcggcaatcctcagaacttctttgccataaacatcaagacagggagctgctccgtcgctcaggctggaatgcagtggcacgaccactcaagcctgcaaagtaggactccagggtttaagggctatccctgtctgtctctgctcagttcttgggactaccggcatgctcccccatgccccgcaacatttctcaactcttag

SEQ ID NO: 23414 - DNA, 13674 bp, Artificial Sequence
  derived and/or modified sequence
atggacatcatcatgggccactgcgtgggcaccagaccccccgcctgctgcctgatcctgctgctgttcaagctgctggccaccgtgagccagggcctgcccggcaccggccccctgggcttccacttcacccacagcatctacaacgccaccgtgtacgagaacagcgccgccagaacctacgtgaacagccagagcagaatgggcatcaccctgatcgacctgagctgggacatcaagtacagaatcgtgagcggcgacgaggagggcttcttcaaggccgaggaggtgatcatcgccgacttctgcttcctgagaatcagaaccaagggcggcaacagcgccatcctgaacagagagatccaggacaactacctgctgatcgtgaagggcagcgtgagaggcgaggacctggaggcctggaccaaggtgaacatccaggtgctggacatgaacgacctgagacccctgttcagccccaccacctacagcgtgaccatcgccgagagcacccccctgagaaccagcgtggcccaggtgaccgccaccgacgccgacatcggcagcaacggcgagttctactactacttcaagaacaaggtggacctgttcagcgtgcaccccaccagcggcgtgatcagcctgagcggcagactgaactacgacgagaagaacagatacgacctggagatcctggccgtggacagaggcatgaagctgtacggcaacaacggcgtgagcagcaccgccaagctgtacgtgcacatcgagagaatcaacgagcacgcccccaccatccacgtggtgacccacgtgcccttcagcctggagaaggagcccacctacgccgtggtgaccgtggacgacctggacgacggcgccaacggcgagatcgagagcgtgagcatcgtggccggcgaccccctggaccagttcttcctggccaaggagggcaagtggctgaacgagtacaagatcaaggagagaaagcagatcgactgggagagcttcccctacggctacaacctgaccctgcaggccaaggacaagggcagcccccagaagtgcagcgccctgaaggccgtgtacatcggcaaccccaccagagacaccgtgcccatcagattcgagaaggaggtgtacgacgtgagcatcagcgagttcagcccccccggcgtggtggtggccatcgtgaagctgagccccgagcccatcgacgtggagtacaagctgagccccggcgaggacgccgtgtacttcaagatcaaccccagaagcggcctgatcgtgaccgccagacccctgaacaccgtgaagaaggaggtgtacaagctggaggtgaccaacaaggagggcgacctgaaggcccaggtgaccatcagcatcgaggacgccaacgaccacacccccgagttccagcagcccctgtacgacgcctacgtgaacgagagcgtgcccgtgggcaccagcgtgctgaccgtgagcgccagcgacaaggacaagggcgagaacggctacatcacctacagcatcgccagcctgaacctgctgcccttcgtgatcaaccagttcaccggcgtgatcagcaccaccgaggagctggacttcgagagcagccccgagatctacagattcatcgtgagagccagcgactggggcagcccctacagacacgagagcgaggtgaacgtgaccatcagaatcggcaacgtgaacgacaacagccccctgttcgagaaggtggcctgccagggcgtgatcagctacgacttccccgtgggcggccacatcaccgccgtgagcgccatcgacatcgacgagctggagctggtgaagtacaagatcatcagcggcaacgagctgggcttcttctacctgaaccccgacagcggcgtgctgcagctgaagaagagcctgaccaacagcggcatcaagaacggcaacttcgccctgagaatcaccgccaccgacggcgagaacctggccgaccccatgagcatcaacatcagcgtgctgcacggcaaggtgagcagcaagagcttcagctgcagagagaccagagtggcccagaagctggccgagaagctgctgatcaaggccaaggccaacggcaagctgaacctggaggacggcttcctggacttctacagcatcaacagacagggcccctacttcgacaagagcttccccagcgacgtggccgtgaaggaggacctgcccgtgggcgccaacatcctgaagatcaaggcctacgacgccgacagcggcttcaacggcaaggtgctgttcaccatcagcgacggcaacaccgacagctgcttcaacatcgacatggagaccggccagctgaaggtgctgatgcccatggacagagagcacaccgacctgtacctgctgaacatcaccatctacgacctgggcaacccccagaagagcagctggagactgctgaccatcaacgtggaggacgccaacgacaacagccccgtgttcatccaggacagctacagcgtgaacatcctggagagcagcggcatcggcaccgagatcatccaggtggaggccagagacaaggacctgggcagcaacggcgaggtgacctacagcgtgctgaccgacacccagcagttcgccatcaacagcagcaccggcatcgtgtacgtggccgaccagctggacagagagagcaaggccaactacagcctgaagatcgaggccagagacaaggccgagagcggccagcagctgttcagcgtggtgaccctgaaggtgttcctggacgacgtgaacgactgcagccccgccttcatccccagcagctacagcgtgaaggtgctggaggacctgcccgtgggcaccgtgatcgcctggctggagacccacgaccccgacctgggcctgggcggccaggtgagatacagcctggtgaacgactacaacggcagattcgagatcgacaaggccagcggcgccatcagactgagcaaggagctggactacgagaagcagcagttctacaacctgaccgtgagagccaaggacaagggcagacccgtgagcctgagcagcgtgagcttcgtggaggtggaggtggtggacgtgaacgagaacctgcacaccccctacttccccgacttcgccgtggtgggcagcgtgaaggagaacagcagaatcggcaccagcgtgctgcaggtgaccgccagagacgaggacagcggcagagacggcgagatccagtacagcatcagagacggcagcggcctgggcagattcagcatcgacgacgagagcggcgtgatcaccgccgccgacatcctggacagagagaccatgggcagctactggctgaccgtgtacgccaccgacagaggcgtggtgcccctgtacagcaccatcgaggtgtacatcgaggtggaggacgtgaacgacaacgcccccctgaccagcgagcccatctactaccccgtggtgatggagaacagccccaaggacgtgagcgtgatccagatccaggccgaggaccccgacagcagcagcaacgagaagctgacctacagaatcaccagcggcaacccccagaacttcttcgccatcaacatcaagaccggcctgatcaccaccaccagcagaaagctggacagagagcagcaggccgagcacttcctggaggtgaccgtgaccgacggcggccccagccccaagcagagcaccatctgggtggtggtgcaggtgctggacgagaacgacaacaagccccagttccccgagaaggtgtaccagatcaagctgcccgagagagacagaaagaagagaggcgagcccatctacagagccttcgccttcgacagagacgagggccccaacgccgagatcagctacagcatcgtggacggcaacgacgacggcaagttcttcatcgaccccaagaccggcatggtgagcagcagaaagcagttcaccgccggcagctacgacatcctgaccatcaaggccgtggacaacggcagaccccagaagagcagcaccgccagactgcacatcgagtggatcaagaagcccccccccagccccatccccctgaccttcgacgagcccttctacaacttcaccgtgatggagagcgacagagtgaccgagatcgtgggcgtggtgagcgtgcagcccgccaacacccccctgtggttcgacatcgtgggcggcaacttcgacagcgccttcgacgccgagaagggcgtgggcaccatcgtgatcgccaagcccctggacgccgagcagagaagcatctacaacatgagcgtggaggtgaccgacggcaccaacgtggccgtgacccaggtgttcatcaaggtgctggacaacaacgacaacggccccgagttcagccagcccaactacgacgtgaccatcagcgaggacgtgctgcccgacaccgagatcctgcagatcgaggccaccgacagagacgagaagcacaagctgagctacaccgtgcacagcagcatcgacagcatcagcatgagaaagttcagaatcgaccccagcaccggcgtgctgtacaccgccgagagactggaccacgaggcccaggacaagcacatcctgaacatcatggtgagagaccaggagttcccctacagaagaaacctggccagagtgatcgtgaacgtggaggacgccaacgaccacagcccctacttcaccaaccccctgtacgaggccagcgtgttcgagagcgccgccctgggcagcgccgtgctgcaggtgaccgccctggacaaggacaagggcgagaacgccgagctgatctacaccatcgaggccggcaacaccggcaacatgttcaagatcgagcccgtgctgggcatcatcaccatctgcaaggagcccgacatgaccaccatgggccagttcgtgctgagcatcaaggtgaccgaccagggcagcccccccatgagcgccaccgccatcgtgagaatcagcgtgaccatgagcgacaacagccaccccaagttcatccacaaggactaccaggccgaggtgaacgagaacgtggacatcggcaccagcgtgatcctgatcagcgccatcagccagagcaccctgatctacgaggtgaaggacggcgacatcaacggcatcttcaccatcaacccctacagcggcgtgatcaccacccagaaggccctggactacgagagaaccagcagctaccagctgatcatccaggccaccaacatggccggcatggccagcaacgccaccgtgaacatccagatcgtggacgagaacgacaacgcccccgtgttcctgttcagccagtacagcggcagcctgagcgaggccgcccccatcaacagcatcgtgagaagcctggacaacagccccctggtgatcagagccaccgacgccgacagcaacagaaacgccctgctggtgtaccagatcgtggagagcaccgccaagaagttcttcaccgtggacagcagcaccggcgccatcagaaccatcgccaacctggaccacgagaccatcgcccacttccacttccacgtgcacgtgagagacagcggcagcccccagctgaccgccgagagccccgtggaggtgaacatcgaggtgaccgacgtgaacgacaacccccccgtgttcacccaggccgtgttcgagaccatcctgctgctgcccacctacgtgggcgtggaggtgctgaaggtgagcgccaccgaccccgacagcgaggtgccccccgagctgacctacagcctgatggagggcagcctggaccacttcctgatcgacagcaacagcggcgtgctgaccatcaagaacaacaacctgagcaaggaccactacatgctgatcgtgaaggtgagcgacggcaagttctacagcaccagcatggtgaccatcatggtgaaggaggccatggacagcggcctgcacttcacccagagcttctacagcaccagcatcagcgagaacaacaccaacatcaccaaggtggccatcgtgaacgccgtgggcaacagactgaacgagcccctgaagtacagcatcctgaaccccggcaacaagttcaagatcaagagcaccagcggcgtgatccagaccaccggcgtgcccttcgacagagaggagcaggagctgtacgagctggtggtggaggccagcagagagctggaccacctgagagtggccagagtggtggtgagagtgaacatcgaggacatcaacgacaacagccccgtgttcgtgggcctgccctactacgccgccgtgcaggtggacgccgagcccggcaccctgatctaccaggtgaccgccatcgacaaggacaagggccccaacggcgaggtgacctacgtgctgcaggacgactacggccacttcgagatcaaccccaacagcggcaacgtgatcctgaaggaggccttcaacagcgacctgagcaacatcgagtacggcgtgaccatcctggccaaggacggcggcaagcccagcctgagcaccagcgtggagctgcccatcaccatcgtgaacaaggccatgcccgtgttcgacaagcccttctacaccgccagcgtgaacgaggacatcagaatgaacacccccatcctgagcatcaacgccaccagccccgagggccagggcatcatctacatcatcatcgacggcgaccccttcaagcagttcaacatcgacttcgacaccggcgtgctgaaggtggtgagccccctggactacgaggtgaccagcgcctacaagctgaccatcagagccagcgacgccctgaccggcgccagagccgaggtgaccgtggacctgctggtgaacgacgtgaacgacaacccccccatcttcgaccagcccacctacaacaccaccctgagcgaggccagcctgatcggcacccccgtgctgcaggtggtgagcatcgacgccgacagcgagaacaacaagatggtgcactaccagatcgtgcaggacacctacaacagcaccgactacttccacatcgacagcagcagcggcctgatcctgaccgccagaatgctggaccacgagctggtgcagcactgcaccctgaaggtgagaagcatcgacagcggcttccccagcctgagcagcgaggtgctggtgcacatctacatcagcgacgtgaacgacaacccccccgtgttcaaccagctgatctacgagagctacgtgagcgagctggcccccagaggccacttcgtgacctgcgtgcaggccagcgacgccgacagcagcgacttcgacagactggagtacagcatcctgagcggcaacgacagaaccagcttcctgatggacagcaagagcggcgtgatcaccctgagcaaccacagaaagcagagaatggagcccctgtacagcctgaacgtgagcgtgagcgacggcctgttcaccagcaccgcccaggtgcacatcagagtgctgggcgccaacctgtacagccccgccttcagccagagcacctacgtggccgaggtgagagagaacgtggccgccggcaccaaggtgatccacgtgagagccaccgacggcgaccccggcacctacggccagatcagctacgccatcatcaacgacttcgccaaggacagattcctgatcgacagcaacggccaggtgatcaccaccgagagactggacagagagaaccccctggagggcgacgtgagcatcttcgtgagagccctggacggcggcggcagaaccaccttctgcaccgtgagagtgatcgtggtggacgagaacgacaacgccccccagttcatgaccgtggagtacagagccagcgtgagagccgacgtgggcagaggccacctggtgacccaggtgcaggccatcgaccccgacgacggcgccaacagcagaatcacctacagcctgtacagcgaggccagcgtgagcgtggccgacctgctggagatcgaccccgacaacggctggatggtgaccaagggcaacttcaaccagctgaagaacaccgtgctgagcttcttcgtgaaggccgtggacggcggcatccccgtgaagcacagcctgatccccgtgtacatccacgtgctgccccccgagaccttcctgcccagcttcacccagagccagtacagcttcaccatcgccgaggacaccgccatcggcagcaccgtggacaccctgagaatcctgcccagccagaacgtgtggttcagcaccgtgaacggcgagagacccgagaacaacaagggcggcatcttcgtgatcgagcaggagaccggcaccatcaagctggacaagagactggacagagagaccagccccgccttccacttcaaggtggccgccaccatccccctggacaaggtggacatcgtgttcaccgtggacgtggacatcaaggtgctggacctgaacgacaacaagcccgtgttcgagaccagcagctacgacaccatcatcatggagggcatgcccgtgggcaccaagctgacccaggtgagagccatcgacatggactggggcgccaacggccaggtgacctacagcctgcacagcgacagccagcccgagaaggtgatggaggccttcaacatcgacagcaacaccggctggatcagcaccctgaaggacctggaccacgagaccgaccccaccttcaccttcagcgtggtggccagcgacctgggcgaggccttcagcctgagcagcaccgccctggtgagcgtgagagtgaccgacatcaacgacaacgcccccgtgttcgcccaggaggtgtacagaggcaacgtgaaggagagcgacccccccggcgaggtggtggccgtgctgagcacctgggacagagacaccagcgacgtgaacagacaggtgagctaccacatcaccggcggcaaccccagaggcagattcgccctgggcctggtgcagagcgagtggaaggtgtacgtgaagagacccctggacagagaggagcaggacatctacttcctgaacatcaccgccaccgacggcctgttcgtgacccaggccatggtggaggtgagcgtgagcgacgtgaacgacaacagccccgtgtgcgaccaggtggcctacaccgccctgctgcccgaggacatccccagcaacaagatcatcctgaaggtgagcgccaaggacgccgacatcggcagcaacggctacatcagatacagcctgtacggcagcggcaacagcgagttcttcctggaccccgagagcggcgagctgaagaccctggccctgctggacagagagagaatccccgtgtacagcctgatggccaaggccaccgacggcggcggcagattctgccagagcaacatccacctgatcctggaggacgtgaacgacaacccccccgtgttcagcagcgaccactacaacacctgcgtgtacgagaacaccgccaccaaggccctgctgaccagagtgcaggccgtggaccccgacatcggcatcaacagaaaggtggtgtacagcctggccgacagcgccggcggcgtgttcagcatcgacagcagcagcggcatcatcatcctggagcagcccctggacagagagcagcagagcagctacaacatcagcgtgagagccaccgaccagagccccggccagagcctgagcagcctgaccaccgtgaccatcaccgtgctggacatcaacgacaacccccccgtgttcgagagaagagactacctggtgaccgtgcccgaggacaccagccccggcacccaggtgctggccgtgttcgccaccagcaaggacatcggcaccaacgccgagatcacctacctgatcagaagcggcaacgagcagggcaagttcaagatcaaccccaagaccggcggcatcagcgtgagcgaggtgctggactacgagctgtgcaagagattctacctggtggtggaggccaaggacggcggcacccccgccctgagcgccgtggccaccgtgaacatcaacctgaccgacgtgaacgacaacccccccaagttcagccaggacgtgtacagcgccgtgatcagcgaggacgccctggtgggcgacagcgtgatcctgctgatcgccgaggacgtggacagccagcccaacggccagatccacttcagcatcgtgaacggcgacagagacaacgagttcaccgtggaccccgtgctgggcctggtgaaggtgaagaagaagctggacagagagagagtgagcggctacagcctgctggtgcaggccgtggacagcggcatccccgccatgagcagcaccgccaccgtgaacatcgacatcagcgacgtgaacgacaacagccccgtgttcacccccgccaactacaccgccgtgatccaggagaacaagcccgtgggcaccagcatcctgcagctggtggtgaccgacagagacagcttccacaacggcccccccttcagcttcagcatcctgagcggcaacgaggaggaggagttcgtgctggacccccacggcatcctgagaagcgccgtggtgttccagcacaccgagagcctggagtacgtgctgtgcgtgcaggccaaggacagcggcaagccccagcaggtgagccacacctacatcagagtgagagtgatcgaggagagcacccacaagcccaccgccatccccctggagatcttcatcgtgaccatggaggacgacttccccggcggcgtgatcggcaagatccacgccaccgaccaggacatgtacgacgtgctgaccttcgccctgaagagcgagcagaagagcctgttcaaggtgaacagccacgacggcaagatcatcgccctgggcggcctggacagcggcaagtacgtgctgaacgtgagcgtgagcgacggcagattccaggtgcccatcgacgtggtggtgcacgtggagcagctggtgcacgagatgctgcagaacaccgtgaccatcagattcgagaacgtgagccccgaggacttcgtgggcctgcacatgcacggcttcagaagaaccctgagaaacgccgtgctgacccagaagcaggacagcctgagaatcatcagcatccagcccgtggccggcaccaaccagctggacatgctgttcgccgtggagatgcacagcagcgagttctacaagcccgcctacctgatccagaagctgagcaacgccagaagacacctggagaacatcatgagaatcagcgccatcctggagaagaactgcagcggcctggactgccaggagcagcactgcgagcagggcctgagcctggacagccacgccctgatgacctacagcaccgccagaatcagcttcgtgtgccccagattctacagaaacgtgagatgcacctgcaacggcggcctgtgccccggcagcaacgacccctgcgtggagaagccctgccccggcgacatgcagtgcgtgagctacgaggccagcagaagacccttcctgtgccagtgcccccccggcaagctgggcgagtgcagcggccacaccagcctgagcttcgccggcaacagctacatcaagtacagactgagcgagaacagcaaggaggaggacttcaagctggccctgagactgagaaccctgcagagcaacggcatcatcatgtacaccagagccaacccctgcatcatcctgaagatcgtggacggcaagctgtggttccagctggactgcggcagcggccccggcatcctgggcatcagcggcagagccgtgaacgacggcagctggcacagcgtgttcctggagctgaacagaaacttcaccagcctgagcctggacgacagctacgtggagagaagaagagcccccctgtacttccagaccctgagcaccgagagcagcatctacttcggcgccctggtgcaggccgacaacatcagaagcctgaccgacaccagagtgacccaggtgctgagcggcttccagggctgcctggacagcgtgatcctgaacaacaacgagctgcccctgcagaacaagagaagcagcttcgccgaggtggtgggcctgaccgagctgaagctgggctgcgtgctgtaccccgacgcctgcaagagaagcccctgccagcacggcggcagctgcaccggcctgcccagcggcggctaccagtgcacctgcctgagccagttcaccggcagaaactgcgagagcgagatcaccgcctgcttccccaacccctgcagaaacggcggcagctgcgaccccatcggcaacaccttcatctgcaactgcaaggccggcctgaccggcgtgacctgcgaggaggacatcaacgagtgcgagagagaggagtgcgagaacggcggcagctgcgtgaacgtgttcggcagcttcctgtgcaactgcacccccggctacgtgggccagtactgcggcctgagacccgtggtggtgcccaacatccaggccggccacagctacgtgggcaaggaggagctgatcggcatcgccgtggtgctgttcgtgatcttcatcctggtggtgctgttcatcgtgttcagaaagaaggtgttcagaaagaactacagcagaaacaacatcaccctggtgcaggaccccgccaccgccgccctgctgaacaagagcaacggcatccccttcagaaacctgagaggcagcggcgacggcagaaacgtgtaccaggaggtgggccccccccaggtgcccgtgagacccatggcctacaccccctgcttccagagcgacagcagaagcaacctggacaagatcgtggacggcctgggcggcgagcaccaggagatgaccaccttccaccccgagagccccagaatcctgaccgccagaagaggcgtggtggtgtgcagcgtggcccccaacctgcccgccgtgagcccctgcagaagcgactgcgacagcatcagaaagaacggctgggacgccggcaccgagaacaagggcgtggacgaccccggcgaggtgacctgcttcgccggcagcaacaagggcagcaacagcgaggtgcagagcctgagcagcttccagagcgacagcggcgacgacaacgcctaccactgggacaccagcgactggatgcccggcgccagactgagcgacatcgaggaggtgcccaactacgagaaccaggacggcggcagcgcccaccagggcagcaccagagagctggagagcgactactacctgggcggctacgacatcgacagcgagtacccccccccccacgaggaggagttcctgagccaggaccagctgcccccccccctgcccgaggacttccccgaccagtacgaggccctgccccccagccagcccgtgagcctggccagcaccctgagccccgactgcagaagaagaccccagttccaccccagccagtacctgcccccccaccccttccccaacgagaccgacctggtgggcccccccgccagctgcgagttcagcaccttcgccgtgagcatgaaccagggcaccgagcccaccggccccgccgacagcgtgagcctgagcctgcacaacagcagaggcaccagcagcagcgacgtgagcgccaactgcggcttcgacgacagcgaggtggccatgagcgactacgagagcgtgggcgagctgagcctggccagcctgcacatccccttcgtggagacccagcaccagacccaggtgtag

SEQ ID NO: 23415 - DNA, 3765 bp, Artificial Sequence
  derived and/or modified sequence
atggacatcatcatgggccactgcgtgggcaccagaccccccgcctgctgcctgatcctgctgctgttcaagctgctggccaccgtgagccagggcctgcccggcaccggccccctgggcttccacttcacccacagcatctacaacgccaccgtgtacgagaacagcgccgccagaacctacgtgaacagccagagcagaatgggcatcaccctgatcgacctgagctgggacatcaagtacagaatcgtgagcggcgacgaggagggcttcttcaaggccgaggaggtgatcatcgccgacttctgcttcctgagaatcagaaccaagggcggcaacagcgccatcctgaacagagagatccaggacaactacctgctgatcgtgaagggcagcgtgagaggcgaggacctggaggcctggaccaaggtgaacatccaggtgctggacatgaacgacctgagacccctgttcagccccaccacctacagcgtgaccatcgccgagagcacccccctgagaaccagcgtggcccaggtgaccgccaccgacgccgacatcggcagcaacggcgagttctactactacttcaagaacaaggtggacctgttcagcgtgcaccccaccagcggcgtgatcagcctgagcggcagactgaactacgacgagaagaacagatacgacctggagatcctggccgtggacagaggcatgaagctgtacggcaacaacggcgtgagcagcaccgccaagctgtacgtgcacatcgagagaatcaacgagcacgcccccaccatccacgtggtgacccacgtgcccttcagcctggagaaggagcccacctacgccgtggtgaccgtggacgacctggacgacggcgccaacggcgagatcgagagcgtgagcatcgtggccggcgaccccctggaccagttcttcctggccaaggagggcaagtggctgaacgagtacaagatcaaggagagaaagcagatcgactgggagagcttcccctacggctacaacctgaccctgcaggccaaggacaagggcagcccccagaagtgcagcgccctgaaggccgtgtacatcggcaaccccaccagagacaccgtgcccatcagattcgagaaggaggtgtacgacgtgagcatcagcgagttcagcccccccggcgtggtggtggccatcgtgaagctgagccccgagcccatcgacgtggagtacaagctgagccccggcgaggacgccgtgtacttcaagatcaaccccagaagcggcctgatcgtgaccgccagacccctgaacaccgtgaagaaggaggtgtacaagctggaggtgaccaacaaggagggcgacctgaaggcccaggtgaccatcagcatcgaggacgccaacgaccacacccccgagttccagcagcccctgtacgacgcctacgtgaacgagagcgtgcccgtgggcaccagcgtgctgaccgtgagcgccagcgacaaggacaagggcgagaacggctacatcacctacagcatcgccagcctgaacctgctgcccttcgtgatcaaccagttcaccggcgtgatcagcaccaccgaggagctggacttcgagagcagccccgagatctacagattcatcgtgagagccagcgactggggcagcccctacagacacgagagcgaggtgaacgtgaccatcagaatcggcaacgtgaacgacaacagccccctgttcgagaaggtggcctgccagggcgtgatcagctacgacttccccgtgggcggccacatcaccgccgtgagcgccatcgacatcgacgagctggagctggtgaagtacaagatcatcagcggcaacgagctgggcttcttctacctgaaccccgacagcggcgtgctgcagctgaagaagagcctgaccaacagcggcatcaagaacggcaacttcgccctgagaatcaccgccaccgacggcgagaacctggccgaccccatgagcatcaacatcagcgtgctgcacggcaaggtgagcagcaagagcttcagctgcagagagaccagagtggcccagaagctggccgagaagctgctgatcaaggccaaggccaacggcaagctgaacctggaggacggcttcctggacttctacagcatcaacagacagggcccctacttcgacaagagcttccccagcgacgtggccgtgaaggaggacctgcccgtgggcgccaacatcctgaagatcaaggcctacgacgccgacagcggcttcaacggcaaggtgctgttcaccatcagcgacggcaacaccgacagctgcttcaacatcgacatggagaccggccagctgaaggtgctgatgcccatggacagagagcacaccgacctgtacctgctgaacatcaccatctacgacctgggcaacccccagaagagcagctggagactgctgaccatcaacgtggaggacgccaacgacaacagccccgtgttcatccaggacagctacagcgtgaacatcctggagagcagcggcatcggcaccgagatcatccaggtggaggccagagacaaggacctgggcagcaacggcgaggtgacctacagcgtgctgaccgacacccagcagttcgccatcaacagcagcaccggcatcgtgtacgtggccgaccagctggacagagagagcaaggccaactacagcctgaagatcgaggccagagacaaggccgagagcggccagcagctgttcagcgtggtgaccctgaaggtgttcctggacgacgtgaacgactgcagccccgccttcatccccagcagctacagcgtgaaggtgctggaggacctgcccgtgggcaccgtgatcgcctggctggagacccacgaccccgacctgggcctgggcggccaggtgagatacagcctggtgaacgactacaacggcagattcgagatcgacaaggccagcggcgccatcagactgagcaaggagctggactacgagaagcagcagttctacaacctgaccgtgagagccaaggacaagggcagacccgtgagcctgagcagcgtgagcttcgtggaggtggaggtggtggacgtgaacgagaacctgcacaccccctacttccccgacttcgccgtggtgggcagcgtgaaggagaacagcagaatcggcaccagcgtgctgcaggtgaccgccagagacgaggacagcggcagagacggcgagatccagtacagcatcagagacggcagcggcctgggcagattcagcatcgacgacgagagcggcgtgatcaccgccgccgacatcctggacagagagaccatgggcagctactggctgaccgtgtacgccaccgacagaggcgtggtgcccctgtacagcaccatcgaggtgtacatcgaggtggaggacgtgaacgacaacgcccccctgaccagcgagcccatctactaccccgtggtgatggagaacagccccaaggacgtgagcgtgatccagatccaggccgaggaccccgacagcagcagcaacgagaagctgacctacagaatcaccagcggcaacccccagaacttcttcgccatcaacatcaagaccggcagctgcagcgtggcccaggccggcatgcagtggcacgaccacagcagcctgcagagcagaacccccggcttcaagggctacccctgcctgagcctgctgagcagctgggactacagacacgcccccccctgccccgccaccttcctgaacagctag

SEQ ID NO: 23416 - protein, 416 aa, Artificial Sequence
  derived and/or modified sequence
MRQLCRGRVLGISVAIAHGVFSGSLNILLKFLISRYQFSFLTLVQCLTSSTAALSLELLRRLGLIAVPPFGLSLARSFAGVAVLSTLQSSLTLWSLRGLSLPMYVVFKRCLPLVTMLIGVLVLKNGAPSPGVLAAVLITTCGAALAGAGDLTGDPIGYVTGVLAVLVHAAYLVLIQKASADTEHGPLTAQYVIAVSATPLLVICSFASTDSIHAWTFPGWKDPAMVCIFVACILIGCAMNFTTLHCTYINSAVTTSFVGVVKSIATITVGMVAFSDVEPTSLFIAGVVVNTLGSIIYCVAKFMETRKQSNYEDLEAQPRGEEAQLSGDQLPFVMEELPGEGGNGRSEGGEAAGGPAQESRQEVRGSPRGVPLVAGSSEEGSRRSLKDAYLEVWRLVRGTRYMKKDYLIENEELPSP

SEQ ID NO: 23417 - DNA, 1251 bp, Artificial Sequence
  derived and/or modified sequence
atgcgccagttgtgtagaggaagggttttagggatcagcgtggctattgcgcatggcgtgttcagcggcagtctgaacatcctgcttaagttccttattagccgttatcaattctcttttttgacactcgtgcagtgcctgacgtcctcaacagctgccctatctctcgagctgctgagacggttaggcttgatcgccgttccaccctttgggctaagcctggcccggtcattcgcgggggtcgcagtactgagcaccctgcagtccagcctgactttatggagtctgcgtggcctgtcactccccatgtacgttgtctttaagcgatgcctcccactcgttacaatgttgataggcgtccttgtacttaagaacggagctcctagtcccggcgtgctggccgcagtgctcataactacttgcggcgcagcactggccggtgcgggtgaccttacgggcgacccaatcgggtacgttaccggcgttttagcagtcctcgtccacgccgcataccttgttctgatccagaaagcatcggccgataccgagcatggaccattgaccgcgcagtacgtgatagcagtgtcagccactcccctcctggttatctgtagcttcgcaagcacggactcgatccatgcatggaccttcccggggtggaaggatccagccatggtctgcatatttgtggcctgcatactgattggctgtgcaatgaactttaccactctgcattgtacctacatcaattcagctgtgacaacatcattcgttggcgtggtcaagagcatcgccactatcacagtgggaatggtggccttttcagatgtcgagccaacaagcctcttcatcgccggcgtggtcgtaaacacactgggtagtataatctattgtgttgccaagtttatggagacacgaaagcagtctaattatgaagatctggaggctcaacctagaggcgaggaggcgcagctttctggcgatcaactccccttcgtgatggaggagttgccaggagagggtgggaacggccgctccgagggcggagaggctgccggagggccggcccaggaaagcagacaggaggtgagaggttccccgagaggcgtcccgctagtagcagggagcagcgaggagggatcaagaagatctctcaaagacgcgtatctggaagtgtggagactcgtgcggggcactaggtatatgaagaaagactacctgatcgagaacgaggaacttccttctccgtag

SEQ ID NO: 23418 - DNA, 1251 bp, Artificial Sequence
  derived and/or modified sequence
atgaggcagctgtgccggggccgggtgctgggcatctctgtggccatcgcccacggcgtcttcagcggcagcctgaacatcctgctgaagttcctgatcagccgctaccagttctccttcctgaccctggtgcagtgcctgaccagcagcacagctgccctgagcctggagctgctgcggcggctgggcctgattgctgtgccccccttcggcctgagcctggcccggagctttgctggggtggccgtgctgagcaccctgcagagcagcctgaccctgtggagcctgcggggcctgagcctgcccatgtatgtggtgttcaagcgctgcctgcccctggtgaccatgctgattggagtgctggtgctgaagaatggagcccccagccctggggtgctggccgctgtgctgatcaccacctgtggggccgccctggccggggccggggacctgaccggggaccccatcggctacgtgactggagtgctggccgtgctggtgcatgctgcctacctggtgctgatccagaaggccagcgctgacacagagcacggccccctgacagcccagtatgtgattgctgtgtctgccacccccctgctggtgatctgcagctttgccagcacagacagcatccacgcctggaccttccctggctggaaggaccctgccatggtgtgcatctttgtggcctgcatcctgattggctgtgccatgaacttcaccaccctgcactgcacctacatcaacagcgctgtgaccaccagctttgtgggcgtggtgaagagcatcgccaccatcaccgtgggcatggtggccttcagtgatgtggagcccaccagcctcttcatcgccggcgtggtggtgaacaccctgggcagcatcatctactgtgtggccaagttcatggagaccaggaagcagagcaactatgaggacctggaggcccagcccagaggagaggaggcccagctgagcggggaccagctgccctttgtgatggaggagctgcccggggagggcggcaatggccgctctgagggcggggaggccgccggcggccctgcccaggagagccggcaggaggtgcggggcagcccccggggcgtgcccctggtggccggcagcagcgaggagggcagccgccgcagcctgaaggatgcctacctggaggtgtggaggctggtgcggggcacccgctacatgaagaaggactacctgattgaaaatgaggagctgcccagcccctag

SEQ ID NO: 23419 - DNA, 1251 bp, Artificial Sequence
  derived and/or modified sequence
atgcggcagctgtgccggggccgggtgctgggcatcagcgtggccatcgcacatggggtgtttagtggctcactgaacattttactcaaatttctcatatcaaggtaccaattctccttccttaccctggtgcagtgcctcaccagcagcactgccgccctcagcctggagttgctgaggagactcgggctgatcgctgtcccacccttcgggctttcactggctaggtcctttgccggagtcgcggttctgtcgacccttcagagcagcctgaccctgtggtcccttcggggtctctctcttcctatgtacgtcgtgttcaagcggtgcctgcctttagttacaatgttaatcggcgtcctggtattaaaaaacggagccccttctccaggggtgctcgccgccgtgctgatcaccacatgcggcgctgcactcgccggtgctggcgatctgacaggagacccaatcggatacgtgacgggtgttctggctgtactggtccacgcggcatacctcgtcttaattcaaaaggcaagcgctgacactgaacacggacccttaaccgctcaatatgtgatcgctgtcagcgccacccctctattggtgatctgcagcttcgcttccaccgactcaattcacgcctggacttttcctggctggaaggatccagcaatggtctgcatctttgttgcctgtattcttatcgggtgcgccatgaattttactacgctgcactgcacatatataaatagcgctgtgactacatcatttgtcggagtcgtgaagtccattgccacgatcacagtcggcatggtggcgttctccgacgtggaacctacatcactcttcattgcaggcgtcgttgtgaatacattgggctctattatctattgtgttgcgaagtttatggaaacacgcaagcaatcaaattacgaggatcttgaggcccaacctagaggtgaagaagcccagttgagcggggaccaattgcctttcgtgatggaagagctgcccggcgagggtggtaatggccggtccgagggcggggaggccgctggaggccccgcccaggaaagtaggcaagaagttaggggaagcccaagaggtgtgccactggtggccggtagttctgaggagggttctcggagatcgcttaaggatgcctaccttgaggtgtggcgcttagtgcgaggaacacgatacatgaaaaaagactatctgatcgagaacgaggaattgccctctccttag

SEQ ID NO: 23420 - DNA, 1251 bp, Artificial Sequence
  derived and/or modified sequence
atgcgccagctgtgtaggggacgggtcctgggtatttctgtcgccatagcccatggagtgttctctggatctctgaatattctgctgaagttcctgattagccggtatcaatttagctttcttaccctggtgcagtgcctcacctcctccactgcagctctgagcttagaactgctgcgcagactgggcctgattgccgttccgcctttcggcctgtccctggcgagatcctttgcaggagtcgccgtgctgagcacactccagagctctttgacactgtggagtctgagggggctctctttgccgatgtacgtcgtctttaaaaggtgcttgccgcttgtcacaatgttaattggggttctggtgctcaagaatggagctcccagccctggtgtccttgctgcagttcttataactacttgcggagccgctctggctggagccggagacctcactggagacccaataggatacgtgacgggcgttttagcggtcctggtgcacgccgcttacctggtgctgatacagaaagcatcagccgacacagaacatgggccactcaccgcccaatatgtgattgctgtgagtgcgacacctctgttggtaatctgttccttcgccagtaccgacagcatccacgcctggacgtttccgggatggaaagaccctgccatggtctgcattttcgttgcttgcatcctgatcgggtgtgctatgaatttcaccacgctgcactgcacttatatcaattcagcagtgacaactagcttcgtgggagttgttaagtcgattgctactatcaccgttggaatggtggcattcagcgatgtggagcctactagtctgtttatagcaggagtggtggtgaatacgttggggtccattatatattgcgtggccaagttcatggagacaagaaagcaatccaattacgaagacctggaagcacagccacgcggtgaggaagctcagctttccggcgaccagcttccttttgtgatggaggaactcccgggtgaggggggtaacggcaggtcagaaggtggagaggccgctggtggacccgctcaggaaagccgccaggaagtgagaggatcaccaagaggggtacctcttgtggccggatctagcgaggaagggtctcgcaggtccctcaaggacgcctatctggaagtgtggagactagtgagaggaacacgctacatgaagaaagactacctgattgagaacgaggagctccccagtccttag

SEQ ID NO: 23421 - DNA, 2359 bp, Artificial Sequence
  derived and/or modified sequence
cgcaagaacgcctggccggagctgccctctgcagccgagccggcgccccctgcccttcgccgccgcgctgggcgggcgcccccgccgccctcactccgctgctcccggctcctcgcgcgcaggtcgcggagctccgccaccgctgggtgcggcgaggccggcgcgatgcggcagctgtgccggggccgcgtgctgggcatctcggtggccatcgcgcacggggtcttctcgggctccctcaacatcttgctcaagttcctcatcagccgctaccagttctccttcctgaccctggtgcagtgcctgaccagctccaccgcggcgctgagcctggagctgctgcggcgcctcgggctcatcgccgtgccccccttcggtctgagcctggcgcgctccttcgcgggggtcgcggtgctctccacgctgcagtccagcctcacgctctggtccctgcgcggcctcagcctgcccatgtacgtggtcttcaagcgctgcctgcccctggtcaccatgctcatcggcgtcctggtgctcaagaacggcgcgccctcgccaggggtgctggcggcggtgctcatcaccacctgcggcgccgccctggcaggagccggcgacctgacgggcgaccccatcgggtacgtcacgggagtgctggcggtgctggtgcacgctgcctacctggtgctcatccagaaggccagcgcagacaccgagcacgggccgctcaccgcgcagtacgtcatcgccgtctctgccaccccgctgctggtcatctgctccttcgccagcaccgactccatccacgcctggaccttcccgggctggaaggacccggccatggtctgcatcttcgtggcctgcatcctgatcggctgcgccatgaacttcaccacgctgcactgcacctacatcaattcggccgtgaccaccagcttcgtgggtgtggtgaagagcatcgccaccatcacggtgggcatggtggccttcagcgacgtggagcccacctctctgttcattgccggcgtggtggtgaacaccctgggctctatcatttactgtgtggccaagttcatggagaccagaaagcaaagcaactacgaggacctggaggcccagcctcggggagaggaggcgcagctaagtggagaccagctgccgttcgtgatggaggagctgcccggggagggaggaaatggccggtcagaaggtggggaggcagcaggtggccccgctcaggagagcaggcaagaggtcaggggcagcccccgaggagtcccgctggtggctgggagctctgaagaagggagcaggaggtcgttaaaagatgcttacctcgaggtatggaggttggttaggggaaccaggtatatgaagaaggattatttgatagaaaacgaggagttacccagtccttgagaaggaggtgcatgtacgtacctatgtgcatacacttattttatatgttagaaatgacgtgttttaatgagaggcctccccgttttattctttgaggagtggggaagggaagaaaagaaagaagctgaaaggtactgacacagagcaacaaaattagcacctgtgtgaattatttagtgtgacttcacctgaggcatcacagagacaaaagaatgtgaagctacttaacaaagtaaggcaacgtttctgcttcagactcctggcacatttactttttgtcattataaccataactaaatatctgcatgtaccaagagtccctaagccaccccctccaaagatggagtgtagaaatgatgacagcacttagtaagttcaaagatgacattcagggatgcattttttgatgatagaactacagtttttatcgccagctgggcaaagagtatattgctgaaatgatatataaatatattgaattgatgtttactgtttatagtcatctgaaatatcatatttactctgattctactcacttgttttttaaaaataagtgtcctattattgtattatatattgatagaaactgttaaagctattttgaaaatatgagttcttagctttaatcatgaagtctgaagtttgctttcagtaattattttaaaagttgttttggttcattgctttataatatttattattgaatgccaaacctgttcttttttttactgtgtccaatattctttcaagcaaatgcaatggctggaatataattcagaattaactgaaacccagccagaagagggaccacctgtaaagcaagtcctttcaagtttcactgcacatcccaaaccatgttacaaaaagagcaactgctatattcacattatgatatttttctatcttaaatttgtcaaaataaagtatgagtctaactattaaa

SEQ ID NO: 23422 - DNA, 1251 bp, Artificial Sequence
  derived and/or modified sequence
atgagacagctgtgcagaggcagagtgctgggcatcagcgtggccatcgcccacggcgtgttcagcggcagcctgaacatcctgctgaagttcctgatcagcagataccagttcagcttcctgaccctggtgcagtgcctgaccagcagcaccgccgccctgagcctggagctgctgagaagactgggcctgatcgccgtgccccccttcggcctgagcctggccagaagcttcgccggcgtggccgtgctgagcaccctgcagagcagcctgaccctgtggagcctgagaggcctgagcctgcccatgtacgtggtgttcaagagatgcctgcccctggtgaccatgctgatcggcgtgctggtgctgaagaacggcgcccccagccccggcgtgctggccgccgtgctgatcaccacctgcggcgccgccctggccggcgccggcgacctgaccggcgaccccatcggctacgtgaccggcgtgctggccgtgctggtgcacgccgcctacctggtgctgatccagaaggccagcgccgacaccgagcacggccccctgaccgcccagtacgtgatcgccgtgagcgccacccccctgctggtgatctgcagcttcgccagcaccgacagcatccacgcctggaccttccccggctggaaggaccccgccatggtgtgcatcttcgtggcctgcatcctgatcggctgcgccatgaacttcaccaccctgcactgcacctacatcaacagcgccgtgaccaccagcttcgtgggcgtggtgaagagcatcgccaccatcaccgtgggcatggtggccttcagcgacgtggagcccaccagcctgttcatcgccggcgtggtggtgaacaccctgggcagcatcatctactgcgtggccaagttcatggagaccagaaagcagagcaactacgaggacctggaggcccagcccagaggcgaggaggcccagctgagcggcgaccagctgcccttcgtgatggaggagctgcccggcgagggcggcaacggcagaagcgagggcggcgaggccgccggcggccccgcccaggagagcagacaggaggtgagaggcagccccagaggcgtgcccctggtggccggcagcagcgaggagggcagcagaagaagcctgaaggacgcctacctggaggtgtggagactggtgagaggcaccagatacatgaagaaggactacctgatcgagaacgaggagctgcccagcccctag

SEQ ID NO: 23423 - protein, 507 aa, Artificial Sequence
  derived and/or modified sequence
MMGHRPVLVLSQNTKRESGRKVQSGNINAAKIQVQHPAAKSMIEISRTQDEEVGDGTTSVIILAGEMLSVAEHFLEQQMHPTVVISAYRKALDDMISTLKKISIPVDISDSDMMLNIINSSITTKAISRWSSLACNIALDAVKMVQFEENGRKEIDIKKYARVEKIPGGIIEDSCVLRGVMINKDVTHPRMRRYIKNPRIVLLDSSLEYKKGESQTDIEITREEDFTRILQMEEEYIQQLCEDIIQLKPDVVITEKGISDLAQHYLMRANITAIRRVRKTDNNRIARACGARIVSRPEELREDDVGTGAGLLEIKKIGDEYFTFITDCKDPKACTILLRGASKEILSEVERNLQDAMQVCRNVLLDPQLVPGGGASEMAVAHALTEKSKAMTGVEQWPYRAVAQALEVIPRTLIQNCGASTIRLLTSLRAKHTQENCETWGVNGETGTLVDMKELGIWEPLAVKLQTYKTAVETAVLLLRIDDIVSGHKKKGDDQSRQGGAPDAGQE

SEQ ID NO: 23424 - protein, 188 aa, Artificial Sequence
  derived and/or modified sequence
MYEGDLEGQSMNWTSEEGRGDIIRSGTNIDRAWQCQNTKRESGRKVQSGNINAAKIQVQHPAAKSMIEISRTQDEEVGDGTTSVIILAGEMLSVAEHFLEQQMHPTVVISAYRKALDDMISTLKKISIPVDISDSDMMLNIINSSITTKAISRWSSLACNIALDAVKMVQFEENGRKEIDIKKYARVE

SEQ ID NO: 23425 - DNA, 1524 bp, Artificial Sequence
  derived and/or modified sequence
atgatgggacataggcccgttcttgttttaagtcaaaataccaagagggagtcgggacgcaaagtgcagagtgggaacattaatgccgcaaaaatacaagttcagcacccagccgcaaagagcatgatcgagatctcccggacacaggacgaggaagtcggggatggaaccacgagcgtgatcatcctcgccggggaaatgttgagcgtcgccgagcacttcctggagcagcagatgcaccctacagttgtaattagcgcttataggaaagctctggatgatatgatctctactctaaagaaaatttctatccctgtcgacatatcagactccgacatgatgttgaatatcatcaactcctctattaccacaaaagcaattagcaggtggagctcattggcttgtaatattgcactcgatgcagtgaagatggtgcagttcgaggaaaacggacgcaaagagatcgacattaagaagtacgcacgggtggagaagatcccaggcggtataatagaggacagctgcgtgctccgtggtgtgatgataaacaaggatgtgactcacccccgaatgaggaggtatattaagaacccccgtattgtgttattggactcatccctggagtacaagaaaggggagagccaaaccgacatcgagataacacgtgaagaagacttcaccaggattttgcagatggaggaagaatacattcagcaactgtgcgaggatataatccagttgaagcccgacgttgtaatcaccgaaaagggtatcagcgaccttgctcaacattacctcatgcgggccaacatcacagctattaggcgagttagaaagacagataataacaggattgctcgcgcctgcggtgcacgcatcgtgtcccgtccagaagaactgcgcgaggacgatgtaggcactggggccggcttgctggaaatcaagaaaatcggagatgaatacttcacttttattaccgactgcaaggaccccaaagcgtgcaccatcctcctgcgcggtgcctcaaaggaaattctatccgaagtcgagagaaacctgcaggacgcaatgcaggtctgcagaaatgttctcttagacccacagcttgtccctggtggaggcgctagcgagatggcagttgcccatgctttgaccgaaaaatcaaaggccatgaccggcgtcgaacagtggccgtacagggccgtcgcccaagctttagaagttattcctagaacactgatccagaactgtggggcatctaccataaggttgttgaccagtctgagggctaagcacactcaggagaactgcgagacctggggtgtaaatggagaaaccggcaccctcgttgacatgaaggaattgggtatttgggagcccttggccgtgaaactgcagacgtataaaacggccgttgagacggccgtactgctcctccgcatcgatgatatagtgtccggccataaaaaaaagggtgacgatcaaagccgccaagggggagcccctgacgctgggcaggaatag

SEQ ID NO: 23426 - DNA, 567 bp, Artificial Sequence
  derived and/or modified sequence
atgtacgaaggagacctcgagggtcagagtatgaactggacctcagaggaagggaggggcgatataattagatctggtacaaacatcgaccgagcctggcagtgccagaatacgaagagagagtccgggcgaaaggtacagtccggtaatattaatgccgctaagattcaggtgcagcaccccgccgcaaagagcatgatcgaaatctccaggactcaggatgaagaagtgggggacgggactaccagtgtgattatcctggccggcgagatgctgtctgtggctgagcacttcctggaacaacaaatgcatcccaccgttgtaatctccgcatatcgaaaagccttggatgacatgatatcaactctgaaaaaaatttccattcccgtggatattagcgactcggatatgatgctgaatatcatcaactcctcaataactacaaaagctatttctcgctggtccagtctcgcgtgtaacatcgctctcgatgctgttaaaatggtgcaatttgaagaaaatggccggaaagagattgatatcaaaaagtatgcacgagttgagtag

SEQ ID NO: 23427 - DNA, 1524 bp, Artificial Sequence
  derived and/or modified sequence
atgatgggccacaggcctgtgctggtgctgagccagaacaccaagcgggagagcggcaggaaggtgcagagcggcaacatcaatgctgccaagatccaggtgcagcaccctgctgccaagtccatgattgagatcagcaggacccaggatgaggaggtgggagatggcaccaccagcgtcatcatcctggccggggagatgctgtctgtggccgagcacttcctggagcagcagatgcaccccaccgtggtgatcagcgcctacaggaaggccctggatgacatgatcagcaccctgaagaagatcagcatccctgtggacatcagtgacagcgacatgatgctgaacatcatcaacagcagcatcaccaccaaggccatcagccgctggagcagcctggcctgcaacatcgccctggatgctgtgaagatggtgcagtttgaagaaaatggaaggaaggagattgacatcaagaagtatgcccgggtggagaagatccctgggggcatcatcgaggacagctgtgtgctgcggggcgtgatgatcaacaaggatgtgacccaccccaggatgaggcgctacatcaagaacccccgcatcgtgctgctggacagcagcctggagtacaagaagggggagagccagacagacatcgagatcacccgggaggaggacttcacccgcatcctgcagatggaggaggagtacatccagcagctgtgtgaggacatcatccagctgaagccagatgtggtgatcacagagaagggcatcagtgacctggcccagcactacctgatgagggccaacatcacagccatcagaagagtgaggaagacagacaacaacagaattgcccgggcctgtggggccagaattgtgtccaggcctgaggagctgcgggaggatgatgtgggcactggagctggcctgctggagatcaagaagattggagatgagtacttcaccttcatcacagactgcaaggaccccaaggcctgcaccatcctgctgcggggggccagcaaggagatcctgtctgaggtggagaggaacctgcaggatgccatgcaggtgtgcagaaatgtgctgctggacccccagctggtgcctgggggcggggccagcgagatggctgtggcccacgccctgacagagaagagcaaggccatgactggagtggagcagtggccctacagagctgtggcccaggccctggaggtgatccccaggaccctcatccagaactgtggggccagcaccatccggctgctgaccagcctgcgggccaagcacacccaggagaactgtgagacctggggcgtgaatggagagaccggcaccctggtggacatgaaggagctgggcatctgggagcccctggccgtgaagctgcagacctacaagacagctgtggagacagctgtgctgctgctgagaattgatgacatcgtgtctggccacaagaagaagggagatgaccagagccggcagggcggggccccagatgctggccaggagtag

SEQ ID NO: 23428 - DNA, 567 bp, Artificial Sequence
  derived and/or modified sequence
atgtatgaaggagacctggagggccagagcatgaactggaccagcgaggagggccgcggggacatcatccgcagcggcaccaacatcgaccgggcctggcagtgccagaacaccaagcgggagagcggcaggaaggtgcagagcggcaacatcaatgctgccaagatccaggtgcagcaccctgctgccaagtccatgattgagatcagcaggacccaggatgaggaggtgggagatggcaccaccagcgtcatcatcctggccggggagatgctgtctgtggccgagcacttcctggagcagcagatgcaccccaccgtggtgatcagcgcctacaggaaggccctggatgacatgatcagcaccctgaagaagatcagcatccctgtggacatcagtgacagcgacatgatgctgaacatcatcaacagcagcatcaccaccaaggccatcagccgctggagcagcctggcctgcaacatcgccctggatgctgtgaagatggtgcagtttgaagaaaatggaaggaaggagattgacatcaagaagtatgcccgggtggagtag

SEQ ID NO: 23429 - DNA, 1524 bp, Artificial Sequence
  derived and/or modified sequence
atgatgggccaccggcccgtgctggtgctgagccagaacaccaagagagagtccggcagaaaagtccagtccggcaacattaacgcggccaaaatccaagtgcaacacccggccgctaagtccatgattgaaatatctcgcacccaggacgaagaagtgggagacggcactaccagcgtgatcattctggccggagagatgctgtccgtggcggaacactttttagagcagcagatgcatcctaccgtagtgatcagtgcctatcgtaaagctttggacgacatgatctccaccctcaagaagatctccattcccgtcgatatcagtgattcggatatgatgcttaatatcatcaactcctctatcaccaccaaggcaatcagccgatggagcagcttagcatgtaacatcgctttagatgccgtcaagatggtccagttcgaggagaacggcaggaaggagatcgacattaaaaagtatgcccgtgtcgaaaagattccaggcggcataatagaagacagttgtgtcctgaggggcgtgatgatcaataaggatgttacacatccccgcatgcggcggtacataaaaaatccacggattgtcctactcgacagttcattggaatacaaaaaaggagaatcccagaccgatattgaaatcacgagggaagaggacttcaccagaattcttcagatggaggaggaatacattcaacagttatgcgaagacattatccagctgaagcccgacgtggtgattacagagaagggaatcagcgacctggcgcaacactacttgatgagagctaacatcaccgccatcaggcgggtgagaaaaacagacaacaatcgtattgccagggcttgtggggctcgcatcgttagccgccccgaagagctgcgggaggacgatgttggcactggtgctggcctgctggagatcaaaaagatcggagacgaatacttcacgttcattacagactgtaaggatcccaaggcctgcaccattttgcttcggggagcctctaaggaaatcttgtccgaggtagaacgtaaccttcaggatgctatgcaggtgtgtagaaatgtgttgcttgatccacagttggtgccaggcggaggggcaagcgaaatggctgtagctcacgctctcactgaaaagagcaaggcaatgaccggggtcgagcagtggccatatcgggccgttgcacaggcccttgaggtgatccctcgcaccctaatccaaaattgcggcgccagcaccataagactgctcacatctttgcgggcaaaacatacacaggaaaactgcgaaacatggggggtgaatggcgaaactggaactttggtagatatgaaggaactcggaatctgggaacctcttgctgttaaacttcagacgtataaaactgcggtcgaaaccgcggtgcttctgctgagaattgacgatattgtttctgggcataaaaagaaaggagacgatcagtcaagacaggggggcgctcccgatgctggccaggagtag

SEQ ID NO: 23430 - DNA, 567 bp, Artificial Sequence
  derived and/or modified sequence
atgtacgagggcgacctggagggccagagcatgaactggaccagcgaggaaggtcgcggggatatcattcgctccggcaccaacattgacagagcctggcaatgccagaatacaaagagagagagcggaaggaaggtccagagtggcaatattaatgcagccaagatccaggtgcaacatccggctgcaaaatccatgatcgaaatatccagaacccaggacgaagaggttggagatggcaccacatcagtgatcatccttgctggagagatgttatccgtggcagagcattttctcgagcaacaaatgcaccccacggtagtaatctcagcctacagaaaggccctagatgatatgattagcacattaaagaagatctctattcctgtcgacatcagtgattccgatatgatgctgaacatcattaatagttccatcacaaccaaagccatttcacgatggagctctctagcttgtaacatcgccctggatgcagtgaagatggtccagttcgaggaaaatggaagaaaggaaatcgatattaaaaaatatgcgcgggtggaatag

SEQ ID NO: 23431 - DNA, 1524 bp, Artificial Sequence
  derived and/or modified sequence
atgatgggccaccgacccgtactggtgctatctcagaacacaaagcgggagtctggaaggaaggtgcaaagcggtaacattaatgccgcaaaaattcaagttcagcaccctgcagccaaaagcatgatcgagatttctcggacacaggatgaggaggttggcgatgggacaaccagcgtgattatcctggcaggagagatgctgtccgttgccgaacacttcctggaacaacaaatgcatcccacagtggttattagtgcctaccgaaaggccttggacgacatgataagcacactcaagaaaatatccatccccgttgatatttccgacagcgatatgatgctcaacatcatcaacagttcgatcaccacaaaggcaatctccaggtggtcctccctggcatgtaatattgccctggatgccgtcaagatggtacaatttgaggagaatggacggaaagagatcgacatcaaaaaatatgccagagtggagaagataccagggggaattattgaggactcttgtgttctgcggggtgtcatgattaacaaggatgtcacccacccacgcatgagacgctacattaagaacccacgcattgtgcttctggattcctcactggagtacaagaagggggaatcccagacagacattgagattacaagagaggaggattttacgaggattctacagatggaggaggagtacatccaacagctctgtgaggatattatacagctgaagccagacgtcgtgatcaccgagaagggtatcagcgatcttgctcaacattacctgatgcgggctaacatcactgctatcaggagggtgcgcaagaccgacaataaccggatcgctcgtgcctgcggagcccgaatcgtgtcaagacctgaggagctgcgggaagacgatgtggggaccggggctggactgctagagataaagaagataggagacgagtactttacctttatcaccgattgcaaagaccccaaggcctgcactatactgctgcgcggtgcctctaaagagatactctcggaagtggaacgtaatttgcaggatgcaatgcaagtgtgccgaaacgtgctcctggatccccagctggtaccaggcggaggggctagtgagatggctgttgctcacgctctgacagagaagtccaaggccatgacaggcgtggaacagtggccttaccgggcagttgctcaggcgttggaagttattcctcggacccttatccagaactgcggcgcaagcaccatcaggctactgacatccctgcgcgcaaagcatacgcaggagaactgcgagacctggggtgtaaatggcgagactggtacgctggttgacatgaaagaactaggcatctgggaacccttggctgttaagttacaaacttataaaaccgccgtcgagaccgcagtgctcctgctgagaatcgacgacatcgtcagcgggcataagaaaaagggagatgaccagtcacggcagggaggtgcacctgatgccggacaggagtag

SEQ ID NO: 23432 - DNA, 567 bp, Artificial Sequence
  derived and/or modified sequence
atgtacgagggagacctggaggggcagtcaatgaattggacatctgaggagggaaggggagatatcatccggtccggcacaaatatcgatcgggcatggcagtgtcaaaacacaaaaagggagtccggtaggaaggttcagtcaggcaatatcaatgctgctaaaatccaggtccaacacccggcagccaaatcaatgatcgaaatatctcggacacaggacgaggaggtaggcgatgggaccaccagcgttattatcctggccggagaaatgcttagtgtcgccgaacattttttggagcagcagatgcaccccaccgtcgtgatatctgcttaccggaaggctctcgatgatatgattagcacactgaagaagatctcaatcccggtagatatctccgactccgatatgatgctgaacattatcaactctagtatcaccaccaaggccatcagcaggtggagctctctggcctgtaacatagcccttgatgctgttaaaatggtacaattcgaagagaacggacgtaaggagatcgacattaagaagtatgctcgcgtggagtag

SEQ ID NO: 23433 - DNA, 1815 bp, Artificial Sequence
  derived and/or modified sequence
ctctccagaaggttctgccggttcccccagctctgggtacccggctctgcatcgcgtcgccatgatgggccatcgtccagtgctcgtgctcagccagaacacaaagcgtgaatccggaagaaaagttcaatctggaaacatcaatgctgccaagattcaagtccagcatccagcggccaagtccatgatcgaaattagccggacccaggatgaagaggttggagatgggaccacatcagtaattattcttgcaggggaaatgctgtctgtagctgagcacttcctggagcagcagatgcacccaacagtggtgatcagtgcttaccgcaaggcattggatgatatgatcagcaccctaaagaaaataagtatcccagtcgacatcagtgacagtgatatgatgctgaacatcatcaacagctctattactaccaaagccatcagtcggtggtcatctttggcttgcaacattgccctggatgctgtcaagatggtacagtttgaggagaatggtcggaaagagattgacataaaaaaatatgcaagagtggaaaagatacctggaggcatcattgaagactcctgtgtcttgcgtggagtcatgattaacaaggatgtgacccatccacgtatgcggcgctatatcaagaaccctcgcattgtgctgctggattcttctctggaatacaagaaaggagaaagccagactgacattgagattacacgagaggaggacttcacccgaattctccagatggaggaagagtacatccagcagctctgtgaggacattatccaactgaagcccgatgtggtcatcactgaaaagggcatctcagatttagctcagcactaccttatgcgggccaatatcacagccatccgcagagtccggaagacagacaataatcgcattgctagagcctgtggggcccggatagtcagccgaccagaggaactgagagaagatgatgttggaacaggagcaggcctgttggaaatcaagaaaattggagatgaatactttactttcatcactgactgcaaagaccccaaggcctgcaccattctcctccggggggctagcaaagagattctctcggaagtagaacgcaacctccaggatgccatgcaagtgtgtcgcaatgttctcctggaccctcagctggtgccagggggtggggcctccgagatggctgtggcccatgccttgacagaaaaatccaaggccatgactggtgtggaacaatggccatacagggctgttgcccaggccctagaggtcattcctcgtaccctgatccagaactgtggggccagcaccatccgtctacttacctcccttcgggccaagcacacccaggagaactgtgagacctggggtgtaaatggtgagacgggtactttggtggacatgaaggaactgggcatatgggagccattggctgtgaagctgcagacttataagacagcagtggagacggcagttctgctactgcgaattgatgacatcgtttcaggccacaaaaagaaaggcgatgaccagagccggcaaggcggggctcctgatgctggccaggagtgagtgctaggcaaggctacttcaatgcacagaaccagcagagtctccccttttcctgagccagagtgccaggaacactgtggacgtctttgttcagaagggatcaggttggggggcagcccccagtccctttctgtcccagctcagttttccaaaagacactgacatgtaattcttctctattgtaaggtttccatttagtttgcttccgatgattaaatctaagtcatttg

SEQ ID NO: 23434 - DNA, 593 bp, Artificial Sequence
  derived and/or modified sequence
gagaattgcttcctgagaaggtaatgaatgtatgaaggtgatctggaaggacaatctatgaattggacaagtgaagaaggaagaggagacattataagaagtgggaccaacatagaccgagcctggcagtgccagaacacaaagcgtgaatccggaagaaaagttcaatctggaaacatcaatgctgccaagattcaagtccagcatccagcggccaagtccatgatcgaaattagccggacccaggatgaagaggttggagatgggaccacatcagtaattattcttgcaggggaaatgctgtctgtagctgagcacttcctggagcagcagatgcacccaacagtggtgatcagtgcttaccgcaaggcattggatgatatgatcagcaccctaaagaaaataagtatcccagtcgacatcagtgacagtgatatgatgctgaacatcatcaacagctctattactaccaaagccatcagtcggtggtcatctttggcttgcaacattgccctggatgctgtcaagatggtacagtttgaggagaatggtcggaaagagattgacataaaaaaatatgcaagagtggaaaa

SEQ ID NO: 23435 - DNA, 1524 bp, Artificial Sequence
  derived and/or modified sequence
atgatgggccacagacccgtgctggtgctgagccagaacaccaagagagagagcggcagaaaggtgcagagcggcaacatcaacgccgccaagatccaggtgcagcaccccgccgccaagagcatgatcgagatcagcagaacccaggacgaggaggtgggcgacggcaccaccagcgtgatcatcctggccggcgagatgctgagcgtggccgagcacttcctggagcagcagatgcaccccaccgtggtgatcagcgcctacagaaaggccctggacgacatgatcagcaccctgaagaagatcagcatccccgtggacatcagcgacagcgacatgatgctgaacatcatcaacagcagcatcaccaccaaggccatcagcagatggagcagcctggcctgcaacatcgccctggacgccgtgaagatggtgcagttcgaggagaacggcagaaaggagatcgacatcaagaagtacgccagagtggagaagatccccggcggcatcatcgaggacagctgcgtgctgagaggcgtgatgatcaacaaggacgtgacccaccccagaatgagaagatacatcaagaaccccagaatcgtgctgctggacagcagcctggagtacaagaagggcgagagccagaccgacatcgagatcaccagagaggaggacttcaccagaatcctgcagatggaggaggagtacatccagcagctgtgcgaggacatcatccagctgaagcccgacgtggtgatcaccgagaagggcatcagcgacctggcccagcactacctgatgagagccaacatcaccgccatcagaagagtgagaaagaccgacaacaacagaatcgccagagcctgcggcgccagaatcgtgagcagacccgaggagctgagagaggacgacgtgggcaccggcgccggcctgctggagatcaagaagatcggcgacgagtacttcaccttcatcaccgactgcaaggaccccaaggcctgcaccatcctgctgagaggcgccagcaaggagatcctgagcgaggtggagagaaacctgcaggacgccatgcaggtgtgcagaaacgtgctgctggacccccagctggtgcccggcggcggcgccagcgagatggccgtggcccacgccctgaccgagaagagcaaggccatgaccggcgtggagcagtggccctacagagccgtggcccaggccctggaggtgatccccagaaccctgatccagaactgcggcgccagcaccatcagactgctgaccagcctgagagccaagcacacccaggagaactgcgagacctggggcgtgaacggcgagaccggcaccctggtggacatgaaggagctgggcatctgggagcccctggccgtgaagctgcagacctacaagaccgccgtggagaccgccgtgctgctgctgagaatcgacgacatcgtgagcggccacaagaagaagggcgacgaccagagcagacagggcggcgcccccgacgccggccaggagtag

SEQ ID NO: 23436 - DNA, 567 bp, Artificial Sequence
  derived and/or modified sequence
atgtacgagggcgacctggagggccagagcatgaactggaccagcgaggagggcagaggcgacatcatcagaagcggcaccaacatcgacagagcctggcagtgccagaacaccaagagagagagcggcagaaaggtgcagagcggcaacatcaacgccgccaagatccaggtgcagcaccccgccgccaagagcatgatcgagatcagcagaacccaggacgaggaggtgggcgacggcaccaccagcgtgatcatcctggccggcgagatgctgagcgtggccgagcacttcctggagcagcagatgcaccccaccgtggtgatcagcgcctacagaaaggccctggacgacatgatcagcaccctgaagaagatcagcatccccgtggacatcagcgacagcgacatgatgctgaacatcatcaacagcagcatcaccaccaaggccatcagcagatggagcagcctggcctgcaacatcgccctggacgccgtgaagatggtgcagttcgaggagaacggcagaaaggagatcgacatcaagaagtacgccagagtggagtag

SEQ ID NO: 23437 - protein, 2272 aa, Artificial Sequence
  derived and/or modified sequence
MSCNGGSHPRINTLGRMIRAESGPDLRYEVTSGGGGTSRMYYSRRGVITDQNSDGYCQTGTMSRHQNQNTIQELLQNCSDCLMRAELIVQPELKYGDGIQLTRSRELDECFAQANDQMEILDSLIREMRQMGQPCDAYQKRLLQLQEQMRALYKAISVPRVRRASSKGGGGYTCQSGSGWDEFTKHVTSECLGWMRQQRAEMDMVAWGVDLASVEQHINSHRGIHNSIGDYRWQLDKIKADLREKSAIYQLEEEYENLLKASFERMDHLRQLQNIIQATSREIMWINDCEEEELLYDWSDKNTNIAQKQEAFSIRMSQLEVKEKELNKLKQESDQLVLNQHPASDKIEAYMDTLQTQWSWILQITKCIDVHLKENAAYFQFFEEAQSTEAYLKGLQDSIRKKYPCDKNMPLQHLLEQIKELEKEREKILEYKRQVQNLVNKSKKIVQLKPRNPDYRSNKPIILRALCDYKQDQKIVHKGDECILKDNNERSKWYVTGPGGVDMLVPSVGLIIPPPNPLAVDLSCKIEQYYEAILALWNQLYINMKSLVSWHYCMIDIEKIRAMTIAKLKTMRQEDYMKTIADLELHYQEFIRNSQGSEMFGDDDKRKIQSQFTDAQKHYQTLVIQLPGYPQHQTVTTTEITHHGTCQDVNHNKVIETNRENDKQETWMLMELQKIRRQIEHCEGRMTLKNLPLADQGSSHHITVKINELKSVQNDSQAIAEVLNQLKDMLANFRGSEKYCYLQNEVFGLFQKLENINGVTDGYLNSLCTVRALLQAILQTEDMLKVYEARLTEEETVCLDLDKVEAYRCGLKKIKNDLNLKKSLLATMKTELQKAQQIHSQTSQQYPLYDLDLGKFGEKVTQLTDRWQRIDKQIDFRLWDLEKQIKQLRNYRDNYQAFCKWLYDAKRRQDSLESMKFGDSNTVMRFLNEQKNLHSEISGKRDKSEEVQKIAELCANSIKDYELQLASYTSGLETLLNIPIKRTMIQSPSGVILQEAADVHARYIELLTRSGDYYRFLSEMLKSLEDLKLKNTKIEVLEEELRLARDANSENCNKNKFLDQNLQKYQAECSQFKAKLASLEELKRQAELDGKSAKQNLDKCYGQIKELNEKITRLTYEIEDEKRRRKSVEDRFDQQKNDYDQLQKARQCEKENLGWQKLESEKAIKEKEYEIERLRVLLQEEGTRKREYENELAKASNRIQESKNQCTQVVQERESLLVKIKVLEQDKARLQRLEDELNRAKSTLEAETRVKQRLECEKQQIQNDLNQWKTQYSRKEEAIRKIESEREKSEREKNSLRSEIERLQAEIKRIEERCRRKLEDSTRETQSQLETERSRYQREIDKLRQRPYGSHRETQTECEWTVDTSKLVFDGLRKKVTAMQLYECQLIDKTTLDKLLKGKKSVEEVASEIQPFLRGAGSIAGASASPKEKYSLVEAKRKKLISPESTVMLLEAQAATGGIIDPHRNEKLTVDSAIARDLIDFDDRQQIYAAEKAITGFDDPFSGKTVSVSEAIKKNLIDRETGMRLLEAQIASGGVVDPVNSVFLPKDVALARGLIDRDLYRSLNDPRDSQKNFVDPVTKKKVSYVQLKERCRIEPHTGLLLLSVQKRSMSFQGIRQPVTVTELVDSGILRPSTVNELESGQISYDEVGERIKDFLQGSSCIAGIYNETTKQKLGIYEAMKIGLVRPGTALELLEAQAATGFIVDPVSNLRLPVEEAYKRGLVGIEFKEKLLSAERAVTGYNDPETGNIISLFQAMNKELIEKGHGIRLLEAQIATGGIIDPKESHRLPVDIAYKRGYFNEELSEILSDPSDDTKGFFDPNTEENLTYLQLKERCIKDEETGLCLLPLKEKKKQVQTSQKNTLRKRRVVIVDPETNKEMSVQEAYKKGLIDYETFKELCEQECEWEEITITGSDGSTRVVLVDRKTGSQYDIQDAIDKGLVDRKFFDQYRSGSLSLTQFADMISLKNGVGTSSSMGSGVSDDVFSSSRHESVSKISTISSVRNLTIRSSSFSDTLEESSPIAAIFDTENLEKISITEGIERGIVDSITGQRLLEAQACTGGIIHPTTGQKLSLQDAVSQGVIDQDMATRLKPAQKAFIGFEGVKGKKKMSAAEAVKEKWLPYEAGQRFLEFQYLTGGLVDPEVHGRISTEEAIRKGFIDGRAAQRLQDTSSYAKILTCPKTKLKISYKDAINRSMVEDITGLRLLEAASVSSKGLPSPYNMSSAPGSRSGSRSGSRSGSRSGSRSGSRRGSFDATGNSSYSYSYSFSSSSIGH

SEQ ID NO: 23438 - DNA, 2862 bp, Artificial Sequence
  derived and/or modified sequence
cagcagcagagagccgagatggacatggtggcctggggcgtggacctggccagcgtggagcagcacatcaacagccacagaggcatccacaacagcatcggcgactacagatggcagctggacaagatcaaggccgacctgagagagaagagcgccatctaccagctggaggaggagtacgagaacctgctgaaggccagcttcgagagaatggaccacctgagacagctgcagaacatcatccaggccaccagcagagagatcatgtggatcaacgactgcgaggaggaggagctgctgtacgactggagcgacaagaacaccaacatcgcccagaagcaggaggccttcagcatcagaatgagccagctggaggtgaaggagaaggagctgaacaagctgaagcaggagagcgaccagctggtgctgaaccagcaccccgccagcgacaagatcgaggcctacatggacaccctgcagacccagtggagctggatcctgcagatcaccaagtgcatcgacgtgcacctgaaggagaacgccgcctacttccagttcttcgaggaggcccagagcaccgaggcctacctgaagggcctgcaggacagcatcagaaagaagtacccctgcgacaagaacatgcccctgcagcacctgctggagcagatcaaggagctggagaaggagagagagaagatcctggagtacaagagacaggtgcagaacctggtgaacaagagcaagaagatcgtgcagctgaagcccagaaaccccgactacagaagcaacaagcccatcatcctgagagccctgtgcgactacaagcaggaccagaagatcgtgcacaagggcgacgagtgcatcctgaaggacaacaacgagagaagcaagtggtacgtgaccggccccggcggcgtggacatgctggtgcccagcgtgggcctgatcatccccccccccaaccccctggccgtggacctgagctgcaagatcgagcagtactacgaggccatcctggccctgtggaaccagctgtacatcaacatgaagagcctggtgagctggcactactgcatgatcgacatcgagaagatcagagccatgaccatcgccaagctgaagaccatgagacaggaggactacatgaagaccatcgccgacctggagctgcactaccaggagttcatcagaaacagccagggcagcgagatgttcggcgacgacgacaagagaaagatccagagccagttcaccgacgcccagaagcactaccagaccctggtgatccagctgcccggctacccccagcaccagaccgtgaccaccaccgagatcacccaccacggcacctgccaggacgtgaaccacaacaaggtgatcgagaccaacagagagaacgacaagcaggagacctggatgctgatggagctgcagaagatcagaagacagatcgagcactgcgagggcagaatgaccctgaagaacctgcccctggccgaccagggcagcagccaccacatcaccgtgaagatcaacgagctgaagagcgtgcagaacgacagccaggccatcgccgaggtgctgaaccagctgaaggacatgctggccaacttcagaggcagcgagaagtactgctacctgcagaacgaggtgttcggcctgttccagaagctggagaacatcaacggcgtgaccgacggctacctgaacagcctgtgcaccgtgagagccctgctgcaggccatcctgcagaccgaggacatgctgaaggtgtacgaggccagactgaccgaggaggagaccgtgtgcctggacctggacaaggtggaggcctacagatgcggcctgaagaagatcaagaacgacctgaacctgaagaagagcctgctggccaccatgaagaccgagctgcagaaggcccagcagatccacagccagaccagccagcagtaccccctgtacgacctggacctgggcaagttcggcgagaaggtgacccagctgaccgacagatggcagagaatcgacaagcagatcgacttcagactgtgggacctggagaagcagatcaagcagctgagaaactacagagacaactaccaggccttctgcaagtggctgtacgacgccaagagaagacaggacagcctggagagcatgaagttcggcgacagcaacaccgtgatgagattcctgaacgagcagaagaacctgcacagcgagatcagcggcaagagagacaagagcgaggaggtgcagaagatcgccgagctgtgcgccaacagcatcaaggactacgagctgcagctggccagctacaccagcggcctggagaccctgctgaacatccccatcaagagaaccatgatccagagccccagcggcgtgatcctgcaggaggccgccgacgtgcacgccagatacatcgagctgctgaccagaagcggcgactactacagattcctgagcgagatgctgaagagcctggaggacctgaagctgaagaacaccaagatcgaggtgctggaggaggagctgagactggccagagacgccaacagcgagaactgcaacaagaacaagttcctggaccagaacctgcagaagtaccaggccgagtgcagccagttcaaggccaagctggccagcctggaggagctgaagagacaggccgagctggacggcaagagcgccaagcagaacctggacaagtgctacggccagatcaaggagctgaacgagaagatcaccagactgacctacgagatcgaggacgagaagagaagaagaaagagcgtggaggacagattcgaccagcagaagaacgactacgaccagctgcagaaggccagacagtgctag

SEQ ID NO: 23439 - DNA, 6819 bp, Artificial Sequence
  derived and/or modified sequence
atgagctgcaacggcggcagccaccccagaatcaacaccctgggcagaatgatcagagccgagagcggccccgacctgagatacgaggtgaccagcggcggcggcggcaccagcagaatgtactacagcagaagaggcgtgatcaccgaccagaacagcgacggctactgccagaccggcaccatgagcagacaccagaaccagaacaccatccaggagctgctgcagaactgcagcgactgcctgatgagagccgagctgatcgtgcagcccgagctgaagtacggcgacggcatccagctgaccagaagcagagagctggacgagtgcttcgcccaggccaacgaccagatggagatcctggacagcctgatcagagagatgagacagatgggccagccctgcgacgcctaccagaagagactgctgcagctgcaggagcagatgagagccctgtacaaggccatcagcgtgcccagagtgagaagagccagcagcaagggcggcggcggctacacctgccagagcggcagcggctgggacgagttcaccaagcacgtgaccagcgagtgcctgggctggatgagacagcagagagccgagatggacatggtggcctggggcgtggacctggccagcgtggagcagcacatcaacagccacagaggcatccacaacagcatcggcgactacagatggcagctggacaagatcaaggccgacctgagagagaagagcgccatctaccagctggaggaggagtacgagaacctgctgaaggccagcttcgagagaatggaccacctgagacagctgcagaacatcatccaggccaccagcagagagatcatgtggatcaacgactgcgaggaggaggagctgctgtacgactggagcgacaagaacaccaacatcgcccagaagcaggaggccttcagcatcagaatgagccagctggaggtgaaggagaaggagctgaacaagctgaagcaggagagcgaccagctggtgctgaaccagcaccccgccagcgacaagatcgaggcctacatggacaccctgcagacccagtggagctggatcctgcagatcaccaagtgcatcgacgtgcacctgaaggagaacgccgcctacttccagttcttcgaggaggcccagagcaccgaggcctacctgaagggcctgcaggacagcatcagaaagaagtacccctgcgacaagaacatgcccctgcagcacctgctggagcagatcaaggagctggagaaggagagagagaagatcctggagtacaagagacaggtgcagaacctggtgaacaagagcaagaagatcgtgcagctgaagcccagaaaccccgactacagaagcaacaagcccatcatcctgagagccctgtgcgactacaagcaggaccagaagatcgtgcacaagggcgacgagtgcatcctgaaggacaacaacgagagaagcaagtggtacgtgaccggccccggcggcgtggacatgctggtgcccagcgtgggcctgatcatccccccccccaaccccctggccgtggacctgagctgcaagatcgagcagtactacgaggccatcctggccctgtggaaccagctgtacatcaacatgaagagcctggtgagctggcactactgcatgatcgacatcgagaagatcagagccatgaccatcgccaagctgaagaccatgagacaggaggactacatgaagaccatcgccgacctggagctgcactaccaggagttcatcagaaacagccagggcagcgagatgttcggcgacgacgacaagagaaagatccagagccagttcaccgacgcccagaagcactaccagaccctggtgatccagctgcccggctacccccagcaccagaccgtgaccaccaccgagatcacccaccacggcacctgccaggacgtgaaccacaacaaggtgatcgagaccaacagagagaacgacaagcaggagacctggatgctgatggagctgcagaagatcagaagacagatcgagcactgcgagggcagaatgaccctgaagaacctgcccctggccgaccagggcagcagccaccacatcaccgtgaagatcaacgagctgaagagcgtgcagaacgacagccaggccatcgccgaggtgctgaaccagctgaaggacatgctggccaacttcagaggcagcgagaagtactgctacctgcagaacgaggtgttcggcctgttccagaagctggagaacatcaacggcgtgaccgacggctacctgaacagcctgtgcaccgtgagagccctgctgcaggccatcctgcagaccgaggacatgctgaaggtgtacgaggccagactgaccgaggaggagaccgtgtgcctggacctggacaaggtggaggcctacagatgcggcctgaagaagatcaagaacgacctgaacctgaagaagagcctgctggccaccatgaagaccgagctgcagaaggcccagcagatccacagccagaccagccagcagtaccccctgtacgacctggacctgggcaagttcggcgagaaggtgacccagctgaccgacagatggcagagaatcgacaagcagatcgacttcagactgtgggacctggagaagcagatcaagcagctgagaaactacagagacaactaccaggccttctgcaagtggctgtacgacgccaagagaagacaggacagcctggagagcatgaagttcggcgacagcaacaccgtgatgagattcctgaacgagcagaagaacctgcacagcgagatcagcggcaagagagacaagagcgaggaggtgcagaagatcgccgagctgtgcgccaacagcatcaaggactacgagctgcagctggccagctacaccagcggcctggagaccctgctgaacatccccatcaagagaaccatgatccagagccccagcggcgtgatcctgcaggaggccgccgacgtgcacgccagatacatcgagctgctgaccagaagcggcgactactacagattcctgagcgagatgctgaagagcctggaggacctgaagctgaagaacaccaagatcgaggtgctggaggaggagctgagactggccagagacgccaacagcgagaactgcaacaagaacaagttcctggaccagaacctgcagaagtaccaggccgagtgcagccagttcaaggccaagctggccagcctggaggagctgaagagacaggccgagctggacggcaagagcgccaagcagaacctggacaagtgctacggccagatcaaggagctgaacgagaagatcaccagactgacctacgagatcgaggacgagaagagaagaagaaagagcgtggaggacagattcgaccagcagaagaacgactacgaccagctgcagaaggccagacagtgcgagaaggagaacctgggctggcagaagctggagagcgagaaggccatcaaggagaaggagtacgagatcgagagactgagagtgctgctgcaggaggagggcaccagaaagagagagtacgagaacgagctggccaaggccagcaacagaatccaggagagcaagaaccagtgcacccaggtggtgcaggagagagagagcctgctggtgaagatcaaggtgctggagcaggacaaggccagactgcagagactggaggacgagctgaacagagccaagagcaccctggaggccgagaccagagtgaagcagagactggagtgcgagaagcagcagatccagaacgacctgaaccagtggaagacccagtacagcagaaaggaggaggccatcagaaagatcgagagcgagagagagaagagcgagagagagaagaacagcctgagaagcgagatcgagagactgcaggccgagatcaagagaatcgaggagagatgcagaagaaagctggaggacagcaccagagagacccagagccagctggagaccgagagaagcagataccagagagagatcgacaagctgagacagagaccctacggcagccacagagagacccagaccgagtgcgagtggaccgtggacaccagcaagctggtgttcgacggcctgagaaagaaggtgaccgccatgcagctgtacgagtgccagctgatcgacaagaccaccctggacaagctgctgaagggcaagaagagcgtggaggaggtggccagcgagatccagcccttcctgagaggcgccggcagcatcgccggcgccagcgccagccccaaggagaagtacagcctggtggaggccaagagaaagaagctgatcagccccgagagcaccgtgatgctgctggaggcccaggccgccaccggcggcatcatcgacccccacagaaacgagaagctgaccgtggacagcgccatcgccagagacctgatcgacttcgacgacagacagcagatctacgccgccgagaaggccatcaccggcttcgacgaccccttcagcggcaagaccgtgagcgtgagcgaggccatcaagaagaacctgatcgacagagagaccggcatgagactgctggaggcccagatcgccagcggcggcgtggtggaccccgtgaacagcgtgttcctgcccaaggacgtggccctggccagaggcctgatcgacagagacctgtacagaagcctgaacgaccccagagacagccagaagaacttcgtggaccccgtgaccaagaagaaggtgagctacgtgcagctgaaggagagatgcagaatcgagccccacaccggcctgctgctgctgagcgtgcagaagagaagcatgagcttccagggcatcagacagcccgtgaccgtgaccgagctggtggacagcggcatcctgagacccagcaccgtgaacgagctggagagcggccagatcagctacgacgaggtgggcgagagaatcaaggacttcctgcagggcagcagctgcatcgccggcatctacaacgagaccaccaagcagaagctgggcatctacgaggccatgaagatcggcctggtgagacccggcaccgccctggagctgctggaggcccaggccgccaccggcttcatcgtggaccccgtgagcaacctgagactgcccgtggaggaggcctacaagagaggcctggtgggcatcgagttcaaggagaagctgctgagcgccgagagagccgtgaccggctacaacgaccccgagaccggcaacatcatcagcctgttccaggccatgaacaaggagctgatcgagaagggccacggcatcagactgctggaggcccagatcgccaccggcggcatcatcgaccccaaggagagccacagactgcccgtggacatcgcctacaagagaggctacttcaacgaggagctgagcgagatcctgagcgaccccagcgacgacaccaagggcttcttcgaccccaacaccgaggagaacctgacctacctgcagctgaaggagagatgcatcaaggacgaggagaccggcctgtgcctgctgcccctgaaggagaagaagaagcaggtgcagaccagccagaagaacaccctgagaaagagaagagtggtgatcgtggaccccgagaccaacaaggagatgagcgtgcaggaggcctacaagaagggcctgatcgactacgagaccttcaaggagctgtgcgagcaggagtgcgagtgggaggagatcaccatcaccggcagcgacggcagcaccagagtggtgctggtggacagaaagaccggcagccagtacgacatccaggacgccatcgacaagggcctggtggacagaaagttcttcgaccagtacagaagcggcagcctgagcctgacccagttcgccgacatgatcagcctgaagaacggcgtgggcaccagcagcagcatgggcagcggcgtgagcgacgacgtgttcagcagcagcagacacgagagcgtgagcaagatcagcaccatcagcagcgtgagaaacctgaccatcagaagcagcagcttcagcgacaccctggaggagagcagccccatcgccgccatcttcgacaccgagaacctggagaagatcagcatcaccgagggcatcgagagaggcatcgtggacagcatcaccggccagagactgctggaggcccaggcctgcaccggcggcatcatccaccccaccaccggccagaagctgagcctgcaggacgccgtgagccagggcgtgatcgaccaggacatggccaccagactgaagcccgcccagaaggccttcatcggcttcgagggcgtgaagggcaagaagaagatgagcgccgccgaggccgtgaaggagaagtggctgccctacgaggccggccagagattcctggagttccagtacctgaccggcggcctggtggaccccgaggtgcacggcagaatcagcaccgaggaggccatcagaaagggcttcatcgacggcagagccgcccagagactgcaggacaccagcagctacgccaagatcctgacctgccccaagaccaagctgaagatcagctacaaggacgccatcaacagaagcatggtggaggacatcaccggcctgagactgctggaggccgccagcgtgagcagcaagggcctgcccagcccctacaacatgagcagcgcccccggcagcagaagcggcagcagaagcggcagcagaagcggcagcagaagcggcagcagaagcggcagcagaagaggcagcttcgacgccaccggcaacagcagctacagctacagctacagcttcagcagcagcagcatcggccactag

SEQ ID NO: 23440 - DNA, 6928 bp, Artificial Sequence
  derived and/or modified sequence
caacaacaaagggcggagatggacatggtggcctggggtgtggacctggcctcagtggagcagcacattaacagccaccggggcatccacaactccatcggcgactatcgctggcagctggacaaaatcaaagccgacctgcgcgagaaatctgctatctaccagttggaggaggagtatgaaaacctgctgaaagcgtcctttgagaggatggatcacctgcgacagctgcagaacatcattcaggccacgtccagggagatcatgtggatcaatgactgcgaggaggaggagctgctgtacgactggagcgacaagaacaccaacatcgctcagaaacaggaggccttctccatacgcatgagtcaactggaagttaaagaaaaagagctcaataagctgaaacaagaaagtgaccaacttgtcctcaatcagcatccagcttcagacaaaattgaggcctatatggacactctgcagacgcagtggagttggattcttcagatcaccaagtgcattgatgttcatctgaaagaaaatgctgcctactttcagttttttgaagaggcgcagtctactgaagcatacctgaaggggctccaggactccatcaggaagaagtacccctgcgacaagaacatgcccctgcagcacctgctggaacagatcaaggagctggagaaagaacgagagaaaatccttgaatacaagcgtcaggtgcagaacttggtaaacaagtctaagaagattgtacagctgaagcctcgtaacccagactacagaagcaataaacccattattctcagagctctctgtgactacaaacaagatcagaaaatcgtgcataagggggatgagtgtatcctgaaggacaacaacgagcgcagcaagtggtacgtgacgggcccgggaggcgttgacatgcttgttccctctgtggggctgatcatccctcctccgaacccactggccgtggacctctcttgcaagattgagcagtactacgaagccatcttggctctgtggaaccagctctacatcaacatgaagagcctggtgtcctggcactactgcatgattgacatagagaagatcagggccatgacaatcgccaagctgaaaacaatgcggcaggaagattacatgaagacgatagccgaccttgagttacattaccaagagttcatcagaaatagccaaggctcagagatgtttggagatgatgacaagcggaaaatacagtctcagttcaccgatgcccagaagcattaccagaccctggtcattcagctccctggctatccccagcaccagacagtgaccacaactgaaatcactcatcatggaacctgccaagatgtcaaccataataaagtaattgaaaccaacagagaaaatgacaagcaagaaacatggatgctgatggagctgcagaagattcgcaggcagatagagcactgcgagggcaggatgactctcaaaaacctccctctagcagaccagggatcttctcaccacatcacagtgaaaattaacgagcttaagagtgtgcagaatgattcacaagcaattgctgaggttctcaaccagcttaaagatatgcttgccaacttcagaggttctgaaaagtactgctatttacagaatgaagtatttggactatttcagaaactggaaaatatcaatggtgttacagatggctacttaaatagcttatgcacagtaagggcactgctccaggctattctccaaacagaagacatgttaaaggtttatgaagccaggctcactgaggaggaaactgtctgcctggacctggataaagtggaagcttaccgctgtggactgaagaaaataaaaaatgacttgaacttgaagaagtcgttgttggccactatgaagacagaactacagaaagcccagcagatccactctcagacttcacagcagtatccactttatgatctggacttgggcaagttcggtgaaaaagtcacacagctgacagaccgctggcaaaggatagataaacagatcgactttaggttatgggacctggagaaacaaatcaagcaattgaggaattatcgtgataactatcaggctttctgcaagtggctctatgatgctaaacgccgccaggattccttagaatccatgaaatttggagattccaacacagtcatgcggtttttgaatgagcagaagaacttgcacagtgaaatatctggcaaacgagacaaatcagaggaagtacaaaaaattgctgaactttgcgccaattcaattaaggattatgagctccagctggcctcatacacctcaggactggaaactctgctgaacatacctatcaagaggaccatgattcagtccccttctggggtgattctgcaagaggctgcagatgttcatgctcggtacattgaactacttacaagatctggagactattacaggttcttaagtgagatgctgaagagtttggaagatctgaagctgaaaaataccaagatcgaagttttggaagaggagctcagactggcccgagatgccaactcggaaaactgtaataagaacaaattcctggatcagaacctgcagaaataccaggcagagtgttcccagttcaaagcgaagcttgcgagcctggaggagctgaagagacaggctgagctggatgggaagtcggctaagcaaaatctagacaagtgctacggccaaataaaagaactcaatgagaagatcacccgactgacttatgagattgaagatgaaaagagaagaagaaaatctgtggaagacagatttgaccaacagaagaatgactatgaccaactgcagaaagcaaggcaatgtgaaaaggagaaccttggttggcagaaattagagtctgagaaagccatcaaggagaaggagtacgagattgaaaggttgagggttctactgcaggaagaaggcacccggaagagagaatatgaaaatgagctggcaaaggcatctaataggattcaggaatcaaagaatcagtgtactcaggtggtacaggaaagagagagccttctggtgaaaatcaaagtcctggagcaagacaaggcaaggctgcagaggctggaggatgagctgaatcgtgcaaaatcaactctagaggcagaaaccagggtgaaacagcgcctggagtgtgagaaacagcaaattcagaatgacctgaatcagtggaagactcaatattcccgcaaggaggaggctattaggaagatagaatcggaaagagaaaagagtgagagagagaagaacagtcttaggagtgagatcgaaagactccaagcagagatcaagagaattgaagagaggtgcaggcgtaagctggaggattctaccagggagacacagtcacagttagaaacagaacgctcccgatatcagagggagattgataaactcagacagcgcccatatgggtcccatcgagagacccagactgagtgtgagtggaccgttgacacctccaagctggtgtttgatgggctgaggaagaaggtgacagcaatgcagctctatgagtgtcagctgatcgacaaaacaaccttggacaaactattgaaggggaagaagtcagtggaagaagttgcttctgaaatccagccattccttcggggtgcaggatctatcgctggagcatctgcttctcctaaggaaaaatactctttggtagaggccaagagaaagaaattaatcagcccagaatccacagtcatgcttctggaggcccaggcagctacaggtggtataattgatccccatcggaatgagaagctgactgtcgacagtgccatagctcgggacctcattgacttcgatgaccgtcagcagatatatgcagcagaaaaagctatcactggttttgatgatccattttcaggcaagacagtatctgtttcagaagccatcaagaaaaatttgattgatagagaaaccggaatgcgcctgctggaagcccagattgcttcagggggtgtagtagaccctgtgaacagtgtctttttgccaaaagatgtcgccttggcccgggggctgattgatagagatttgtatcgatccctgaatgatccccgagatagtcagaaaaactttgtggatccagtcaccaaaaagaaggtcagttacgtgcagctgaaggaacggtgcagaatcgaaccacatactggtctgctcttgctttcagtacagaagagaagcatgtccttccaaggaatcagacaacctgtgaccgtcactgagctagtagattctggtatattgagaccgtccactgtcaatgaactggaatctggtcagatttcttatgacgaggttggtgagagaattaaggacttcctccagggttcaagctgcatagcaggcatatacaatgagaccacaaaacagaagcttggcatttatgaggccatgaaaattggcttagtccgacctggtactgctctggagttgctggaagcccaagcagctactggctttatagtggatcctgttagcaacttgaggttaccagtggaggaagcctacaagagaggtctggtgggcattgagttcaaagagaagctcctgtctgcagaacgagctgtcactgggtataatgatcctgaaacaggaaacatcatctctttgttccaagccatgaataaggaactcatcgaaaagggccacggtattcgcttattagaagcacagatcgcaaccggggggatcattgacccaaaggagagccatcgtttaccagttgacatagcatataagaggggctatttcaatgaggaactcagtgagattctctcagatccaagtgatgataccaaaggattttttgaccccaacactgaagaaaatcttacctatctgcaactaaaagaaagatgcattaaggatgaggaaacagggctctgtcttctgcctctgaaagaaaagaagaaacaggtgcagacatcacaaaagaataccctcaggaagcgtagagtggtcatagttgacccagaaaccaataaagaaatgtctgttcaggaggcctacaagaagggcctaattgattatgaaaccttcaaagaactgtgtgagcaggaatgtgaatgggaagaaataaccatcacgggatcagatggctccaccagggtggtcctggtagatagaaagacaggcagtcagtatgatattcaagatgctattgacaagggccttgttgacaggaagttctttgatcagtaccgatccggcagcctcagcctcactcaatttgctgacatgatctccttgaaaaatggtgtcggcaccagcagcagcatgggcagtggtgtcagcgatgatgtttttagcagctcccgacatgaatcagtaagtaagatttccaccatatccagcgtcaggaatttaaccataaggagcagctctttttcagacaccctggaagaatcgagccccattgcagccatctttgacacagaaaacctggagaaaatctccattacagaaggtatagagcggggcatcgttgacagcatcacgggtcagaggcttctggaggctcaggcctgcacaggtggcatcatccacccaaccacgggccagaagctgtcacttcaggacgcagtctcccagggtgtgattgaccaagacatggccaccaggctgaagcctgctcagaaagccttcataggcttcgagggtgtgaagggaaagaagaagatgtcagcagcagaggcagtgaaagaaaaatggctcccgtatgaggctggccagcgcttcctggagttccagtacctcacgggaggtcttgttgacccggaagtgcatgggaggataagcaccgaagaagccatccggaaggggttcatagatggccgcgccgcacagaggctgcaagacaccagcagctatgccaaaatcctgacctgccccaaaaccaaattaaaaatatcctataaggatgccataaatcgctccatggtagaagatatcactgggctgcgccttctggaagccgcctccgtgtcgtccaagggcttacccagcccttacaacatgtcttcggctccggggtcccgctccggctcccgctcgggatctcgctccggatctcgctccgggtcccgcagtgggtcccggagaggaagctttgacgccacagggaattcttcctactcttattcctactcatttagcagtagttctattgggcactagtagtcagttgggagtggttgctataccttgacttcatttatatgaatttccactttattaaataatagaaaagaaaatcccggtgcttgcagtagagtgataggacattctatgcttacagaaaatatagccatgattgaaatcaaatagtaaaggctgttctggctttttatcttcttagctcatcttaaataagcagtacacttggatgcagtgcgtctgaagtgctaatcagttgtaacaatagcacaaatcgaacttaggatttgtttcttctcttctgtgtttcgatttttgatcaattctttaattttggaagcctataatacagttttctattcttggagataaaaattaaatggatcactgatattttagtcattctgcttctcatctaaatatttccatattctgtattaggagaaaattaccctcccagcaccagcccccctctcaaacccccaacccaaaaccaagcattttggaatgagtctcctttagtttcagagtgtggattgtataacccatatactcttcgatgtacttgtttggtttggtattaatttgactgtgcatgacagcggcaatcttttctttggtcaaagttttctgtttattttgcttgtcatattcgatgtactttaaggtgtctttatgaagtttgctattctggcaataaacttttagacttttg

SEQ ID NO: 23441 - DNA, 7812 bp, Artificial Sequence
  derived and/or modified sequence
ggaggagactcgctccgccgccgaccaacaccaacacccagctccgacgcagctcctctgcgcccttgccgccctccgagccacagctttcctcccgctcctgcccccggcccgtcgccgtctccgcgctcgcagcggcctcgggagggcccaggtagcgagcagcgacctcgcgagccttccgcactcccgcccggttccccggccgtccgcctatccttggccccctccgctttctccgcgccggcccgcctcgcttatgcctcggcgctgagccgctctcccgattgcccgccgacatgagctgcaacggaggctcccacccgcggatcaacactctgggccgcatgatccgcgccgagtctggcccggacctgcgctacgaggtgaccagcggcggcgggggcaccagcaggatgtactattctcggcgcggcgtgatcaccgaccagaactcggacggctactgtcaaaccggcacgatgtccaggcaccagaaccagaacaccatccaggagctgctgcagaactgctccgactgcttgatgcgagcagagctcatcgtgcagcctgaattgaagtatggagatggaatacaactgactcggagtcgagaattggatgagtgttttgcccaggccaatgaccaaatggaaatcctcgacagcttgatcagagagatgcggcagatgggccagccctgtgatgcttaccagaaaaggcttcttcagctccaagagcaaatgcgagccctttataaagccatcagtgtccctcgagtccgcagggccagctccaagggtggtggaggctacacttgtcagagtggctctggctgggatgagttcaccaaacatgtcaccagtgaatgtttggggtggatgaggcagcaaagggcggagatggacatggtggcctggggtgtggacctggcctcagtggagcagcacattaacagccaccggggcatccacaactccatcggcgactatcgctggcagctggacaaaatcaaagccgacctgcgcgagaaatctgctatctaccagttggaggaggagtatgaaaacctgctgaaagcgtcctttgagaggatggatcacctgcgacagctgcagaacatcattcaggccacgtccagggagatcatgtggatcaatgactgcgaggaggaggagctgctgtacgactggagcgacaagaacaccaacatcgctcagaaacaggaggccttctccatacgcatgagtcaactggaagttaaagaaaaagagctcaataagctgaaacaagaaagtgaccaacttgtcctcaatcagcatccagcttcagacaaaattgaggcctatatggacactctgcagacgcagtggagttggattcttcagatcaccaagtgcattgatgttcatctgaaagaaaatgctgcctactttcagttttttgaagaggcgcagtctactgaagcatacctgaaggggctccaggactccatcaggaagaagtacccctgcgacaagaacatgcccctgcagcacctgctggaacagatcaaggagctggagaaagaacgagagaaaatccttgaatacaagcgtcaggtgcagaacttggtaaacaagtctaagaagattgtacagctgaagcctcgtaacccagactacagaagcaataaacccattattctcagagctctctgtgactacaaacaagatcagaaaatcgtgcataagggggatgagtgtatcctgaaggacaacaacgagcgcagcaagtggtacgtgacgggcccgggaggcgttgacatgcttgttccctctgtggggctgatcatccctcctccgaacccactggccgtggacctctcttgcaagattgagcagtactacgaagccatcttggctctgtggaaccagctctacatcaacatgaagagcctggtgtcctggcactactgcatgattgacatagagaagatcagggccatgacaatcgccaagctgaaaacaatgcggcaggaagattacatgaagacgatagccgaccttgagttacattaccaagagttcatcagaaatagccaaggctcagagatgtttggagatgatgacaagcggaaaatacagtctcagttcaccgatgcccagaagcattaccagaccctggtcattcagctccctggctatccccagcaccagacagtgaccacaactgaaatcactcatcatggaacctgccaagatgtcaaccataataaagtaattgaaaccaacagagaaaatgacaagcaagaaacatggatgctgatggagctgcagaagattcgcaggcagatagagcactgcgagggcaggatgactctcaaaaacctccctctagcagaccagggatcttctcaccacatcacagtgaaaattaacgagcttaagagtgtgcagaatgattcacaagcaattgctgaggttctcaaccagcttaaagatatgcttgccaacttcagaggttctgaaaagtactgctatttacagaatgaagtatttggactatttcagaaactggaaaatatcaatggtgttacagatggctacttaaatagcttatgcacagtaagggcactgctccaggctattctccaaacagaagacatgttaaaggtttatgaagccaggctcactgaggaggaaactgtctgcctggacctggataaagtggaagcttaccgctgtggactgaagaaaataaaaaatgacttgaacttgaagaagtcgttgttggccactatgaagacagaactacagaaagcccagcagatccactctcagacttcacagcagtatccactttatgatctggacttgggcaagttcggtgaaaaagtcacacagctgacagaccgctggcaaaggatagataaacagatcgactttaggttatgggacctggagaaacaaatcaagcaattgaggaattatcgtgataactatcaggctttctgcaagtggctctatgatgctaaacgccgccaggattccttagaatccatgaaatttggagattccaacacagtcatgcggtttttgaatgagcagaagaacttgcacagtgaaatatctggcaaacgagacaaatcagaggaagtacaaaaaattgctgaactttgcgccaattcaattaaggattatgagctccagctggcctcatacacctcaggactggaaactctgctgaacatacctatcaagaggaccatgattcagtccccttctggggtgattctgcaagaggctgcagatgttcatgctcggtacattgaactacttacaagatctggagactattacaggttcttaagtgagatgctgaagagtttggaagatctgaagctgaaaaataccaagatcgaagttttggaagaggagctcagactggcccgagatgccaactcggaaaactgtaataagaacaaattcctggatcagaacctgcagaaataccaggcagagtgttcccagttcaaagcgaagcttgcgagcctggaggagctgaagagacaggctgagctggatgggaagtcggctaagcaaaatctagacaagtgctacggccaaataaaagaactcaatgagaagatcacccgactgacttatgagattgaagatgaaaagagaagaagaaaatctgtggaagacagatttgaccaacagaagaatgactatgaccaactgcagaaagcaaggcaatgtgaaaaggagaaccttggttggcagaaattagagtctgagaaagccatcaaggagaaggagtacgagattgaaaggttgagggttctactgcaggaagaaggcacccggaagagagaatatgaaaatgagctggcaaaggcatctaataggattcaggaatcaaagaatcagtgtactcaggtggtacaggaaagagagagccttctggtgaaaatcaaagtcctggagcaagacaaggcaaggctgcagaggctggaggatgagctgaatcgtgcaaaatcaactctagaggcagaaaccagggtgaaacagcgcctggagtgtgagaaacagcaaattcagaatgacctgaatcagtggaagactcaatattcccgcaaggaggaggctattaggaagatagaatcggaaagagaaaagagtgagagagagaagaacagtcttaggagtgagatcgaaagactccaagcagagatcaagagaattgaagagaggtgcaggcgtaagctggaggattctaccagggagacacagtcacagttagaaacagaacgctcccgatatcagagggagattgataaactcagacagcgcccatatgggtcccatcgagagacccagactgagtgtgagtggaccgttgacacctccaagctggtgtttgatgggctgaggaagaaggtgacagcaatgcagctctatgagtgtcagctgatcgacaaaacaaccttggacaaactattgaaggggaagaagtcagtggaagaagttgcttctgaaatccagccattccttcggggtgcaggatctatcgctggagcatctgcttctcctaaggaaaaatactctttggtagaggccaagagaaagaaattaatcagcccagaatccacagtcatgcttctggaggcccaggcagctacaggtggtataattgatccccatcggaatgagaagctgactgtcgacagtgccatagctcgggacctcattgacttcgatgaccgtcagcagatatatgcagcagaaaaagctatcactggttttgatgatccattttcaggcaagacagtatctgtttcagaagccatcaagaaaaatttgattgatagagaaaccggaatgcgcctgctggaagcccagattgcttcagggggtgtagtagaccctgtgaacagtgtctttttgccaaaagatgtcgccttggcccgggggctgattgatagagatttgtatcgatccctgaatgatccccgagatagtcagaaaaactttgtggatccagtcaccaaaaagaaggtcagttacgtgcagctgaaggaacggtgcagaatcgaaccacatactggtctgctcttgctttcagtacagaagagaagcatgtccttccaaggaatcagacaacctgtgaccgtcactgagctagtagattctggtatattgagaccgtccactgtcaatgaactggaatctggtcagatttcttatgacgaggttggtgagagaattaaggacttcctccagggttcaagctgcatagcaggcatatacaatgagaccacaaaacagaagcttggcatttatgaggccatgaaaattggcttagtccgacctggtactgctctggagttgctggaagcccaagcagctactggctttatagtggatcctgttagcaacttgaggttaccagtggaggaagcctacaagagaggtctggtgggcattgagttcaaagagaagctcctgtctgcagaacgagctgtcactgggtataatgatcctgaaacaggaaacatcatctctttgttccaagccatgaataaggaactcatcgaaaagggccacggtattcgcttattagaagcacagatcgcaaccggggggatcattgacccaaaggagagccatcgtttaccagttgacatagcatataagaggggctatttcaatgaggaactcagtgagattctctcagatccaagtgatgataccaaaggattttttgaccccaacactgaagaaaatcttacctatctgcaactaaaagaaagatgcattaaggatgaggaaacagggctctgtcttctgcctctgaaagaaaagaagaaacaggtgcagacatcacaaaagaataccctcaggaagcgtagagtggtcatagttgacccagaaaccaataaagaaatgtctgttcaggaggcctacaagaagggcctaattgattatgaaaccttcaaagaactgtgtgagcaggaatgtgaatgggaagaaataaccatcacgggatcagatggctccaccagggtggtcctggtagatagaaagacaggcagtcagtatgatattcaagatgctattgacaagggccttgttgacaggaagttctttgatcagtaccgatccggcagcctcagcctcactcaatttgctgacatgatctccttgaaaaatggtgtcggcaccagcagcagcatgggcagtggtgtcagcgatgatgtttttagcagctcccgacatgaatcagtaagtaagatttccaccatatccagcgtcaggaatttaaccataaggagcagctctttttcagacaccctggaagaatcgagccccattgcagccatctttgacacagaaaacctggagaaaatctccattacagaaggtatagagcggggcatcgttgacagcatcacgggtcagaggcttctggaggctcaggcctgcacaggtggcatcatccacccaaccacgggccagaagctgtcacttcaggacgcagtctcccagggtgtgattgaccaagacatggccaccaggctgaagcctgctcagaaagccttcataggcttcgagggtgtgaagggaaagaagaagatgtcagcagcagaggcagtgaaagaaaaatggctcccgtatgaggctggccagcgcttcctggagttccagtacctcacgggaggtcttgttgacccggaagtgcatgggaggataagcaccgaagaagccatccggaaggggttcatagatggccgcgccgcacagaggctgcaagacaccagcagctatgccaaaatcctgacctgccccaaaaccaaattaaaaatatcctataaggatgccataaatcgctccatggtagaagatatcactgggctgcgccttctggaagccgcctccgtgtcgtccaagggcttacccagcccttacaacatgtcttcggctccggggtcccgctccggctcccgctcgggatctcgctccggatctcgctccgggtcccgcagtgggtcccggagaggaagctttgacgccacagggaattcttcctactcttattcctactcatttagcagtagttctattgggcactagtagtcagttgggagtggttgctataccttgacttcatttatatgaatttccactttattaaataatagaaaagaaaatcccggtgcttgcagtagagtgataggacattctatgcttacagaaaatatagccatgattgaaatcaaatagtaaaggctgttctggctttttatcttcttagctcatcttaaataagcagtacacttggatgcagtgcgtctgaagtgctaatcagttgtaacaatagcacaaatcgaacttaggatttgtttcttctcttctgtgtttcgatttttgatcaattctttaattttggaagcctataatacagttttctattcttggagataaaaattaaatggatcactgatattttagtcattctgcttctcatctaaatatttccatattctgtattaggagaaaattaccctcccagcaccagcccccctctcaaacccccaacccaaaaccaagcattttggaatgagtctcctttagtttcagagtgtggattgtataacccatatactcttcgatgtacttgtttggtttggtattaatttgactgtgcatgacagcggcaatcttttctttggtcaaagttttctgtttattttgcttgtcatattcgatgtactttaaggtgtctttatgaagtttgctattctggcaataaacttttagacttttg

SEQ ID NO: 23442 - DNA, 2862 bp, Artificial Sequence
  derived and/or modified sequence
caacaacagcgcgccgagatggatatggtagcgtggggcgtcgatctagcatccgttgagcagcacatcaacagtcaccgaggcatccataactccatcggtgattacagatggcaactggataaaataaaggcagatcttagagagaagtcagccatctatcaactcgaggaggagtatgagaacctgctcaaggctagctttgagcgcatggatcatcttcgacagctccaaaatatcattcaggcaacgtcaagagagatcatgtggataaatgattgtgaggaagaggaactcctgtacgactggagcgataaaaacacaaatatcgctcaaaagcaggaggcgttttctatccgtatgtcacaactggaagtaaaggagaaggagctgaacaaacttaaacaggaatccgaccagcttgtgctcaatcagcaccctgctagtgataaaattgaggcctacatggatacactgcagacccaatggtcctggatcctgcaaataactaagtgtatcgacgttcatttaaaagagaatgccgcgtattttcagtttttcgaagaagcccagtcaaccgaggcctaccttaagggactgcaagatagcattcgtaaaaaatatccttgcgataaaaacatgcccctccagcacctgcttgaacagataaaggaattagagaaggaacgggaaaagattctggaatacaagcgccaagtgcagaatcttgttaataaatcaaaaaagatcgtccagttaaagccccggaacccagattatagatccaataagcctatcatcctgagggccctgtgtgactacaaacaggatcagaagattgtgcacaagggagatgaatgtatcctgaaggataacaatgaaagatcaaaatggtacgtaacaggcccaggaggggtcgacatgctggtcccgtccgtgggcctgatcatacctcctcctaacccactggctgtcgacctgtcatgcaagatcgagcagtactatgaggccattctcgctttatggaaccagctgtacatcaatatgaaaagtctggtgagttggcactattgcatgattgatattgagaaaattcgagctatgacaatagctaagctgaagaccatgcgacaagaggattacatgaagaccattgccgatttagaactgcactatcaggagttcatcaggaacagccagggaagcgaaatgttcggcgatgacgacaagcgaaagatacagagtcaatttaccgatgcccaaaagcactaccaaacactcgtcattcaactgcccggttacccacagcaccagaccgttactacaaccgaaattacccatcacggcacctgccaggacgttaaccataacaaggtgattgaaaccaatagagaaaatgacaagcaggagacatggatgctcatggaactgcagaagattcgaaggcagatagagcactgtgaggggcgaatgaccctgaaaaatctccccctggcagatcagggctcctcccatcacattactgttaagatcaatgaactgaaatctgtccagaacgattcacaggctattgccgaggtgcttaaccagctgaaagacatgctggccaacttcagaggttccgaaaagtactgttacctccaaaacgaggtcttcgggctctttcagaagctcgaaaacatcaacggggtcacagacggctacctgaactctctttgcacagttcgtgccctgttacaggcgatcctccaaaccgaagatatgttgaaagtgtatgaagccagactcacagaagaggagaccgtctgtctcgatttagacaaagttgaggcttaccgttgcggactgaagaaaattaaaaatgatttgaatcttaaaaagagcttgctggctacaatgaaaactgaattacagaaggcgcagcagatccacagtcagacgagccaacagtacccattgtacgacctggatctggggaaattcggagagaaagttacccagctcacggatagatggcaacgaattgacaagcaaatagacttccggctatgggatctcgaaaaacagataaagcagttgaggaactatagagacaactatcaggcattctgcaaatggctgtatgatgcaaaacgtaggcaagatagcctggagagcatgaaattcggcgattcaaataccgtgatgcgattcttgaacgagcagaagaacctccacagtgagatctctggtaaaagagacaagtccgaggaagtgcagaagatcgccgagctgtgtgcgaactcaattaaagactatgaactgcagcttgcttcctatacctcaggactggagaccttgcttaatataccaatcaaacggactatgattcagtccccatctggggtgatattacaggaagctgcagatgtacacgctaggtatattgagttactgacacggagcggggattactaccggtttttgtctgagatgttgaagtccctggaagatctgaagcttaaaaataccaaaatcgaagtgctcgaggaagaacttcggctggcacgcgatgcgaatagcgagaactgtaacaaaaacaagtttctggaccaaaacctccaaaagtaccaagccgagtgttcccagttcaaagctaagctcgcttccctggaagagctgaaaagacaggcagagctggatggcaagtccgcaaaacagaatctggataagtgctacgggcagatcaaggagcttaatgaaaagattacccggctgacatatgagatcgaggacgaaaagcgaaggaggaagtcagtggaagatcgttttgaccagcaaaagaatgactatgatcagcttcagaaggcccggcagtgttag

SEQ ID NO: 23443 - DNA, 6819 bp, Artificial Sequence
  derived and/or modified sequence
atgtcgtgcaatggaggatcgcaccctagaattaatacacttggaagaatgattagagctgagtctgggccagacctgcggtacgaggtgacatctggcgggggcggaacgtcaaggatgtactacagccggcggggggtgattaccgatcagaactcagatggttactgtcagacgggtacaatgagtcgtcaccagaatcagaacacaatccaggagctcctccagaattgttcagactgcctgatgagagcggagctaattgttcagcctgagctgaagtacggggacggtatccagctaactcggtcccgagaattagatgaatgctttgcacaggctaacgatcagatggagatcctcgatagcttgataagggagatgaggcaaatgggccagccatgtgatgcttatcagaagagactattacaactgcaggagcagatgagagctctctataaggccatttctgtgcctcgcgtgaggcgtgcctcatcaaaagggggtgggggctacacatgtcagtcaggatcaggatgggacgaatttacaaagcacgtcacttcggagtgcctcggttggatgagacagcagagggctgagatggacatggttgcttggggtgtggacttagcttcagtggaacagcatatcaatagccacagaggtatccacaatagtatcggagactaccgatggcagctcgataagatcaaggctgatctcagggagaagtccgccatataccagttagaagaggaatatgaaaacttgctcaaggcttctttcgaacgaatggatcatttgcggcagctgcagaatattatccaagccactagcagagagataatgtggattaacgactgtgaagaggaggaactcctctatgactggtcagacaaaaataccaatatcgcccagaaacaggaggcctttagtataagaatgtcccagttggaggtaaaggaaaaagaactgaataagctgaagcaggaaagtgatcagcttgtccttaatcagcaccccgccagtgataagatcgaggcctatatggacacgctgcagacccagtggtcctggatactccagataaccaagtgtattgacgttcacttgaaagaaaacgctgcgtactttcagttcttcgaggaggcccaaagcacggaggcctaccttaagggtctgcaagattccattcgcaagaagtacccctgtgacaagaacatgcccctacagcacctcctagagcaaataaaagaactggagaaagagcgcgagaagatcctggaatataagcgacaggtgcagaacttagtaaataagagcaaaaagatagttcagctgaagcctcggaaccccgactacagatccaataaacccatcattttaagagcactgtgcgactataagcaagatcagaaaatcgtccacaaaggtgacgaatgcattctcaaagataacaatgagcgatctaagtggtacgttacaggtccgggcggggtggacatgttggtgccatctgtcgggctaataatacccccgcccaatcccctcgctgtggatctgtcctgcaaaatagagcagtattatgaagcgatcctcgccctatggaaccagttgtatatcaacatgaaaagtctggtttcctggcattactgcatgattgatatcgaaaagattagggctatgaccatcgcaaagctaaagactatgcgccaggaggactacatgaagacaatcgctgatctggagctgcactaccaggagtttatccggaactcacagggatctgagatgtttggcgatgatgataagcggaagattcagtcccagttcacagacgctcagaagcactaccagacgctggtcattcagctgcccggatatccccaacaccaaacggtcaccacaacagagataacgcatcatgggacttgccaggacgtcaatcacaacaaggtgatagaaaccaatcgcgaaaatgacaagcaagaaacctggatgctcatggaactccagaagatacggcggcagatcgaacactgtgaggggcggatgacactcaagaatttgcccctggccgatcaagggtcttcccatcacattaccgtgaaaattaacgaacttaagagcgtgcagaatgacagccaagcaatcgccgaggtgttaaaccaactgaaagatatgctggccaatttcaggggctccgaaaaatactgctacctccagaacgaagtgtttgggttgttccagaagctcgagaacattaatggcgtcactgacggatacttgaattcattgtgtaccgtgagggcgctgctgcaggccatactgcagaccgaagacatgctgaaggtttacgaagcgaggttaaccgaagaagagactgtgtgcctagacctggataaagttgaagcttatcgctgcgggttgaaaaagattaaaaacgacctgaacctcaagaagtcattactggcgactatgaaaaccgaactgcagaaggcccagcaaatacactcacaaacaagccagcagtatcctctgtacgatttagatttagggaagtttggggagaaggttacacagctaacggatagatggcagcggatagacaagcagattgactttagactatgggaccttgaaaagcagattaagcaattgcggaactacagggacaactaccaggctttttgcaaatggctctatgatgctaagcgtaggcaggacagcctcgaatccatgaagtttggcgacagtaacactgtaatgcgctttctcaacgaacagaaaaaccttcactctgagatctccgggaagcgggacaagagcgaagaagtgcagaaaatcgccgagttgtgtgctaactccatcaaagactatgaactgcagcttgcctcttacacatccgggctggagacactcctcaatattcccattaaacgcactatgattcagtctccatctggcgttatcctgcaggaagcagccgacgtccacgcgaggtatattgagctgctgaccaggtctggagattactaccgctttctgtccgagatgctgaaaagtctggaggacctcaagctcaagaacacaaagattgaggttttagaggaggaactccggttggctagggatgccaattcagagaattgtaataagaacaagtttctcgaccagaacctgcagaaatatcaagctgagtgttctcagtttaaggctaagctcgcaagtttggaagagctgaagcgccaggcggagttagacggcaaaagcgccaagcaaaatctggataagtgctacggtcagatcaaagagctgaacgagaaaattacaagacttacatacgaaattgaggacgagaaaaggcgtaggaaatctgtggaggaccgcttcgaccaacagaagaacgactacgaccagctgcagaaagcccgccagtgtgaaaaagagaatctcggatggcagaagctagaatccgaaaaagccataaaagagaaggagtacgaaattgaacgccttagagtgctgctccaggaagaggggacgagaaagagggaatacgagaatgagctggcaaaagcctctaaccggattcaggaatccaaaaaccagtgtacccaggtggtgcaagaaagagaatcactgctcgtgaaaattaaggtgctagagcaagataaggcacgtcttcagcgcctcgaggatgagctgaatcgagcgaagtcgacgctcgaggctgaaacccgagtaaaacagcgacttgagtgcgagaagcagcaaatccaaaacgatctcaaccagtggaaaacccagtacagccgcaaggaagaagccattcgcaagatcgaaagcgaacgcgaaaagtccgaaagggaaaaaaattcccttcgtagcgaaatcgagcgcctacaggccgaaattaaaagaattgaagaaagatgccgcagaaaattggaggattccacccgcgaaacgcagtctcagttagagactgaacgaagcaggtaccagagggaaattgataaattacgccaacgcccatacgggagtcaccgggagacacagaccgagtgtgaatggacggtcgatacgtccaagctagtgtttgacgggttacggaagaaagtgactgcaatgcagctgtatgaatgtcagctgatcgacaagacaactctggacaagctcctcaaaggaaaaaagagcgtggaagaggtagcatcagagatccaaccattccttcggggagccggcagtattgccggggccagcgcgagtcccaaggagaagtatagtttggtggaggccaagcggaagaaactgatcagccctgaaagcaccgtgatgctcctcgaagcccaggccgccactggcgggatcatagacccacatcggaatgaaaaactaactgtggattctgcaatagcaagagacctgattgatttcgatgaccgtcagcagatatatgccgccgaaaaggccattactgggtttgacgatccatttagcgggaagacagtctctgtgtcggaagcaatcaaaaaaaatctcatcgaccgggagacaggaatgcggttgcttgaagcgcagatagcttcaggaggagtagtcgacccagtgaattccgtattcttgcctaaggacgtagctcttgctagaggtttaattgatcgggacttgtaccggtccttgaatgacccgagagactcccagaaaaactttgtcgacccggtgactaaaaagaaagtgtcttatgtacagctgaaggagagatgccgaatcgagccacatacgggattgctgctcttaagtgtgcagaagcggagtatgtcgttccagggaattcgccagcccgtgacagtgactgagttagtcgacagcggtattctgaggccatctacagttaatgagctggaatcaggtcagatttcatatgatgaagtgggggagaggatcaaagattttttgcaggggagctcctgcatagccggcatctataacgaaacaactaaacagaagctggggatatacgaggcaatgaaaatcggcctggttcgacctggcacagccctggaactcctcgaggcgcaagctgcaacaggctttatcgttgacccagtgtctaatcttcgtctcccagtcgaagaggcttacaagaggggtcttgttggcatcgaattcaaggaaaagctccttagcgccgaaagagccgtgaccggatacaatgaccccgagacgggcaacatcatctctctgttccaagctatgaacaaggagttaattgagaaaggtcatggcattcgattattggaggcacaaattgctacggggggcattatcgatcctaaagagtcacataggctcccagtggacatcgcctacaagaggggctatttcaatgaagagctgagtgagatcttgtctgatccatcagatgacacaaaaggtttcttcgacccgaacactgaagaaaacctgacttatcttcaactgaaagaacgctgtataaaggacgaggaaacaggtctatgcttgctgcccttgaaggagaagaagaaacaagtccagacatctcagaagaatacattacgcaagaggagagtggttattgtcgatccagagacaaacaaagaaatgtcagttcaggaggcctacaaaaagggcttaatcgactatgaaaccttcaaagagctgtgtgagcaggaatgcgagtgggaggaaatcactatcactggtagcgatggatctactcgggtcgtgctggtagaccgcaagacaggaagtcagtatgacatacaagatgcgatcgataagggcctggtggacaggaagttcttcgatcagtatcggtcaggctcattgtcactgactcaatttgccgatatgatctcccttaaaaatggggtcggcacgtcctcctctatgggctcaggcgtatcagacgatgtgtttagctcgtcgaggcacgagtccgtctctaaaattagcaccattagctccgtccgcaatctcactatcagaagctcttcgtttagtgacaccttagaggagagctcacccatcgctgcgatatttgacacagagaatctggaaaaaattagtattaccgagggtatcgagcgcggcatagttgattccatcaccggccaaagactactggaagctcaggcctgcacaggcggcatcatccatcccacgacgggccagaagctgagcctccaagatgctgtgagtcagggggtaattgaccaggacatggccactcggctgaaacccgcccagaaagcattcattggcttcgagggcgtgaagggaaaaaagaaaatgagcgccgcagaggccgtgaaagaaaagtggcttccttacgaggccggccagcggttcctcgagttccagtacctgaccggcggcctcgtcgatcccgaagtgcacggacggatctctacagaggaagctatcagaaagggatttattgacgggagagctgcacagaggctacaggacacgtcctcctacgccaaaatcttgacatgccccaaaaccaagctgaagatatcgtacaaggacgcgatcaacagaagcatggttgaggacattactggcttgagattactggaagccgcctccgtatcctccaagggtttgccaagcccatacaatatgagctcagcccctgggagccgatccgggtctcgcagtggctcacgaagtggctctaggtccggcagccgatcaggcagcaggagagggagtttcgacgccactggaaactcctcatattcctattcatactccttttccagctcaagcatcggacactag

SEQ ID NO: 23444 - DNA, 2862 bp, Artificial Sequence
  derived and/or modified sequence
cagcagcagagagctgagatggacatggtggcctggggcgtggacctggcctctgtggagcagcacatcaacagccaccggggcatccacaacagcattggagactaccgctggcagctggacaagatcaaggctgacctgcgggagaagagcgccatctaccagctggaggaggagtatgagaacctgctgaaggccagctttgagaggatggaccacctgcggcagctgcagaacatcatccaggccaccagccgggagatcatgtggatcaatgactgtgaggaggaggagctgctgtatgactggagcgacaagaacaccaacatcgcccagaagcaggaggccttcagcatccgcatgagccagctggaggtgaaggagaaggagctgaacaagctgaagcaggagagtgaccagctggtgctgaaccagcacccagccagtgacaagattgaggcctacatggacaccctgcagacccagtggagctggatcctgcagatcaccaagtgcattgatgtgcacctgaaggaaaatgctgcctacttccagttctttgaggaggcccagagcacagaggcctacctgaagggcctgcaggacagcatcaggaagaagtacccctgtgacaagaacatgcccctgcagcacctgctggagcagatcaaggagctggagaaggagcgggagaagatcctggagtacaagaggcaggtgcagaacctggtgaacaagagcaagaagatcgtgcagctgaagcccaggaacccagactaccgcagcaacaagcccatcatcctgcgggccctgtgtgactacaagcaggaccagaagatcgtgcacaagggagatgagtgcatcctgaaggacaacaatgaaagaagcaagtggtacgtgactggacctggaggagtggacatgctggtgcccagcgtgggcctcatcatccccccacccaaccccctggccgtggacctgagctgcaagattgagcagtactatgaggccatcctggccctgtggaaccagctgtacatcaacatgaagagcctggtgtcctggcactactgcatgattgacatcgagaagatccgggccatgaccatcgccaagctgaagaccatgaggcaggaggactacatgaagaccatcgctgacctggagctgcactaccaggagttcatccggaacagccagggcagcgagatgtttggagatgatgacaagaggaagatccagagccagttcacagatgcccagaagcactaccagaccctggtgatccagctgcccggctacccccagcaccagacagtgaccaccacagagatcacccaccacggcacctgccaggatgtgaaccacaacaaggtgattgagaccaacagagaaaatgacaagcaggagacctggatgctgatggagctgcagaagatccggcggcagatcgagcactgtgagggccgcatgaccctgaagaacctgcccctggccgaccagggcagcagccaccacatcaccgtgaagatcaatgagctgaagtctgtgcagaatgacagccaggccatcgccgaggtgctgaaccagctgaaggacatgctggccaacttccggggcagcgagaagtactgctacctgcagaatgaggtgtttggcctcttccagaagctggagaacatcaacggggtgacagatggctacctgaacagcctgtgcaccgtgcgggccctgctgcaggccatcctgcagacagaggacatgctgaaggtgtatgaggcccggctgacagaggaggagaccgtgtgcctggacctggacaaggtggaggcctaccgctgtggcctgaagaagatcaagaatgacctgaacctgaagaagagcctgctggccaccatgaagacagagctgcagaaggcccagcagatccacagccagaccagccagcagtaccccctgtatgacctggacctgggcaagtttggagagaaggtgacccagctgacagaccgctggcagagaattgacaagcagattgacttccggctgtgggacctggagaagcagatcaagcagctgaggaactacagagacaactaccaggccttctgcaagtggctgtatgatgccaagaggcggcaggacagcctggagagcatgaagtttggagacagcaacacagtgatgaggttcctgaatgagcagaagaacctgcacagcgagatcagcggcaagagggacaagtctgaggaggtgcagaagattgctgagctgtgtgccaacagcatcaaggactatgagctgcagctggccagctacaccagcggcctggagaccctgctgaacatccccatcaagaggaccatgatccagagccccagcggggtcatcctgcaggaggccgcagatgtgcacgcccgctacatcgagctgctgaccaggtctggggactactaccgcttcctgtctgagatgctgaagagcctggaggacctgaagctgaagaacaccaagattgaggtgctggaggaggagctgcggctggccagagatgccaacagcgagaactgcaacaagaacaagttcctggaccagaacctgcagaagtaccaggctgaatgttcccagttcaaggccaagctggccagcctggaggagctgaagaggcaggccgagctggatggcaagagcgccaagcagaacctggacaagtgctacggccagatcaaggagctgaatgagaagatcacccggctgacctatgaaattgaagatgagaagagaagaaggaagtctgtggaggacagatttgaccagcagaagaatgactatgaccagctgcagaaggcccggcagtgctag

SEQ ID NO: 23445 - DNA, 6819 bp, Artificial Sequence
  derived and/or modified sequence
atgagctgcaatggaggcagccacccccgcatcaacaccctgggccgcatgatccgggcagagagcggccctgacctgcgctatgaggtgaccagcggcggcggcggcaccagcaggatgtactacagccggcggggcgtcatcacagaccagaacagtgatggctactgccagacaggcaccatgagccgccaccagaaccagaacaccatccaggagctgctgcagaactgcagcgactgcctgatgagagctgagctgattgtgcagcctgagctgaagtatggagatggcatccagctgaccaggagccgggagctggatgaatgttttgcccaggccaatgaccagatggagatcctggacagcctcatccgggagatgaggcagatgggccagccctgtgatgcctaccagaagaggctgctgcagctgcaggagcagatgagggccctgtacaaggccatctctgtgccccgggtgcggcgggccagcagcaaaggaggcggcggctacacctgccagagcggcagcggctgggatgagttcaccaagcacgtgaccagcgagtgcctgggctggatgaggcagcagagagctgagatggacatggtggcctggggcgtggacctggcctctgtggagcagcacatcaacagccaccggggcatccacaacagcatcggggactaccgctggcagctggacaagatcaaggctgacctgcgggagaagagcgccatctaccagctggaggaggagtatgagaacctgctgaaggccagctttgagaggatggaccacctgcggcagctgcagaacatcatccaggccaccagccgggagatcatgtggatcaatgactgtgaggaggaggagctgctgtatgactggagcgacaagaacaccaacatcgcccagaagcaggaggccttcagcatccgcatgagccagctggaggtgaaggagaaggagctgaacaagctgaagcaggagagtgaccagctggtgctgaaccagcacccagccagtgacaagattgaggcctacatggacaccctgcagacccagtggagctggatcctgcagatcaccaagtgcattgatgtgcacctgaaggaaaatgctgcctacttccagttctttgaggaggcccagagcacagaggcctacctgaagggcctgcaggacagcatcaggaagaagtacccctgtgacaagaacatgcccctgcagcacctgctggagcagatcaaggagctggagaaggagcgggagaagatcctggagtacaagaggcaggtgcagaacctggtgaacaagagcaagaagatcgtgcagctgaagcccagaaatccagactaccgcagcaacaagcccatcatcctgcgggccctgtgtgactacaagcaggaccagaagatcgtgcacaagggagatgagtgcatcctgaaggacaacaatgaaagaagcaagtggtacgtgacaggccctgggggcgtggacatgctggtgcccagcgtgggcctcatcatccccccacccaaccccctggccgtggacctgagctgcaagattgagcagtactatgaggccatcctggccctgtggaaccagctgtacatcaacatgaagagcctggtgtcctggcactactgcatgattgatattgagaagatccgggccatgaccatcgccaagctgaagaccatgaggcaggaggactacatgaagaccatcgctgacctggagctgcactaccaggagttcatccggaacagccagggcagcgagatgtttggagatgatgacaagaggaagatccagagccagttcacagatgcccagaagcactaccagaccctggtgatccagctgcccggctacccccagcaccagacagtgaccaccacagagatcacccaccacggcacctgccaggatgtgaaccacaacaaggtgattgagaccaaccgggagaatgacaagcaggagacctggatgctgatggagctgcagaagatccggcggcagatcgagcactgtgagggccgcatgaccctgaagaacctgcccctggccgaccagggcagcagccaccacatcaccgtgaagatcaatgagctgaagtctgtgcagaatgacagccaggccatcgccgaggtgctgaaccagctgaaggacatgctggccaacttccggggcagcgagaagtactgctacctgcagaatgaggtgtttggcctcttccagaagctggagaacatcaatggagtgacagatggctacctgaacagcctgtgcaccgtgcgggccctgctgcaggccatcctgcagacagaggacatgctgaaggtgtatgaggcccggctgacagaggaggagaccgtgtgcctggacctggacaaggtggaggcctaccgctgtggcctgaagaagatcaagaatgacctgaacctgaagaagagcctgctggccaccatgaagacagagctgcagaaggcccagcagatccacagccagaccagccagcagtaccccctgtatgacctggacctgggcaagtttggagagaaggtgacccagctgacagaccgctggcagagaattgacaagcagattgacttccggctgtgggacctggagaagcagatcaagcagctgaggaactacagagacaactaccaggccttctgcaagtggctgtatgatgccaagaggcggcaggacagcctggagagcatgaagtttggagacagcaacacagtgatgaggttcctgaatgagcagaagaacctgcacagcgagatcagcggcaagagggacaagtctgaggaggtgcagaagattgctgagctgtgtgccaacagcatcaaggactatgagctgcagctggccagctacaccagcggcctggagaccctgctgaacatccccatcaagaggaccatgatccagagccccagcggggtcatcctgcaggaggccgcagatgtgcacgcccgctacatcgagctgctgaccaggtctggggactactaccgcttcctgtctgagatgctgaagagcctggaggacctgaagctgaagaacaccaagattgaggtgctggaggaggagctgcggctggccagagatgccaacagcgagaactgcaacaagaacaagttcctggaccagaacctgcagaagtaccaggccgagtgcagccagttcaaggccaagctggccagcctggaggagctgaagaggcaggccgagctggatggcaagagcgccaagcagaacctggacaagtgctacggccagatcaaggagctgaatgagaagatcacccggctgacctatgaaattgaagatgagaagagaagaaggaagtctgtggaggacagatttgaccagcagaagaatgactatgaccagctgcagaaggcccggcagtgtgagaaggagaacctgggctggcagaagctggagagcgagaaggccatcaaggagaaggagtatgaaattgagcggctgcgggtgctgctgcaggaggagggcaccaggaagcgggagtatgaaaatgagctggccaaggccagcaaccgcatccaggagagcaagaaccagtgcacccaggtggtgcaggagcgggagagcctgctggtgaagatcaaggtgctggagcaggacaaggcccggctgcagaggctggaggatgagctgaacagagccaagagcaccctggaggccgagaccagggtgaagcagaggctggagtgtgagaagcagcagatccagaatgacctgaaccagtggaagacccagtacagcaggaaggaggaggccatcaggaagattgagagcgagcgggagaagtctgagcgggagaagaacagcctgcggagtgaaattgaaaggctgcaggccgagatcaagagaattgaggagcgctgcaggaggaagctggaggacagcacccgggagacccagagccagctggagacagagaggagccgctaccagcgggagattgacaagctgcggcagaggccctacggcagccaccgggagacccagacagaatgtgagtggacagtggacaccagcaagctggtgtttgatggcctgaggaagaaggtgacagccatgcagctgtatgagtgccagctgattgacaagaccaccctggacaagctgctgaagggcaagaagtctgtggaggaggtggccagcgagatccagcccttcctgcggggggccggcagcattgctggggccagcgccagccccaaggagaagtacagcctggtggaggccaagaggaagaagctgatcagccctgagagcacagtgatgctgctggaggcccaggccgccaccggcggcatcatcgacccccacagaaatgagaagctgactgtggacagcgccatcgcccgggacctgattgactttgatgaccggcagcagatctatgctgctgagaaggccatcactggatttgatgaccccttcagcggcaagacagtgtctgtgtctgaggccatcaagaagaacctgattgaccgggagaccggcatgaggctgctggaggcccagatcgccagcggcggcgtggtggaccctgtgaacagcgtcttcctgcccaaggatgtggccctggcccggggcctgattgaccgggacctgtaccgcagcctgaatgacccccgggacagccagaagaactttgtggaccctgtgaccaagaagaaggtgtcctatgtgcagctgaaggagcgctgcagaattgagccccacacaggcctgctgctgctgtctgtgcagaagaggtccatgtccttccagggcatccggcagcctgtgacagtgacagagctggtggacagcggcatcctgcggcccagcacagtgaatgagctggagagcggccagatctcctatgatgaggtgggggagcgcatcaaggacttcctgcagggcagcagctgcatcgccggcatctacaatgagaccaccaagcagaagctgggcatctatgaggccatgaagattggcctggtgcggcccggcacagccctggagctgctggaggcccaggccgccaccggcttcatcgtggaccctgtgagcaacctgcggctgcctgtggaggaggcctacaagaggggcctggtgggcatcgagttcaaggagaagctgctgtctgctgagagagctgtgacaggctacaatgaccctgagactggaaacatcatcagcctcttccaggccatgaacaaggagctgattgagaagggccacggcatccggctgctggaggcccagatcgccactggaggcatcatcgaccccaaggagagccaccggctgcctgtggacatcgcctacaagaggggctacttcaatgaggagctgtctgagatcctgagtgaccccagtgatgacaccaagggcttctttgaccccaacacagaggagaacctgacctacctgcagctgaaggagcgctgcatcaaggatgaggagaccggcctgtgcctgctgcccctgaaggagaagaagaagcaggtgcagaccagccagaagaacaccctgaggaagagaagagtggtgattgtggaccctgagaccaacaaggagatgtctgtgcaggaggcctacaagaagggcctgattgattatgagaccttcaaggagctgtgtgagcaggagtgtgagtgggaggagatcaccatcaccggcagtgatggcagcaccagggtggtgctggtggacaggaagacaggcagccagtatgacatccaggatgccatcgacaagggcctggtggacaggaagttctttgaccagtaccgcagcggcagcctgagcctgacccagtttgctgacatgatcagcctgaagaatggagtgggcaccagcagctccatgggcagcggcgtgtctgatgatgtgttcagcagcagcagacatgagagcgtgtccaagatcagcaccatcagctctgtgaggaacctgaccatccgcagcagcagcttcagtgacaccctggaggagagcagccccatcgccgccatctttgacacagagaacctggagaagatcagcatcacagagggcatcgagcggggcatcgtggacagcatcaccggccagaggctgctggaggcccaggcctgcaccggcggcatcatccaccccaccaccggccagaagctgagcctgcaggatgctgtgtcccagggcgtgattgaccaggacatggccacccggctgaagccagcccagaaggccttcatcggctttgaaggagtgaagggcaagaagaagatgtctgctgctgaggccgtgaaggagaagtggctgccctatgaagctggccagcgcttcctggagttccagtacctgaccggcggcctggtggaccctgaggtgcacggccgcatcagcacagaggaggccatcaggaagggcttcattgatggccgggccgcccagaggctgcaggacaccagcagctatgccaagatcctgacctgccccaagaccaagctgaagatctcctacaaggatgccatcaacagatccatggtggaggacatcaccggcctgcggctgctggaggccgcctctgtgagcagcaagggcctgcccagcccctacaacatgagcagcgcccctggcagccgcagcggcagccgcagcggcagccgcagcggcagccgcagcggcagccgcagcggcagcagaagaggcagctttgatgccaccggcaacagcagctacagctacagctacagcttcagcagcagcagcatcggccactag

SEQ ID NO: 23446 - DNA, 2862 bp, Artificial Sequence
  derived and/or modified sequence
cagcagcagcgggccgagatggacatggtggcctggggcgtggacctggcgagcgttgaacaacacattaattctcaccgcggaattcacaacagtatcggagactacaggtggcagcttgacaaaatcaaggctgacctgcgagaaaagtctgccatctaccagttggaggaagagtatgaaaacctgttgaaagccagctttgaacgcatggatcatctgcgacagctgcagaatatcatccaggctaccagccgcgaaattatgtggatcaatgattgcgaggaggaagagcttctttacgattggagtgacaaaaacacgaatatcgcccagaagcaggaggccttcagcattcgtatgtctcaattggaagtcaaggaaaaagagctgaacaaactgaaacaggagtctgaccagctggttctaaatcagcatccagcaagcgataaaatcgaggcatatatggatacactgcaaacccaatggtcctggatcctgcaaattacaaaatgcattgatgtacatctcaaggaaaacgccgcctatttccagtttttcgaggaggctcaaagcactgaggcctatctgaagggcctccaggattccattaggaagaagtacccgtgtgacaagaatatgccacttcaacatcttctcgagcaaatcaaggagctcgagaaggaaagagagaaaatccttgagtataagagacaggtgcagaatctggtgaataaatccaaaaagattgtgcagcttaagccgcggaaccctgattaccggtctaacaagcccattattctgagggcgttgtgtgactacaagcaagaccagaaaattgtccacaagggagacgagtgtatcttgaaagataacaacgagaggtctaagtggtacgttaccggccctgggggggtggacatgttggtaccctcagttggccttatcataccaccccccaacccccttgccgtggacctctcgtgtaaaatagagcagtattatgaagcaatcctggccctgtggaaccagctgtacataaacatgaaatcgctcgtgtcgtggcactattgtatgattgacattgaaaagatcagagcaatgaccattgccaagctgaagactatgagacaggaagattacatgaaaacgatcgctgatcttgaactccattatcaagagttcatcagaaattctcagggctcagagatgtttggtgatgacgacaagcgcaagatccagagccagttcaccgacgctcagaagcactaccagacacttgttattcagttgcctggctacccgcaacaccaaacggttactacgacagaaatcacacatcatggcacctgccaggatgtgaaccataataaggtgattgagactaatcgggagaacgacaaacaggaaacatggatgctgatggaacttcaaaagatccggcgccagatagagcattgcgaggggcgaatgacactgaagaatcttccattggccgatcagggcagcagtcaccatattacggttaagataaatgagcttaagtctgtgcagaacgatagccaggcgattgccgaggtgctgaaccagctgaaggatatgctggcaaacttccgcggctcagagaagtactgttatctccaaaacgaggtcttcggcctgtttcagaaactggagaatataaatggagtcaccgatggctatctgaactctctgtgtaccgtcagggcgttgctgcaggcaattctccagacagaggatatgctgaaagtgtatgaagcacgcctgactgaagaggagacggtgtgtctcgacctcgacaaggttgaggcctaccggtgcggacttaagaaaattaaaaacgatctcaacctcaagaaaagtctccttgcgacgatgaaaacggagctccagaaagcccagcaaatccactctcagacctcacagcagtaccccctgtacgacctggacctgggcaaattcggagaaaaggtgacacagctgaccgatcgatggcaacgcattgacaaacagatcgattttcgcctctgggacttagagaaacagattaagcaactgagaaattatcgtgataactaccaggctttttgcaagtggctgtacgatgctaaaaggaggcaagactccctggagtccatgaaattcggggattctaacaccgtcatgaggtttctgaacgagcagaagaacttgcacagcgaaatttcagggaagcgcgacaaatccgaggaggtccagaagatagccgaactgtgcgccaattcaatcaaggactacgagttacaactggctagctatacaagcggcctggaaacattgctgaacataccaatcaaaagaaccatgatccagtccccaagcggggtgattctccaggaggctgctgacgtccatgcccggtacatagaactactcactcgcagtggcgactactacagattcttgtccgagatgttaaagagcctggaggaccttaaattaaaaaacacaaagattgaagttctcgaggaagagctgcgccttgcaagagacgcaaactctgagaactgtaataagaataaatttctcgaccagaatttacagaagtaccaggcagagtgctctcagttcaaagctaagctcgcctcgctcgaagaactaaaacgccaggcagaactcgacgggaagtctgcaaaacagaacctggacaaatgctacggacagattaaggagctcaatgagaaaattacccgcctgacctacgagattgaggacgagaagaggaggcggaagagcgttgaggatcgcttcgatcaacaaaaaaacgactacgaccagctccagaaggccagacagtgttag

SEQ ID NO: 23447 - DNA, 6819 bp, Artificial Sequence
  derived and/or modified sequence
atgagctgcaacggcggcagccacccccggatcaacaccctgggccggatgatcagggccgagtctggtcctgacctccgatacgaggtcacctccggaggtggtggaacttccagaatgtattacagtaggcgaggggttatcacagaccagaacagcgacggctattgccagaccgggaccatgtcacggcaccagaatcagaataccattcaggagctgctccaaaattgttccgattgcctgatgcgcgcagagctgattgtgcagcctgaacttaaatatggggatgggatccagctgactaggtctcgggagctggacgagtgtttcgctcaggcgaacgaccaaatggagattctggacagcttgatcagagaaatgaggcagatggggcaaccttgcgatgcgtaccagaagcgacttttgcagctgcaggagcagatgcgcgccctctacaaggcaattagcgtgccaagagtgcgtcgggcttcctctaagggtggcggaggatacacttgccaatccggctcggggtgggacgagtttaccaaacatgttacaagcgaatgtttgggctggatgcgacagcagcgcgctgagatggatatggtggcctggggtgtagacctagcttctgtggagcaacacatcaattcgcaccgaggtatccacaacagtatcggcgactatcgttggcagcttgataagattaaggctgacctgagggagaaatctgcgatctaccagctggaggaagagtacgagaatctgctcaaagctagtttcgagagaatggatcacctccggcagctgcagaacattatccaggcgactagcagggagataatgtggatcaacgattgcgaggaagaagaacttctgtatgactggtccgacaagaataccaacatcgcacaaaagcaagaggcctttagtataaggatgtctcagctcgaagtaaaagaaaaagaactgaataagctcaaacaggagtccgatcagctggtgctgaaccagcatccagcatctgataaaattgaagcttatatggacacacttcagacgcagtggtcgtggattctgcagataactaagtgcatcgatgtgcacctcaaggaaaatgcagcctattttcagttctttgaggaggcccagtccacagaggcatacttgaagggcttgcaggattccatccgcaaaaaatatccctgcgacaaaaacatgcctcttcagcacctgctggagcagatcaaggaattggaaaaagaacgagagaagattctcgaatacaagcggcaggtgcagaatctggtgaataagagcaaaaagatagtgcagttgaagccgcggaatcccgactacaggtcgaataagcccatcattctgagggcattgtgcgactacaagcaggatcagaagatagtgcacaagggagatgagtgtatcctgaaagacaataacgaacgctctaagtggtacgttactggcccagggggcgtagatatgctcgttcctagcgtgggcctgatcatcccaccaccaaatcctcttgccgtggacttgtcttgcaagatcgaacagtattatgaggccattctcgccctatggaaccagctatacataaatatgaaatcattggtgtcttggcactattgtatgatagatatagagaagatccgcgccatgaccattgctaaactcaaaacaatgcgacaggaagattacatgaaaacaatcgcagacttagagctgcactatcaggagtttattcgcaatagccaaggctcagagatgtttggggatgatgataagaggaagatccaatcacagtttacagacgcacaaaaacactaccagaccctcgtgattcagctgcccgggtacccccagcatcaaaccgtaactaccactgagatcacccaccatggaacctgccaggacgttaatcataataaagttatcgagaccaatcgcgagaacgacaaacaggaaacatggatgctgatggaactccagaagattcggaggcagatagaacattgtgaaggaaggatgaccctgaaaaatctgcccttggctgatcaaggctctagccaccacattacagtgaagattaacgagttgaagagcgtgcaaaacgactcccaggctatagctgaagtgctgaatcagctcaaggatatgctggcgaactttagggggtctgaaaaatattgctaccttcagaacgaagttttcgggttattccaaaagctggaaaatattaatggggtaactgatgggtatttaaattcactttgcaccgtcagggccctgttgcaggcgatcctccagacggaggacatgcttaaagtgtatgaggccagactcaccgaggaggaaacagtgtgccttgacttagataaagtggaggcatatcgctgcggattgaagaaaattaagaatgacctgaatctgaagaagtctctgctggccacgatgaaaaccgagctgcagaaggcgcaacagattcactcacagacaagccagcagtaccccctgtacgacttggatctcggaaagttcggtgagaaggtgactcaacttaccgatcggtggcagaggattgataaacagattgatttccgattgtgggatctggaaaagcaaataaaacaactaagaaattatcgggacaattaccaggcattctgcaagtggctctatgacgccaaacgtaggcaggacagtctggaatcaatgaaatttggcgattcaaacactgtcatgcgctttctcaatgagcagaagaacctgcacagtgagatctctggaaaacgggacaagagcgaggaagtacagaagattgccgagttgtgtgccaattcaattaaagattacgaacttcagctagcaagctatacttccggactggagactctgcttaatatccctattaagaggactatgattcagtctccatccggggtgatactgcaggaggctgctgacgtgcatgcccgctatattgaactcctgactagatctggagattactatcgtttcctgtctgaaatgctcaagtcactggaggatctcaaactgaaaaacaccaagatcgaagtgctggaagaagagctcagacttgcacgcgatgctaactctgaaaattgtaacaaaaacaagttcctcgaccagaacctacagaagtaccaagccgagtgctcacagttcaaggcaaaactggccagcctagaggagctgaagcgccaggcggagttggatggaaagtctgccaagcaaaatctggacaaatgttatgggcagataaaagaactcaatgaaaagataaccagattaacctacgagatcgaggacgaaaaacgaagaaggaaatctgtagaagatcggttcgatcaacaaaagaatgactacgatcaactgcagaaagctagacagtgcgagaaggaaaatcttggctggcagaaactggagagtgaaaaagccatcaaggagaaagagtacgagatcgagcggctgagagtgcttttgcaggaggaaggaacaagaaaaagggagtacgagaacgagcttgctaaggccagtaatagaatccaggagagtaaaaaccagtgtacccaagttgtgcaggagcgagagagcctgttagtaaagatcaaggtcctcgagcaagacaaagcacggctgcagcgcctcgaagatgaactgaacagggccaaatccactctcgaagccgaaacccgcgtgaagcagcggctcgagtgtgaaaagcaacagatccagaatgacttgaatcagtggaagacccagtacagtagaaaggaagaagcgatcaggaagatcgaatctgagcgggaaaagtccgagagggaaaagaatagtctccggtctgagattgaacgactacaagctgaaattaaacggattgaggaaagatgccgtaggaagcttgaagatagtacaagggaaacccagtcccaattagagactgaacgatcccggtaccagcgtgagatagataagctccggcagcggccctatgggtctcacagggagactcaaactgagtgcgaatggaccgtggatacctcaaagctggtcttcgacggtctgagaaagaaagttacagctatgcaactgtatgagtgccaactgatagacaagactactctggataagctgctgaagggtaagaagtctgtcgaagaggtggcaagcgaaatccagccattcctgagaggcgcaggctctattgcgggggccagtgcaagccccaaagaaaagtactcactcgtagaggccaagcgaaaaaagctgatcagcccagagtctactgtaatgttattagaagcccaggccgccactggcggcatcatcgatcctcaccgcaatgagaagttaacagtggacagcgccattgcaagagaccttattgatttcgatgacaggcagcagatttacgccgccgagaaggcaatcactggcttcgacgaccctttcagcggaaagaccgttagcgtttccgaggctatcaaaaagaacctgatcgatcgcgaaacgggcatgcggctgctagaggcccagattgcttccggtggcgtggtcgatccggtaaacagcgtatttttgccaaaggatgtcgcactggctaggggccttatcgaccgggacctgtataggtccctgaacgatcccagggattcccagaagaattttgtggaccccgtcactaaaaaaaaagtttcttacgtgcagcttaaggagagatgcaggatcgagccacacactggtctgcttctgctgtccgtgcaaaaacgaagtatgtctttccaaggtattaggcagcccgtaaccgtcactgagttagtcgattcaggcatcctgcggccatctacagttaacgagctggagtcagggcagatctcttacgacgaggtcggagagcgcatcaaggattttttacagggttcctcatgtattgcaggtatctacaacgagaccaccaagcagaagctggggatttacgaggccatgaaaatcgggcttgtaaggccaggaaccgccctggagttgctggaggctcaggcagccaccggcttcattgtggacccagtctctaatctccggctgcccgttgaagaagcctacaaacgtggcctggttgggatcgagtttaaggagaagctcctgagcgccgaaagagccgtaaccggatataatgatccagagactggcaatataattagcctcttccaggcaatgaataaggagctgatagaaaaaggtcacggcattcgtttgctcgaggctcagatcgcaacaggaggtataattgatcccaaggaatcccatcggctgcccgtagatatagcgtacaagcggggttacttcaacgaagagctctccgagatcttatccgaccctagcgacgacacaaaggggttctttgatccaaacaccgaggagaatctaacgtacctccagcttaaagaaagatgcatcaaggacgaggagacaggcctctgcctgctcccgctgaaggagaaaaaaaaacaggtgcaaacctctcagaaaaacacattgcgcaagcgcagagtcgtgatcgtagatccagagaccaacaaggaaatgagcgtacaggaagcttataagaagggccttatcgactacgaaaccttcaaggaactctgtgagcaagagtgtgagtgggaagaaattacgattaccggaagcgacgggtctacgcgagttgtgctagtggaccgaaagaccgggtcccagtacgatatccaggacgccattgacaagggactcgtcgatcgcaaattcttcgatcagtatcggtccggaagtctgtcactgactcaattcgctgacatgataagcctgaagaacggtgtgggcacctcctcctctatggggagcggtgttagtgacgatgtgttctcatccagtagacacgaatccgttagcaagatttccacaattagttccgtgcgcaatctgacaattagatccagttcattttctgacacgctggaggagtcttcccctattgccgctattttcgacacagaaaacctagagaagatttcaataacagagggcatcgagcgagggatcgtcgatagcataacggggcagcgcttgttggaggcacaggcgtgcaccggcgggatcatacaccccaccaccgggcagaagctgagtctgcaggatgcagtgtcacaaggagttattgaccaggatatggctaccagactaaaacctgcacagaaagcttttatcggcttcgagggagtcaagggaaaaaagaagatgtctgcagccgaagctgtgaaagaaaaatggctgccttacgaagcaggtcagagatttcttgagttccagtacttgactggtggactagtagacccagaagtgcacgggcgaatcagcaccgaggaggccattaggaagggctttattgatggccgtgccgcacagcgtctccaggataccagctcatatgccaagattctgacatgccctaagaccaaactcaagatatcatataaagatgccattaaccggtccatggtcgaagacataaccggtttaagactgctggaagcagcaagtgtgtcttcaaagggtctgcctagtccctacaatatgagtagcgcccccggcagccgatctggctcaagaagcggctcccggtcagggtctcgcagcggatctcggtccggctcccggagggggtcattcgacgctactggcaatagcagttactcgtactcttactccttttcttctagctccattgggcactag

SEQ ID NO: 23448 - DNA, 2862 bp, Artificial Sequence
  derived and/or modified sequence
cagcaacagcgcgctgagatggacatggtagcctggggggtcgatttggcaagcgtggaacagcatattaacagtcacaggggaattcacaatagcattggggactatcggtggcagcttgataagattaaggccgatcttagagaaaaaagcgcgatttaccaactggaggaggagtacgaaaatctactgaaagcctcttttgagcgtatggatcatctgcgccagttacaaaatatcatacaggcgactagtagggagatcatgtggattaacgattgtgaagaggaagagctgctatatgactggagtgacaaaaacacgaacattgcccagaaacaggaggcattctccattagaatgtcacagcttgaagtgaaggagaaagaactcaacaaactcaagcaggagtctgaccaactcgtgctgaaccagcatcccgcttcagataagattgaagcatatatggataccctgcagacgcagtggagctggatcttgcagatcaccaagtgtatcgacgtacatctgaaggagaacgctgcttacttccagtttttcgaagaggcgcagagcactgaggcctatctgaaagggctgcaggactccatccgtaagaagtacccttgtgataagaacatgccgctacaacatttactcgagcaaatcaaagaattggagaaggagagagaaaagattttagaatacaagcgacaggtccagaacttggttaacaaatcaaagaaaattgtacagctgaaacctcgcaaccctgactaccggtcaaacaagccaatcatcctgagggccctctgcgactataagcaggatcagaagatcgttcacaaaggtgatgaatgcattctcaaagacaataacgagcgctctaagtggtatgtgacgggaccaggaggagttgacatgctcgtgcccagcgtgggtctcatcatacctccacccaaccctctggctgtggatctctcctgcaaaatcgagcaatactatgaagctattctggcactgtggaaccagttatacatcaatatgaagtccctggtttcatggcattattgtatgatcgatatcgaaaaaatccgggcaatgacaattgccaaactgaaaacaatgaggcaggaggactatatgaaaacaatagccgatctagaactgcattatcaggaattcattcgtaatagccaaggtagcgagatgtttggggatgacgacaagaggaagattcagtcacagttcacggacgcccaaaagcactatcagacacttgtgattcagcttcccggttatccacagcatcagaccgtcaccacaactgagattacacaccacggaacttgtcaagatgttaatcacaacaaggtcattgagacaaaccgggagaatgacaagcaggagacctggatgttaatggagctgcagaagatccggagacagattgaacactgtgaaggcagaatgaccctcaaaaatcttcccctcgccgatcagggtagctcccaccacataaccgtgaagataaatgagctgaagtccgtccaaaacgactcacaagccatcgcggaggttctgaaccagctgaaagatatgctggccaatttcaggggcagtgagaagtactgctacttgcagaacgaggtcttcggcctttttcagaagctggaaaacatcaatggggtcaccgacggatacctgaactcgttgtgtaccgttcgcgctttacttcaggctattctgcagaccgaggacatgctcaaagtctatgaggccaggctcaccgaggaggagactgtctgcctggacctggacaaagtggaggcgtacaggtgcgggctgaagaagattaagaacgatctcaatttgaaaaagtctcttcttgccaccatgaagacggaactgcagaaggcacagcagatccattctcagacaagtcaacagtaccctttgtacgacctagacctgggtaagtttggagagaaggtgactcagctgacagataggtggcagcggatcgacaagcagattgatttcaggctgtgggaccttgagaagcagataaagcagcttcgtaattaccgcgataactaccaagctttttgtaagtggttgtatgatgctaagaggcggcaggacagtctagaaagcatgaaatttggcgactccaacacagttatgcgcttcctgaatgaacagaaaaatctgcacagcgagatcagtgggaagcgggataaatccgaagaagtgcagaaaatcgccgagctctgcgccaactctattaaggattatgagctccagctggcctcttacacgagtggactagaaacattgcttaatattcccattaagcgcacgatgattcagagcccaagcggggttattctgcaggaggcggctgatgtacatgcccgttacattgaactgctcacaagaagtggggattattaccgcttcctgtccgagatgttgaaaagcttagaagatcttaagttgaagaatacaaagatcgaagtgctcgaggaggagctgcgcctggctagggacgcaaattcggaaaactgcaacaagaacaagtttctggatcagaacttgcaaaagtatcaggcagaatgctctcaattcaaagctaagcttgcgtctctggaagaattgaagcgtcaagcggaactcgatggtaagtcagcgaagcagaacttggataagtgctatgggcagattaaggagctcaatgagaaaatcacgcgtctgacatacgaaatcgaggatgaaaagcgacggaggaagtcagtggaggatcggttcgatcaacagaagaacgactatgaccagctgcaaaaagctcggcagtgttag

SEQ ID NO: 23449 - DNA, 6818 bp, Artificial Sequence
  derived and/or modified sequence
atgagctgcaatgggggtagtcacccaaggattaacacactgggcaggatgattcgggctgaatcaggacctgacctgagatatgaagtgacatccgggggaggcggaacctcgagaatgtactattccaggcggggtgtgattactgaccagaacagcgacgggtactgccaaaccggtaccatgtctagacaccaaaaccaaaataccattcaggagctgctgcagaattgctcagactgccttatgcgcgctgaactcattgtccaaccggagcttaaatacggtgatggaatccaactgactagaagcagggaactggatgaatgttttgctcaagccaacgatcagatggagattctggacagcttgatccgggagatgcggcagatggggcaaccttgcgatgcttaccaaaagaggttactgcagcttcaggaacagatgcgggcactctacaaggcgatcagcgtgccacgagttaggcgagcctcctcaaagggtgggggaggatacacctgccagagcggcagcggttgggatgaattcacaaaacacgtcacatcagagtgtctcgggtggatgcgtcagcagcgcgctgaaatggatatggtcgcgtggggcgtggacctggcaagtgtcgagcagcacatcaactcacaccggggtattcataactccataggagactacagatggcagctcgataaaatcaaggccgatctgcgcgagaagagtgccatttaccagctcgaggaggagtacgagaatttactcaaggcttcgtttgaaaggatggaccatctgaggcagctccaaaacataatccaagctacgtcccgcgagattatgtggattaacgactgcgaagaggaagagctgctgtatgactggtcagataagaataccaatattgcccagaagcaagaggcattcagcatccgaatgtcccagctcgaggtgaaagaaaaggagctgaacaagcttaagcaggaaagcgatcagctcgtgctaaaccagcatcccgcatcggataaaatagaagcatatatggacaccctgcagactcagtggtcgtggatactgcagattaccaagtgtatcgatgttcaccttaaggagaacgcagcatacttccaatttttcgaagaggctcaaagtacagaggcttatttgaaaggacttcaagactcgatacgaaagaagtacccttgcgacaaaaatatgcccctgcagcacttgcttgagcaaattaaggagctggaaaaagagagggagaaaattctcgaatataagcgccaagtgcaaaatttagtgaataaatccaagaaaattgtacagctgaagccaagaaatcccgattaccgctcaaacaaacctattatactacgcgctttgtgcgattacaagcaagaccagaagatcgtgcataagggagacgagtgcatactcaaggacaacaacgaaaggtcaaaatggtatgttacaggccctgggggtgtggacatgctcgtgcctagcgtgggcctgatcatcccccctccgaaccccctggccgtcgacctctcttgtaagatcgagcagtattatgaggccatcttggctctgtggaaccagctgtacattaacatgaagagcttagtttcttggcactactgcatgatagatattgagaaaatccgagctatgacaatcgcgaagctgaagaccatgcggcaggaagactacatgaagaccattgctgatctcgaattgcattaccaagagtttattagaaattcccagggaagcgagatgtttggagacgatgataagcgcaagattcagagtcagttcaccgatgcacagaagcactatcagacactggtgatacagttgccaggctacccccagcaccagaccgttacaactactgaaattacccaccatggaacctgccaggatgtcaatcataataaggtgatcgagaccaaccgcgagaacgacaaacaggagacctggatgctgatggagctgcaaaaaatccgtcggcaaatcgagcattgtgaggggaggatgacgctgaagaacctccctctggccgatcaagggtccagccaccatattactgtcaaaattaacgagctcaaatctgtgcagaatgactctcaggctatcgcggaggttttgaaccagctgaaagatatgcttgcgaattttagagggtctgaaaagtactgctatctgcagaacgaggtatttggcctttttcagaagctggagaacataaacggagtcacggatggctacctgaacagcttgtgcactgtcagggcgcttttgcaggccatcctgcagacggaagacatgttaaaggtctatgaggcgagacttaccgaggaggagacagtttgtctggatctggataaggtggaagcctatagatgcggcctgaagaaaataaagaacgacctaaatctcaagaaatcactcttagccaccatgaagaccgagctgcagaaagctcaacagatccatagccaaactagccaacagtatccactgtatgacctggatctgggtaagtttggcgaaaaggtaacccagttaaccgacaggtggcaacgcatcgataagcagatcgactttcgactgtgggacctcgaaaaacagatcaaacagctgcggaactacagagataactaccaggctttttgtaagtggctttatgacgctaagagacggcaggattctctcgaaagtatgaagttcggagatagcaacaccgtgatgaggttcttaaatgagcaaaagaacctccactctgagatttccggcaagcgcgacaagtctgaagaggtgcagaagatcgccgaactctgtgctaatagcattaaggattatgagctgcagctggcttcttacacgtccggcctggagaccctgctaaatatccccattaagaggactatgatacaaagccccagtggagtcatccttcaggaggccgcagacgtccatgccagatatattgagctactcactaggtcaggagactactacaggtttctaagtgagatgcttaagtctctagaggatctgaagctgaaaaacacaaaaatcgaggtgctggaggaagagctccggctggccagagatgcgaatagcgagaattgcaataagaacaaattcctggaccaaaacctccaaaaatatcaagccgagtgtagtcagtttaaagctaagctggcgtctctagaggaattaaagcgccaagctgaactggatggaaagtccgctaagcagaatctggacaaatgttacggacagatcaaagagctgaatgaaaagatcacccgtcttacgtacgaaattgaagacgagaaacgtcggaggaagagcgtggaggacagattcgatcagcagaagaacgattacgaccagctgcagaaggcccgacagtgcgagaaggaaaatctgggctggcagaagctagagtctgaaaaagctataaaggagaaggagtacgagatcgagcggctccgggtactgttgcaggaggaaggtacacggaagagagaatatgaaaatgagctggccaaagccagcaatcgtatccaggaatctaagaatcaatgcacccaggtcgttcaggaacgggagagccttctggtaaaaattaaggtgctggagcaagataaggcacggctgcagagactggaggacgaactgaacagagcaaagtccacgttggaggccgagacacgcgtcaagcagcgcttagagtgtgagaagcagcagattcaaaatgatctgaaccaatggaagacacaatatagcaggaaggaggaagctattcggaagattgaatctgaacgcgaaaagagtgagcgagagaagaattcattgagaagtgagatcgagaggttgcaagccgaaatcaaaagaatagaagaacgttgccgcaggaagttggaagacagcacccgcgagacccagtcccaactggaaaccgaaaggagtaggtaccagagagagatcgacaagttaagacagcgtccttacggatctcaccgagaaacccagaccgagtgcgagtggacagttgatacaagtaaacttgtgtttgatggcctgagaaaaaaagtgacagctatgcaactttacgagtgtcagctcatagataaaactaccctggataagcttctcaaagggaagaagtctgtcgaagaggtggcctctgagattcagccatttctgcgcggagctggttccatcgccggagcatctgcgtcaccgaaggagaagtacagtttagtagaagccaaaagaaagaaacttatctcccctgaatccaccgttatgctcctggaagctcaggctgccacgggtggcatcatagatccgcaccgaaatgagaagctgactgttgatagcgccatcgctagggatctgatcgacttcgacgatcgccagcagatctacgctgcagaaaaggcgatcacgggcttcgatgacccattcagcggaaagacagtgtctgtgtccgaggccataaagaaaaacctcatcgatcgcgagactggaatgagattactggaggctcagattgcatctggaggtgttgttgatcccgtgaactccgtctttctccctaaggacgtcgctttagctagaggtctcatcgatcgcgatctgtaccgaagcctgaacgatcctagagactcgcagaagaactttgtagaccccgtgacaaaaaaaaaggtgtcatatgtgcagttgaaggaaaggtgccggatcgagccccacaccggactgttgctgctgagcgtgcagaagaggagcatgtccttccagggtatccggcagcccgtcactgtgacagagcttgtcgacagcggcattctgagaccatccaccgtaaatgagctggaatcggggcagatctcatacgatgaggtgggggagcgcatcaaggactttctccaggggagttcgtgcatcgctggaatctacaacgagacgacaaaacagaagttgggaatatatgaagcgatgaagatcgggctcgtcagacccggtaccgctctggaactgctggaggcccaggccgcaaccggttttattgtcgatccggtatctaatttaagattgccagttgaagaagcctataaaagggggctcgtgggcattgaatttaaggagaagctccttagcgctgaaagggcagtgactgggtacaacgaccccgaaactgggaatatcatctctctctttcaggctatgaataaagagctcatagagaagggtcacggcatcagactcctggaggcgcaaatcgccacaggcggtatcatcgaccctaaagaaagccacaggctcccggtagacatagcctacaaaagaggctatttcaatgaggagctgtccgagattctcagcgacccctcagacgacacgaaggggttcttcgaccccaacaccgaggaaaacctgacttatctacagctcaaagaacgttgcattaaggacgaagaaacaggcctctgcttgctgcctcttaaagagaaaaagaagcaagtgcagacttctcagaagaatacacttcggaaaagaagagttgtgattgtcgaccctgagacaaacaaagaaatgtccgtgcaggaagcctataaaaagggactgatagattacgaaactttcaaagagctttgtgagcaggaatgtgagtgggaggagatcacaatcaccggttccgacggcagtacacgggtggtactggtcgataggaagacggggtcccaatatgatattcaggatgccatcgacaaaggactggtggatcgcaagttcttcgaccagtaccggagtggaagtttatctctcactcagtttgccgacatgataagtttgaagaacggcgtggggacctcttcatctatggggtccggagtgagtgacgacgtattttcctcatcaagacacgagtctgtttctaagatttcaactatctcgagcgtgagaaatctgaccatcaggtcctcctctttttcagacacgctagaggagagttctccgattgccgcaatttttgacacagagaatcttgaaaaaatctctatcaccgagggcatagaacgcggaattgtcgattccatcaccggtcaaagactgctcgaggcccaggcctgtacgggcggtatcatccaccccaccactggacagaagctgagcctccaggatgcggtgtcacagggtgtcatcgaccaggacatggctacccgactgaaacccgctcagaaagccttcatcggatttgaaggcgtgaaggggaaaaaaaagatgtcagccgctgaggccgttaaggagaagtggctgccatacgaggccggacagagatttctggaattccaatatctgaccggagggctggtggacccggaggtgcatgggaggattagcacagaggaagctatccgcaagggcttcattgacggcagagcagctcagcggctacaggacaccagctcctacgcaaagattttgacgtgtcctaaaaccaagctcaaaatctcatataaagatgccattaatcgcagcatggttgaagatatcaccggactcaggttgcttgaggcagctagcgtgtcatcgaaaggtctgcctagtccgtataacatgtctagcgctcccggaagtcgatcagggagtaggagcggatcaaggagcggaagcaggtccgggagccggtctggaagtcggaggggcagcttcgacgctaccggaaattcctcatattcttacagctacagcttttctagtagcagcattgggcatta

SEQ ID NO: 23450 - protein, 360 aa, Artificial Sequence
  derived and/or modified sequence
MSQGRGKYDFYIGLGLAMSSSIFIGGSFILKKKGLLRLARKGSMRAGQGGHAYLKEWLWWAGLLSMGAGEVANFAAYAFAPATLVTPLGALSVLVSAILSSYFLNERLNLHGKIGCLLSILGSTVMVIHAPKEEEIETLNEMSHKLGDPGFVVFATLVVIVALILIFVVGPRHGQTNILVYITICSVIGAFSVSCVKGLGIAIKELFAGKPVLRHPLAWILLLSLIVCVSTQINYLNRALDIFNTSIVTPIYYVFFTTSVLTCSAILFKEWQDMPVDDVIGTLSGFFTIIVGIFLLHAFKDVSFSLASLPVSFRKDEKAMNGNLSNMYEVLNNNEESLTCGIEQHTGENVSRRNGNLTAF

SEQ ID NO: 23451 - protein, 59 aa, Artificial Sequence
  derived and/or modified sequence
MSQGRGKYDFYIGLGLAMSSSIFIGGSFILKKKGLLRLARKGSMRAGQGGHAYLKEWLW

SEQ ID NO: 23452 - DNA, 1083 bp, Artificial Sequence
  derived and/or modified sequence
atgtcccagggtcgtgggaaatacgatttttacatcggtctgggtctggcgatgagctccagcatatttattggggggagtttcatcctgaaaaagaaagggctcctaaggttagctcgtaaagggtcaatgagggcgggtcaaggcggccatgcttatcttaaagaatggttatggtgggctgggctgttatccatgggagccggagaggtggcgaacttcgccgcatacgcgtttgcgcccgccacattggttactcctttgggagccctttcagtgctggtgtctgccatactgtcatcttatttcctgaatgaacgcctaaacttacatggcaaaatcggctgcctgcttagcattcttggatccactgttatggtgatccacgcccccaaagaggaagaaattgagaccctcaacgaaatgtcccacaagctgggcgatcccggattcgtggtattcgcgaccttagtagtaattgtagcccttatcttaatttttgtggtggggccccgtcatggccaaactaatatcctagtgtacatcactatttgtagtgtcattggtgcattttccgtgtcctgtgtgaaaggactgggaattgccatcaaggagctttttgctggaaagccagtgctgcgtcatccactggcctggattctgctgctttctcttatcgtgtgcgtgagtactcaaattaactatctgaaccgggccctcgacatcttcaatacaagtatagtcacaccaatatactatgtgttcttcacaacctcagtgctaacatgctccgctatcttatttaaagagtggcaggatatgcccgtggacgacgtgattggcactttgagcgggttttttactatcatcgttggaatcttccttctccacgcctttaaagacgtgagcttctcactcgctagtttgccagttagcttccgtaaagacgagaaggccatgaatggaaacttatccaacatgtatgaggtgttgaacaataatgaggagtcacttacctgcggaatagagcagcatactggggaaaatgtctcacgcaggaatggaaacttaacagccttttag

SEQ ID NO: 23453 - DNA, 1083 bp, Artificial Sequence
  derived and/or modified sequence
atgtcccaggggcggggaaaatacgatttctacatcggcctcggtctggctatgtcatctagtatctttatcgggggctctttcatattgaaaaagaaaggcctgctgagactcgctcggaagggcagcatgagggcaggccagggaggacatgcctacttgaaggagtggctatggtgggcagggctgttgtctatgggagctggcgaggtcgctaatttcgccgcctatgcgtttgccccagcaacattagtcacaccactgggcgcgctcagcgtcttagtgtccgctatcctcagcagttacttcctcaacgaaagactgaatctgcacggtaagattggctgccttttatctatcctcggctctacagtgatggtgatccatgcccccaaagaagaggagattgaaaccttaaatgagatgtcccacaaattaggtgacccaggtttcgtcgttttcgcaaccctggtcgttatcgttgccctgatcctcatattcgtcgtgggccctcgacatggacagacaaatattctagtatacatcacaatctgctccgtgattggcgcctttagtgtgtcttgcgttaaggggcttggaatcgcgattaaagaactgttcgccggcaaaccagtcctcagacaccctttagcctggatccttctcctgtcacttattgtgtgcgtcagcacccagatcaactatctgaacagagccctcgacatatttaacacctcaatcgtgacacctatctactatgtttttttcacaacaagcgtgctcacatgttccgctatccttttcaaagaatggcaggacatgccagtggatgatgtgatcggcacactctctggattcttcacaattatcgttggcatttttctgctgcatgcattcaaagacgtgtcattttccttagcatcgctccccgtctcctttagaaaagatgagaaagcaatgaacggcaatttatctaatatgtatgaagtgttgaacaataatgaggagtctttgacctgcggaatcgagcaacacaccggggaaaatgtgagccgtcgcaatgggaatctgacagcattttag

SEQ ID NO: 23454 - DNA, 1083 bp, Artificial Sequence
  derived and/or modified sequence
atgagtcaggggagagggaaatacgatttctacattgggttggggctagctatgtcctcttcgatatttatcggtggatccttcatcttgaaaaaaaaaggattactcagacttgccagaaaaggcagcatgagagccggccagggcggccacgcctatctgaaagagtggctttggtgggccggactactgtcaatgggtgcaggagaggttgccaatttcgccgcctatgctttcgcaccggccaccttagtcaccccccttggtgcgcttagtgtgctagtctccgctatcctgtcaagttacttcctcaacgagcgcctgaacctgcacgggaagattggctgcctcctgtcgattctaggatccacagtgatggtgatacacgcccccaaggaggaggagattgaaactcttaatgagatgtctcataaactgggagatccaggtttcgtggtcttcgcaactctggtcgtgatcgttgctttaattttgattttcgtagtgggtccacggcatggacaaacaaacatccttgtctacattaccatttgcagtgtcattggggcattttccgtgagttgtgtgaagggattggggatagcaataaaggaactttttgcgggcaagccagtgctgcgacatcccctggcatggatcctcctcctaagtctaattgtttgcgtcagtacacaaatcaattacctgaaccgggccttggatattttcaacaccagcattgtgacaccaatctattatgtcttcttcacaacaagcgtgttgacttgctccgctatactgttcaaggagtggcaggatatgccagtggatgacgtgatcggaacgctgtccggatttttcactataatcgtggggattttcctgcttcatgccttcaaagacgtatccttctccctggcatccttgcctgtgagcttccggaaagacgaaaaagccatgaatggaaacttgtctaacatgtacgaagtgctgaataataacgaagagagtctcacttgcggcatcgagcaacacactggagagaacgtctccaggagaaatggaaacctgacagctttttag

SEQ ID NO: 23455 - DNA, 180 bp, Artificial Sequence
  derived and/or modified sequence
atgtcccagggtcgggggaagtatgacttctacattggcctgggactcgctatgtcatcttctatcttcatcgggggatccttcattcttaagaagaaaggtcttctgcgccttgcgagaaagggctcgatgcgggccggccaagggggtcatgcttacctgaaggaatggctgtggtag

SEQ ID NO: 23456 - DNA, 1083 bp, Artificial Sequence
  derived and/or modified sequence
atgagccagggccggggcaagtatgacttctacatcggcctgggcctggccatgagcagcagcatcttcatcggcggcagcttcatcctgaagaagaagggcctgctgcggctggccaggaagggctccatgagagctggccagggcggccacgcctacctgaaggagtggctgtggtgggccggcctgctgtccatgggcgctggggaggtggccaactttgctgcctatgcctttgccccagccaccctggtgacccccctgggcgccctgtctgtgctggtgtctgccatcctgagcagctacttcctgaatgaaaggctgaacctgcacggcaagattggctgcctgctgagcatcctgggcagcacagtgatggtgattcatgcccccaaggaggaggagattgagaccctgaatgagatgagccacaagctgggggaccccggctttgtggtgtttgccaccctggtggtgattgtggccctgatcctgatctttgtggtgggccccaggcatggccagaccaacatcctggtgtacatcaccatctgcagcgtcatcggggccttctctgtgtcctgtgtgaagggcctgggcatcgccatcaaggagctgtttgctgggaagcctgtgctgcggcaccccctggcctggatcctgctgctgagcctcatcgtgtgtgtgtccacccagatcaactacctgaacagagccctggacatcttcaacaccagcatcgtgacccccatctactacgtgttcttcaccacctctgtgctgacctgcagcgccatcctcttcaaggagtggcaggacatgcctgtggatgatgtgattggcaccctgagcggcttcttcaccatcatcgtgggcatcttcctgctgcacgccttcaaggatgtgtccttcagcctggccagcctgcctgtgtccttcaggaaggatgagaaggccatgaatggaaacctgagcaacatgtatgaggtgctgaacaacaatgaggagagcctgacctgtggcatcgagcagcacactggagaaaatgtgtccagaagaaatggaaacctgacagccttctag

SEQ ID NO: 23457 - DNA, 180 bp, Artificial Sequence
  derived and/or modified sequence
atgagccagggccggggcaagtatgacttctacatcggcctgggcctggccatgagcagcagcatcttcatcggcggcagcttcatcctgaagaagaagggcctgctgcggctggccaggaagggctccatgagagctggccagggcggccacgcctacctgaaggagtggctgtggtag

SEQ ID NO: 23458 - DNA, 1083 bp, Artificial Sequence
  derived and/or modified sequence
atgagccagggccggggcaagtacgacttctacatcggcctgggcttggcaatgagctcttctatcttcatcggagggagttttatcctcaaaaagaaaggtttgctccggctcgctaggaaaggctcaatgagagcaggacagggtggtcacgcctacctgaaggaatggctctggtgggccggcctgctgtctatgggtgcaggtgaggtggcaaacttcgccgcctatgcgtttgccccagccactctggtaacacctctcggtgccttgagcgtcctggtgtccgctatcttaagctcgtacttccttaacgagagactgaatctccacggcaaaatagggtgtttacttagcatattgggcagcactgtgatggtcatccacgcccccaaagaggaggagattgagaccttgaacgagatgtcacacaaactgggcgaccctggctttgtggtgtttgccaccctggtcgtgatcgtggcgctgattttaatatttgttgttgggccccgacacggacagaccaatatactagtgtatattaccatctgcagtgtcataggagcttttagcgtgtcatgtgtcaagggcttggggattgccatcaaggagctatttgcaggcaaacccgtactgaggcatccactggcttggatactgctgctaagcctgattgtgtgtgtgagtacccagattaactacctgaacagagctctggacatttttaatacatctatcgtcacccccatctattatgtctttttcacgacttcagtgctgacgtgcagcgcaatattatttaaggagtggcaggacatgccagtcgatgatgtgattggcacactcagcggcttctttaccatcattgttggtattttcttgctccacgcatttaaggatgtgtcattttccttggcgtccctccccgtgagctttcgcaaagacgaaaaggccatgaatgggaacctgagtaacatgtatgaggtgctgaacaacaacgaggagtcgttgacttgcgggatcgagcagcatactggtgagaatgtgtccagaaggaatgggaacctgacagctttctag

SEQ ID NO: 23459 - DNA, 1083 bp, Artificial Sequence
  derived and/or modified sequence
atgagccagggccggggcaagtacgacttctacatcggcctgggcttagctatgtcatcgagtatcttcatcggaggcagttttatcctaaaaaagaaaggcctgctgaggcttgcccgaaaagggtccatgagggcagggcaaggcgggcatgcgtatctgaaggaatggctgtggtgggccggtctcctatccatgggggccggagaggttgcaaacttcgctgcttacgctttcgcccccgcgaccctagttacgcctttaggagccctgagcgtcctcgtctcagccatcctgtcctcttactttctcaacgaacgcctcaatcttcacggcaagattggttgtctgttaagtatattgggatccaccgtgatggtgatccacgcacctaaggaagaggagatcgagacactcaatgaaatgtcacacaagctgggcgatccaggctttgtggtcttcgcaaccctagttgttatcgtagcactgatcctcatctttgtagtaggcccacgacatgggcagacgaacatcctagtgtacatcaccatctgttcagtcattggtgcctttagtgtctcctgcgtgaaaggtctgggcatagcaattaaagagctgttcgcagggaagccggtattacggcacccactcgcctggattctgcttttgtcactcatcgtctgcgtgtccacccaaataaactatttaaaccgtgcgctagacatttttaacacttccattgtcaccccaatctattacgtcttctttacaacctccgtgttaacctgctccgcaatactcttcaaggagtggcaggacatgcccgtcgatgacgtgattggaactctatccggcttttttacaattattgtcggcatcttcctgttacacgcgttcaaagacgtgtcgttcagtctcgcctcactgcctgtaagcttccgcaaggacgaaaaggcaatgaatggaaacctgagcaatatgtatgaggtcctgaataacaatgaagaatcactcacatgtggcattgagcaacacaccggcgagaacgtgagccggagaaacggtaatctgacggccttttag

SEQ ID NO: 23460 - DNA, 1083 bp, Artificial Sequence
  derived and/or modified sequence
atgagccagggccggggcaagtacgacttctacatcggcctgggcctggcaatgtcgagctctatcttcatcggaggcagcttcatattaaaaaagaagggacttttgcggctggctcgtaagggttccatgcgtgccgggcagggaggccacgcctatttaaaagaatggctttggtgggccggtctgctgtcaatgggtgccggggaggttgcaaattttgccgcctacgcctttgcacccgcgaccctcgtcactccactcggggcactctccgtgctagtttctgctatattatccagctacttcctgaatgagcggttgaaccttcatggcaaaatcgggtgcctgctcagtatccttggctctacagtgatggttatccacgctccaaaggaagaagaaattgaaactcttaatgagatgtcccataaattaggtgatcctggatttgtcgtattcgctaccctggtggtgattgtcgctctgattcttatattcgtggtcggaccgaggcacggacagacaaatatccttgtgtacataactatctgctctgtgatcggagcgtttagtgtcagctgtgtgaagggcttaggcatcgcgataaaggagctcttcgctggtaaacctgtgctgcgacacccgctggcctggatcctcctcctgtcattaatagtctgtgtgagcacacagataaactacctgaaccgcgcgctggatatcttcaataccagcatcgtgacacccatatactacgtctttttcaccaccagtgtgctcacctgttcagccatattgtttaaagaatggcaagatatgcctgtggatgatgttataggcactctttccggattcttcacaatcattgtgggcatttttctgcttcacgcatttaaagacgtttctttctcgttagcgtctctgcccgtctctttcaggaaagatgagaaggctatgaatggcaatctgtcaaacatgtacgaggtactcaataacaatgaagagtccctcacatgcgggatcgaacagcacacaggcgagaacgtctcccgcaggaatggtaacctcacagcattctag

SEQ ID NO: 23461 - DNA, 180 bp, Artificial Sequence
  derived and/or modified sequence
atgagccagggccggggcaagtacgacttctacatcggcctgggcctggccatgtcaagtagcatctttatcggtggctcctttattttgaagaagaagggattactgcggctggcgcggaaaggctccatgagggccggccaaggagggcatgcctacctcaaggagtggctttggtag

SEQ ID NO: 23462 - DNA, 3233 bp, Artificial Sequence
  derived and/or modified sequence
gttttccggcgccggccctaggtcccggcagcggtggtgacggcggtgccggaggttgtccttggcaggttttcctcggcgcttctccatggaggaggcggtgcgaacggcttcagccccgaatgctcgcatctcccactggacggcgacgaaggcggtggccgtgcgagcgcaggactgggcggcctgtgtgggggtgtgagccgcggtgcccaaggctgcgccggcgaggggaagccgcgcggccggccggccgactagggctggagctactcggccagggtttaagactttaaatgagaataaagggtggtatttacgaggaaatgagagtgaataagtcatctctaacctctcccagcctttttttcataagagagaccatattaaacttacatgctctcccggctgtgatagaccttcagttacagagagagggagcagagtgggaccaggtctgagaatagtgaagcaactcattcctttcaggacattccctctgatgtcctattttcaaactgtttgaagactgcttcattctgcctctagtaccagcggtttctctgttctgtgatcaatgtgattcacaggaactccttaagtaacaaacgaaatgagccaggggcgtggaaaatatgacttctatattggtctgggattggctatgagctccagcattttcattggaggaagtttcattttgaaaaaaaagggcctccttcgacttgccaggaaaggctctatgagagcaggtcaaggtggccatgcatatcttaaggaatggttgtggtgggctggactgctgtcaatgggagctggtgaggtggccaacttcgctgcgtatgcgtttgcaccagccactctagtgactccactaggagctctcagcgtgctagtaagtgccattctttcttcatactttctcaatgaaagacttaatcttcatgggaaaattgggtgtttgctaagtattctaggatctacagttatggtcattcatgctccaaaggaagaggagattgagactttaaatgaaatgtctcacaagctaggtgatccaggttttgtggtctttgcaacccttgtggtcattgtggccttgatattaatcttcgtggtgggtcctcgccatggacagacaaacattcttgtgtacataacaatctgctctgtaatcggcgcgttttcagtctcctgtgtgaagggcctgggcattgctatcaaggagctgtttgcagggaagcctgtgctgcggcatcccctggcttggattctgctgctgagcctcatcgtctgtgtgagcacacagattaattacctaaatagggccctggatatattcaacacttccattgtgactccaatatattatgtattctttacaacatcagttttaacttgttcagctattctttttaaggagtggcaagatatgcctgttgacgatgtcattggtactttgagtggcttctttacaatcattgtggggatattcttgttgcatgcctttaaagacgtcagctttagtctagcaagtctgcctgtgtcttttcgaaaagacgagaaagcaatgaatggcaatctctctaatatgtatgaagttcttaataataatgaagaaagcttaacctgtggaatcgaacaacacactggtgaaaatgtctcccgaagaaatggaaatctgacagctttttaagaaaggtgtaattaaaggttaatctgtgattgttatgaagtgaatttgaatatcatcagaatgtgtctgaaaaaacattgtcctcaaataatgttctttaaaggcaatctttttaaagatttcactaatttggaccaagaaattacttttcttgtatttaaacaaacaatggtagctcactaaaatgacctcagcacatgacgatttctattaacattttattgttgtagaagtattttacattttcatcccttctccaaaagccgaatgcactaatgacagttttaagtctatgaaaatgctttattttttcattggtgatgaaagtctgaaatgtgcatttgtcatccccactccatcaatccctgaccatgtaaggcttttttattttaaaaaaacagagttatcccaatacattatcctgtgatttaccttacctacaaaagtggctcctgtttgtttgatgatgattggttttatttttgaaatatttattaagggaaaactaagttactgaatgaaggaacctctttcttacaaaacaaaaaaaagggcagaaatcaccccaaggaacgatttctcaggttgagatgatcaccgtgaatccggcttcctctgagcattcgatggccttagcacctcatcaagccagcacatcctgcctgctgttgcagcctggctgggtttattcttcagttaccctaatcccatgatgcctggaaccttgattaccgttttacatcagctcttgtacttttcagtatattttcataatgagttatattgtcatttagactttgaacagctctgggaaatagaagactagggttgtttcttaaatttagctcatgttataataaaaagttgaaatgaagttcttattctaaaagtctgaatgcttagaacaaacttaacatgtttatagaatatggtctctttgtaccaagtactttgcttaagagctcctttgggccactacatattttggtttctagaaaatgtttgtttatgaagaagtcgatggaaaactgcaaacatatgcagaaaaggtagaataataaaaaaggtctaatgaactccattcagctttgaacctatccactcataaccattgactggcctttaaaaaaaagtattggcagaattaatttccacctaggtgatgggaagaaagtgttcgcctgttccagcctgtggctcctgcctggaggttacccagtggtgcgccagcgccaagccatcactccccgagggcctcccctgccaatggtgctggtatcccatgcagctcaccactggctgcgtggaaactcccttttttccaactttattattggccttctaaggagctgttttagatgttttttctaactgcctcctcccatgccattttaatactacagatgtactacgtatctgtttatatactgtacctacatctgtgctttgtacataaaagaaccagttttctcccccttgaggacagagactcatttgaacatgcataggttaataaataataaattcttatttaaca

SEQ ID NO: 23463 - DNA, 2280 bp, Artificial Sequence
  derived and/or modified sequence
gcagcggtggtgacggcggtgccggaggttgtccttggcaggttttcctcggcgcttctccatggaggaggcggtgcgaacggcttcagccccgaatgctcgcatctcccactggacggcgacgaaggcggtggccgtgcgagcgcaggactgggcggcctgtgtgggggtgtgagccgcggtgcccaaggctgcgccggcgaggggaagccgcgcggccggccggccgactagggtttgaagactgcttcattctgcctctagtaccagcggtttctctgttctgtgatcaatgtgattcacaggaactccttaagtaacaaacgaaatgagccaggggcgtggaaaatatgacttctatattggtctgggattggctatgagctccagcattttcattggaggaagtttcattttgaaaaaaaagggcctccttcgacttgccaggaaaggctctatgagagcaggtcaaggtggccatgcatatcttaaggaatggttgtggtgggctggactgctgtcaatgggagctggtgaggtggccaacttcgctgcgtatgcgtttgcaccagccactctagtgactccactaggagctctcagcgtgctagtaagtgccattctttcttcatactttctcaatgaaagacttaatcttcatgggaaaattgggtgtttgctaagtattctaggatctacagttatggtcattcatgctccaaaggaagaggagattgagactttaaatgaaatgtctcacaagctaggtgatccaggttttgtggtctttgcaacccttgtggtcattgtggccttgatattaatcttcgtggtgggtcctcgccatggacagacaaacattcttgtgtacataacaatctgctctgtaatcggcgcgttttcagtctcctgtgtgaagggcctgggcattgctatcaaggagctgtttgcagggaagcctgtgctgcggcatcccctggcttggattctgctgctgagcctcatcgtctgtgtgagcacacagattaattacctaaatagggccctggatatattcaacacttccattgtgactccaatatattatgtattctttacaacatcagttttaacttgttcagctattctttttaaggagtggcaagatatgcctgttgacgatgtcattggtactttgagtggcttctttacaatcattgtggggatattcttgttgcatgcctttaaagacgtcagctttagtctagcaagtctgcctgtgtcttttcgaaaagacgagaaagcaatgaatggcaatctctctaatatgtatgaagttcttaataataatgaagaaagcttaacctgtggaatcgaacaacacactggtgaaaatgtctcccgaagaaatggaaatctgacagctttttaagaaaggtgtaattaaaggttaatctgtgattgttatgaagtgaatttgaatatcatcagaatgtgtctgaaaaaacattgtcctcaaataatgttctttaaaggcaatctttttaaagatttcactaatttggaccaagaaattacttttcttgtatttaaacaaacaatggtagctcactaaaatgacctcagcacatgacgatttctattaacattttattgttgtagaagtattttacattttcatcccttctccaaaagccgaatgcactaatgacagttttaagtctatgaaaatgctttattttttcattggtgatgaaagtctgaaatgtgcatttgtcatccccactccatcaatccctgaccatgtaaggcttttttattttaaaaaaacagagttatcccaatacattatcctgtgatttaccttacctacaaaagtggctcctgtttgtttgatgatgattggttttatttttgaaatatttattaagggaaaactaagttactgaatgaaggaacctctttcttacaaaacaaaaaaaagggcagaaatcaccccaaggaacgatttctcaggttgagatgatcaccgtgaatccggcttcctctgagcattcgatggccttagcacctcatcaagccagcacatcctgcctgctgttgcagcctggctgggtttattcttcagttaccctaatcccatgatgcctggaaccttgattaccgttttacatcagctcttgtacttttcagtatattttcataatgagttatattgtcatttagactttgaacagctctgggaaatagaagactagggttgtttcttaaatttagctcatgttataataaaaagttgaa

SEQ ID NO: 23464 - DNA, 3130 bp, Artificial Sequence
  derived and/or modified sequence
gtcatttagccgcgcctaggttttccggcgccggccctaggtcccggcagcggtggtgacggcggtgccggaggttgtccttggcaggttttcctcggcgcttctccatggaggaggcggtgcgaacggcttcagccccgaatgctcgcatctcccactggacggcgacgaaggcggtggccgtgcgagcgcaggactgggcggcctgtgtgggggtgtgagccgcggtgcccaaggctgcgccggcgaggggaagccgcgcggccggccggccgactagggctggagctactcggccagggtttaagactttaaatgagaataaagggtggtatttacgaggaaatgagagtgaataagtcatctctaacctctcccagcctttttttcataagagagaccatattaaacttacatgtttgaagactgcttcattctgcctctagtaccagcggtttctctgttctgtgatcaatgtgattcacaggaactccttaagtaacaaacgaaatgagccaggggcgtggaaaatatgacttctatattggtctgggattggctatgagctccagcattttcattggaggaagtttcattttgaaaaaaaagggcctccttcgacttgccaggaaaggctctatgagagcaggtcaaggtggccatgcatatcttaaggaatggttgtggtgggctggactgctgtcaatgggagctggtgaggtggccaacttcgctgcgtatgcgtttgcaccagccactctagtgactccactaggagctctcagcgtgctagtaagtgccattctttcttcatactttctcaatgaaagacttaatcttcatgggaaaattgggtgtttgctaagtattctaggatctacagttatggtcattcatgctccaaaggaagaggagattgagactttaaatgaaatgtctcacaagctaggtgatccaggttttgtggtctttgcaacccttgtggtcattgtggccttgatattaatcttcgtggtgggtcctcgccatggacagacaaacattcttgtgtacataacaatctgctctgtaatcggcgcgttttcagtctcctgtgtgaagggcctgggcattgctatcaaggagctgtttgcagggaagcctgtgctgcggcatcccctggcttggattctgctgctgagcctcatcgtctgtgtgagcacacagattaattacctaaatagggccctggatatattcaacacttccattgtgactccaatatattatgtattctttacaacatcagttttaacttgttcagctattctttttaaggagtggcaagatatgcctgttgacgatgtcattggtactttgagtggcttctttacaatcattgtggggatattcttgttgcatgcctttaaagacgtcagctttagtctagcaagtctgcctgtgtcttttcgaaaagacgagaaagcaatgaatggcaatctctctaatatgtatgaagttcttaataataatgaagaaagcttaacctgtggaatcgaacaacacactggtgaaaatgtctcccgaagaaatggaaatctgacagctttttaagaaaggtgtaattaaaggttaatctgtgattgttatgaagtgaatttgaatatcatcagaatgtgtctgaaaaaacattgtcctcaaataatgttctttaaaggcaatctttttaaagatttcactaatttggaccaagaaattacttttcttgtatttaaacaaacaatggtagctcactaaaatgacctcagcacatgacgatttctattaacattttattgttgtagaagtattttacattttcatcccttctccaaaagccgaatgcactaatgacagttttaagtctatgaaaatgctttattttttcattggtgatgaaagtctgaaatgtgcatttgtcatccccactccatcaatccctgaccatgtaaggcttttttattttaaaaaaacagagttatcccaatacattatcctgtgatttaccttacctacaaaagtggctcctgtttgtttgatgatgattggttttatttttgaaatatttattaagggaaaactaagttactgaatgaaggaacctctttcttacaaaacaaaaaaaagggcagaaatcaccccaaggaacgatttctcaggttgagatgatcaccgtgaatccggcttcctctgagcattcgatggccttagcacctcatcaagccagcacatcctgcctgctgttgcagcctggctgggtttattcttcagttaccctaatcccatgatgcctggaaccttgattaccgttttacatcagctcttgtacttttcagtatattttcataatgagttatattgtcatttagactttgaacagctctgggaaatagaagactagggttgtttcttaaatttagctcatgttataataaaaagttgaaatgaagttcttattctaaaagtctgaatgcttagaacaaacttaacatgtttatagaatatggtctctttgtaccaagtactttgcttaagagctcctttgggccactacatattttggtttctagaaaatgtttgtttatgaagaagtcgatggaaaactgcaaacatatgcagaaaaggtagaataataaaaaaggtctaatgaactccattcagctttgaacctatccactcataaccattgactggcctttaaaaaaaagtattggcagaattaatttccacctaggtgatgggaagaaagtgttcgcctgttccagcctgtggctcctgcctggaggttacccagtggtgcgccagcgccaagccatcactccccgagggcctcccctgccaatggtgctggtatcccatgcagctcaccactggctgcgtggaaactcccttttttccaactttattattggccttctaaggagctgttttagatgttttttctaactgcctcctcccatgccattttaatactacagatgtactacgtatctgtttatatactgtacctacatctgtgctttgtacataaaagaaccagttttctcccccttgaggacagagactcatttgaacatgcataggttaataaataataaattcttatttaaca

SEQ ID NO: 23465 - DNA, 554 bp, Artificial Sequence
  derived and/or modified sequence
gcggtggtgacggcggtgccggaggttgtccttggcaggttttcctcggcgcttctccatggaggaggcggtgcgaacggcttcagccccgaatgctcgcatctcccactggacggcgacgaaggcggtggccgtgcgagcgcaggactgggcggcctgtgtgggggtgtgagccgcggtgcccaaggctgcgccggcgaggggaagccgcgcggccggccggccgactagggctctcccggctgtgatagaccttcagttacagagagagggagcagagtgggaccaggtctgagaatagtgaagcaactcattcctttcaggacattccctctgatgtcctattttcaaactgaactccttaagtaacaaacgaaatgagccaggggcgtggaaaatatgacttctatattggtctgggattggctatgagctccagcattttcattggaggaagtttcattttgaaaaaaaagggcctccttcgacttgccaggaaaggctctatgagagcaggtcaaggtggccatgcatatcttaaggaatggttgtgg

SEQ ID NO: 23466 - DNA, 1083 bp, Artificial Sequence
  derived and/or modified sequence
atgagccagggcaggggaaaatatgacttctacattggtctgggcctcgctatgagtagttcaattttcattggaggaagtttcattctgaaaaaaaaaggccttctccgcctggccagaaaaggatctatgcgtgcaggccagggtggacatgcatacttaaaggagtggctctggtgggccggacttctgagtatgggggctggcgaggtcgctaatttcgcagcctatgcgtttgcacccgctacattagtgacaccccttggtgccctgtctgttttagtgtccgccattttatcatcctatttcctgaacgagcggctgaatttgcacggcaagatcgggtgtcttctgtccatactagggtccacagtcatggtgattcatgccccaaaagaggaggaaatagagaccctcaatgagatgtctcataaactcggcgatcccggattcgtggtttttgccaccctcgtggtaatcgtcgctcttattctaatttttgtggttggacccaggcatggacagacgaacattttggtgtacatcaccatctgctctgtaataggggcattctccgtgtcctgcgtgaaggggctgggtatcgctatcaaagagctgttcgcaggtaagcctgtcctcaggcatccactggcttggattttgttgctgagtctgattgtgtgtgttagcactcagattaattatctcaatagggcactggatatttttaacacctccattgttactcccatttactacgtgttcttcactacctccgtgctaacttgttccgcgattttattcaaagagtggcaagacatgcccgtagatgatgtcatagggaccctgtcaggattttttactattattgtaggcatttttctgctccacgcatttaaagatgtctccttttccttagccagtttgcctgtgtcttttcggaaagatgaaaaggccatgaatgggaacctctctaacatgtacgaggtgctcaataacaacgaagagtctctgacctgcggaatcgaacagcacactggagagaatgtctcacgcagaaacggcaaccttacagctttttag

SEQ ID NO: 23467 - DNA, 1083 bp, Artificial Sequence
  derived and/or modified sequence
atgtcccagggtcgtggaaagtatgacttctatatcggcttgggactggctatgtctagcagcatttttatcggaggttcttttatcctgaagaagaaaggcctgcttcgcctggcgcgtaaggggtcgatgcgggcagggcaaggagggcatgcatacctcaaggagtggctgtggtgggccggactgctgagcatgggagctggagaagtggccaattttgccgcatacgccttcgcaccggcaaccctggtcacccccctgggcgctctgtccgtactggtgtcagctattcttagctcttactttctgaacgaaaggctcaacctccatgggaagataggttgcctgctgtctatactggggtccacagtgatggtgatacacgctcccaaggaagaggagatcgaaactctcaacgagatgtcccacaaattgggggaccctggttttgtggtattcgctacccttgtcgttatagtagcccttattctgatcttcgtggtgggcccaaggcacggacagaccaacatcctagtttacatcaccatttgttctgtaatcggagctttctcagtgagctgtgtcaagggcttgggcatcgccatcaaagagctatttgctggaaaaccagtcctgcggcaccctctggcctggattcttttactgtccctcattgtttgtgttagcacacagataaactatttgaaccgtgccctagatatatttaacacaagcatagtcactccaatttactatgtgtttttcaccactagtgtcctgacctgctccgctattctgttcaaggaatggcaggacatgcccgtagacgatgtgatcggcactctgtccggtttttttactatcatcgtcggcattttcttgctgcacgccttcaaagacgttagttttagcttagcttccctcccggtctcttttcggaaagacgagaaggccatgaatgggaatctcagcaatatgtacgaggtccttaacaacaacgaggaaagcctcacatgcgggatcgaacaacatacaggtgagaatgtgagtaggcggaatggcaatctaaccgctttttag

SEQ ID NO: 23468 - DNA, 1083 bp, Artificial Sequence
  derived and/or modified sequence
atgtctcagggaaggggcaagtacgatttttacatagggctgggccttgcgatgtcaagcagtatcttcatcgggggaagtttcatcctcaagaagaagggccttctaagactggccaggaagggatctatgcgtgcgggacagggcggtcacgcctatctgaaagaatggctctggtgggctgggctcctaagcatgggagcaggagaggtggctaacttcgctgcctacgcttttgctccagcaactctggtcaccccactgggcgcactctcagtgttggtgtctgcaatattgagcagctatttcctcaatgagcgcctgaaccttcacgggaagatcgggtgcctcctgtccatattgggctcaactgttatggtgatccatgcccctaaagaggaggagattgaaacccttaacgagatgagtcataaacttggtgaccccggatttgtggtgtttgctacactcgtggtcatagtggcgctaattttgattttcgtggtggggccaagacacggacagacaaatattctggtctacataacaatttgctccgttattggcgctttctctgtaagctgcgtgaaaggtttagggatcgccattaaggaactgtttgccggtaagccagtgctgcgccacccactagcttggattctactgctatcccttatcgtgtgcgtgtcgacccaaatcaactacctgaacagggcccttgatatctttaacaccagtatcgtgacccctatctactacgttttctttacaacctccgttctgacctgtagtgcaattctgtttaaggagtggcaggacatgccagtggatgacgtcatcggtactctcagtggtttttttacgattatcgttggtatttttttgttgcacgccttcaaggacgtcagctttagcctggcctctcttcctgtgtcctttcgaaaagatgagaaagccatgaacggtaacttaagcaacatgtacgaggttctcaacaataacgaggagagcttgacgtgtggcatcgaacaacataccggcgaaaacgtctcacgacggaacggaaacctgacggccttttag

SEQ ID NO: 23469 - DNA, 180 bp, Artificial Sequence
  derived and/or modified sequence
atgtcacagggaagaggcaaatacgacttttacataggtctgggacttgctatgtcgagctccatctttattggcggtagcttcatattgaagaaaaaggggctgctgaggcttgctcgcaaaggcagcatgagagccggtcaggggggacacgcttacctgaaggaatggctgtggtag

SEQ ID NO: 23470 - DNA, 1083 bp, Artificial Sequence
  derived and/or modified sequence
atgagccagggcagaggcaagtacgacttctacatcggcctgggcctggccatgagcagcagcatcttcatcggcggcagcttcatcctgaagaagaagggcctgctgagactggccagaaagggcagcatgagagccggccagggcggccacgcctacctgaaggagtggctgtggtgggccggcctgctgagcatgggcgccggcgaggtggccaacttcgccgcctacgccttcgcccccgccaccctggtgacccccctgggcgccctgagcgtgctggtgagcgccatcctgagcagctacttcctgaacgagagactgaacctgcacggcaagatcggctgcctgctgagcatcctgggcagcaccgtgatggtgatccacgcccccaaggaggaggagatcgagaccctgaacgagatgagccacaagctgggcgaccccggcttcgtggtgttcgccaccctggtggtgatcgtggccctgatcctgatcttcgtggtgggccccagacacggccagaccaacatcctggtgtacatcaccatctgcagcgtgatcggcgccttcagcgtgagctgcgtgaagggcctgggcatcgccatcaaggagctgttcgccggcaagcccgtgctgagacaccccctggcctggatcctgctgctgagcctgatcgtgtgcgtgagcacccagatcaactacctgaacagagccctggacatcttcaacaccagcatcgtgacccccatctactacgtgttcttcaccaccagcgtgctgacctgcagcgccatcctgttcaaggagtggcaggacatgcccgtggacgacgtgatcggcaccctgagcggcttcttcaccatcatcgtgggcatcttcctgctgcacgccttcaaggacgtgagcttcagcctggccagcctgcccgtgagcttcagaaaggacgagaaggccatgaacggcaacctgagcaacatgtacgaggtgctgaacaacaacgaggagagcctgacctgcggcatcgagcagcacaccggcgagaacgtgagcagaagaaacggcaacctgaccgccttctag

SEQ ID NO: 23471 - DNA, 180 bp, Artificial Sequence
  derived and/or modified sequence
atgagccagggcagaggcaagtacgacttctacatcggcctgggcctggccatgagcagcagcatcttcatcggcggcagcttcatcctgaagaagaagggcctgctgagactggccagaaagggcagcatgagagccggccagggcggccacgcctacctgaaggagtggctgtggtag

SEQ ID NO: 23472 - protein, 659 aa, Artificial Sequence
  derived and/or modified sequence
MLYKQLRQACEDHVQAQILPFREDSLDSVLFLKKINTCWQDHCRQMIMIRSIFLFLDRTYVLQNSTLPSIWDMGLELFRTHIISDKMVQSKTIDGILLLIERERSGEAVDRSLLRSLLGMLSDLQVYKDSFELKFLEETNCLYAAEGQRLMQEREVPEYLNHVSKRLEEEGDRVITYLDHSTQKPLIACVEKQLLGEHLTAILQKGLDHLLDENRVPDLAQMYQLFSRVRGGQQALLQHWSEYIKTFGTAIVINPEKDKDMVQDLLDFKDKVDHVIEVCFQKNERFVNLMKESFETFINKRPNKPAELIAKHVDSKLRAGNKEATDEELERTLDKIMILFRFIHGKDVFEAFYKKDLAKRLLVGKSASVDAEKSMLSKLKHECGAAFTSKLEGMFKDMELSKDIMVHFKQHMQNQSDSGPIDLTVNILTMGYWPTYTPMEVHLTPEMIKLQEVFKAFYLGKHSGRKLQWQTTLGHAVLKAEFKEGKKEFQVSLFQTLVLLMFNEGDGFSFEEIKMATGIEDSELRRTLQSLACGKARVLIKSPKGKEVEDGDKFIFNGEFKHKLFRIKINQIQMKETVEEQVSTTERVFQDRQYQIDAAIVRIMKMRKTLGHNLLVSELYNQLKFPVKPGDLKKRIESLIDRDYMERDKDNPNQYHYVA

SEQ ID NO: 23473 - protein, 759 aa, Artificial Sequence
  derived and/or modified sequence
MADEAPRKGSFSALVGRTNGLTKPAALAAAPAKPGGAGGSKKLVIKNFRDRPRLPDNYTQDTWRKLHEAVRAVQSSTSIRYNLEELYQAVENLCSHKVSPMLYKQLRQACEDHVQAQILPFREDSLDSVLFLKKINTCWQDHCRQMIMIRSIFLFLDRTYVLQNSTLPSIWDMGLELFRTHIISDKMVQSKTIDGILLLIERERSGEAVDRSLLRSLLGMLSDLQVYKDSFELKFLEETNCLYAAEGQRLMQEREVPEYLNHVSKRLEEEGDRVITYLDHSTQKPLIACVEKQLLGEHLTAILQKGLDHLLDENRVPDLAQMYQLFSRVRGGQQALLQHWSEYIKTFGTAIVINPEKDKDMVQDLLDFKDKVDHVIEVCFQKNERFVNLMKESFETFINKRPNKPAELIAKHVDSKLRAGNKEATDEELERTLDKIMILFRFIHGKDVFEAFYKKDLAKRLLVGKSASVDAEKSMLSKLKHECGAAFTSKLEGMFKDMELSKDIMVHFKQHMQNQSDSGPIDLTVNILTMGYWPTYTPMEVHLTPEMIKLQEVFKAFYLGKHSGRKLQWQTTLGHAVLKAEFKEGKKEFQVSLFQTLVLLMFNEGDGFSFEEIKMATGIEDSELRRTLQSLACGKARVLIKSPKGKEVEDGDKFIFNGEFKHKLFRIKINQIQMKETVEEQVSTTERVFQDRQYQIDAAIVRIMKMRKTLGHNLLVSELYNQLKFPVKPGDLKKRIESLIDRDYMERDKDNPNQYHYVA

SEQ ID NO: 23474 - DNA, 2280 bp, Artificial Sequence
  derived and/or modified sequence
atggccgacgaggccccgcggaaggggtccttttccgccctggtggggcggacgaatggtctgaccaagcccgcagcactggcagcagccccagccaaacctgggggggctgggggcagtaagaagctggttattaaaaactttagagacaggccacgattgccggacaactacacacaagatacatggcggaaacttcacgaggcggtgcgagccgtccaaagctccactagtatccgatacaacctcgaagagctgtaccaggctgtggagaatctgtgcagccataaggtgagtcccatgctgtacaaacaactacggcaagcttgtgaggatcatgtccaggcccagattttacctttccgcgaggactccctggacagcgtgctgttcctgaagaaaattaacacttgttggcaggaccactgccgccagatgatcatgatcagatctatctttctgttcctggaccgcacctatgtgttgcagaactccaccctgccttctatctgggacatgggtcttgaactgtttcgcactcacattatctctgataaaatggtgcagagcaaaactattgacggaatccttttgctgattgaacgagaacgcagcggggaagccgtcgaccgcagcttattgagaagtttgctcggaatgctgtcagaccttcaggtgtataaagactcgtttgaactcaagtttctcgaagagacaaattgcctctatgcagccgagggccagcgcctgatgcaagaacgggaagtgcccgagtacctgaaccatgtgtctaagcgcctggaagaagagggggatagggtgatcacctacctggatcactccactcaaaagcctctcattgcatgcgtcgagaagcaactgttgggagaacacctgacagctattcttcagaagggactggatcacctcctggatgagaatagagtcccagacctggctcaaatgtaccagctttttagcagagtgcgcggcgggcagcaggcactgctgcagcattggtccgagtatatcaagacattcgggaccgctattgtcatcaaccctgagaaagataaggatatggtccaggatctacttgactttaaggataaagttgaccacgtgatcgaggtctgctttcaaaaaaacgaaagatttgtgaacctgatgaaggagagttttgaaacctttattaacaagcgaccaaataagcccgcagaactgatcgccaagcacgttgacagtaaactcagggcaggcaacaaggaggccacggacgaggagctcgagagaactctcgataaaataatgatacttttcaggtttatacacggtaaagacgtctttgaagctttctataagaaagacctggccaagcggcttctggtcggcaagagtgcgtctgtagatgccgagaagtctatgttaagcaaattgaaacatgaatgtggtgccgcattcacttcaaaactcgaaggaatgtttaaagacatggaactgtccaaggatatcatggtgcatttcaaacaacacatgcagaatcagagcgactcaggcccaattgacctgactgtcaatatcctaacaatggggtactggcccacctatacccctatggaagtccacctcacaccagaaatgataaagctgcaggaagtgttcaaagctttctatcttgggaagcacagcggaaggaagctgcagtggcagactacactcgggcatgccgtgttaaaagctgaattcaaagagggcaagaaggagtttcaggtgagtctttttcagacactagtccttctgatgttcaatgagggtgacggtttttctttcgaagagatcaaaatggccaccggtattgaggatagcgaacttagaagaacgctacagagcctggcatgtggcaaggccagggtgctgatcaaatctcccaagggtaaagaagttgaagacggtgataaatttatcttcaatggagagtttaagcataaactattccggatcaagataaatcagattcagatgaaggaaacagtagaagaacaggtgagcaccactgaaagggtgtttcaggaccgccagtaccaaattgacgccgccattgtcaggatcatgaaaatgcgtaagacactcggccataatctgctagtaagcgaattatataatcagctgaagtttccagtgaaaccgggcgacctaaagaaacggatagagagtctgatcgacagggattatatggaacgggataaagacaaccctaatcagtatcattacgtggcctag

SEQ ID NO: 23475 - DNA, 2280 bp, Artificial Sequence
  derived and/or modified sequence
atggctgatgaggcccccaggaagggcagcttcagcgccctggtgggccgcaccaacggcctgaccaagccagctgccctggccgccgccccagccaagccaggaggagctgggggcagcaagaagctggtgatcaagaacttccgggaccggccccggctgcctgacaactacacccaggacacctggaggaagctgcatgaagctgtgcgggctgtgcagagcagcaccagcatccgctacaacctggaggagctgtaccaggccgtggagaacctgtgcagccacaaggtgagccccatgctgtacaagcagctgcggcaggcctgtgaagatcatgtgcaggcccagatcctgcccttccgggaggacagcctggacagcgtgctcttcctgaagaagatcaacacctgctggcaggaccactgccggcagatgatcatgatccgcagcatcttcctgttcctggacaggacctacgtgctgcagaacagcaccctgcccagcatctgggacatgggcctggagctgttccgcacccacatcatcagtgacaagatggtgcagagcaagaccattgatggcatcctgctgctgattgaaagagagaggtctggagaggccgtggacaggagcctgctgcggagcctgctgggcatgctgagtgacctgcaggtgtacaaggacagctttgagctgaagttcctggaggagaccaactgcctgtatgctgctgagggccagaggctgatgcaggagcgggaggtgcctgagtacctgaaccacgtgtccaagaggctggaggaggagggggacagagtcatcacctacctggaccacagcacccagaagcccctgattgcctgtgtggagaagcagctgctgggggagcacctgacagccatcctgcagaagggcctggaccacctgctggatgaaaatagagtgcctgacctggcccagatgtaccagctgttcagccgggtgcggggcggccagcaggccctgctgcagcactggagcgagtacatcaagacctttggaacagccatcgtcatcaaccctgagaaggacaaggacatggtgcaggacctgctggacttcaaggacaaggtggaccacgtgattgaggtgtgcttccagaagaatgaaagatttgtgaacctgatgaaggagagctttgagaccttcatcaacaagaggcccaacaagccagctgagctgattgccaagcacgtggacagcaagctgcgggccggcaacaaggaggccacagatgaggagctggagaggaccctggacaagatcatgatcctcttccgcttcatccacggcaaggatgtgtttgaggccttctacaagaaggacctggccaagaggctgctggtgggcaagagcgcctctgtggatgctgagaagtccatgctgagcaagctgaagcatgaatgtggggccgccttcaccagcaagctggagggcatgttcaaggacatggagctgagcaaggacatcatggtgcacttcaagcagcacatgcagaaccagagcgacagcggccccatcgacctgactgtgaacatcctgaccatgggctactggcccacctacacccccatggaggtgcacctgaccccagagatgatcaagctgcaggaggtgttcaaggccttctacctgggcaagcacagcggcaggaagctgcagtggcagaccaccctgggccatgctgtgctgaaggccgagttcaaggagggcaagaaggagttccaggtgtccctcttccagaccctggtgctgctgatgtttaatgaaggagatggcttctcctttgaggagatcaagatggccactggaattgaggacagcgagctgcggaggaccctgcagagcctggcctgtgggaaggcccgggtgctgatcaagagccccaagggcaaggaggtggaggatggagacaagttcatcttcaatggagagttcaagcacaagctgttccgcatcaagatcaaccagatccagatgaaggagaccgtggaggagcaggtgtccaccacagagagggtcttccaggaccggcagtaccagattgatgctgccatcgtgcgcatcatgaagatgaggaagaccctgggccacaacctgctggtgtctgagctgtacaaccagctgaagtttcctgtgaagccaggggacctgaagaagagaattgagagcctgattgaccgggactacatggagcgggacaaggacaaccccaaccagtaccactacgtggcctag

SEQ ID NO: 23476 - DNA, 2280 bp, Artificial Sequence
  derived and/or modified sequence
atggccgacgaggccccccggaagggcagcttcagcgccctggtgggacgaacgaatggcctgaccaagcctgccgccttggctgccgcacctgctaagccaggcggcgcaggcggttccaaaaagctggtgatcaaaaattttcgggatcgcccgcgtctgcccgataactacacgcaggacacctggcgcaagttgcacgaggccgtgagagcagtacagtcctccacgtctatccgctacaatttagaggaattgtatcaagccgtcgagaacctgtgtagccacaaagtgtccccgatgctgtataagcagctgcgccaggcttgtgaggaccatgttcaagcccagatcctccctttccgagaagatagcctggactctgtgctcttcctcaaaaagatcaatacctgttggcaggaccattgccgccagatgatcatgattcgatctatcttcttatttctcgatcgtacatacgtgttacagaacagcacactgccatccatttgggacatgggcctggaactcttccgtacgcacatcatctcagataagatggtccagagcaaaactatcgatgggatcttgttgctgatcgagcgtgagcggtcaggcgaagcagtggatagatctctgctcaggtcactgctgggcatgctcagcgatctccaagtttacaaggacagttttgagctcaaattcctcgaggagaccaactgtctatacgccgcggagggacaacgcctgatgcaggagagggaggtcccagaatatttaaaccacgtcagcaagaggctcgaagaggaaggcgatagggtgatcacctacttggaccattccactcagaagcccctaatcgcgtgcgttgagaaacagcttttaggggagcacctgaccgctatcctccagaaaggactcgatcatctgctcgacgaaaatcgggtgcccgatctggctcagatgtaccagctcttctcgcgagtgcggggaggccaacaagccctgttgcagcactggagtgagtacatcaaaacattcggcaccgccatagtgattaaccccgagaaggataaggacatggttcaggacctcctggattttaaggacaaggttgaccacgtgatcgaggtgtgcttccaaaaaaatgagcgctttgtaaacttgatgaaggagagcttcgagacgttcattaataagcggcccaacaaacccgccgaacttattgccaagcatgtggattctaagctcagagcaggaaataaggaagccactgatgaagaactggaacgcactctggacaagatcatgatcctgtttaggtttattcacggtaaggatgtctttgaagcgttctacaagaaggatcttgccaagcgtctcctggtggggaagtctgcaagcgttgatgcagagaaatctatgctttccaagcttaagcacgagtgtggggccgccttcacatccaagttggaggggatgttcaaggatatggaattgtctaaggacataatggtgcattttaagcaacacatgcagaaccaatctgacagcggtcccatagatctgactgtgaacatattgaccatggggtattggccaacctataccccaatggaggtgcacctgactccggaaatgattaagttgcaggaggtgttcaaggcattctacctgggcaagcactctggccggaagctacagtggcaaaccaccctcggccacgcggttctcaaggccgaattcaaagaaggaaaaaaagaatttcaggtgtccctgtttcaaaccttggtcctgttgatgttcaatgagggagacgggtttagcttcgaagagataaaaatggcaacagggattgaagattctgaattgcgacgaacccttcagtccctggcgtgcgggaaggcaagagttctaatcaagagccctaaaggaaaggaagtcgaggatggggacaagttcatcttcaatggcgagttcaaacataagttatttaggattaagattaaccagatacagatgaaggagaccgtcgaggagcaggtgtccacgactgaaagggtgtttcaggatcgtcagtaccagattgatgcagcaattgtccggataatgaagatgcgcaagacactgggacataatctgctcgtgtccgagctctataatcaactgaaatttcctgttaaacctggagatctcaaaaaaaggatcgagagtctcattgatagggactatatggaaagagacaaagataatcccaatcagtaccactacgttgcttag

SEQ ID NO: 23477 - DNA, 2280 bp, Artificial Sequence
  derived and/or modified sequence
atggcagatgaggcccctcgtaagggatcattcagcgcattggtgggccgtacaaatgggctgactaagcctgcagccttggctgccgctcccgctaaaccaggaggtgctggcggatccaagaagttagtgatcaagaatttccgagatcgcccaagactgcccgataattacacacaggatacgtggagaaagctacacgaggccgtacgcgcagtgcaaagctcaacatccattaggtacaacctggaggaactgtaccaggcagtggaaaatctctgttcacataaagtgagcccgatgctatacaaacaattgagacaggcatgcgaggaccatgtgcaggcacagatcttgccttttcgggaggacagcttagatagcgtgctttttttgaagaaaattaacacctgttggcaggatcactgtcggcagatgatcatgattcggtctattttcctctttcttgaccgaacctatgtgctccagaactcaacattgccatcaatctgggacatggggcttgagttgttcaggacccacatcatctccgacaagatggtgcagagcaagaccattgatggaattcttctgctcattgagcgagagcgcagcggcgaagcggtggaccgctcactgctccgatcattacttggcatgctcagtgacttgcaggtatataaggactctttcgagttgaagtttttggaagagaccaattgcttgtatgctgccgaaggacagaggctcatgcaggagagagaagttcctgagtatctgaaccacgtgtctaagcggctggaggaggagggagatcgcgtgataacatacctggaccacagcacacagaaacccttgatcgcctgcgtggagaagcagctgcttggcgagcatctcacggccatcctgcagaagggactggaccacctgctggacgagaatcgcgttcccgacttggcgcagatgtaccagctgttcagtcgcgtgcgtggcggacagcaagcactgttgcaacactggagcgagtacatcaaaacctttggaactgccatagtgatcaatcctgagaaagataaagatatggttcaggacctgctggatttcaaagacaaagtggaccatgtcattgaggtttgtttccaaaaaaacgaacggtttgttaatctaatgaaagaatccttcgaaactttcattaataagagacccaacaagccagcagagctgatcgccaaacacgtggactccaagcttcgcgcaggtaacaaagaagctaccgacgaagagctggaaaggacgctagataaaatcatgattctttttcggtttatccacggaaaagatgtgttcgaggcgttttacaaaaaggacctcgctaagcgcttattggtaggaaagagcgcatctgttgacgcagagaaatctatgctctcaaagttgaaacacgagtgcggcgctgcatttacttccaaactcgagggcatgttcaaggacatggaattgagcaaagatataatggttcactttaaacagcacatgcagaaccagagcgatagtgggcctatcgaccttactgtgaatatactgacaatggggtactggcctacgtacacacccatggaggtgcatctgacccctgaaatgatcaagctgcaggaggtctttaaggccttttatctgggcaaacactcagggcgaaagttgcagtggcaaaccaccctgggtcatgccgtgctgaaggcagagtttaaggagggtaaaaaggaattccaggtgtctctatttcagaccctggtactgctaatgttcaacgagggcgatggattcagcttcgaggagattaagatggccacaggcatcgaagactctgaattgcggcgtactttacaatccctcgcctgtggcaaggctagagtgctgataaaaagcccaaagggcaaggaggtagaggatggagacaaattcatctttaatggagagtttaaacacaagctgtttagaattaagattaaccaaattcaaatgaaggagacagttgaggagcaggtctcaacgacagaacgcgtgttccaggataggcagtatcagatcgatgcagcaatagtccgcatcatgaagatgcgcaaaactctcggacacaacttattggtcagtgagctgtataaccagctgaaattccccgtcaaaccaggagacctcaaaaagcgtatcgagtccctgattgaccgcgactacatggaaagagataaggacaacccgaaccagtaccactatgtggcttag

SEQ ID NO: 23478 - DNA, 3643 bp, Artificial Sequence
  derived and/or modified sequence
gtcctctcagccgggacgccagcggctctgattacagacctcggctgcccgacaactacacgcaggacacgtggcggaagctgcacgaggcggtgcgggccgtgcagagcagcacctccatcaggctgtggaaaatctctgttctcacaaagtctccccaatgctctacaagcaactgcgtcaggcctgtgaagaccacgtccaggcacagatccttccgtttagagaagactcactagatagtgttttatttttaaagaagattaacacgtgctggcaggaccactgcagacaaatgatcatgatcagaagcatcttcctgttcttggaccgcacctatgtgctgcagaactccacgctgccctccatctgggatatgggattagaactgtttagaacccatattattagtgataaaatggttcagagtaaaaccattgatggaatcctactgctgatcgagcgcgagaggagcggcgaggccgtggaccggagcctgttgcggagcctcctgggcatgctgtctgacctgcaggtgtataaagattcatttgaactgaaatttttggaagagactaattgcttatatgctgccgaaggccaaaggttaatgcaggaaagagaggttccagaatatcttaaccatgtaagtaaacgcttagaggaagagggagacagagtaatcacttacttggaccacagcacacagaaaccactgattgcttgtgtggagaaacagctattaggagaacatttaacagcaattctgcagaaagggctcgaccacttactggatgagaacagagtgccggacctcgcacagatgtaccagctgttcagccgggtgaggggcgggcagcaggcgctgctgcagcactggagcgagtacatcaagacttttggaacagcgatcgtaatcaatcctgagaaagacaaagacatggtccaagacctgttggacttcaaggacaaggtggaccacgtgatcgaggtctgcttccagaagaatgagcggttcgtcaacctgatgaaggagtcctttgagacgttcatcaacaagagacccaacaagcctgcagaactgatcgcaaagcatgtggattcaaagttaagagcaggcaacaaagaagccacagacgaggagctggagcggacgttggacaagatcatgatcctgttcaggtttatccacggtaaagatgtctttgaagcattttataaaaaagatttggcaaaaagactccttgttgggaaaagtgcctcagtcgatgctgaaaagtctatgttgtcaaagctcaagcatgagtgcggtgcagccttcaccagcaagctggaaggcatgttcaaggacatggagctttcgaaggacatcatggttcatttcaagcagcatatgcagaatcagagtgactcaggccctatagacctcacagtgaacatactcacaatgggctactggccaacatacacgcccatggaagtgcacttaaccccagaaatgattaaacttcaggaagtatttaaggcattttatcttggaaagcacagtggtcgaaaacttcagtggcaaactactttgggacatgctgttttaaaagcggagtttaaagaagggaagaaggaattccaggtgtccctcttccagacactggtgctcctcatgttcaacgagggagatggcttcagctttgaggagataaaaatggccacggggatagaggatagtgaattgcgcagaacgctgcagtccctggcctgtggcaaagcacgtgtgctgattaaaagtcccaaaggaaaggaagtggaagatggagacaagttcatttttaatggagagttcaagcacaagttgtttagaataaagatcaatcaaattcagatgaaggaaactgttgaggaacaggttagcaccactgagagagtgtttcaggatagacaatatcagattgatgctgctatcgtcagaataatgaagatgagaaagactcttggtcataatcttctagtttctgaattatataatcagctgaaatttccagtaaagcctggagatttgaaaaagagaattgaatctctgatagacagagactatatggagagagacaaagacaatccgaatcagtaccactacgtggcctgacgcatctgcagacggttccccttcatgaaacactagaatgtaccctcagagcaggaagcacacctgtgccatttctgggactctgattgatccagctgtggacattggaaggcgaaggaagggaggtggctcctgggtcatctttcacaaggctcaagacttcaacctgcagatgtatctttttccctccagtttttcctctagttcttttaggcatttaaattgtttctgttactctgtgcaaaataactttgagattggacaagaagatgttactaaagagaagttcctttaaaaggtcttgttcttgtgtcaaaaagctgcaagtttggtttgttctcgtgtgtgatcatgagtgcacaatgaagaagaccctagatgctgcattttttagctctgaagattccttaggtatccctgaagacagctcgctcagatgatcagcatttagagtgaaaacaagggcccttcatgggtgaacattagaaagagccagggttcaaagctggcgaatggatgacgcaccctagccactggcccctctctgtttcatgtatttccaaaagttgtaaactttgatggctgatttttcgtaagtcaggtttctaagtgagctccctgaggtgccaaggccatggtgtccgccctgctgcgtctgttcgtcagctgagttccttgtgaatctctgttttagggtttggggctagtgtgtttgtgtttccattctaagattgagtctggcagtccctgtttttttgcattggggtaactgctctttgattttttttaattgcagtatttgtgtgattgcaataataaagtttggtttggtttttacagtcatgcgcagggacgatccttgttctctgctgtaaactgtaaaaagtttatggagacttaaagtcttgatgttgtgaagcagaggttattttgtggaaagattaaaaggattttgttggtacctggttttgtgttgtgtatatatacatgaggttgaacagtgaaaggaaagttcagtagtgatgttagaagggtaactatgacaaagatacttttgagataacatttaaaagtactttatattttacataatagcatgtttcattttgattaaaagctaccaaaggaattttgatcatggcataagtgtttaaagcaatattttctggaatataccaagtttatataatttgattttgtgctaaattattaagagtctctttttgaaacatgcgggtttgaaatatgacaccttgtgggtttccatattaaaatcctcactctttaattgtcatttctatctttgaaaattttcatttatgagttccatgatatgtggtctaagaaagaccaaacagatttctattttttttttcttataagttcgttgtgtctagagattgttaatattgtaatttaatgtagacttactttgaataaaattagtttaattggccttaaaattacattaataaaactttgtgatatgcaaatgacacattc

SEQ ID NO: 23479 - DNA, 2364 bp, Artificial Sequence
  derived and/or modified sequence
ggaggccgcgcggaccggggcgggcggagcggagctcggcgggcggcggcgctcggggcggggcgcggcggttccggcccagccatggcggacgaggccccgcggaagggcagcttctcggcgctcgtgggccgcaccaacggcctcaccaagcccgcggccctggccgccgcgcccgccaagccggggggcgcgggcggctccaagaagctggtcatcaagaacttccgagacagacctcggctgcccgacaactacacgcaggacacgtggcggaagctgcacgaggcggtgcgggccgtgcagagcagcacctccatcaggtacaacctcgaggagctctaccaggctgtggaaaatctctgttctcacaaagtctccccaatgctctacaagcaactgcgtcaggcctgtgaagaccacgtccaggcacagatccttccgtttagagaagactcactagatagtgttttatttttaaagaagattaacacgtgctggcaggaccactgcagacaaatgatcatgatcagaagcatcttcctgttcttggaccgcacctatgtgctgcagaactccacgctgccctccatctgggatatgggattagaactgtttagaacccatattattagtgataaaatggttcagagtaaaaccattgatggaatcctactgctgatcgagcgcgagaggagcggcgaggccgtggaccggagcctgttgcggagcctcctgggcatgctgtctgacctgcaggtgtataaagattcatttgaactgaaatttttggaagagactaattgcttatatgctgccgaaggccaaaggttaatgcaggaaagagaggttccagaatatcttaaccatgtaagtaaacgcttagaggaagagggagacagagtaatcacttacttggaccacagcacacagaaaccactgattgcttgtgtggagaaacagctattaggagaacatttaacagcaattctgcagaaagggctcgaccacttactggatgagaacagagtgccggacctcgcacagatgtaccagctgttcagccgggtgaggggcgggcagcaggcgctgctgcagcactggagcgagtacatcaagacttttggaacagcgatcgtaatcaatcctgagaaagacaaagacatggtccaagacctgttggacttcaaggacaaggtggaccacgtgatcgaggtctgcttccagaagaatgagcggttcgtcaacctgatgaaggagtcctttgagacgttcatcaacaagagacccaacaagcctgcagaactgatcgcaaagcatgtggattcaaagttaagagcaggcaacaaagaagccacagacgaggagctggagcggacgttggacaagatcatgatcctgttcaggtttatccacggtaaagatgtctttgaagcattttataaaaaagatttggcaaaaagactccttgttgggaaaagtgcctcagtcgatgctgaaaagtctatgttgtcaaagctcaagcatgagtgcggtgcagccttcaccagcaagctggaaggcatgttcaaggacatggagctttcgaaggacatcatggttcatttcaagcagcatatgcagaatcagagtgactcaggccctatagacctcacagtgaacatactcacaatgggctactggccaacatacacgcccatggaagtgcacttaaccccagaaatgattaaacttcaggaagtatttaaggcattttatcttggaaagcacagtggtcgaaaacttcagtggcaaactactttgggacatgctgttttaaaagcggagtttaaagaagggaagaaggaattccaggtgtccctcttccagacactggtgctcctcatgttcaacgagggagatggcttcagctttgaggagataaaaatggccacggggatagaggatagtgaattgcgcagaacgctgcagtccctggcctgtggcaaagcacgtgtgctgattaaaagtcccaaaggaaaggaagtggaagatggagacaagttcatttttaatggagagttcaagcacaagttgtttagaataaagatcaatcaaattcagatgaaggaaactgttgaggaacaggttagcaccactgagagagtgtttcaggatagacaatatcagattgatgctgctatcgtcagaataatgaagatgagaaagactcttggtcataatcttctagtttctgaattatataatcagctgaaatttccagtaaagcctggagatttgaaaaagagaattgaatctctgatagacagagactatatggagagagacaaagacaatccgaatcagtaccactacgtggcctga

SEQ ID NO: 23480 - DNA, 2502 bp, Artificial Sequence
  derived and/or modified sequence
accgcccacagcgggccctcggcgtggcccgcaggcccttcggaccgcctgggagcgcggccacacgtgccagcaagtgagggcagcgacctgggaccgccgcgtctacttacaccgcgacgactccgcgatccacggacaccgcccggcccccacggcggccctgcaggggagaactcgggccgccttcccgagtcccggccgccgctgttcggctcgcgcggctgcccgccggggacccgaacggaagaagggtggcgaggcgggaaaggaaaaggcctgagggtccaaggcaggaggggacacacggaacacgccgagggccaaccacgccgccgcgcgctccccggctaggacccacctgctgcagacagacctcggctgcccgacaactacacgcaggacacgtggcggaagctgcacgaggcggtgcgggccgtgcagagcagcacctccatcaggtacaacctcgaggagctctaccaggctgtggaaaatctctgttctcacaaagtctccccaatgctctacaagcaactgcgtcaggcctgtgaagaccacgtccaggcacagatccttccgtttagagaagactcactagatagtgttttatttttaaagaagattaacacgtgctggcaggaccactgcagacaaatgatcatgatcagaagcatcttcctgttcttggaccgcacctatgtgctgcagaactccacgctgccctccatctgggatatgggattagaactgtttagaacccatattattagtgataaaatggttcagagtaaaaccattgatggaatcctactgctgatcgagcgcgagaggagcggcgaggccgtggaccggagcctgttgcggagcctcctgggcatgctgtctgacctgcaggtgtataaagattcatttgaactgaaatttttggaagagactaattgcttatatgctgccgaaggccaaaggttaatgcaggaaagagaggttccagaatatcttaaccatgtaagtaaacgcttagaggaagagggagacagagtaatcacttacttggaccacagcacacagaaaccactgattgcttgtgtggagaaacagctattaggagaacatttaacagcaattctgcagaaagggctcgaccacttactggatgagaacagagtgccggacctcgcacagatgtaccagctgttcagccgggtgaggggcgggcagcaggcgctgctgcagcactggagcgagtacatcaagacttttggaacagcgatcgtaatcaatcctgagaaagacaaagacatggtccaagacctgttggacttcaaggacaaggtggaccacgtgatcgaggtctgcttccagaagaatgagcggttcgtcaacctgatgaaggagtcctttgagacgttcatcaacaagagacccaacaagcctgcagaactgatcgcaaagcatgtggattcaaagttaagagcaggcaacaaagaagccacagacgaggagctggagcggacgttggacaagatcatgatcctgttcaggtttatccacggtaaagatgtctttgaagcattttataaaaaagatttggcaaaaagactccttgttgggaaaagtgcctcagtcgatgctgaaaagtctatgttgtcaaagctcaagcatgagtgcggtgcagccttcaccagcaagctggaaggcatgttcaaggacatggagctttcgaaggacatcatggttcatttcaagcagcatatgcagaatcagagtgactcaggccctatagacctcacagtgaacatactcacaatgggctactggccaacatacacgcccatggaagtgcacttaaccccagaaatgattaaacttcaggaagtatttaaggcattttatcttggaaagcacagtggtcgaaaacttcagtggcaaactactttgggacatgctgttttaaaagcggagtttaaagaagggaagaaggaattccaggtgtccctcttccagacactggtgctcctcatgttcaacgagggagatggcttcagctttgaggagataaaaatggccacggggatagaggatagtgaattgcgcagaacgctgcagtccctggcctgtggcaaagcacgtgtgctgattaaaagtcccaaaggaaaggaagtggaagatggagacaagttcatttttaatggagagttcaagcacaagttgtttagaataaagatcaatcaaattcagatgaaggaaactgttgaggaacaggttagcaccactgagagagtgtttcaggatagacaatatcagattgatgctgctatcgtcagaataatgaagatgagaaagactcttggtcataatcttctagtttctgaattatataatcagctgaaatttccagtaaagcctggagatttgaaaaagagaattgaatctctgatagacagagactatatggagagagacaaagacaatccgaatcagtaccactacgtggcctga

SEQ ID NO: 23481 - DNA, 3724 bp, Artificial Sequence
  derived and/or modified sequence
cctggggaccggctcggcgacgcgctcgggctgagggggcccggggtctttctgccggggccccgtcctctcagccgggacgccagcggctctgattacagacctcggctgcccgacaactacacgcaggacacgtggcggaagctgcacgaggcggtgcgggccgtgcagagcagcacctccatcaggtacaacctcgaggagctctaccaggctgtggaaaatctctgttctcacaaagtctccccaatgctctacaagcaactgcgtcaggcctgtgaagaccacgtccaggcacagatccttccgtttagagaagactcactagatagtgttttatttttaaagaagattaacacgtgctggcaggaccactgcagacaaatgatcatgatcagaagcatcttcctgttcttggaccgcacctatgtgctgcagaactccacgctgccctccatctgggatatgggattagaactgtttagaacccatattattagtgataaaatggttcagagtaaaaccattgatggaatcctactgctgatcgagcgcgagaggagcggcgaggccgtggaccggagcctgttgcggagcctcctgggcatgctgtctgacctgcaggtgtataaagattcatttgaactgaaatttttggaagagactaattgcttatatgctgccgaaggccaaaggttaatgcaggaaagagaggttccagaatatcttaaccatgtaagtaaacgcttagaggaagagggagacagagtaatcacttacttggaccacagcacacagaaaccactgattgcttgtgtggagaaacagctattaggagaacatttaacagcaattctgcagaaagggctcgaccacttactggatgagaacagagtgccggacctcgcacagatgtaccagctgttcagccgggtgaggggcgggcagcaggcgctgctgcagcactggagcgagtacatcaagacttttggaacagcgatcgtaatcaatcctgagaaagacaaagacatggtccaagacctgttggacttcaaggacaaggtggaccacgtgatcgaggtctgcttccagaagaatgagcggttcgtcaacctgatgaaggagtcctttgagacgttcatcaacaagagacccaacaagcctgcagaactgatcgcaaagcatgtggattcaaagttaagagcaggcaacaaagaagccacagacgaggagctggagcggacgttggacaagatcatgatcctgttcaggtttatccacggtaaagatgtctttgaagcattttataaaaaagatttggcaaaaagactccttgttgggaaaagtgcctcagtcgatgctgaaaagtctatgttgtcaaagctcaagcatgagtgcggtgcagccttcaccagcaagctggaaggcatgttcaaggacatggagctttcgaaggacatcatggttcatttcaagcagcatatgcagaatcagagtgactcaggccctatagacctcacagtgaacatactcacaatgggctactggccaacatacacgcccatggaagtgcacttaaccccagaaatgattaaacttcaggaagtatttaaggcattttatcttggaaagcacagtggtcgaaaacttcagtggcaaactactttgggacatgctgttttaaaagcggagtttaaagaagggaagaaggaattccaggtgtccctcttccagacactggtgctcctcatgttcaacgagggagatggcttcagctttgaggagataaaaatggccacggggatagaggatagtgaattgcgcagaacgctgcagtccctggcctgtggcaaagcacgtgtgctgattaaaagtcccaaaggaaaggaagtggaagatggagacaagttcatttttaatggagagttcaagcacaagttgtttagaataaagatcaatcaaattcagatgaaggaaactgttgaggaacaggttagcaccactgagagagtgtttcaggatagacaatatcagattgatgctgctatcgtcagaataatgaagatgagaaagactcttggtcataatcttctagtttctgaattatataatcagctgaaatttccagtaaagcctggagatttgaaaaagagaattgaatctctgatagacagagactatatggagagagacaaagacaatccgaatcagtaccactacgtggcctgacgcatctgcagacggttccccttcatgaaacactagaatgtaccctcagagcaggaagcacacctgtgccatttctgggactctgattgatccagctgtggacattggaaggcgaaggaagggaggtggctcctgggtcatctttcacaaggctcaagacttcaacctgcagatgtatctttttccctccagtttttcctctagttcttttaggcatttaaattgtttctgttactctgtgcaaaataactttgagattggacaagaagatgttactaaagagaagttcctttaaaaggtcttgttcttgtgtcaaaaagctgcaagtttggtttgttctcgtgtgtgatcatgagtgcacaatgaagaagaccctagatgctgcattttttagctctgaagattccttaggtatccctgaagacagctcgctcagatgatcagcatttagagtgaaaacaagggcccttcatgggtgaacattagaaagagccagggttcaaagctggcgaatggatgacgcaccctagccactggcccctctctgtttcatgtatttccaaaagttgtaaactttgatggctgatttttcgtaagtcaggtttctaagtgagctccctgaggtgccaaggccatggtgtccgccctgctgcgtctgttcgtcagctgagttccttgtgaatctctgttttagggtttggggctagtgtgtttgtgtttccattctaagattgagtctggcagtccctgtttttttgcattggggtaactgctctttgattttttttaattgcagtatttgtgtgattgcaataataaagtttggtttggtttttacagtcatgcgcagggacgatccttgttctctgctgtaaactgtaaaaagtttatggagacttaaagtcttgatgttgtgaagcagaggttattttgtggaaagattaaaaggattttgttggtacctggttttgtgttgtgtatatatacatgaggttgaacagtgaaaggaaagttcagtagtgatgttagaagggtaactatgacaaagatacttttgagataacatttaaaagtactttatattttacataatagcatgtttcattttgattaaaagctaccaaaggaattttgatcatggcataagtgtttaaagcaatattttctggaatataccaagtttatataatttgattttgtgctaaattattaagagtctctttttgaaacatgcgggtttgaaatatgacaccttgtgggtttccatattaaaatcctcactctttaattgtcatttctatctttgaaaattttcatttatgagttccatgatatgtggtctaagaaagaccaaacagatttctattttttttttcttataagttcgttgtgtctagagattgttaatattgtaatttaatgtagacttactttgaataaaattagtttaattggccttaaaattacattaataaaactttgtgatatgcaaatg

SEQ ID NO: 23482 - DNA, 2280 bp, Artificial Sequence
  derived and/or modified sequence
atggccgacgaggcccccagaaagggcagcttcagcgccctggtgggcagaaccaacggcctgaccaagcccgccgccctggccgccgcccccgccaagcccggcggcgccggcggcagcaagaagctggtgatcaagaacttcagagacagacccagactgcccgacaactacacccaggacacctggagaaagctgcacgaggccgtgagagccgtgcagagcagcaccagcatcagatacaacctggaggagctgtaccaggccgtggagaacctgtgcagccacaaggtgagccccatgctgtacaagcagctgagacaggcctgcgaggaccacgtgcaggcccagatcctgcccttcagagaggacagcctggacagcgtgctgttcctgaagaagatcaacacctgctggcaggaccactgcagacagatgatcatgatcagaagcatcttcctgttcctggacagaacctacgtgctgcagaacagcaccctgcccagcatctgggacatgggcctggagctgttcagaacccacatcatcagcgacaagatggtgcagagcaagaccatcgacggcatcctgctgctgatcgagagagagagaagcggcgaggccgtggacagaagcctgctgagaagcctgctgggcatgctgagcgacctgcaggtgtacaaggacagcttcgagctgaagttcctggaggagaccaactgcctgtacgccgccgagggccagagactgatgcaggagagagaggtgcccgagtacctgaaccacgtgagcaagagactggaggaggagggcgacagagtgatcacctacctggaccacagcacccagaagcccctgatcgcctgcgtggagaagcagctgctgggcgagcacctgaccgccatcctgcagaagggcctggaccacctgctggacgagaacagagtgcccgacctggcccagatgtaccagctgttcagcagagtgagaggcggccagcaggccctgctgcagcactggagcgagtacatcaagaccttcggcaccgccatcgtgatcaaccccgagaaggacaaggacatggtgcaggacctgctggacttcaaggacaaggtggaccacgtgatcgaggtgtgcttccagaagaacgagagattcgtgaacctgatgaaggagagcttcgagaccttcatcaacaagagacccaacaagcccgccgagctgatcgccaagcacgtggacagcaagctgagagccggcaacaaggaggccaccgacgaggagctggagagaaccctggacaagatcatgatcctgttcagattcatccacggcaaggacgtgttcgaggccttctacaagaaggacctggccaagagactgctggtgggcaagagcgccagcgtggacgccgagaagagcatgctgagcaagctgaagcacgagtgcggcgccgccttcaccagcaagctggagggcatgttcaaggacatggagctgagcaaggacatcatggtgcacttcaagcagcacatgcagaaccagagcgacagcggccccatcgacctgaccgtgaacatcctgaccatgggctactggcccacctacacccccatggaggtgcacctgacccccgagatgatcaagctgcaggaggtgttcaaggccttctacctgggcaagcacagcggcagaaagctgcagtggcagaccaccctgggccacgccgtgctgaaggccgagttcaaggagggcaagaaggagttccaggtgagcctgttccagaccctggtgctgctgatgttcaacgagggcgacggcttcagcttcgaggagatcaagatggccaccggcatcgaggacagcgagctgagaagaaccctgcagagcctggcctgcggcaaggccagagtgctgatcaagagccccaagggcaaggaggtggaggacggcgacaagttcatcttcaacggcgagttcaagcacaagctgttcagaatcaagatcaaccagatccagatgaaggagaccgtggaggagcaggtgagcaccaccgagagagtgttccaggacagacagtaccagatcgacgccgccatcgtgagaatcatgaagatgagaaagaccctgggccacaacctgctggtgagcgagctgtacaaccagctgaagttccccgtgaagcccggcgacctgaagaagagaatcgagagcctgatcgacagagactacatggagagagacaaggacaaccccaaccagtaccactacgtggcctag

SEQ ID NO: 23483 - DNA, 1206 bp, Artificial Sequence
  derived and/or modified sequence
atgagcagcaagatcatcggcatcaacggcgacttcttcgccaacatggtggtggacgccgtgctggccatcaagtacaccgacatcagaggccagcccagataccccgtgaacagcgtgaacatcctgaaggcccacggcagaagccagatggagagcatgctgatcagcggctacgccctgaactgcgtggtgggcagccagggcatgcccaagagaatcgtgaacgccaagatcgcctgcctggacttcagcctgcagaagaccaagatgaagctgggcgtgcaggtggtgatcaccgaccccgagaagctggaccagatcagacagagagagagcgacatcaccaaggagagaatccagaagatcctggccaccggcgccaacgtgatcctgaccaccggcggcatcgacgacatgtgcctgaagtacttcgtggaggccggcgccatggccgtgagaagagtgctgaagagagacctgaagagaatcgccaaggccagcggcgccaccatcctgagcaccctggccaacctggagggcgaggagaccttcgaggccgccatgctgggccaggccgaggaggtggtgcaggagagaatctgcgacgacgagctgatcctgatcaagaacaccaaggccagaaccagcgccagcatcatcctgagaggcgccaacgacttcatgtgcgacgagatggagagaagcctgcacgacgccctgtgcgtggtgaagagagtgctggagagcaagagcgtggtgcccggcggcggcgccgtggaggccgccctgagcatctacctggagaactacgccaccagcatgggcagcagagagcagctggccatcgccgagttcgccagaagcctgctggtgatccccaacaccctggccgtgaacgccgcccaggacagcaccgacctggtggccaagctgagagccttccacaacgaggcccaggtgaaccccgagagaaagaacctgaagtggatcggcctggacctgagcaacggcaagcccagagacaacaagcaggccggcgtgttcgagcccaccatcgtgaaggtgaagagcctgaagttcgccaccgaggccgccatcaccatcctgagaatcgacgacctgatcaagctgcaccccgagagcaaggacgacaagcacggcagctacgaggacgccgtgcacagcggcgccctgaacgactag

SEQ ID NO: 23484 - DNA, 1206 bp, Artificial Sequence
  derived and/or modified sequence
atgagctcaaagatcatcgggatcaacggggatttcttcgcaaatatggttgtcgacgctgttctcgcaatcaaatataccgatatacgcggccagcctcggtatccagtgaattcagtgaatatcctcaaggctcacgggaggtcccagatggaaagtatgttgatttcaggatacgccctgaattgtgtggtggggagtcaaggtatgcccaaacgaatcgtgaacgccaagatcgcatgtcttgatttcagccttcagaaaacgaagatgaagctgggtgtccaggtggtgatcacggatccagaaaaactcgaccagattagacagcgggaaagtgatattactaaggagcggattcagaaaatacttgcaaccggagccaacgtgattctgactaccggggggatagacgacatgtgcctcaagtatttcgtggaagccggggcaatggccgtccgtcgagtgctcaagagagatctgaagagaattgccaaggcttcaggcgccacaattttgtccacactggccaatctggagggcgaagaaacatttgaagccgccatgttagggcaggccgaagaagtcgttcaggaacgaatctgcgatgacgagttaatacttattaagaatactaaggccagaacctctgctagtatcattcttcgaggagctaacgactttatgtgcgatgaaatggaacgctccctacacgacgcattatgtgtggtcaagcgagtccttgagagcaagtctgtggtgcccggggggggggctgtcgaggccgctctctctatttacttggagaattacgccacatcaatgggaagtcgggagcagctcgccattgctgaatttgctcgtagtttgttggtgattccaaataccctggcagtaaacgccgcccaggacagtacggacttggtggccaaactgagggccttccacaatgaggcccaggtgaatcctgagcgcaaaaaccttaagtggattgggctggatctcagtaacggcaaaccaagggacaataagcaggccggcgtgttcgagcctactatcgtgaaggtgaagtccctcaagtttgccacggaagccgcaataacaatcctgcgaatcgatgacctaattaaactgcaccctgaatctaaagatgataagcatggaagctatgaggatgctgtccactcaggagccctcaacgactag

SEQ ID NO: 23485 - DNA, 1206 bp, Artificial Sequence
  derived and/or modified sequence
atgagcagcaagatcatcggcatcaatggagacttctttgccaacatggtggtggatgctgtgctggccatcaagtacacagacatccggggccagccccgctaccctgtgaacagcgtgaacatcctgaaggcccacggccgcagccagatggagagcatgctgatcagcggctacgccctgaactgtgtggtgggcagccagggcatgcccaagagaattgtgaatgccaagatcgcctgcctggacttcagcctgcagaagaccaagatgaagctgggcgtgcaggtggtgatcacagatcctgagaagctggaccagatccggcagcgggagagtgacatcaccaaggagcgcatccagaagatcctggccaccggggccaacgtcatcctgaccaccggcggcattgatgacatgtgcctgaagtactttgtggaggccggggccatggctgtgcggcgggtgctgaagagggacctgaagagaattgccaaggccagcggggccaccatcctgagcaccctggccaacctggagggggaggagacctttgaagctgccatgctgggccaggccgaggaggtggtgcaggagcgcatctgtgatgatgagctgatcctgatcaagaacaccaaggcccggaccagcgccagcatcatcctgcggggggccaatgacttcatgtgtgatgagatggagaggagcctgcatgatgccctgtgtgtggtgaagagggtgctggagagcaagtctgtggtgcctgggggcggcgctgtggaggccgccctgagcatctacctggagaactatgccacctccatgggcagccgggagcagctggccatcgccgagtttgcccggagcctgctggtgatccccaacaccctggccgtgaatgctgcccaggacagcacagacctggtggccaagctgcgggccttccacaatgaggcccaggtgaaccctgagaggaagaacctgaagtggattggcctggacctgagcaatggcaagccccgggacaacaagcaggccggcgtgtttgagcccaccatcgtgaaggtgaagagcctgaagtttgccacagaagctgccatcaccatcctgagaattgatgacctgatcaagctgcaccctgagagcaaggatgacaagcacggcagctatgaagatgctgtgcacagcggggccctgaatgactag

SEQ ID NO: 23486 - DNA, 1206 bp, Artificial Sequence
  derived and/or modified sequence
atgagcagcaagatcatcggcatcaacggcgacttcttcgccaacatggtcgttgatgcagtgctcgcaattaagtatactgacattagagggcaaccccgctatccggtaaacagtgttaatattctcaaggcacacggaaggagccagatggagtctatgctcatctccgggtatgcgctgaattgcgtggtcggctcacaggggatgcccaagcgaatcgttaacgctaagattgcctgcttggatttctctctacagaagaccaaaatgaagctcggcgtgcaggtggtaatcacagaccccgagaagctcgaccagatacgacagcgcgaatctgacattaccaaggagcggatacaaaaaatcctcgccaccggagccaacgtcattttgacaacagggggaatcgacgacatgtgcttgaaatattttgtggaggcaggggccatggccgtgcggagggtgctcaagcgggatcttaaacggattgccaaagccagcggtgccacaatccttagtacactcgccaatctcgagggagaggaaacgttcgaggctgcaatgcttggccaggcggaggaggtcgtgcaggaaagaatctgtgatgatgaactgatactgatcaaaaacactaaggccagaaccagcgccagcatcattttgaggggcgccaatgacttcatgtgtgacgaaatggaaagatcacttcacgatgctttgtgtgtggttaagcgggtcctcgagtccaaatctgtggtgccagggggcggagccgtggaggcagcacttagtatttacctggaaaactacgctacttcgatggggtcaagagaacagctggccatcgcagaatttgctcgatcccttctcgtcatccccaataccctcgcagtgaacgctgcacaggactccaccgatctggtggcaaagttgcgagcctttcacaacgaagcccaggttaatcctgagcgtaagaatctgaaatggatcggacttgacctttcaaacggcaaacccagggataataaacaggcaggtgtatttgagccaactattgtgaaagttaagagcctgaaatttgccacagaagccgcgataacgatcctgaggatcgatgacttaattaaattacaccccgagtcaaaagatgacaaacacgggtcctacgaagacgctgtgcacagtggggctctgaacgattag

SEQ ID NO: 23487 - DNA, 1206 bp, Artificial Sequence
  derived and/or modified sequence
atgagcagtaagatcatcggaataaacggagatttttttgcgaacatggtcgttgacgccgtgttagctattaaatacaccgatattcgcggacagcccaggtaccctgtgaattctgttaacatcctgaaggcccatggcagatcccagatggagtctatgctaatctcaggctacgccttaaattgcgtcgtgggcagccaggggatgcccaagcgcatcgtcaatgcgaaaatcgcctgtctggactttagcctacaaaaaaccaagatgaaactcggggtgcaagtcgtaataaccgacccagaaaagttggaccagattcggcagcgcgaaagtgacataactaaagaaagaatccagaaaattctggccacaggtgctaacgtgatcctgaccactggcggaatcgatgatatgtgtctcaaatacttcgtggaggccggtgccatggctgttcggagagtactgaaaagagacttgaaaagaatcgccaaagcctctggcgctaccatcctgtcaacccttgcaaatctagaaggggaagagacctttgaagcagccatgttaggacaggctgaagaagtcgtccaggaacgaatctgtgacgacgaactgatactgatcaaaaacaccaaggctcgaacaagcgcaagcattattctccgcggagctaacgacttcatgtgtgatgagatggaacgctcactccacgatgctttgtgtgtagtgaaaagagtcctcgagtcaaaatccgtggtgccaggcggaggggcagtcgaggctgctctgagcatttatctggaaaattatgccacttctatgggctccagagagcagttagctatcgccgaattcgcaagatccttgcttgtgatcccaaatacattagcagtcaatgctgctcaagactcaacagatttagttgcaaagctgcgggcttttcacaacgaagcccaagtcaaccccgaacgcaagaacctgaagtggatcggcctcgacctgtcaaatggaaaaccgcgagacaataaacaggccggagtcttcgagcccacaattgtcaaggtcaagtcacttaaatttgcgaccgaggccgcaattacaatcctgaggatcgatgacctgattaaactgcatcccgagtctaaggatgacaagcacgggtcatacgaggatgcggttcacagcggtgctttgaatgactag

SEQ ID NO: 23488 - protein, 2039 aa, Artificial Sequence
  derived and/or modified sequence
MGDDSEWLKLPVDQKCEHKLWKARLSGYEEALKIFQKIKDEKSPEWSKFLGLIKKFVTDSNAVVQLKGLEAALVYVENAHVAGKTTGEVVSGVVSKVFNQPKAKAKELGIEICLMYIEIEKGEAVQEELLKGLDNKNPKIIVACIETLRKALSEFGSKIILLKPIIKVLPKLFESREKAVRDEAKLIAVEIYRWIRDALRPPLQNINSVQLKELEEEWVKLPTSAPRPTRFLRSQQELEAKLEQQQSAGGDAEGGGDDGDEVPQIDAYELLEAVEILSKLPKDFYDKIEAKKWQERKEALESVEVLIKNPKLEAGDYADLVKALKKVVGKDTNVMLVALAAKCLTGLAVGLRKKFGQYAGHVVPTILEKFKEKKPQVVQALQEAIDAIFLTTTLQNISEDVLAVMDNKNPTIKQQTSLFIARSFRHCTASTLPKSLLKPFCAALLKHINDSAPEVRDAAFEALGTALKVVGEKAVNPFLADVDKLKLDKIKECSEKVELIHGKKAGLAADKKEFKPLPGRTAASGAAGDKDTKDISAPKPGPLKKAPAAKAGGPPKKGKPAAPGGAGNTGTKNKKGLETKEIVEPELSIEVCEEKASAVLPPTCIQLLDSSNWKERLACMEEFQKAVELMDRTEMPCQALVRMLAKKPGWKETNFQVMQMKLHIVALIAQKGNFSKTSAQVVLDGLVDKIGDVKCGNNAKEAMTAIAEACMLPWTAEQVVSMAFSQKNPKNQSETLNWLSNAIKEFGFSGLNVKAFISNVKTALAATNPAVRTAAITLLGVMYLYVGPSLRMFFEDEKPALLSQIDAEFEKMQGQSPPAPTRGISKHSTSGTDEGEDGDEPDDGSNDVVDLLPRTEISDKITSELVSKIGDKNWKIRKEGLDEVAGIINDAKFIQPNIGELPTALKGRLNDSNKILVQQTLNILQQLAVAMGPNIKQHVKNLGIPIITVLGDSKNNVRAAALATVNAWAEQTGMKEWLEGEDLSEELKKENPFLRQELLGWLAEKLPTLRSTPTDLILCVPHLYSCLEDRNGDVRKKAQDALPFFMMHLGYEKMAKATGKLKPTSKDQVLAMLEKAKVNMPAKPAPPTKATSKPMGGSAPAKFQPASAPAEDCISSSTEPKPDPKKAKAPGLSSKAKSAQGKKMPSKTSLKEDEDKSGPIFIVVPNGKEQRMKDEKGLKVLKWNFTTPRDEYIEQLKTQMSSCVAKWLQDEMFHSDFQHHNKALAVMVDHLESEKEGVIGCLDLILKWLTLRFFDTNTSVLMKALEYLKLLFTLLSEEEYHLTENEASSFIPYLVVKVGEPKDVIRKDVRAILNRMCLVYPASKMFPFIMEGTKSKNSKQRAECLEELGCLVESYGMNVCQPTPGKALKEIAVHIGDRDNAVRNAALNTIVTVYNVHGDQVFKLIGNLSEKDMSMLEERIKRSAKRPSAAPIKQVEEKPQRAQNISSNANMLRKGPAEDMSSKLNQARSMSGHPEAAQMVRREFQLDLDEIENDNGTVRCEMPELVQHKLDDIFEPVLIPEPKIRAVSPHFDDMHSNTASTINFIISQVASGDINTSIQALTQIDEVLRQEDKAEAMSGHIDQFLIATFMQLRLIYNTHMADEKLEKDEIIKLYSCIIGNMISLFQIESLAREASTGVLKDLMHGLITLMLDSRIEDLEEGQQVIRSVNLLVVKVLEKSDQTNILSALLVLLQDSLLATASSPKFSELVMKCLWRMVRLLPDTINSINLDRILLDIHIFMKVFPKEKLKQCKSEFPIRTLKTLLHTLCKLKGPKSCMCLPQILDHLTMIDNKNESELEAHLCRMMKHSMDQTGSKSDKETEKGASRIDEKSSKAKVNDFLAEIFKKIGSKENTKEGLAELYEYKKKYSDADIEPFLKNSSQFFQSYVERGLRVIEMEREGKGRISTSTGISPQMEVTCVPTPTSTVSSIGNTNGEEVGPSVYLERLKILRQRCGLDNTKQDDRPPLTSLLSKPAVPTVASSTDMLHSKLSQLRESREQHQHSDLDSNQTHSSGTVTSSSSTANIDDLKKRLERIKSSRK

SEQ ID NO: 23489 - protein, 151 aa, Artificial Sequence
  derived and/or modified sequence
MGDDSEWLKLPVDQKCEHKLWKARLSGYEEALKIFQKIKDEKSPEWSKFLGLIKKFVTDSNAVVQLKGLEAALVYVENAHVAGKTTGEVVSGVVSKVFNQPKAKAKELGIEICLMYIEIEKGEAVQEELLKGLDNKNPKIIVACIETLRKA

SEQ ID NO: 23490 - protein, 2032 aa, Artificial Sequence
  derived and/or modified sequence
MGDDSEWLKLPVDQKCEHKLWKARLSGYEEALKIFQKIKDEKSPEWSKFLGLIKKFVTDSNAVVQLKGLEAALVYVENAHVAGKTTGEVVSGVVSKVFNQPKAKAKELGIEICLMYIEIEKGEAVQEELLKGLDNKNPKIIVACIETLRKALSEFGSKIILLKPIIKVLPKLFESREKAVRDEAKLIAVEIYRWIRDALRPPLQNINSVQLKELEEEWVKLPTSAPRPTRFLRSQQELEAKLEQQQSAGGDAEGGGDDGDEVPQIDAYELLEAVEILSKLPKDFYDKIEAKKWQERKEALESVEVLIKNPKLEAGDYADLVKALKKVVGKDTNVMLVALAAKCLTGLAVGLRKKFGQYAGHVVPTILEKFKEKKPQVVQALQEAIDAIFLTTTLQNISEDVLAVMDNKNPTIKQQTSLFIARSFRHCTASTLPKSLLKPFCAALLKHINDSAPEVRDAAFEALGTALKVVGEKAVNPFLADVDKLKLDKIKECSEKVELIHGKKAGLAADKKEFKPLPGRTAASGAAGDKDTKDISAPKPGPLKKAPAAKAGGPPKKGKPAAPGGAGNTGTKNKKGLETKEIVEPELSIEVCEEKASAVLPPTCIQLLDSSNWKERLACMEEFQKAVELMDRTEMPCQALVRMLAKKPGWKETNFQVMQMKLHIVALIAQKGNFSKTSAQVVLDGLVDKIGDVKCGNNAKEAMTAIAEACMLPWTAEQVVSMAFSQKNPKNQSETLNWLSNAIKEFGFSGLNVKAFISNVKTALAATNPAVRTAAITLLGVMYLYVGPSLRMFFEDEKPALLSQIDAEFEKMQGQSPPAPTRGISKHSTSGTDEGEDGDEPDDGSNDVVDLLPRTEISDKITSELVSKIGDKNWKIRKEGLDEVAGIINDAKFIQPNIGELPTALKGRLNDSNKILVQQTLNILQQLAVAMGPNIKQHVKNLGIPIITVLGDSKNNVRAAALATVNAWAEQTGMKEWLEGEDLSEELKKENPFLRQELLGWLAEKLPTLRSTPTDLILCVPHLYSCLEDRNGDVRKKAQDALPFFMMHLGYEKMAKATGKLKPTSKDQVLAMLEKAKVNMPAKPAPPTKATSKPMGGSAPAKFQPASAPAEDCISSSTEPKPDPKKAKAPGLSSKAKSAQGKKMPSKTSLKEDEDKSGPIFIVVPNGKEQRMKDEKGLKVLKWNFTTPRDEYIEQLKTQMSSCVAKWLQDEMFHSDFQHHNKALAVMVDHLESEKEGVIGCLDLILKWLTLRFFDTNTSVLMKALEYLKLLFTLLSEEEYHLTENEASSFIPYLVVKVGEPKDVIRKDVRAILNRMCLVYPASKMFPFIMEGTKSKNSKQRAECLEELGCLVESYGMNVCQPTPGKALKEIAVHIGDRDNAVRNAALNTIVTVYNVHGDQVFKLIGNLSEKDMSMLEERIKRSAKRPSAAPIKQVEEKPQRAQNISSNANMLRKGPAEDMSSKLNQARSMSGHPEAAQMVRREFQLDLDEIENDNGTVRCEMPELVQHKLDDIFEPVLIPEPKIRAVSPHFDDMHSNTASTINFIISQVASGDINTSIQALTQIDEVLRQEDKAEAMSGHIDQFLIATFMQLRLIYNTHMADEKLEKDEIIKLYSCIIGNMISLFQIESLAREASTGVLKDLMHGLITLMLDSRIEDLEEGQQVIRSVNLLVVKVLEKSDQTNILSALLVLLQDSLLATASSPKFSELVMKCLWRMVRLLPDTINSINLDRILLDIHIFMKVFPKEKLKQCKSEFPIRTLKTLLHTLCKLKGPKILDHLTMIDNKNESELEAHLCRMMKHSMDQTGSKSDKETEKGASRIDEKSSKAKVNDFLAEIFKKIGSKENTKEGLAELYEYKKKYSDADIEPFLKNSSQFFQSYVERGLRVIEMEREGKGRISTSTGISPQMEVTCVPTPTSTVSSIGNTNGEEVGPSVYLERLKILRQRCGLDNTKQDDRPPLTSLLSKPAVPTVASSTDMLHSKLSQLRESREQHQHSDLDSNQTHSSGTVTSSSSTANIDDLKKRLERIKSSRK

SEQ ID NO: 23491 - DNA, 6120 bp, Artificial Sequence
  derived and/or modified sequence
atgggcgacgacagcgagtggctcaaactgccagtagaccagaaatgcgagcacaaactgtggaaagctaggctatcaggctacgaggaggccttgaaaatctttcagaagattaaggatgaaaaatccccagagtggtccaaatttctaggactaatcaagaaatttgtcacagatagtaatgcggtggtccagctaaagggcctggaggcagcactcgtatacgttgaaaacgcgcatgttgccgggaagacaaccggcgaagttgtgagcggtgttgtgtctaaggtattcaatcaacccaaggctaaggctaaagagctgggaattgaaatctgtctaatgtatattgagatcgagaagggagaagctgtgcaggaggaattgctcaaaggtctggataacaaaaatcctaagattatcgttgcatgcattgagactctgagaaaggccctaagcgaatttggatccaagattattctgctaaagcctataatcaaagtactccctaagctgttcgagtcacgggagaaagctgttcgggatgaggctaaactaatagctgtggaaatctatcgctggattagggacgccctgcgacctcctttgcagaatattaactccgtacaactgaaggaactggaggaggaatgggtcaagctgcccaccagtgctccccgccctacccgttttctgcgctctcaacaggagctggaggcaaagctagagcagcagcagagcgctggcggggatgctgagggaggtggggacgatggagatgaagttcctcagatcgacgcatatgagttacttgaagccgtggagatccttagcaaattacccaaggatttttatgataaaatcgaggccaaaaaatggcaagaacgcaaagaagccctagaaagtgtcgaggttctgattaagaatcccaagctggaggcaggagactacgccgatcttgtgaaggcactgaagaaagtggtgggcaaggacactaacgttatgttggtggcactggcggcaaagtgtctcactggactggctgtgggactgcgcaagaaattcggccagtatgcgggtcacgttgtcccaaccattttagagaaattcaaggaaaaaaagccgcaggtggtacaagcactacaggaggctatcgacgcaatttttctgacaaccacacttcagaacatttctgaggatgtgcttgctgtgatggataacaagaatcccactattaagcaacagacgagcttgtttatagcaaggagttttcggcactgcactgcttcaaccctgcccaagagtcttctcaaaccattctgtgcagcccttctgaagcacattaatgattccgcgccagaggtgagggatgccgcctttgaggctcttgggaccgcccttaaggttgttggtgagaaagcagttaatccttttctggcagatgtagacaaactaaaactcgataagatcaaagaatgctccgagaaagtggaattgatccatggcaagaaagccggcctggcagccgataagaaggagttcaagcccttgcccgggcggaccgccgcgtccggggcagctggagacaaggacacgaaagacatttctgctcccaagcccggcccccttaaaaaagccccggccgcaaaagctgggggtcctccaaaaaagggcaaaccagccgccccaggtggggcaggtaatacaggcaccaaaaataagaaagggttagagaccaaggagatagtggagccagagttgtccattgaggtgtgcgaggagaaggcgtcagctgttctccctcctacttgtattcagctgttggattcttctaattggaaagagcgtctggcctgcatggaagagttccagaaagcggtggagttaatggatcgcaccgagatgccatgccaggctcttgtgcgaatgctggccaagaagcccgggtggaaggaaaccaactttcaggtcatgcagatgaaactgcacattgtggccttaatcgctcagaaagggaacttcagcaaaacatccgctcaggtcgtgcttgacgggttggtggataaaatcggggatgtgaaatgcgggaataatgctaaggaggctatgactgccattgccgaggcatgcatgctgccatggacagctgagcaggtggtgtccatggccttcagccagaagaaccccaagaaccaatcagagacacttaactggttaagcaatgcaatcaaagagttcggcttcagcggcctgaacgtgaaagcatttataagtaatgttaagacagctctggcggctaccaatcccgctgttcgtaccgccgccatcacactgcttggagtaatgtacctctatgtcggtccaagcctgcgcatgttcttcgaggatgaaaaacccgcactgttgagccagatcgatgccgagttcgaaaaaatgcagggtcaaagcccccccgctccaacgcgcgggatttctaagcacagtacgtcgggtaccgacgaaggagaggacggcgatgagcccgatgacggctccaacgacgtggttgaccttttacctagaacggaaatcagcgataagatcaccagtgaactcgttagcaagattggcgacaagaattggaaaattagaaaggaggggctggacgaggtcgccggaattattaatgatgctaagttcatccagccaaatattggcgagttgcctactgcccttaagggccggcttaatgatagtaataagattctggtccaacagaccctgaatatcttacagcagctggcggtggcgatgggcccgaatataaaacagcacgttaagaacctcggaatacctattattaccgtgctcggcgactctaagaataacgtccgcgcggcagccctagccacagtgaacgcctgggcagaacagactggcatgaaagagtggttagagggggaagacttgtcagaggaactcaagaaagaaaatccgttccttcggcaggagctcctcgggtggttggcggaaaagctgcccactcttcgctcaacacctaccgacctgatcctctgcgtcccacacctgtatagctgcctcgaagataggaatggcgatgtgcgaaaaaaagctcaggacgccctccccttttttatgatgcacttgggttacgagaaaatggcaaaagccaccggcaaacttaaacccacaagcaaggaccaggtcctggctatgctggaaaaggccaaagtgaacatgcccgctaagccagcgcctccaaccaaggcaacgtccaaacccatgggaggcagtgctcccgcaaagttccagccagcatcagcacctgcagaagattgcattagctcctctactgaaccaaagcctgatccaaagaaggccaaagcaccagggctctcgtccaaggctaagagcgcccagggaaaaaagatgcccagcaaaacttcattgaaggaagacgaggacaagtcagggcccatctttatcgtcgtgccaaacggcaaagaacagcgcatgaaggacgagaagggattaaaagtgctgaaatggaactttacaactccgcgggatgagtatattgagcagttaaagactcaaatgtccagctgtgtggccaagtggcttcaggacgaaatgttccacagcgactttcagcatcacaacaaggccttggccgtcatggttgatcatctggaatctgagaaagaaggcgtgatcgggtgtttagatcttatcctgaagtggttaaccctgcgcttttttgatacaaatacttccgtgctgatgaaggccctggagtacttgaagctcctctttactctgctcagcgaggaagagtatcatctgaccgaaaacgaggccagtagtttcataccatatctagtggtgaaggtaggcgagccaaaggacgtgatccggaaagacgtccgagccatcctaaaccgaatgtgtctagtgtatccagcctctaagatgttcccgtttatcatggaaggaaccaaaagtaaaaactctaagcagagggctgagtgtttggaggagctaggttgcctggtggaatcttatggaatgaacgtctgtcagccaacacctggcaaggcgctgaaagaaattgccgtccacatcggcgatagagataatgccgtgcgtaatgcagctttaaataccatcgtgacagtatacaacgttcatggggatcaggtcttcaagttaattgggaatctctccgagaaggatatgtctatgctggaggagaggatcaagcgctctgccaaacgcccgtccgcggctcctattaagcaggtagaggaaaaaccacagcgggctcagaatattagcagcaacgctaacatgctacgaaagggccctgccgaggatatgtcctccaagctgaatcaggcacggtccatgtccgggcatccagaggctgcgcagatggtccgaagagagtttcagctagatctggatgaaatcgaaaacgacaacggcactgtgaggtgcgaaatgcctgagctggtgcagcacaagttagacgacatctttgagcccgtgttgattcccgagccgaagatccgcgcagttagtcctcacttcgacgacatgcattccaacaccgccagtaccataaactttattattagtcaggttgcttcaggcgatatcaatacctccatccaagcccttacacaaattgatgaggtgctcaggcaggaagataaggctgaggccatgtcaggccatatcgaccagttcctgatagcgactttcatgcagctcagactcatctacaatacgcacatggctgacgaaaaattagagaaagatgagatcatcaaactttacagctgtattatcgggaatatgatatccttgttccaaattgagagcctggcaagggaggcctcaacaggagtgctgaaggatctgatgcatggactgatcactctgatgcttgactctcgtatcgaggacttggaagagggtcaacaggtgatcaggtcagtcaatttactcgtggtgaaagtgttagaaaaatctgaccagacaaatatcttgagcgctctattagttctgctccaagactcacttctggcaactgcctcaagcccgaaattctccgagctggtcatgaagtgcctctggcggatggtcagactgcttccggacaccatcaacagtattaacctcgacagaatcctgctggacatccatatatttatgaaggtgttccctaaggaaaagcttaaacagtgcaaaagtgagttccccatacgtacactgaagaccttgctgcacacactttgcaagttaaaaggccctaagagctgtatgtgcctgccacagattctggaccaccttacgatgatcgataacaaaaatgagagcgagcttgaggcccacctgtgtcggatgatgaaacactcgatggaccagacaggctcaaaaagcgacaaagagaccgagaagggggccagcaggatcgacgagaagtcctctaaggcaaaagtgaacgacttcctggcagagattttcaagaaaataggttccaaagagaacacaaaagaaggactggcagagctctatgagtacaagaagaaatactccgacgctgacattgaaccgtttctaaaaaattcctcccagttctttcaaagttatgtagaaaggggcctccgagtgatagaaatggagagggaagggaaaggaagaataagcacttcaacagggatatccccacagatggaggttacttgtgtacccacacccacaagtactgtttcttccatcggaaatactaacggcgaagaggtgggcccaagtgtttatcttgagcgcctgaagatcttgcggcagagatgcggactcgacaataccaaacaagatgacaggccacccttgacgagcttgctgtccaaacctgccgtccctactgtggcgagttctaccgatatgttgcacagtaagctttctcagctcagagagagccgggagcagcaccaacactcggacctggattccaatcagacccactcatccggtaccgtgacgagttcttcttctacagccaatattgacgacctgaagaagcggctcgaaaggatcaagtccagccgcaagtag

SEQ ID NO: 23492 - DNA, 456 bp, Artificial Sequence
  derived and/or modified sequence
atgggcgacgactccgagtggctgaaacttccagttgaccagaagtgtgaacataaactttggaaggcaagactctcaggctatgaagaggcacttaaaatctttcagaaaattaaagatgagaagtctcctgagtggtcgaaattcttaggcctcattaagaagttcgtgaccgacagtaacgcagtggtccagctgaagggactcgaggccgcgctcgtgtatgtcgagaacgcccacgtggcaggaaaaactacgggtgaggtggtctccggagtcgtcagtaaggtgtttaaccaacctaaggctaaggctaaagagctgggaatcgaaatctgcctgatgtatattgagattgagaaaggcgaggcggttcaggaggagctgttgaaaggactggataataagaacccaaagatcattgtggcatgtatcgagacactcagaaaagcctag

SEQ ID NO: 23493 - DNA, 6099 bp, Artificial Sequence
  derived and/or modified sequence
atgggagatgattcagagtggctcaagttaccagttgatcagaaatgcgagcacaaattgtggaaggcccgattgtctgggtatgaagaagcactcaaaatcttccagaagattaaagatgaaaagtcccccgagtggtcaaaatttctgggattaataaagaagtttgtgactgatagcaacgcagtggtgcagctgaagggtctcgaagccgccttggtctacgtggagaacgcgcatgttgctggaaaaaccacgggggaggtggtcagtggagttgtttcaaaggtgtttaatcagcctaaggctaaggcgaaagagctaggcattgaaatctgccttatgtatattgagattgagaaaggcgaggctgtccaggaagagctgctcaagggactggataacaagaatcctaaaataattgtggcttgcattgagacgctgcgcaaggccctgtcggaatttggttcaaaaatcatcttactgaaaccaattataaaggtactaccaaaactgttcgagtctagggaaaaggcagtgagggacgaggctaaactgatcgcggtcgaaatttacaggtggatcagggatgctctccggccgccacttcagaatatcaacagtgtccaacttaaggagctggaagaagagtgggtcaagctgcccaccagtgccccccgccccacccgttttctgagatcacagcaagagttggaagcaaaattggaacaacaacaaagcgcgggcggagacgcggagggaggaggcgacgatggagatgaggtgccacaaatcgatgcgtacgaacttttggaggcagtagagatcctgtcaaagctgcccaaggatttctatgacaagatcgaagcaaagaagtggcaagagcgcaaggaagccctggaatcagtcgaagtgctaattaagaaccctaagcttgaggcaggtgattatgccgacctggtgaaggcgctcaaaaaagttgtgggcaaagatactaacgtcatgctcgtagctttagccgctaaatgcctgacaggactggccgtgggactcagaaagaagttcggacagtacgcaggccacgtggtgccaaccattctcgagaagtttaaagagaagaaaccccaggttgtccaagctctgcaagaggctatagatgccatatttctcacgactaccttgcagaacatctcggaggacgttttagccgtgatggacaataagaatcctactatcaaacagcagacatccttattcattgcacgctcatttcgacactgcaccgcgagtacattgcccaagtcactgctcaaacccttttgcgctgctcttctgaaacatattaacgattccgcaccagaagtcagagacgcagcgtttgaagccctgggtaccgctcttaaggtggtgggagagaaagccgtcaatcctttcctcgccgacgttgacaaactgaagcttgacaagattaaggagtgctctgagaaggtggaactgatacacggaaagaaggcggggctagccgccgacaagaaagaatttaagcctctgcctggccgcaccgccgcatcaggcgccgccggcgacaaagacaccaaagatatcagtgccccgaagcctggccccttgaagaaagctccagcagccaaagcaggcggtccccctaagaagggtaaacccgcggcaccaggtggcgctggcaataccggcacgaagaacaaaaaggggttggagaccaaagagatcgtcgagccagaactttccatcgaggtttgcgaggagaaggccagcgccgtgctgcctcctacctgcattcagcttctagattctagcaattggaaagagcgcctggcttgcatggaggagttccagaaggccgttgagttaatggatagaaccgaaatgccctgtcaggccttagttaggatgctcgcgaaaaagccggggtggaaagaaaccaacttccaggtcatgcagatgaagctgcatatcgtcgcactcatagcgcaaaaaggcaactttagcaagacgtccgctcaggtggtgctcgatgggcttgttgataaaattggcgatgtcaagtgtggaaataacgccaaggaagcgatgactgctattgctgaagcatgtatgctgccatggactgcagaacaggtggtgagcatggcattcagccaaaaaaatcctaagaaccaatccgagactctgaattggctctccaacgcgataaaggagttcgggttttcgggcctgaacgtgaaggccttcatttcgaatgtgaagaccgcactggccgccaccaaccctgctgtgcgaaccgccgcaataacactgttgggtgtgatgtacctgtatgtcggaccctcattaaggatgttcttcgaggatgaaaaacccgctctgctgagccagatagatgccgagttcgagaagatgcaaggacagagtcccccagccccaacacgaggcatttctaaacacagcaccagcggaacagacgagggggaggacggagatgagccggatgatggaagcaacgacgtggtagatctgctgcccaggacagaaatctctgataaaataacctccgagttagtgtccaagatcggggacaaaaactggaaaatccgcaaagagggcctggatgaagtggctggcattataaacgatgcaaaattcatccagcccaatataggcgaactaccaacagccttaaaggggagattgaatgatagcaacaaaatcttggtgcagcagacactgaatatactgcagcagctggcagtagcaatgggcccaaatatcaaacagcatgttaaaaatcttggcatccctattataacagtgttgggggattccaagaacaacgtgagagcagctgcactcgctaccgttaacgcatgggctgagcagactggcatgaaggaatggctggagggagaagacctctccgaggagcttaagaaggagaatcctttcctgaggcaagaacttctgggatggcttgccgagaaactcccaacactcaggtctaccccaaccgatctcatactgtgtgttccccatctctattcgtgtctggaagaccgcaatggggacgtgagaaaaaaagcacaggatgccctgcccttctttatgatgcacctcgggtacgagaaaatggccaaagcaacaggtaaactaaaacctactagcaaagaccaggtgctcgcaatgcttgagaaagccaaggtcaacatgcccgctaaacccgccccccctacaaaggccacatccaaacccatggggggcagcgcaccagcaaaattccaacctgcatccgcccccgcggaagattgtatcagttcttctacagagcccaagcctgatcccaagaaggcgaaggcacctggactttccagcaaggccaagtcggctcaaggcaagaagatgccaagcaaaacctcactgaaagaagatgaggacaagtcgggacccatctttatagtggtgcctaacggcaaagagcaacgtatgaaggacgagaagggtcttaaggtcttgaagtggaacttcactacaccacgggatgagtacattgagcagttaaagactcagatgagctcctgtgtcgcaaagtggctacaggatgagatgttccacagcgactttcaacaccataacaaggcccttgcggtaatggtggaccacctagagtctgagaaggaaggagtaataggctgccttgacctcatcctgaagtggctcacacttcggttcttcgacactaacacatctgttctgatgaaggctctcgaatatctgaagctgctgttcactctactttctgaggaagagtaccatttaacagagaacgaagccagctcttttataccttatctggtggttaaggtgggggagccaaaggacgtgatccgaaaggatgttcgcgcaattctgaatagaatgtgcctagtgtaccctgcttcaaaaatgtttccatttatcatggaagggacgaaatccaaaaactcaaagcaaagagccgaatgcttagaggagctcgggtgtctcgtggagagctacggcatgaacgtatgccagcccacccctggaaaggccctcaaagagatcgccgtgcatattggcgaccgcgataacgcggttcgaaatgcagctctgaataccattgtgaccgtatataatgtgcatggtgatcaggtgtttaagcttatagggaatttgtccgagaaagatatgagtatgctcgaggagcgtattaagcggtcagccaagcgaccctctgccgcaccaatcaaacaggtagaggagaagccacagcgagcccaaaacatttcatcgaacgccaacatgttacggaaaggacctgccgaggacatgtcctctaagctgaaccaagccagaagtatgtcaggccaccctgaggcagcccagatggttcgacgcgaattccagctcgatctggacgagattgagaacgataacggaaccgtgaggtgtgaaatgccagagctcgtccagcataagctggacgatatctttgaacctgttttaatccccgaaccaaaaatacgagcagtgtcgccgcattttgacgacatgcattcaaatactgcctctaccatcaacttcattatcagccaagtggcgtcaggggatattaatacctctattcaagctctgactcagattgacgaggttttgcgccaggaggataaagcagaggccatgtctgggcatattgaccaatttcttattgcaacattcatgcagctgcgcctaatttacaacacccatatggcggacgagaaacttgaaaaagatgaaatcattaaattgtacagttgcattatcgggaacatgatcagcctttttcagattgagagcctggcccgggaggcatcaactggcgtgcttaaggatttgatgcatgggctcatcaccctgatgctcgactcccggatagaagacctggaagagggtcaacaggttatcaggagcgtgaacctgctcgtggttaaggtgctagaaaaaagtgatcagacgaatattctgagcgcgctgctggtcctgttgcaagactccctcctggccactgcctcaagtcctaaattcagcgagttagtgatgaaatgtctttggagaatggttaggctgttgcctgacaccattaactcaataaacttagaccggattctcctcgacattcacattttcatgaaagtgttccctaaagaaaaactgaagcagtgcaagagcgagtttcccatcaggacactgaagacactgctccacactctgtgcaaattgaaaggaccaaagattttggatcatctcactatgattgataacaaaaatgaatccgagctggaagcccacctgtgcagaatgatgaagcacagcatggaccagaccggctcaaaatccgacaaggaaaccgagaaaggggcaagccgcattgatgagaagtcctcgaaagctaaagtaaacgatttcttagctgagatttttaaaaagatcggaagtaaggaaaacacgaaagaaggtctcgccgagctctacgagtacaaaaaaaagtattctgacgcagatatcgagccgttcctcaaaaattcgtcccagttctttcagtcttacgtggagagagggcttcgtgttattgagatggagagagaaggcaaaggcagaatctctaccagcaccggtattagtccccaaatggaggttacgtgcgtgcccacccccactagtactgtgtcttcgatcgggaacacgaatggtgaagaagtcggccccagcgtgtatctcgaaagacttaaaatcctgcgccagcgctgcggattagacaatacaaagcaggatgataggccccctctcacgagtctgctttcaaagcccgcagtcccgacagtggcctctagcactgacatgcttcactctaagttgtcacagctgcgagagagtcgagagcagcaccaacatagcgatcttgacagcaatcagacccactcttcgggaactgtgacctcaagttccagtaccgctaatatcgatgatctcaaaaagcggctggaacgtattaagtcttctaggaagtag

SEQ ID NO: 23494 - DNA, 6120 bp, Artificial Sequence
  derived and/or modified sequence
atgggagatgattctgagtggctgaagctgcctgtggaccagaagtgtgagcacaagctgtggaaggcccggctgagcggctatgaggaggccctgaagatcttccagaagatcaaggatgagaagagccctgagtggagcaagttcctgggcctcatcaagaagtttgtgacagacagcaatgctgtggtgcagctgaagggcctggaggccgccctggtgtatgtggagaatgcccacgtggccggcaagaccaccggggaggtggtgtctggagtggtgtccaaggtgttcaaccagcccaaggccaaggccaaggagctgggcatcgagatctgcctgatgtacattgaaattgaaaaaggagaggccgtgcaggaggagctgctgaagggcctggacaacaagaaccccaagatcatcgtggcctgcatcgagaccctgaggaaggccctgtctgaatttggcagcaagatcatcctgctgaagcccatcatcaaggtgctgcccaagctgtttgagagccgggagaaggctgtgagagatgaggccaagctgattgctgtggagatctaccgctggatcagagatgccctgcggccccccctgcagaacatcaacagcgtgcagctgaaggagctggaggaggagtgggtgaagctgcccaccagcgccccccggcccacccgcttcctgcggagccagcaggagctggaggccaagctggagcagcagcagagcgctggaggagatgctgagggcggcggagatgatggagatgaggtgccccagattgatgcctatgagctgctggaggccgtggagatcctgagcaagctgcccaaggacttctatgacaagattgaggccaagaagtggcaggagaggaaggaggccctggagagcgtggaggtgctgatcaagaaccccaagctggaggccggggactatgctgacctggtgaaggccctgaagaaggtggtgggcaaggacaccaacgtgatgctggtggccctggccgccaagtgcctgaccggcctggccgtgggcctgaggaagaagtttggccagtatgccggccacgtggtgcccaccatcctggagaagttcaaggagaagaagccccaggtggtgcaggccctgcaggaggccattgatgccatcttcctgaccaccaccctgcagaacatcagtgaagatgtgctggccgtgatggacaacaagaaccccaccatcaagcagcagaccagcctcttcatcgcccgctccttccgccactgcacagccagcaccctgcccaagagcctgctgaagcccttctgtgccgccctgctgaagcacatcaatgattctgcccctgaggtgagagatgctgcctttgaggccctgggcacagccctgaaggtggtgggggagaaggctgtgaaccccttcctggctgatgtggacaagctgaagctggacaagatcaaggagtgcagcgagaaggtggagctgattcatggcaagaaggccggcctggccgctgacaagaaggagttcaagcccctgcccggccgcacagctgccagcggggctgctggggacaaggacaccaaggacatcagcgcccccaagccaggccccctgaagaaggccccagctgccaaggccggcggcccccccaagaagggcaagccagctgcccctggaggagctggcaacacaggcaccaagaacaagaagggcctggagaccaaggagatcgtggagcctgagctgagcattgaggtgtgtgaggagaaggccagcgctgtgctgccccccacctgcatccagctgctggacagcagcaactggaaggagcggctggcctgcatggaggagttccagaaggctgtggagctgatggacagaacagagatgccctgccaggccctggtgaggatgctggccaagaagccaggctggaaggagaccaacttccaggtgatgcagatgaagctgcacatcgtggccctgattgcccagaagggcaacttcagcaagaccagcgcccaggtggtgctggatggcctggtggacaagattggagatgtgaagtgtggcaacaatgccaaggaggccatgacagccatcgccgaggcctgcatgctgccctggacagctgagcaggtggtgtccatggccttcagccagaagaaccccaagaaccagagcgagaccctgaactggctgagcaatgccatcaaggagtttggcttcagcggcctgaatgtgaaggccttcatcagcaatgtgaagacagccctggccgccaccaacccagctgtgaggacagctgccatcaccctgctgggcgtgatgtacctgtatgtgggccccagcctgaggatgttctttgaagatgagaagccagccctgctgagccagattgatgctgagtttgagaagatgcagggccagagccccccagcccccacccggggcatcagcaagcacagcaccagcggcacagatgaaggagaagatggagatgagccagatgatggcagcaatgatgtggtggacctgctgcccaggacagagatcagtgacaagatcaccagcgagctggtgtccaagattggagacaagaactggaagatcaggaaggagggcctggatgaggtggccggcatcatcaatgatgccaagttcatccagcccaacatcggggagctgcccacagccctgaagggccgcctgaatgacagcaacaagatcctggtgcagcagaccctgaacatcctgcagcagctggccgtggccatgggccccaacatcaagcagcacgtgaagaacctgggcatccccatcatcaccgtgctgggggacagcaagaacaacgtgcgggccgccgccctggccaccgtgaatgcctgggccgagcagacaggcatgaaggagtggctggagggggaggacctgtctgaggagctgaagaaggagaaccccttcctgcggcaggagctgctgggctggctggccgagaagctgcccaccctgcggagcacccccacagacctgatcctgtgtgtgccccacctgtacagctgcctggaggacagaaatggagatgtgaggaagaaggcccaggatgccctgcccttcttcatgatgcacctgggctatgagaagatggccaaggccaccgggaagctgaagcccaccagcaaggaccaggtgctggccatgctggagaaggccaaggtgaacatgcctgccaagccagccccacccaccaaggccaccagcaagcccatgggcggcagcgccccagccaagttccagcctgccagcgccccagctgaggactgcatcagcagcagcacagagcccaagccagaccccaagaaggccaaggcccctggcctgagcagcaaggccaagagcgcccagggcaagaagatgcccagcaagaccagcctgaaggaggatgaggacaagagcggccccatcttcatcgtggtgcccaacgggaaggagcagaggatgaaggatgagaagggcctgaaggtgctgaagtggaacttcaccaccccaagagatgagtacatcgagcagctgaagacccagatgagcagctgtgtggccaagtggctgcaggatgagatgttccacagcgacttccagcaccacaacaaggccctggccgtgatggtggaccacctggagagcgagaaggagggcgtgattggctgcctggacctgatcctgaagtggctgaccctgcgcttctttgacaccaacacctctgtgctgatgaaggccctggagtacctgaagctgctcttcaccctgctgtctgaggaggagtaccacctgacagaaaatgaggccagcagcttcatcccctacctggtggtgaaggtgggggagcccaaggatgtgatcaggaaggatgtgcgggccatcctgaacaggatgtgcctggtgtacccagccagcaagatgttccccttcatcatggagggcaccaagagcaagaacagcaagcagagagcagaatgtctggaggagctgggctgcctggtggagagctatggcatgaatgtgtgccagcccacccctgggaaggccctgaaggagattgctgtgcacatcggggaccgggacaatgctgtgagaaatgctgccctgaacaccatcgtgacagtgtacaacgtgcatggagaccaggtgttcaagctgattggcaacctgtctgagaaggacatgtccatgctggaggagcgcatcaagaggtctgccaagaggcccagcgctgcccccatcaagcaggtggaggagaagccccagagggcccagaacatcagcagcaatgccaacatgctgaggaagggccctgctgaggacatgagcagcaagctgaaccaggcccgctccatgagcggccaccctgaggccgcccagatggtgagaagagagttccagctggacctggatgaaattgaaaatgacaatggaacagtgcgctgtgagatgcctgagctggtgcagcacaagctggatgacatctttgagcctgtgctgatccctgagcccaagatccgggctgtgagcccccactttgatgacatgcacagcaacacagccagcaccatcaacttcatcatcagccaggtggccagcggggacatcaacaccagcatccaggccctgacccagattgatgaggtgctgcggcaggaggacaaggccgaggccatgagcggccacatcgaccagttcctgattgccaccttcatgcagctgcggctcatctacaacacccacatggctgatgagaagctggagaaggatgagatcatcaagctgtacagctgcatcatcggcaacatgatcagcctcttccagatcgagagcctggcccgggaggccagcactggagtgctgaaggacctgatgcacggcctcatcaccctgatgctggacagcagaattgaggacctggaggagggccagcaggtgatccgctctgtgaacctgctggtggtgaaggtgctggagaagagtgaccagaccaacatcctgagcgccctgctggtgctgctgcaggacagcctgctggccacagccagcagccccaagttcagcgagctggtgatgaagtgcctgtggaggatggtgcggctgctgcctgacaccatcaacagcatcaacctggaccgcatcctgctggacatccacatcttcatgaaggtgttccccaaggagaagctgaagcagtgcaagtctgagttccccatccgcaccctgaagaccctgctgcacaccctgtgcaagctgaagggccccaagagctgcatgtgcctgccccagatcctggaccacctgaccatgattgacaacaagaatgaaagtgagctggaggcccacctgtgcaggatgatgaagcacagcatggaccagacaggcagcaagagtgacaaggagacagagaagggggccagcagaattgatgagaagagcagcaaggccaaggtgaatgacttcctggccgagatcttcaagaagattggcagcaaagaaaacaccaaggagggcctggccgagctgtatgagtacaagaagaagtacagtgatgctgacatcgagcccttcctgaagaacagcagccagttcttccagagctatgtggagcggggcctgcgggtcatcgagatggagcgggagggcaagggccgcatcagcaccagcacaggcatcagcccccagatggaggtgacctgtgtgcccacccccaccagcacagtgagcagcatcggcaacaccaatggagaggaggtgggccccagcgtgtacctggagcggctgaagatcctgcggcagagatgtggcctggacaacaccaagcaggatgaccggccccccctgaccagcctgctgagcaagccagctgtgcccaccgtggccagcagcacagacatgctgcacagcaagctgagccagctgcgggagagccgggagcagcaccagcacagcgacctggacagcaaccagacccacagcagcggcaccgtgaccagcagcagcagcacagccaacattgatgacctgaagaagaggctggagcgcatcaagagcagcaggaagtag

SEQ ID NO: 23495 - DNA, 456 bp, Artificial Sequence
  derived and/or modified sequence
atgggagatgattctgagtggctgaagctgcctgtggaccagaagtgtgagcacaagctgtggaaggcccggctgagcggctatgaggaggccctgaagatcttccagaagatcaaggatgagaagagccctgagtggagcaagttcctgggcctcatcaagaagtttgtgacagacagcaatgctgtggtgcagctgaagggcctggaggccgccctggtgtatgtggagaatgcccacgtggccggcaagaccaccggggaggtggtgtctggagtggtgtccaaggtgttcaaccagcccaaggccaaggccaaggagctgggcatcgagatctgcctgatgtacattgaaattgaaaaaggagaggccgtgcaggaggagctgctgaagggcctggacaacaagaaccccaagatcatcgtggcctgcatcgagaccctgaggaaggcctag

SEQ ID NO: 23496 - DNA, 6099 bp, Artificial Sequence
  derived and/or modified sequence
atgggagatgattctgagtggctgaagctgcctgtggaccagaagtgtgagcacaagctgtggaaggcccggctgagcggctatgaggaggccctgaagatcttccagaagatcaaggatgagaagagccctgagtggagcaagttcctgggcctcatcaagaagtttgtgacagacagcaatgctgtggtgcagctgaagggcctggaggccgccctggtgtatgtggagaatgcccacgtggccggcaagaccaccggggaggtggtgtctggagtggtgtccaaggtgttcaaccagcccaaggccaaggccaaggagctgggcatcgagatctgcctgatgtacattgaaattgaaaaaggagaggccgtgcaggaggagctgctgaagggcctggacaacaagaaccccaagatcatcgtggcctgcatcgagaccctgaggaaggccctgtctgaatttggcagcaagatcatcctgctgaagcccatcatcaaggtgctgcccaagctgtttgagagccgggagaaggctgtgagagatgaggccaagctgattgctgtggagatctaccgctggatcagagatgccctgcggccccccctgcagaacatcaacagcgtgcagctgaaggagctggaggaggagtgggtgaagctgcccaccagcgccccccggcccacccgcttcctgcggagccagcaggagctggaggccaagctggagcagcagcagagcgctggaggagatgctgagggcggcggagatgatggagatgaggtgccccagattgatgcctatgagctgctggaggccgtggagatcctgagcaagctgcccaaggacttctatgacaagattgaggccaagaagtggcaggagaggaaggaggccctggagagcgtggaggtgctgatcaagaaccccaagctggaggccggggactatgctgacctggtgaaggccctgaagaaggtggtgggcaaggacaccaacgtgatgctggtggccctggccgccaagtgcctgaccggcctggccgtgggcctgaggaagaagtttggccagtatgccggccacgtggtgcccaccatcctggagaagttcaaggagaagaagccccaggtggtgcaggccctgcaggaggccattgatgccatcttcctgaccaccaccctgcagaacatcagtgaagatgtgctggccgtgatggacaacaagaaccccaccatcaagcagcagaccagcctcttcatcgcccgctccttccgccactgcacagccagcaccctgcccaagagcctgctgaagcccttctgtgccgccctgctgaagcacatcaatgattctgcccctgaggtgagagatgctgcctttgaggccctgggcacagccctgaaggtggtgggggagaaggctgtgaaccccttcctggctgatgtggacaagctgaagctggacaagatcaaggagtgcagcgagaaggtggagctgattcatggcaagaaggccggcctggccgctgacaagaaggagttcaagcccctgcccggccgcacagctgccagcggggctgctggggacaaggacaccaaggacatcagcgcccccaagccaggccccctgaagaaggccccagctgccaaggccggcggcccccccaagaagggcaagccagctgcccctggaggagctggcaacacaggcaccaagaacaagaagggcctggagaccaaggagatcgtggagcctgagctgagcattgaggtgtgtgaggagaaggccagcgctgtgctgccccccacctgcatccagctgctggacagcagcaactggaaggagcggctggcctgcatggaggagttccagaaggctgtggagctgatggacagaacagagatgccctgccaggccctggtgaggatgctggccaagaagccaggctggaaggagaccaacttccaggtgatgcagatgaagctgcacatcgtggccctgattgcccagaagggcaacttcagcaagaccagcgcccaggtggtgctggatggcctggtggacaagattggagatgtgaagtgtggcaacaatgccaaggaggccatgacagccatcgccgaggcctgcatgctgccctggacagctgagcaggtggtgtccatggccttcagccagaagaaccccaagaaccagagcgagaccctgaactggctgagcaatgccatcaaggagtttggcttcagcggcctgaatgtgaaggccttcatcagcaatgtgaagacagccctggccgccaccaacccagctgtgaggacagctgccatcaccctgctgggcgtgatgtacctgtatgtgggccccagcctgaggatgttctttgaagatgagaagccagccctgctgagccagattgatgctgagtttgagaagatgcagggccagagccccccagcccccacccggggcatcagcaagcacagcaccagcggcacagatgaaggagaagatggagatgagccagatgatggcagcaatgatgtggtggacctgctgcccaggacagagatcagtgacaagatcaccagcgagctggtgtccaagattggagacaagaactggaagatcaggaaggagggcctggatgaggtggccggcatcatcaatgatgccaagttcatccagcccaacatcggggagctgcccacagccctgaagggccgcctgaatgacagcaacaagatcctggtgcagcagaccctgaacatcctgcagcagctggccgtggccatgggccccaacatcaagcagcacgtgaagaacctgggcatccccatcatcaccgtgctgggggacagcaagaacaacgtgcgggccgccgccctggccaccgtgaatgcctgggccgagcagacaggcatgaaggagtggctggagggggaggacctgtctgaggagctgaagaaggagaaccccttcctgcggcaggagctgctgggctggctggccgagaagctgcccaccctgcggagcacccccacagacctgatcctgtgtgtgccccacctgtacagctgcctggaggacagaaatggagatgtgaggaagaaggcccaggatgccctgcccttcttcatgatgcacctgggctatgagaagatggccaaggccaccgggaagctgaagcccaccagcaaggaccaggtgctggccatgctggagaaggccaaggtgaacatgcctgccaagccagccccacccaccaaggccaccagcaagcccatgggcggcagcgccccagccaagttccagcctgccagcgccccagctgaggactgcatcagcagcagcacagagcccaagccagaccccaagaaggccaaggcccctggcctgagcagcaaggccaagagcgcccagggcaagaagatgcccagcaagaccagcctgaaggaggatgaggacaagagcggccccatcttcatcgtggtgcccaacgggaaggagcagaggatgaaggatgagaagggcctgaaggtgctgaagtggaacttcaccaccccaagagatgagtacatcgagcagctgaagacccagatgagcagctgtgtggccaagtggctgcaggatgagatgttccacagcgacttccagcaccacaacaaggccctggccgtgatggtggaccacctggagagcgagaaggagggcgtgattggctgcctggacctgatcctgaagtggctgaccctgcgcttctttgacaccaacacctctgtgctgatgaaggccctggagtacctgaagctgctcttcaccctgctgtctgaggaggagtaccacctgacagaaaatgaggccagcagcttcatcccctacctggtggtgaaggtgggggagcccaaggatgtgatcaggaaggatgtgcgggccatcctgaacaggatgtgcctggtgtacccagccagcaagatgttccccttcatcatggagggcaccaagagcaagaacagcaagcagagagcagaatgtctggaggagctgggctgcctggtggagagctatggcatgaatgtgtgccagcccacccctgggaaggccctgaaggagattgctgtgcacatcggggaccgggacaatgctgtgagaaatgctgccctgaacaccatcgtgacagtgtacaacgtgcatggagaccaggtgttcaagctgattggcaacctgtctgagaaggacatgtccatgctggaggagcgcatcaagaggtctgccaagaggcccagcgctgcccccatcaagcaggtggaggagaagccccagagggcccagaacatcagcagcaatgccaacatgctgaggaagggccctgctgaggacatgagcagcaagctgaaccaggcccgctccatgagcggccaccctgaggccgcccagatggtgagaagagagttccagctggacctggatgaaattgaaaatgacaatggaacagtgcgctgtgagatgcctgagctggtgcagcacaagctggatgacatctttgagcctgtgctgatccctgagcccaagatccgggctgtgagcccccactttgatgacatgcacagcaacacagccagcaccatcaacttcatcatcagccaggtggccagcggggacatcaacaccagcatccaggccctgacccagattgatgaggtgctgcggcaggaggacaaggccgaggccatgagcggccacatcgaccagttcctgattgccaccttcatgcagctgcggctcatctacaacacccacatggctgatgagaagctggagaaggatgagatcatcaagctgtacagctgcatcatcggcaacatgatcagcctcttccagatcgagagcctggcccgggaggccagcactggagtgctgaaggacctgatgcacggcctcatcaccctgatgctggacagcagaattgaggacctggaggagggccagcaggtgatccgctctgtgaacctgctggtggtgaaggtgctggagaagagtgaccagaccaacatcctgagcgccctgctggtgctgctgcaggacagcctgctggccacagccagcagccccaagttcagcgagctggtgatgaagtgcctgtggaggatggtgcggctgctgcctgacaccatcaacagcatcaacctggaccgcatcctgctggacatccacatcttcatgaaggtgttccccaaggagaagctgaagcagtgcaagtctgagttccccatccgcaccctgaagaccctgctgcacaccctgtgcaagctgaagggccccaagatcctggaccacctgaccatgattgacaacaagaatgaaagtgagctggaggcccacctgtgcaggatgatgaagcacagcatggaccagacaggcagcaagagtgacaaggagacagagaagggggccagcagaattgatgagaagagcagcaaggccaaggtgaatgacttcctggccgagatcttcaagaagattggcagcaaggagaacaccaaggagggcctggccgagctgtatgagtacaagaagaagtacagtgatgctgacatcgagcccttcctgaagaacagcagccagttcttccagagctatgtggagcggggcctgcgggtgattgagatggagcgggagggcaagggccgcatcagcaccagcacaggcatcagcccccagatggaggtgacctgtgtgcccacccccaccagcacagtgagcagcatcggcaacaccaacggggaggaggtgggccccagcgtgtacctggagcggctgaagatcctgcggcagagatgtggcctggacaacaccaagcaggatgacaggcctcccctgaccagcctgctgagcaagccagctgtgcccaccgtggccagcagcacagacatgctgcacagcaagctgagccagctgcgggagagccgggagcagcaccagcacagcgacctggacagcaaccagacccacagcagcggcaccgtgaccagcagcagcagcacagccaacattgatgacctgaagaagaggctggagcgcatcaagagcagcaggaagtag

SEQ ID NO: 23497 - DNA, 6120 bp, Artificial Sequence
  derived and/or modified sequence
atgggcgacgacagcgagtggctgaagctgcccgtggaccagaagtgtgagcacaaactgtggaaggctcgattatcaggctacgaggaagcactcaagatcttccaaaagatcaaagatgagaaaagccccgaatggtccaaatttctaggtcttatcaaaaagttcgttacggactctaacgctgtggtccagctaaaaggcctggaggccgctcttgtttatgtcgaaaacgcacatgttgcgggaaagacaaccggcgaagtcgtgtccggcgtcgtgagcaaggtattcaaccagcctaaggccaaagccaaagagctagggatcgaaatttgcctcatgtacatcgaaatagagaagggggaggccgtgcaggaagaattgctgaagggcctggacaacaagaatccgaagatcattgttgcatgtatcgaaacactgcgcaaagcgctgagtgaatttggaagtaagattatcctactgaaacccattatcaaagttctgcctaagctctttgagtcccgtgagaaggcagttagagatgaggccaagctcatagccgtggagatatatcgatggatcagggacgctctgcgccccccattgcagaatatcaactctgtccagctgaaggagttggaggaggagtgggtgaaacttcccacaagcgcgccacggcccacacggtttctgagatcgcagcaagagctcgaggctaagttggaacagcagcagagcgcaggaggcgatgcagaggggggaggtgatgatggcgacgaagtgccgcagatcgacgcctacgaactgctggaagctgtagagattctgagcaagctgcccaaggacttctatgataaaattgaggccaagaaatggcaggagcggaaagaagccttagagtctgtggaagtgctgataaagaaccccaagcttgaagccggcgattatgctgatctggttaaggccttgaaaaaggttgtgggtaaagacaccaatgtgatgctggtggcattggctgctaagtgcctgacagggcttgcagtgggactacggaagaagttcgggcaatacgccgggcacgttgtccccactatcctggagaagttcaaagaaaaaaagccccaggttgtacaggccctccaagaggcgattgacgcaatcttcctgaccacaacattgcagaacattagcgaggatgtcctggccgtgatggataacaagaatcctaccatcaagcagcagacctcactgttcatcgctcgcagcttccggcactgcactgcttccaccctgcctaagtctcttctgaaacctttttgcgctgctcttctgaaacatattaatgactcagcccctgaagttcgggacgcagcctttgaggctttaggcaccgcgctgaaagtggtaggtgagaaggcagtgaatccttttctagcagacgtggataaactgaagcttgataaaattaaagagtgctcggaaaaagtggagttaatccacggaaaaaaggctggtctcgcggcagataagaaggaatttaaaccactccctggaaggactgccgcaagcggtgccgccggcgacaaggacaccaaagacatatcagccccaaagccaggccccctgaagaaagcgcccgcagccaaagccggtggtcctcctaaaaagggaaaaccagcagctcctggaggtgccgggaatactggcaccaaaaacaagaaagggttggagacaaaggagattgtagaacccgaattgagcatagaagtctgcgaagagaaagcttccgccgtactgcctccaacatgcatccagctactggattcgagcaactggaaagagcgtctcgcatgtatggaggaattccagaaagctgtagagctgatggatagaaccgagatgccctgtcaggccctggtcagaatgttggcgaaaaagcctgggtggaaggagactaactttcaggtgatgcagatgaagctgcacattgtggctttaattgctcagaaaggaaacttcagtaagacatcggctcaggtcgtgctggatggactggtagataaaattggagatgtgaaatgcggaaataacgccaaggaggcaatgaccgccattgccgaggcctgcatgctgccatggactgccgagcaggtagtctcgatggcattttctcaaaaaaatcctaagaatcagtcggagacgctcaattggctgagcaatgcaatcaaggagtttggcttcagcggactgaacgtgaaagcctttatctccaatgttaagaccgccttggcagccaccaaccccgccgtacggaccgctgccattaccctgttgggagtaatgtatctatacgtagggccgtctctgcggatgtttttcgaggatgagaagccagcacttttgagccagattgatgctgagttcgaaaagatgcagggccagagccctccagcacccacgagggggatttcaaagcattctacatcagggacagacgagggggaggatggcgacgagcccgacgacggctccaacgatgtggtggacctcctgccacggaccgagatcagcgacaaaataacaagtgaattggtgtctaaaatcggcgacaagaattggaaaatcaggaaggagggactggacgaggtggctgggatcataaacgatgccaaatttattcagccaaacattggagaacttcctactgcacttaagggtagattaaatgattcaaacaaaatcctcgtgcagcaaacccttaatatcttacagcagttagcagttgctatgggccccaacatcaaacagcacgtcaagaatctcggaatcccgatcatcacggtgctgggggattctaagaataatgtgcgtgccgcggcactggccaccgtcaacgcttgggctgagcaaactggtatgaaagagtggttagagggcgaagatctgtccgaagagcttaaaaaggagaatcctttcctcagacaggaattacttggatggctggccgaaaaactgcctacgttacgatccacccccacggatctgatcctctgtgtgccacatctctactcctgcctcgaggatcgcaacggagacgtgagaaagaaggcccaggatgcactacctttctttatgatgcatctggggtacgaaaagatggcgaaagctactggcaaactcaagccgacctccaaagaccaggttttggctatgttggagaaagccaaagtaaatatgccagccaaaccagcccctcctacaaaggctaccagcaagcctatgggcggcagtgcgcctgccaagttccagccagcatcggccccggctgaagactgtatatccagctccacagaaccaaagcccgatccgaaaaaagccaaggcacctggattatctagcaaggccaaatctgcccagggcaaaaaaatgccttcaaagacttcccttaaggaggatgaagataaaagtgggcctatctttatcgtggtgcccaacgggaaggaacaaagaatgaaagatgaaaaaggtctcaaagtgttgaaatggaacttcacaaccccacgcgacgagtacatagaacagctgaagacccagatgtcttcctgcgttgctaagtggctccaggacgagatgttccactcagattttcagcatcacaataaagcactcgccgtcatggtagaccatctggaatcagagaaggagggcgtaatcggatgtttagatctgattctcaaatggcttaccttgaggttttttgacacaaatacctctgtgctgatgaaggcgctcgaatacctgaagctgctgttcaccctgctgagcgaggaagaatatcacttaactgaaaacgaagccagttccttcatcccctacctcgtggtgaaggtcggtgaacccaaggatgtcatcaggaaagacgttcgcgccattctaaatcgcatgtgtcttgtgtatcccgcgtccaagatgtttccatttataatggaggggaccaagtcgaagaactctaagcagagagctgaatgtctcgaggagttgggctgtttagtggaaagttacggaatgaacgtctgccagcccacaccgggcaaggccttaaaagaaatagccgttcacattggagatagagataacgctgtacgcaacgcagccctcaataccatcgtaacggtgtacaacgtgcatggtgatcaggtgtttaagttgataggcaacctgagcgagaaagatatgagtatgctcgaggaacggatcaaacgcagtgccaagcgcccttcagcagctcctattaagcaagttgaagaaaagccccagcgcgcccagaatatttctagtaacgccaatatgctgcgcaagggtcctgcagaagacatgagctccaagctcaaccaggctcgcagcatgagcgggcatccggaggcagcacagatggtgaggcgggagttccaactcgacctggacgagatcgagaacgataatggtaccgtgcgctgcgagatgcctgagctcgtgcaacacaagttggacgacatcttcgaacccgtgctcatccccgagccaaaaataagggcagtgtctccgcactttgatgacatgcattctaacaccgcgagcacgatcaacttcataatcagtcaggtggcctccggcgacatcaacacttccatacaggctctaacgcagattgacgaggtactgaggcaagaggataaggcagaagccatgtccgggcacatcgatcaatttttaattgccactttcatgcagctgagactgatttacaatacgcatatggctgatgagaaactcgaaaaagacgagattatcaaattatatagttgtattatcggtaacatgatttctctgtttcaaatcgaatcacttgcaagggaggcttccaccggagttttgaaggacctgatgcatggcctcataacactcatgttagactccaggatcgaggacttagaagagggacaacaggtgattcgctctgtgaacctcttggtagtgaaggtcttagaaaagtccgaccaaactaatatcttaagtgccctcctggtgctgttacaagactctctcctcgccactgcatctagccccaagttctccgagctggtgatgaaatgcctgtggcgtatggtcagactgctccctgacacaattaatagcatcaacctggatagaatcttgctggacattcacatcttcatgaaagtcttccctaaagagaaattgaaacagtgcaagtcagagttccctatcaggacactgaagaccctattacacaccctgtgcaagctgaaaggtccaaaatcctgtatgtgcttgccccagatattagaccaccttactatgatcgataataaaaatgaatctgagctagaggcacacctgtgtagaatgatgaagcatagcatggaccagactggaagcaagtctgacaaagaaacagaaaagggagccagcaggattgatgagaagagttctaaagccaaggttaatgacttccttgctgagattttcaaaaaaatcggctcgaaagaaaacaccaaagaagggctggcagagttgtatgagtacaaaaaaaagtacagcgatgccgatattgagccattcttgaagaatagttcccagttctttcagtcctatgtcgaacgtggattgagggtaattgaaatggagcgagagggcaagggtcgaatctctacatcaacaggcatctccccccagatggaggtcacttgcgtgccaacgccaacaagcactgtttccagtattgggaatacgaacggcgaggaagtggggccgagcgtctatctggagcggttgaaaattctgaggcagcgctgtggactggacaacacaaaacaggatgaccggccacctttaacgtctttgttatctaagccggccgttcctacagtagcaagctctacagatatgctgcattccaaactgtcccaactgagagagagccgcgaacagcatcaacacagtgacctggacagcaaccaaacgcatagtagcggaacagttacttcctccagctcgaccgctaacattgacgacctcaaaaagaggctggaacgcatcaagtcttctcgcaagtag

SEQ ID NO: 23498 - DNA, 456 bp, Artificial Sequence
  derived and/or modified sequence
atgggcgacgacagcgagtggctgaagctgcccgtggaccagaagtgtgagcataagctatggaaggcacgactttccgggtacgaagaagctcttaaaatctttcagaagatcaaggacgagaaatcccccgagtggagcaagttcttgggactcatcaaaaaattcgttaccgattcaaatgccgtggtgcaattgaagggcctagaagccgccctcgtatatgtggagaatgctcacgtcgcaggtaagacaaccggcgaggtcgtatccggcgtggtgagcaaggtgttcaatcaacctaaagccaaggctaaggaattagggatcgagatctgtctgatgtacattgagatcgagaagggagaggctgtccaagaagagctgctcaagggactggacaacaagaaccccaaaattattgttgcttgcatagaaactctgcgcaaggcatag

SEQ ID NO: 23499 - DNA, 6099 bp, Artificial Sequence
  derived and/or modified sequence
atgggcgacgacagcgagtggctgaagctgcccgtggaccagaagtgcgagcataaactgtggaaggctcgtcttagtggctacgaggaggcgctgaagatcttccagaaaatcaaagacgagaagtctcctgaatggtccaaattcttgggtctgattaagaagttcgtcaccgattccaacgcagtggtgcagttgaaaggcttggaggctgccttagtgtatgtcgagaacgctcatgttgccggaaagacaacaggcgaagtagtgtctggggtcgtgagcaaagtgtttaaccaaccaaaggccaaagcgaaggaactgggcatagagatctgcttgatgtacatcgagattgagaagggtgaagctgtgcaggaagagcttctcaaaggattggataataaaaaccctaaaattattgtcgcttgtattgaaacactgcgaaaagctctgtctgaattcggcagtaaaatcatcttattaaagcccatcatcaaagtgctgcctaagttatttgagtctagggaaaaggccgtcagagacgaagctaagctgatcgctgtggagatttaccggtggattcgggatgccctccgcccccccctgcagaacatcaattcagtgcagctgaaagagctcgaggaggagtgggtgaagctaccaacttcagcacctcgaccaacgcgctttctccggtcccagcaggagctggaggctaagctggagcagcaacagtcagcggggggggacgccgaaggcggaggtgatgatggggatgaggtcccgcagatcgacgcatatgagcttttagaagcagttgaaatcctctccaaacttccaaaggacttctacgataaaattgaggcaaaaaagtggcaggaacgtaaagaagccctggaatccgtggaggtgctcattaaaaatcctaagctggaggccggggattatgctgacctcgtaaaggccctgaaaaaggtagtgggtaaggatacaaatgtgatgctggttgccctcgccgctaagtgccttactggactggcagttgggctacggaaaaaatttggacaatacgccggccatgtagttcccactattttggagaagtttaaggaaaagaaaccccaggtggttcaggccctccaggaggccattgacgctatttttctcaccactacacttcaaaatatatccgaagatgtcctggcagtcatggacaacaaaaatccaaccatcaagcagcagaccagtttgtttattgctcggagttttcgccattgcactgcaagtaccctgccaaagagtctcctgaagccattctgcgcagccttactcaagcatataaacgactcagccccggaggtcagagacgctgcctttgaggctttgggcacagcgctgaaagtcgtcggcgagaaggctgttaaccccttcctggctgatgtggataagctgaaacttgacaagattaaagagtgctccgagaaggtggaattaattcatggtaagaaggctggtctagcggcggataagaaggagttcaagcccctgccaggccggactgccgcaagcggtgcagcaggagataaagacacgaaggacatttccgcccctaagcctggtccgctgaaaaaagcacccgctgccaaggcaggggggcctcctaaaaaaggaaaaccagccgccccggggggggctggcaataccggcacaaaaaacaagaagggcctcgagaccaaggagatcgtggagcccgaattgagcatcgaagtctgcgaggagaaagcttccgcagtcttgccaccaacttgtatccagttattagatagttcaaattggaaggagagacttgcgtgtatggaggaattccagaaggccgttgaactgatggatagaacagagatgccatgccaggcacttgtgcggatgctggccaaaaagcccggctggaaggagacgaattttcaggtgatgcaaatgaaattgcacatcgtcgcccttatcgcacagaagggaaacttttcaaaaactagcgcccaggtcgttttggacggtctggtcgataagataggagacgtgaagtgcggcaataacgctaaagaggcgatgactgctattgctgaggcttgtatgttgccgtggacagcagagcaggtggtctcaatggccttttcacagaaaaacccgaagaaccagagtgaaaccctgaactggctgtctaacgccatcaaagagttcggcttttctggcctgaatgtcaaagcatttataagcaacgtgaaaacagcacttgctgccacgaaccccgctgtccggacagccgcgatcactctcctgggtgtcatgtacctctatgtgggacccagcctccgcatgtttttcgaagacgagaaaccagcacttctatctcagatagatgcagaattcgaaaaaatgcagggacagtcccccccagcaccaacccgtggcatctctaagcattctacctccggcacagacgaaggggaagacggggacgagccagacgatggtagcaatgatgtggttgacctgctccctaggaccgagatctcagataaaattaccagtgaactcgtatcaaaaattggagataaaaactggaagattcggaaggagggattagacgaggtagcgggaattataaacgacgccaagttcatacagcccaacattggcgaactgcccacagccctgaagggccgcctcaacgatagcaataagattcttgtgcagcaaacattgaatatcctccaacagctggcagtggctatgggtcctaatatcaaacagcatgtgaaaaatctcggtatcccaatcatcactgtgctgggtgattcgaagaacaatgtccgagccgctgccctggccaccgtcaacgcctgggctgagcagaccggtatgaaggaatggctcgagggggaggatcttagcgaggagcttaaaaaggagaatcctttcctgaggcaggagctcttaggctggctggccgaaaaattacccacgctgcgcagcacccccactgacctcattctgtgtgttccgcacctttactcctgtttagaggatcggaatggagacgtccgtaagaaagcccaggatgccttgcccttcttcatgatgcaccttggttacgagaagatggctaaggcaacagggaagttaaaaccgacttcaaaagaccaggtgttggctatgttggaaaaagcaaaggtaaacatgccggccaaaccagccccgcctacgaaagctacgagcaagcctatgggaggaagcgcacctgcaaaattccaacctgcatctgccccggctgaggactgtatctctagttccacagagccaaaaccagaccctaagaaagccaaagcaccgggactctccagtaaagcaaaaagtgctcaggggaagaaaatgccaagcaaaacctcattgaaagaagatgaggacaagtccgggccaatctttattgttgtcccaaatggcaaagagcagcgtatgaaggatgagaagggtttgaaagttttaaagtggaacttcacaactccccgggatgagtacattgagcagctgaagacccagatgagctcctgcgtggccaagtggctgcaggacgagatgtttcactctgacttccagcaccataataaggccttggctgttatggtggatcatctggagagcgagaaagaaggagtgataggctgcctcgacctaatcctgaagtggcttaccttacgcttctttgacacaaacaccagcgttctgatgaaggcattggagtatctcaaactcctgttcaccttgttgagcgaagaagaatatcacctgactgaaaatgaagcgtcctcttttataccttatctggtcgtcaaggtaggggagcctaaagatgtcattaggaaggatgttagagccatcctaaatcgtatgtgcctggtatacccagcttccaagatgtttccattcatcatggagggaaccaagagcaaaaatagtaagcagcgggccgaatgtttagaggaattggggtgccttgtggaaagctacggtatgaacgtgtgtcagccaactcccgggaaggctttgaaagaaatcgctgttcacattggtgatcgcgacaacgccgtgcgtaatgccgccctgaacaccattgtgaccgtgtacaatgtccacggtgaccaggtgttcaagcttatagggaatctgagtgaaaaagatatgtccatgctagaggaaaggattaagcggagcgctaagcggcccagcgcagcccccatcaaacaagtggaagaaaagccccaaagggcgcagaatatttcttcgaatgcaaacatgctgcgcaaaggaccagcagaagatatgtctagcaaacttaaccaggctcgttcgatgagcggacaccccgaggctgcacagatggtgagaagggaattccagttagatctcgacgaaatcgagaacgacaacgggaccgtgaggtgtgaaatgcctgagctcgtgcagcataagttggatgacatcttcgaaccagtgctaatacccgagccgaagattcgcgctgtctctccgcatttcgatgacatgcatagcaacaccgcaagcaccattaatttcataatttcacaggttgcctctggagacatcaatacatccatacaagctcttactcaaattgatgaggtcctccgtcaggaggataaggcagaagccatgagcggccacatcgatcagttccttatagcaacatttatgcaattgcggctcatctataatactcatatggcagacgaaaaactggaaaaggatgagatcatcaagctgtacagctgcataatcggcaatatgataagcctattccaaatcgagagcttagcgagggaggcatcaaccggtgttctaaaggacctcatgcatggtctgattactttgatgctggatagcaggattgaggacctggaagaagggcaacaggtgatccgtagcgttaacttgctagtcgtgaaggttctggagaaaagcgatcagacgaacattctatcagctttgttggtactactgcaggattctctgttggcgactgccagtagccctaagttttcagaactggtaatgaagtgcctatggagaatggtccgcctgctcccagacaccattaattcaataaacttggatcgaatcttgcttgatatccatatctttatgaaggtttttccaaaggagaagctcaagcaatgtaaatccgaatttcctattcggacactgaaaactcttctgcataccctctgcaaattgaagggtccaaaaatactggaccacttaacaatgatcgataacaagaacgaaagtgaactggaagcacacctctgtagaatgatgaaacactcaatggatcagaccggttctaagtcagacaaagagactgaaaaaggtgcatctaggatcgatgaaaagagctctaaggctaaagtgaatgacttcctggccgagattttcaaaaaaatcggatctaaggaaaacactaaagaaggattggcagagttgtacgaatacaagaaaaaatactctgacgcggacattgaaccctttctcaagaattcctcacagtttttccaatcctacgtggaaagaggcttgcgtgttatcgaaatggaacgggaaggaaaaggccgaatctcaacaagtacaggcattagcccacagatggaggtgacttgcgttccaacaccgacgtcaaccgtttcttcgatcggaaatacaaatggagaggaagtgggtcctagtgtgtacttggaacggttaaaaatcctgagacaaagatgcgggcttgacaacaccaaacaggacgatcgcccacccctcacgtccctgctctcgaaacccgctgtgccaactgtcgcctctagtaccgacatgctgcacagtaagctgagtcagctccgggaaagcagggagcagcaccagcactctgacttggattctaaccagacgcactcctctgggacagtgacatccagcagttcaacggctaacattgacgacctcaagaaacgcctggaacggattaagtctagccgcaagtag

SEQ ID NO: 23500 - DNA, 6119 bp, Artificial Sequence
  derived and/or modified sequence
atgggcgacgacagcgagtggctcaagctcccggttgatcagaagtgtgagcacaaactgtggaaggctcgcctcagtggctacgaggaggctctgaagatctttcagaaaattaaagatgaaaagtctcctgagtggagcaaattccttggcctcattaagaaattcgtgaccgatagtaatgccgtcgtgcagctcaagggcctagaagcagcattagtctacgtagaaaatgctcacgtggctggaaagacaactggcgaggtcgtgtctggtgttgtatcaaaggtgttcaaccaacccaaagcaaaagcaaaggaattaggcattgaaatctgcctgatgtacatcgaaatcgaaaaaggcgaagctgtgcaggaggagctcttgaagggactggacaataagaatcctaagattattgtggcttgtatcgaaaccctccgcaaagcactgagcgaatttggttctaagataattttgctgaagccaatcataaaagtgctgcccaagctgttcgaatcccgggagaaggccgtgcgggacgaagccaagctcattgctgtagagatctataggtggatacgcgacgcactcaggcctccgctccagaatatcaatagcgttcagctaaaggaactcgaagaagagtgggtcaaactccctacatctgcaccgagaccaacgcgattccttcgtagccagcaggagctggaagctaagcttgagcagcagcaatccgcaggcggtgatgccgaagggggaggtgatgacggggatgaagtacctcaaatagacgcatacgagctgcttgaggccgtggaaatcctctccaagctgccaaaagatttttacgataaaattgaagcaaaaaagtggcaagagcgcaaagaggctttagagtccgttgaggttctaattaagaatcccaaattagaagcgggtgattacgcggatctggttaaagctctgaagaaggtggtaggaaaggacaccaacgtaatgctggtggcactggctgctaaatgtctgacaggccttgctgttggccttcgcaagaagtttggccagtacgccggacatgtcgtgcccaccatcctcgaaaagttcaaagaaaaaaaacctcaggtagtacaggccttgcaggaggccatagacgcaattttcctgaccaccactcttcagaacatatctgaggatgtgctcgcagtgatggataacaagaatcccacgatcaagcaacagaccagtttatttattgctcggagttttaggcactgcaccgcaagcacactgcccaagtctctcctaaaacctttctgcgcagcactacttaagcatattaacgattccgcccctgaggtgcgcgatgctgctttcgaagcactgggaaccgccctgaaagtggtaggggaaaaggctgtcaacccattccttgcagatgttgacaagctgaagctggataagatcaaagagtgttctgaaaaggttgaactcatccacggtaaaaaggcagggttagcagcagataaaaaggagttcaaaccactgcccggtaggacagccgcatcaggggcagcaggtgataaagacacaaaggacatctctgccccaaagccaggccctcttaagaaggcccctgctgcgaaggcaggcggacccccaaagaaaggaaagcctgccgctcccggaggcgctgggaacactggaacaaagaataaaaagggactggaaaccaaagagatagtcgaaccagaattatcaatagaagtctgtgaggagaaagcgtcagccgttcttccgcctacatgcattcagctcctggacagcagtaattggaaggagaggctcgcatgcatggaagaattccaaaaggcagtggaactgatggacaggaccgaaatgccttgccaggccttggtgcgaatgctggctaagaaacctggatggaaagaaaccaatttccaggtcatgcagatgaagcttcatatagtcgcactgatagcacaaaagggtaattttagcaagacatctgctcaagtggtccttgacgggttggttgacaagattggcgacgtgaagtgtgggaataatgcaaaagaagctatgacagcaattgccgaggcctgtatgcttccctggaccgctgagcaagtcgtgagtatggctttctctcaaaagaaccccaagaatcagagcgaaacattaaattggctatctaacgcaatcaaggaatttggcttctccggactcaatgttaaagctttcataagcaatgtcaagaccgctctggcagccacaaatccagccgtgaggactgccgctatcacactgctgggcgtgatgtatttgtacgttggaccgagcttgagaatgtttttcgaagacgagaaaccggcactcctgagccagatagatgcggaatttgagaagatgcaagggcaatcccctcccgcacctaccaggggtatctccaagcatagcacatctggaactgacgaaggggaggatggcgatgagccagacgacggcagtaacgacgtggtggacctgctcccacgaaccgagattagcgataagatcacctcggagctggtgtcaaaaattggggataaaaactggaaaattcggaaagaagggctggacgaggtcgctggaattattaatgacgcaaagttcatccagcctaatatcggcgagctgccaaccgctctgaaaggcaggctgaatgactccaacaaaatcctggtccagcagacgcttaatatcctccaacagctggcagtggctatgggcccaaatattaagcagcatgtgaagaacctcggaattccaatcattacggtgctgggcgattcaaagaacaacgttcgtgccgcagccctcgcaactgtgaatgcttgggctgaacagacgggaatgaaggaatggctcgagggggaggatttatccgaggagctgaagaaggaaaatccatttctccgacaggagctccttggatggctggctgaaaaacttcccaccctgcgctcgacgcccaccgacctcatcctctgtgttcctcacctttatagctgtctggaggatcgcaatggagacgtaaggaagaaggcccaggacgcattgccctttttcatgatgcacttgggctacgagaagatggctaaagccactggaaaactcaaacccacaagtaaggatcaggtgttggccatgctggagaaagccaaagtgaatatgccagccaaacctgcccctccaaccaaggcaacgagtaagcctatgggtgggagcgctcccgcaaaattccagcccgcttccgctcccgcagaggactgtattagttcctcgacagagccaaaacccgatccgaaaaaggccaaagctcctggcctgtcctctaaggccaagtccgcccaaggaaagaaaatgcccagtaagacttccctgaaagaggatgaagacaaaagcgggcctatattcatcgttgtcccgaacggaaaagagcaacgcatgaaagacgagaagggattgaaggtcttgaaatggaacttcaccacaccgagagatgagtacatcgaacagctgaagacccagatgagttcttgtgtggctaaatggctgcaggatgagatgtttcacagcgatttccaacaccacaacaaggctctggccgtcatggttgatcatttggagagtgagaaggagggggtcatcggttgtttggatctgatcctgaaatggcttacgcttaggttttttgacacaaacacaagcgtactgatgaaggccttggaatatctcaagctcttgtttaccctactcagcgaggaggaatatcacctgacagaaaatgaggcatcatcattcatcccttacctggtcgtaaaagtgggggaacccaaagatgttattaggaaggacgtgagagctattctgaaccgcatgtgcttagtgtatcccgcaagcaagatgttcccatttataatggagggtaccaaaagcaagaactccaaacagcgagccgagtgccttgaagaacttggctgtctggtggaatcgtacggcatgaatgtatgtcaacctaccccaggcaaagccctgaaagaaatcgccgttcacatcggggatcgtgacaatgcagttcgcaacgctgctctgaacacgatcgtcactgtatacaatgttcacggagatcaggtgttcaagctgataggaaacttgtccgaaaaagatatgtctatgctcgaggaacgtattaagaggtcggctaaacggccaagtgctgcccctatcaagcaggtggaagaaaaaccccagagggcccagaatatctcttctaacgctaatatgctgaggaagggcccagcggaagatatgagtagtaaattgaaccaggccagatcaatgagcggccaccctgaagctgcgcagatggtgcgacgagagttccaactggacctggatgaaattgagaatgacaacggcactgtcaggtgtgagatgcccgagttagtgcaacataaattggatgatatcttcgaaccggtgctaattccagaacccaagatacgtgcagttagcccccactttgacgatatgcattcaaatacagcatctaccattaatttcatcatcagtcaggttgctagtggagacataaacacaagcatacaggctctgacccagatcgatgaagtccttaggcaagaggataaagccgaggcaatgtctggccatatcgatcagttcctgatcgctacttttatgcaactacggctgatatataacacacacatggctgacgagaagctggaaaaggacgagataattaagttgtactcttgtatcataggcaatatgatatcattgtttcagattgaaagtttggccagggaagcatctactggagtgctcaaagatctcatgcacggcctcattaccctgatgctggactctcgaatagaagacctggaggaggggcagcaggtcatccggtcggttaaccttctcgtagtgaaagtactggaaaaaagcgatcagacaaacattcttagtgccttacttgttctcctgcaggactcccttctggctacggcttcaagccccaaattctcagaattggtcatgaagtgcctgtggaggatggtacgcttgctgcctgatactattaattccatcaacctagatagaattcttctggatattcatatcttcatgaaagtgttccctaaggaaaagctcaaacaatgtaagtctgagtttcccattcgtacgctgaaaactcttctacataccctgtgtaaactgaagggtcctaaaagttgcatgtgtcttccacagatcctggaccatctcacgatgatcgacaacaagaatgaaagtgaactggaagcccacctatgtaggatgatgaaacatagcatggaccaaaccggaagcaagtcagacaaagagacagaaaagggagcgtctcggattgatgagaagagttcaaaggctaaggtaaacgacttcctggccgagatatttaaaaaaatcggctctaaagaaaacaccaaggaggggctggcagaactgtatgagtataagaagaagtactccgatgctgatatcgagcccttcctgaaaaattcttcacagttcttccagtcttatgtcgaaaggggactgcgcgtaattgaaatggaacgggagggtaaaggccgaatatctacatctaccgggataagccctcagatggaggtcacctgcgtacccaccccaactagtacagtgagttctatcgggaacaccaacggggaagaagtaggaccgtcagtctatttggagcgtctgaagattttgagacagcgatgtggcctggacaatacaaagcaggatgataggccccctttgacatcattgctgagcaagcccgcagtgcctacggttgcctcatcaacagatatgcttcactccaagctatctcagctcagagagtccagagaacaacatcagcacagtgatttggactcgaatcagacacactctagcggtaccgtgacatcaagtagctcaaccgcgaacatcgatgatctgaagaaaagactggagaggatcaaaagttcccgcaaata

SEQ ID NO: 23501 - DNA, 456 bp, Artificial Sequence
  derived and/or modified sequence
atgggcgatgatagcgagtggctgaaattgccagttgatcaaaagtgcgagcacaagctgtggaaagcgagactgtccgggtacgaagaggccctgaaaattttccaaaagatcaaggacgagaagtcccccgaatggtccaagttcctggggctcataaaaaaattcgtcaccgattcaaatgccgtggtccaactgaagggacttgaggcagccttagtttatgtggagaacgcccatgttgccggaaagaccacaggcgaagtggtctcaggcgtcgttagcaaggtgttcaaccagcctaaagccaaagctaaagaactcggcattgaaatatgcttaatgtatattgagattgaaaaaggtgaagctgtgcaggaagagctgctcaagggcctcgacaacaagaatcctaaaatcatcgtcgcttgcatcgagacactccgcaaggcctag

SEQ ID NO: 23502 - DNA, 6098 bp, Artificial Sequence
  derived and/or modified sequence
atgggcgatgatagcgagtggctgaaactgccggtcgatcagaaatgtgaacataagctgtggaaggcacgcctctccggctacgaggaggcattgaagatcttccagaaaattaaggacgaaaagagccccgagtggtctaaattcctgggcctgattaagaagtttgtgacagactcgaatgcagttgttcagttaaagggcttggaggcagctctggtctatgtcgagaacgctcacgtggcgggaaagaccacaggggaagttgttagcggcgtcgtgtccaaagtgtttaaccagccaaaggcaaaggcgaaggaacttggaatcgagatctgcctgatgtatattgagattgagaagggtgaagccgtgcaagaagaacttctgaaagggctcgataataagaaccccaagattattgtcgcatgcattgagaccctccgcaaagctttgagcgagttcggctcaaaaatcatcctattgaagcccatcatcaaggttctgccaaagctgttcgaaagtagagagaaggcggtccgtgacgaggcaaaactgatagcagtcgaaatttaccggtggatccgggatgcactcagacctcccctccaaaatattaatagtgtgcagctgaaggagctagaagaggaatgggtcaagttgcctaccagcgctccgcgacccacaagatttttgcgtagccagcaggagcttgaagcaaagctggagcagcaacagtcagctgggggagatgctgaaggcggtggcgatgatggcgatgaggttccacagatagacgcgtacgaactgttggaagcagtagagattctcagcaagctgccaaaggacttttatgataagatcgaagccaaaaaatggcaagagcggaaagaggctctggagtcggtggaggtgcttattaaaaacccaaagctcgaggctggtgactatgccgacttagtgaaggcgctgaaaaaggtcgttggtaaagacactaacgtcatgcttgtggcactggctgcaaagtgtttgactgggctcgctgtggggctgaggaagaagttcggacagtacgccggtcatgtagtgcccactattcttgaaaagttcaaagagaaaaagcctcaggtggttcaggccttacaggaagctatcgatgctatcttcctgaccacgacactccagaatatcagtgaggatgtcttggccgtaatggataataagaaccctaccatcaagcagcagacatccttgttcatcgccaggagctttcggcattgcacagcctcgacactgccaaaatctcttttgaaacctttctgtgctgcgctactcaagcacatcaatgacagcgccccagaggtcagggatgctgcattcgaagccctgggtactgccctcaaggtggtcggggaaaaagccgtcaacccctttcttgctgatgtggataagttgaaactggataaaatcaaagaatgctctgaaaaagtggagcttattcacggtaagaaagccggactggccgcagacaaaaaagagtttaaacctctgccaggacggacagcggcaagcggtgcagcaggtgacaaggacactaaggacatctctgcccctaaacccggtcccctgaagaaggcccctgcagccaaggcaggagggcctcctaaaaaaggcaaaccggctgccccaggcggagcgggaaatactgggactaaaaataagaagggattggagacaaaagagatcgtggaaccagagttgagcatcgaggtatgtgaagaaaaagcttccgctgtgctgcctcccacctgcatacagctgctggactcctccaactggaaggaaagactggcttgtatggaggaattccagaaagcagtcgagcttatggacaggacggagatgccttgccaggccctggttagaatgctggcaaagaagcctggctggaaggaaacaaatttccaagtaatgcaaatgaagctgcatattgtcgccctgatagctcagaaaggcaacttttcaaaaacctccgcccaggtcgtcttagacggcctcgtagacaagatcggggatgttaaatgcggtaataacgccaaggaagcaatgacggcaattgctgaagcctgcatgctcccctggaccgccgaacaggttgtgtcaatggctttttcacaaaaaaatcctaaaaaccaaagcgagaccctgaattggctgtcaaacgccattaaagagttcgggttcagcggtctcaatgtgaaggccttcatcagcaatgtgaaaaccgccctggccgcaacaaacccagccgtgagaaccgcagcaataaccctcttgggcgtgatgtacctctatgtggggcctagcctccggatgtttttcgaggacgaaaagcccgcactcctcagccaaattgacgccgagttcgagaaaatgcagggacagtcccctcccgcaccaactcggggtatctcaaaacattccacctcaggaactgacgagggagaggacggtgacgaaccggatgacggttctaacgacgtagttgacttgctgcctagaactgaaattagtgataagattacatctgagcttgtgtccaaaattggtgataaaaattggaagattagaaaggagggcctagacgaagtggccggaataatcaatgatgccaagtttattcagcccaacatcggggagttgccgaccgccttaaaaggtcggctgaatgactctaataaaatcctggtgcagcaaacccttaacattctgcagcagcttgccgtggcaatggggcctaacattaaacaacacgtgaaaaatctcggtatcccgattatcaccgtgttgggcgattccaaaaataacgtccgcgctgcagcacttgccactgttaacgcgtgggccgagcagaccggaatgaaggaatggcttgaaggtgaggatctgagcgaagagctgaagaaagagaatccctttctgaggcaggaactcctgggttggctggcagaaaagttacctaccctccgatcgaccccgacagatttgatcttatgtgtccctcacttatactcatgtcttgaggacagaaacggcgatgtccggaaaaaggcacaagacgccctacctttctttatgatgcaccttggatacgagaagatggctaaggctacaggtaaacttaaacccacctcaaaggaccaagttctagccatgctggaaaaggcgaaagtgaatatgcccgctaagccagctcctcccactaaggccacgtccaagcccatgggcggatctgcaccagccaaatttcagccagcatccgccccagccgaagattgcatttcttctagtacagagccgaagccagatccgaagaaagcgaaggcaccaggactgtccagtaaggccaaatccgcccagggaaaaaaaatgccctctaaaacgtctctgaaggaagatgaggataaaagcggcccaatcttcatcgtggtaccaaacggaaaagagcagcgcatgaaagacgagaagggtctcaaggtactgaagtggaattttactaccccgcgtgatgagtatatcgagcaacttaagacacagatgagtagctgcgtcgccaaatggctgcaggacgagatgtttcattccgattttcagcaccacaacaaagccctagcagtgatggtcgaccaccttgagtccgaaaaagaaggcgtcattggctgtctagacctgattttgaagtggttaactctccgtttctttgatactaacacaagcgttctgatgaaggccttagaatacctgaagctcctgttcactttactctcagaggaagaataccaccttaccgagaacgaagcttcatccttcatcccatacctcgtcgtgaaagttggcgaacctaaggatgtgattagaaaagatgtgcgagcaattctgaatcgaatgtgcctggtttatcctgcctctaaaatgttccccttcatcatggagggtaccaaatctaagaattctaaacaaagagcagaatgtctagaagagctggggtgtctggtggaatcttatggtatgaacgtctgccagcccacacccggtaaggctttaaaggaaatcgccgtccacatcggcgatagagacaatgcagtcaggaatgccgctcttaataccattgtgaccgtgtataatgtccatggagaccaggtttttaagttaattgggaatctctccgaaaaagacatgagcatgctggaagaacgcatcaagcgatccgcaaagaggcctagcgccgctccaattaaacaagtagaagaaaagcctcaacgcgctcaaaacatctccagcaacgccaatatgttgcgcaagggtcccgcagaggatatgtcaagtaagctgaaccaggccaggtcaatgagcgggcaccccgaagcggcacagatggttaggcgcgagttccagcttgacctggatgaaatcgaaaatgataatggaacagtgagatgcgagatgcccgaactggtgcagcacaaattggatgatatctttgagccagtgttgataccggaaccgaaaatcagagccgtgagccctcactttgatgatatgcattccaacactgccagcacgatcaactttatcatatctcaagtggcctccggagacatcaatacatctattcaggccctgacccagatagacgaggtgttgaggcaggaggataaggctgaagccatgagcggtcacatagatcagtttctgattgccacctttatgcaactgaggttaatctacaacacccacatggcggacgaaaaactggagaaggatgaaataattaaactgtacagttgtattatcggcaacatgattagtctcttccagattgaatctctggcacgcgaggccagcacaggagtcctgaaggacctgatgcatggattaataactctgatgctggattcccggatagaagatctcgaagaaggccagcaggtgatacgaagcgtcaatctgttagtagtcaaagtgctcgaaaaatccgatcaaacaaatatactttctgccctgttagttctccttcaagactcccttctggcaactgccagctcacccaagttctctgagttagtgatgaaatgcttgtggcgcatggtgagattgctgccagacacgattaattcaatcaacctcgatcgcatcctccttgacattcatatcttcatgaaggtcttccccaaggaaaaactcaagcagtgcaagtctgaatttcctattaggaccctgaagaccctgttacacaccctatgcaagctgaaaggtcctaaaattctggaccacttaacaatgatcgataacaagaacgagtctgagcttgaggcccatctctgcaggatgatgaaacattccatggatcagaccggctcaaagagtgataaggagacagagaagggggcttcaagaatcgatgagaagtcatctaaagctaaagttaatgacttcctggccgaaatcttcaagaaaataggcagtaaggagaatactaaagagggtcttgccgaactctacgaatacaagaaaaaatattctgacgcagacatcgaaccattcctcaaaaatagtagtcagtttttccaatcttatgtggaacgcggtctcagggtcatcgaaatggagcgtgagggcaagggccgtatcagtacctccacaggcatcagccctcagatggaggtaacttgtgtgcctactcctacgagtacagtttcaagtatcggaaataccaatggagaggaggtcggtccaagcgtttatctggagaggcttaaaatactccgtcagcggtgcggtctggataacaccaagcaagatgatagaccccctctgaccagcctgctgtccaagccggctgtgccgacagtggcatcatccaccgatatgctccacagcaagctgagtcagctgcgggagtctagagagcagcaccagcattccgacctggatagtaatcaaacccactccagcgggactgtgaccagctcgtcctctacagctaacatagatgacctgaagaagaggctcgagcggatcaagagcagcagaaagta

SEQ ID NO: 23503 - DNA, 6692 bp, Artificial Sequence
  derived and/or modified sequence
actgcggggtgtgcggcggcccaagcggtttcaaacggcttagagcaggccgcttggttctgacccagctgaggaaatactcttaattctaaggaaaacctggaagcacaatgggagatgacagtgagtggttgaaactgccagttgatcagaaatgtgaacacaagctgtggaaagcaaggttaagtgggtatgaagaggccctgaagatcttccagaaaataaaggatgaaaagagcccagagtggtccaaatttttaggattgatcaaaaaatttgtcactgattccaatgcagtggttcaattgaaaggattagaagctgcacttgtttatgttgaaaatgcccatgtagcaggaaaaaccacaggagaagttgtgtcaggtgttgtaagtaaggtgttcaatcaacctaaagctaaagccaaggagctgggcatagagatctgtcttatgtacatagagattgagaaaggagaggctgttcaagaagagctcctgaaaggcttggacaataagaatcccaagatcatagtggcctgtatagagacactgaggaaagccttaagtgaatttggttccaaaatcatcttgcttaagccaattatcaaagtgttgccaaaactctttgagtctcgagagaaggctgttcgagatgaagccaaactaattgctgtggagatttacagatggattcgggatgctctgagacccccattacaaaatataaactctgttcagttgaaagaactagaagaagaatgggtcaaactgccaacaagtgctcctagacctactcgatttcttcgttcccaacaagaactagaagctaaattggaacaacaacagtctgctggtggagatgctgaaggaggtggtgatgatggtgatgaggtgccacaaatagatgcttatgagcttttagaagctgtagaaatcctttccaaaccaaagacttttatgacaaaattgaggcaaaaaaatggcaagagagaaaagaggccctggagtctgtagaagtactaataaaaaaccccaaactggaagctggcgattatgcagatttagtaaaagcattaaagaaggttgttggaaaggacaccaatgtcatgttggtggctttggcagcaaaatgtcttactggcctggctgttgggctaaggaagaaatttggacaatatgcaggacatgttgtgccaaccatcttggagaaattcaaagagaagaaacctcaagtggtacaagccctgcaggaggcaattgatgcaatcttccttactaccacactacagaacatcagtgaggatgttttagcagtaatggataataaaaatccaaccatcaagcagcagacatctctttttattgcaagaagtttccgccactgcactgcttctaccctgccaaagagcttgctaaagcccttttgtgctgcactacttaagcacatcaatgattctgctcctgaagtcagagatgccgcatttgaagcattgggtactgctttgaaggtggttggcgagaaagcagtaaacccattcctagctgatgtggacaaactcaagcttgataagatcaaagaatgttcagaaaaggtagaactgatacatggtaagaaagctggactagctgctgataagaaggaattcaaacctctgcctggaaggactgctgcttcaggggctgcaggagataaggacacaaaggacatttctgcacccaaaccaggacctctaaaaaaggcacctgctgctaaggctggtgggccaccaaaaaaggggaaaccagctgcaccaggaggcgcagggaatactggaaccaagaacaagaaaggactggagactaaagaaatagtggagcctgagctctcgatagaagtatgtgaagaaaaagcttcagctgttcttccccctacctgtatacagcttcttgacagcagtaactggaaagaaaggctggcttgtatggaagagttccagaaggctgttgagctaatggaccgaactgaaatgccatgccaggcattagtgaggatgctagccaagaaacctggatggaaagaaactaattttcaggtgatgcaaatgaagcttcatatagttgctttgattgcccagaagggaaatttttccaaaacgtcagctcaggttgtattagatggccttgtggacaagattggagatgtgaaatgtgggaacaatgcaaaagaagctatgacagcaatagccgaagcctgtatgttaccatggactgctgaacaggttgtgtcaatggctttctcacaaaagaatcccaaaaatcagtcagaaactctgaattggctatcaaatgccataaaagaatttggtttttctgggttgaatgtcaaagctttcattagcaatgtgaagacagctcttgctgcaacaaacccagctgtgaggactgctgccataaccctgcttggcgtgatgtatctgtatgttggtccctctttgcgaatgttctttgaggatgagaagcctgccctcctatcccagatagatgcagaatttgagaagatgcagggacaaagtccacctgctccaaccagaggaatttccaagcatagcacaagtggtacagatgaaggagaagatggagatgaaccagatgacgggagcaatgatgtcgttgatcttttgccgaggacggagatcagtgataaaatcacttcagagttggtatctaagattggtgataagaattggaagattaggaaagaaggcctagatgaagtggcaggtattattaatgacgcaaaatttatccaaccgaatataggtgaacttccaactgccttgaagggtcgactcaatgattcaaataaaatcttggtacagcaaacgctgaatatcctgcaacaactggcagtagccatgggcccaaatattaagcaacatgtaaaaaatttaggcatccctatcatcacagtccttggagacagcaagaacaatgttcgagctgctgccctagcgactgtgaatgcttgggcagaacagactggcatgaaggaatggctggaaggagaagatctttctgaagagctcaaaaaggaaaatcctttcttgaggcaagagcttctgggctggctggctgagaaactacctactcttcgttccacccctacagaccttatcctttgtgttcctcatctctactcctgcctagaagatcgaaatggagatgtgcgaaagaaggcccaagatgccttgccattcttcatgatgcatttaggatatgaaaaaatggccaaggctactgggaaactaaagccaacttctaaagatcaggtattggccatgctagagaaagccaaagttaacatgccagccaagcctgctccacccactaaagcaacttctaaaccaatgggagggtccgctccagccaaattccagcctgcatcagcacctgctgaagattgtatttccagcagtacagaacccaaacctgatccaaaaaaggccaaagctccaggattatcctctaaagcaaagagtgcacaagggaagaagatgccaagcaaaaccagcttaaaggaggatgaagacaaatccgggcctatttttattgttgttccaaatggaaaagagcaaaggatgaaagatgaaaaaggattgaaggtgctaaagtggaattttactaccccacgggatgaatacattgagcaactaaagactcaaatgtctagctgtgtggctaaatggttacaagatgagatgtttcactcagactttcagcatcataacaaagcccttgctgttatggttgatcacttggagagtgaaaaagaaggagttattggttgcctggatcttatcttaaagtggcttaccctgaggttttttgacaccaatacaagcgtcctgatgaaagcactagaatatttaaaattgctcttcaccttgctaagtgaagaagaatatcatcttactgagaatgaagcatcttccttcatcccctatcttgtcgtcaaggttggagaaccaaaggatgtcattcgtaaagatgttcgtgccatcctgaaccggatgtgccttgtctacccagctagcaagatgtttccctttatcatggaaggaaccaaatccaaaaactctaagcagagagcagagtgcctggaagagctgggatgtctggttgagtcctatggcatgaatgtttgccaaccaaccccaggaaaagccttaaaggaaatagctgttcacataggagaccgtgacaatgctgtacgcaatgctgcactcaacaccattgtaacggtgtacaatgtacatggggatcaggtgttcaaactgattggaaatctttctgaaaaggatatgagcatgctcgaggagaggattaagcggtcagcaaagagaccctctgctgcaccaataaaacaggtggaagagaaacctcagcgtgcacagaacataagctccaatgccaacatgttacgcaagggaccagctgaggacatgtcttccaaactcaaccaagcccgaagcatgagtgggcatcctgaggcagcccagatggtccgccgagaattccagctggatctagatgagattgagaatgacaatggtacagtccgatgtgaaatgccagaacttgttcagcacaaactggatgacatttttgagccagtccttattcctgaacccaagatccgggctgtttctccacacttcgatgacatgcacagtaatacagcatccacaatcaatttcattatctcccaagtagccagtggtgacatcaacacaagtatccaagctctgacacagatcgatgaggtcctgagacaggaagacaaagctgaagccatgtccggccatattgatcagtttctgatagccacttttatgcagctaagactcatctacaacacacacatggcagatgagaaattggagaaggacgagatcatcaagttgtatagctgtatcattggcaacatgatttcgctgtttcagatagagagccttgcccgggaggcctccactggagtactaaaagacctaatgcatggcctcatcaccttaatgctggattctcggattgaagatcttgaggaaggacaacaggtcatccgctctgtgaacctcttggtggtgaaggttctggagaagtcagaccagaccaacatcctgagtgccctacttgttttgctccaagacagcctgctagcaacagccagttctcccaaattctcagagcttgttatgaagtgtctctggagaatggttcgactgttgcctgataccatcaatagcattaacctagacagaattcttctggatatccacattttcatgaaggtcttccccaaagagaaactgaagcaatgcaaaagtgaatttcccataaggaccctaaagaccctgctacacaccttatgcaaattaaaagggcccaagatcctggaccacctaacgatgatcgacaacaaaaacgagtctgagctggaggcccatctctgccggatgatgaagcacagtatggaccagactgggagcaagtctgataaggaaacagaaaagggagcatctcgaatagatgaaaaatcatcaaaggccaaagtgaatgatttcttagctgagatttttaagaagattggctctaaagaaaacactaaagagggactagcagagttatatgaatataagaagaaatactcagatgctgacattgaaccatttctgaaaaattcctcacagttcttccagagctatgtcgaaagaggccttcgggtgattgagatggagagggagggcaaaggtcgtatttccacttcaacaggcatctcccctcagatggaagtcacatgtgtgcccacgcccacaagcacagtgtcctccataggtaacacaaatggggaagaagtggggccatctgtctacttggaaaggctaaagatcctccgacagcgatgtggtctggacaacacaaagcaagatgaccgacctcctttgacctctttgctctccaaaccagcagttcctactgtcgcctcttccacagacatgctccacagcaaactctctcagctccgggagtcacgggagcagcaccagcattcagacctggattctaaccagactcactcttcaggaactgtgacctcctcctcctccacagctaacatagacgacttgaaaaaaagactggagagaataaagagcagtcgcaaatgaagctgccccactcccccggcaccctgcagctttagtttactaaactagaagtcctcatagtttaaaatggcctcagcaggcctagtgtatacaaactggttgtatgtatcatgccgtggagctagggggaggagtcattgtggcacaagtatttgtacatactctgcttctctctgtcagcgtcctgctgctctagaagactgtccgtggatgagtttagtgtacagacttgtaaacagctgccccctctctgctcagtctagttcccagatccttttcttttctttttaattgctcatttgtaaaattgtcctaatctttcctagctttttaatagttaatattagaaactctttaatagttttcctttcagtttgtgagctcttctctgtcgccctgaagggtcactgtattctgtatgaatgcatggcatgatacaactaatttaagagtcttttataaataaagtttgcattaactatacctg

SEQ ID NO: 23504 - DNA, 6717 bp, Artificial Sequence
  derived and/or modified sequence
actgcggggtgtgcggcggcccaagcggtttcaaacggcttagagcaggccgcttggttctgacccagctgaggaaatactcttaattctaaggaaaacctggaagcacaatgggagatgacagtgagtggttgaaactgccagttgatcagaaatgtgaacacaagctgtggaaagcaaggttaagtgggtatgaagaggccctgaagatcttccagaaaataaaggatgaaaagagcccagagtggtccaaatttttaggattgatcaaaaaatttgtcactgattccaatgcagtggttcaattgaaaggattagaagctgcacttgtttatgttgaaaatgcccatgtagcaggaaaaaccacaggagaagttgtgtcaggtgttgtaagtaaggtgttcaatcaacctaaagctaaagccaaggagctgggcatagagatctgtcttatgtacatagagattgagaaaggagaggctgttcaagaagagctcctgaaaggcttggacaataagaatcccaagatcatagtggcctgtatagagacactgaggaaagccttaagtgaatttggttccaaaatcatcttgcttaagccaattatcaaagtgttgccaaaactctttgagtctcgagagaaggctgttcgagatgaagccaaactaattgctgtggagatttacagatggattcgggatgctctgagacccccattacaaaatataaactctgttcagttgaaagaactagaagaagaatgggtcaaactgccaacaagtgctcctagacctactcgatttcttcgttcccaacaagaactagaagctaaattggaacaacaacagtctgctggtggagatgctgaaggaggtggtgatgatggtgatgaggtgccacaaatagatgcttatgagcttttagaagctgtagaaatcctttccaaacttcccaaagacttttatgacaaaattgaggcaaaaaaatggcaagagagaaaagaggccctggagtctgtagaagtactaataaaaaaccccaaactggaagctggcgattatgcagatttagtaaaagcattaaagaaggttgttggaaaggacaccaatgtcatgttggtggctttggcagcaaaatgtcttactggcctggctgttgggctaaggaagaaatttggacaatatgcaggacatgttgtgccaaccatcttggagaaattcaaagagaagaaacctcaagtggtacaagccctgcaggaggcaattgatgcaatcttccttactaccacactacagaacatcagtgaggatgttttagcagtaatggataataaaaatccaaccatcaagcagcagacatctctttttattgcaagaagtttccgccactgcactgcttctaccctgccaaagagcttgctaaagcccttttgtgctgcactacttaagcacatcaatgattctgctcctgaagtcagagatgccgcatttgaagcattgggtactgctttgaaggtggttggcgagaaagcagtaaacccattcctagctgatgtggacaaactcaagcttgataagatcaaagaatgttcagaaaaggtagaactgatacatggtaagaaagctggactagctgctgataagaaggaattcaaacctctgcctggaaggactgctgcttcaggggctgcaggagataaggacacaaaggacatttctgcacccaaaccaggacctctaaaaaaggcacctgctgctaaggctggtgggccaccaaaaaaggggaaaccagctgcaccaggaggcgcagggaatactggaaccaagaacaagaaaggactggagactaaagaaatagtggagcctgagctctcgatagaagtatgtgaagaaaaagcttcagctgttcttccccctacctgtatacagcttcttgacagcagtaactggaaagaaaggctggcttgtatggaagagttccagaaggctgttgagctaatggaccgaactgaaatgccatgccaggcattagtgaggatgctagccaagaaacctggatggaaagaaactaattttcaggtgatgcaaatgaagcttcatatagttgctttgattgcccagaagggaaatttttccaaaacgtcagctcaggttgtattagatggccttgtggacaagattggagatgtgaaatgtgggaacaatgcaaaagaagctatgacagcaatagccgaagcctgtatgttaccatggactgctgaacaggttgtgtcaatggctttctcacaaaagaatcccaaaaatcagtcagaaactctgaattggctatcaaatgccataaaagaatttggtttttctgggttgaatgtcaaagctttcattagcaatgtgaagacagctcttgctgcaacaaacccagctgtgaggactgctgccataaccctgcttggcgtgatgtatctgtatgttggtccctctttgcgaatgttctttgaggatgagaagcctgccctcctatcccagatagatgcagaatttgagaagatgcagggacaaagtccacctgctccaaccagaggaatttccaagcatagcacaagtggtacagatgaaggagaagatggagatgaaccagatgacgggagcaatgatgtcgttgatcttttgccgaggacggagatcagtgataaaatcacttcagagttggtatctaagattggtgataagaattggaagattaggaaagaaggcctagatgaagtggcaggtattattaatgacgcaaaatttatccaaccgaatataggtgaacttccaactgccttgaagggtcgactcaatgattcaaataaaatcttggtacagcaaacgctgaatatcctgcaacaactggcagtagccatgggcccaaatattaagcaacatgtaaaaaatttaggcatccctatcatcacagtccttggagacagcaagaacaatgttcgagctgctgccctagcgactgtgaatgcttgggcagaacagactggcatgaaggaatggctggaaggagaagatctttctgaagagctcaaaaaggaaaatcctttcttgaggcaagagcttctgggctggctggctgagaaactacctactcttcgttccacccctacagaccttatcctttgtgttcctcatctctactcctgcctagaagatcgaaatggagatgtgcgaaagaaggcccaagatgccttgccattcttcatgatgcatttaggatatgaaaaaatggccaaggctactgggaaactaaagccaacttctaaagatcaggtattggccatgctagagaaagccaaagttaacatgccagccaagcctgctccacccactaaagcaacttctaaaccaatgggagggtccgctccagccaaattccagcctgcatcagcacctgctgaagattgtatttccagcagtacagaacccaaacctgatccaaaaaaggccaaagctccaggattatcctctaaagcaaagagtgcacaagggaagaagatgccaagcaaaaccagcttaaaggaggatgaagacaaatccgggcctatttttattgttgttccaaatggaaaagagcaaaggatgaaagatgaaaaaggattgaaggtgctaaagtggaattttactaccccacgggatgaatacattgagcaactaaagactcaaatgtctagctgtgtggctaaatggttacaagatgagatgtttcactcagactttcagcatcataacaaagcccttgctgttatggttgatcacttggagagtgaaaaagaaggagttattggttgcctggatcttatcttaaagtggcttaccctgaggttttttgacaccaatacaagcgtcctgatgaaagcactagaatatttaaaattgctcttcaccttgctaagtgaagaagaatatcatcttactgagaatgaagcatcttccttcatcccctatcttgtcgtcaaggttggagaaccaaaggatgtcattcgtaaagatgttcgtgccatcctgaaccggatgtgccttgtctacccagctagcaagatgtttccctttatcatggaaggaaccaaatccaaaaactctaagcagagagcagagtgcctggaagagctgggatgtctggttgagtcctatggcatgaatgtttgccaaccaaccccaggaaaagccttaaaggaaatagctgttcacataggagaccgtgacaatgctgtacgcaatgctgcactcaacaccattgtaacggtgtacaatgtacatggggatcaggtgttcaaactgattggaaatctttctgaaaaggatatgagcatgctcgaggagaggattaagcggtcagcaaagagaccctctgctgcaccaataaaacaggtggaagagaaacctcagcgtgcacagaacataagctccaatgccaacatgttacgcaagggaccagctgaggacatgtcttccaaactcaaccaagcccgaagcatgagtgggcatcctgaggcagcccagatggtccgccgagaattccagctggatctagatgagattgagaatgacaatggtacagtccgatgtgaaatgccagaacttgttcagcacaaactggatgacatttttgagccagtccttattcctgaacccaagatccgggctgtttctccacacttcgatgacatgcacagtaatacagcatccacaatcaatttcattatctcccaagtagccagtggtgacatcaacacaagtatccaagctctgacacagatcgatgaggtcctgagacaggaagacaaagctgaagccatgtccggccatattgatcagtttctgatagccacttttatgcagctaagactcatctacaacacacacatggcagatgagaaattggagaaggacgagatcatcaagttgtatagctgtatcattggcaacatgatttcgctgtttcagatagagagccttgcccgggaggcctccactggagtactaaaagacctaatgcatggcctcatcaccttaatgctggattctcggattgaagatcttgaggaaggacaacaggtcatccgctctgtgaacctcttggtggtgaaggttctggagaagtcagaccagaccaacatcctgagtgccctacttgttttgctccaagacagcctgctagcaacagccagttctcccaaattctcagagcttgttatgaagtgtctctggagaatggttcgactgttgcctgataccatcaatagcattaacctagacagaattcttctggatatccacattttcatgaaggtcttccccaaagagaaactgaagcaatgcaaaagtgaatttcccataaggaccctaaagaccctgctacacaccttatgcaaattaaaagggcccaagtcatgcatgtgtctccctcagatcctggaccacctaacgatgatcgacaacaaaaacgagtctgagctggaggcccatctctgccggatgatgaagcacagtatggaccagactgggagcaagtctgataaggaaacagaaaagggagcatctcgaatagatgaaaaatcatcaaaggccaaagtgaatgatttcttagctgagatttttaagaagattggctctaaagaaaacactaaagagggactagcagagttatatgaatataagaagaaatactcagatgctgacattgaaccatttctgaaaaattcctcacagttcttccagagctatgtcgaaagaggccttcgggtgattgagatggagagggagggcaaaggtcgtatttccacttcaacaggcatctcccctcagatggaagtcacatgtgtgcccacgcccacaagcacagtgtcctccataggtaacacaaatggggaagaagtggggccatctgtctacttggaaaggctaaagatcctccgacagcgatgtggtctggacaacacaaagcaagatgaccgacctcctttgacctctttgctctccaaaccagcagttcctactgtcgcctcttccacagacatgctccacagcaaactctctcagctccgggagtcacgggagcagcaccagcattcagacctggattctaaccagactcactcttcaggaactgtgacctcctcctcctccacagctaacatagacgacttgaaaaaaagactggagagaataaagagcagtcgcaaatgaagctgccccactcccccggcaccctgcagctttagtttactaaactagaagtcctcatagtttaaaatggcctcagcaggcctagtgtatacaaactggttgtatgtatcatgccgtggagctagggggaggagtcattgtggcacaagtatttgtacatactctgcttctctctgtcagcgtcctgctgctctagaagactgtccgtggatgagtttagtgtacagacttgtaaacagctgccccctctctgctcagtctagttcccagatccttttcttttctttttaattgctcatttgtaaaattgtcctaatctttcctagctttttaatagttaatattagaaactctttaatagttttcctttcagtttgtgagctcttctctgtcgccctgaagggtcactgtattctgtatgaatgcatggcatgatacaactaatttaagagtcttttataaataaagtttgcattaactatacctg

SEQ ID NO: 23505 - DNA, 582 bp, Artificial Sequence
  derived and/or modified sequence
aatgctgctgccgccgccgccgccgcctgccgggtattcctgctgatcctgctcggaccttagcttccctgacctctccctgcccggggagcgaaatactcttaattctaaggaaaacctggaagcacaatgggagatgacagtgagtggttgaaactgccagttgatcagaaatgtgaacacaagctgtggaaagcaaggttaagtgggtatgaagaggccctgaagatcttccagaaaataaaggatgaaaagagcccagagtggtccaaatttttaggattgatcaaaaaatttgtcactgattccaatgcagtggttcaattgaaaggattagaagctgcacttgtttatgttgaaaatgcccatgtagcaggaaaaaccacaggagaagttgtgtcaggtgttgtaagtaaggtgttcaatcaacctaaagctaaagccaaggagctgggcatagagatctgtcttatgtacatagagattgagaaaggagaggctgttcaagaagagctcctgaaaggcttggacaataagaatcccaagatcatagtggcctgtatagagacactgaggaaagcc

SEQ ID NO: 23506 - DNA, 7121 bp, Artificial Sequence
  derived and/or modified sequence
cccagctgaggaaatactcttaattctaaggaaaacctggaagcacaatgggagatgacagtgagtggttgaaactgccagttgatcagaaatgtgaacacaagctgtggaaagcaaggttaagtgggtatgaagaggccctgaagatcttccagaaaataaaggatgaaaagagcccagagtggtccaaatttttaggattgatcaaaaaatttgtcactgattccaatgcagtggttcaattgaaaggattagaagctgcacttgtttatgttgaaaatgcccatgtagcaggaaaaaccacaggagaagttgtgtcaggtgttgtaagtaaggtgttcaatcaacctaaagctaaagccaaggagctgggcatagagatctgtcttatgtacatagagattgagaaaggagaggctgttcaagaagagctcctgaaaggcttggacaataagaatcccaagatcatagtggcctgtatagagacactgaggaaagccttaagtgaatttggttccaaaatcatcttgcttaagccaattatcaaagtgttgccaaaactctttgagtctcgagagaaggctgttcgagatgaagccaaactaattgctgtggagatttacagatggattcgggatgctctgagacccccattacaaaatataaactctgttcagttgaaagaactagaagaagaatgggtcaaactgccaacaagtgctcctagacctactcgatttcttcgttcccaacaagaactagaagctaaattggaacaacaacagtctgctggtggagatgctgaaggaggtggtgatgatggtgatgaggtgccacaaatagatgcttatgagcttttagaagctgtagaaatcctttccaaacttcccaaagacttttatgacaaaattgaggcaaaaaaatggcaagagagaaaagaggccctggagtctgtagaagtactaataaaaaaccccaaactggaagctggcgattatgcagatttagtaaaagcattaaagaaggttgttggaaaggacaccaatgtcatgttggtggctttggcagcaaaatgtcttactggcctggctgttgggctaaggaagaaatttggacaatatgcaggacatgttgtgccaaccatcttggagaaattcaaagagaagaaacctcaagtggtacaagccctgcaggaggcaattgatgcaatcttccttactaccacactacagaacatcagtgaggatgttttagcagtaatggataataaaaatccaaccatcaagcagcagacatctctttttattgcaagaagtttccgccactgcactgcttctaccctgccaaagagcttgctaaagcccttttgtgctgcactacttaagcacatcaatgattctgctcctgaagtcagagatgccgcatttgaagcattgggtactgctttgaaggtggttggcgagaaagcagtaaacccattcctagctgatgtggacaaactcaagcttgataagatcaaagaatgttcagaaaaggtagaactgatacatggtaagaaagctggactagctgctgataagaaggaattcaaacctctgcctggaaggactgctgcttcaggggctgcaggagataaggacacaaaggacatttctgcacccaaaccaggacctctaaaaaaggcacctgctgctaaggctggtgggccaccaaaaaaggggaaaccagctgcaccaggaggcgcagggaatactggaaccaagaacaagaaaggactggagactaaagaaatagtggagcctgagctctcgatagaagtatgtgaagaaaaagcttcagctgttcttccccctacctgtatacagcttcttgacagcagtaactggaaagaaaggctggcttgtatggaagagttccagaaggctgttgagctaatggaccgaactgaaatgccatgccaggcattagtgaggatgctagccaagaaacctggatggaaagaaactaattttcaggtgatgcaaatgaagcttcatatagttgctttgattgcccagaagggaaatttttccaaaacgtcagctcaggttgtattagatggccttgtggacaagattggagatgtgaaatgtgggaacaatgcaaaagaagctatgacagcaatagccgaagcctgtatgttaccatggactgctgaacaggttgtgtcaatggctttctcacaaaagaatcccaaaaatcagtcagaaactctgaattggctatcaaatgccataaaagaatttggtttttctgggttgaatgtcaaagctttcattagcaatgtgaagacagctcttgctgcaacaaacccagctgtgaggactgctgccataaccctgcttggcgtgatgtatctgtatgttggtccctctttgcgaatgttctttgaggatgagaagcctgccctcctatcccagatagatgcagaatttgagaagatgcagggacaaagtccacctgctccaaccagaggaatttccaagcatagcacaagtggtacagatgaaggagaagatggagatgaaccagatgacgggagcaatgatgtcgttgatcttttgccgaggacggagatcagtgataaaatcacttcagagttggtatctaagattggtgataagaattggaagattaggaaagaaggcctagatgaagtggcaggtattattaatgacgcaaaatttatccaaccgaatataggtgaacttccaactgccttgaagggtcgactcaatgattcaaataaaatcttggtacagcaaacgctgaatatcctgcaacaactggcagtagccatgggcccaaatattaagcaacatgtaaaaaatttaggcatccctatcatcacagtccttggagacagcaagaacaatgttcgagctgctgccctagcgactgtgaatgcttgggcagaacagactggcatgaaggaatggctggaaggagaagatctttctgaagagctcaaaaaggaaaatcctttcttgaggcaagagcttctgggctggctggctgagaaactacctactcttcgttccacccctacagaccttatcctttgtgttcctcatctctactcctgcctagaagatcgaaatggagatgtgcgaaagaaggcccaagatgccttgccattcttcatgatgcatttaggatatgaaaaaatggccaaggctactgggaaactaaagccaacttctaaagatcaggtattggccatgctagagaaagccaaagttaacatgccagccaagcctgctccacccactaaagcaacttctaaaccaatgggagggtccgctccagccaaattccagcctgcatcagcacctgctgaagattgtatttccagcagtacagaacccaaacctgatccaaaaaaggccaaagctccaggattatcctctaaagcaaagagtgcacaagggaagaagatgccaagcaaaaccagcttaaaggaggatgaagacaaatccgggcctatttttattgttgttccaaatggaaaagagcaaaggatgaaagatgaaaaaggattgaaggtgctaaagtggaattttactaccccacgggatgaatacattgagcaactaaagactcaaatgtctagctgtgtggctaaatggttacaagatgagatgtttcactcagactttcagcatcataacaaagcccttgctgttatggttgatcacttggagagtgaaaaagaaggagttattggttgcctggatcttatcttaaagtggcttaccctgaggttttttgacaccaatacaagcgtcctgatgaaagcactagaatatttaaaattgctcttcaccttgctaagtgaagaagaatatcatcttactgagaatgaagcatcttccttcatcccctatcttgtcgtcaaggttggagaaccaaaggatgtcattcgtaaagatgttcgtgccatcctgaaccggatgtgccttgtctacccagctagcaagatgtttccctttatcatggaaggaaccaaatccaaaaactctaagcagagagcagagtgcctggaagagctgggatgtctggttgagtcctatggcatgaatgtttgccaaccaaccccaggaaaagccttaaaggaaatagctgttcacataggagaccgtgacaatgctgtacgcaatgctgcactcaacaccattgtaacggtgtacaatgtacatggggatcaggtgttcaaactgattggaaatctttctgaaaaggatatgagcatgctcgaggagaggattaagcggtcagcaaagagaccctctgctgcaccaataaaacaggtggaagagaaacctcagcgtgcacagaacataagctccaatgccaacatgttacgcaagggaccagctgaggacatgtcttccaaactcaaccaagcccgaagcatgagtgggcatcctgaggcagcccagatggtccgccgagaattccagctggatctagatgagattgagaatgacaatggtacagtccgatgtgaaatgccagaacttgttcagcacaaactggatgacatttttgagccagtccttattcctgaacccaagatccgggctgtttctccacacttcgatgacatgcacagtaatacagcatccacaatcaatttcattatctcccaagtagccagtggtgacatcaacacaagtatccaagctctgacacagatcgatgaggtcctgagacaggaagacaaagctgaagccatgtccggccatattgatcagtttctgatagccacttttatgcagctaagactcatctacaacacacacatggcagatgagaaattggagaaggacgagatcatcaagttgtatagctgtatcattggcaacatgatttcgctgtttcagatagagagccttgcccgggaggcctccactggagtactaaaagacctaatgcatggcctcatcaccttaatgctggattctcggattgaagatcttgaggaaggacaacaggtcatccgctctgtgaacctcttggtggtgaaggttctggagaagtcagaccagaccaacatcctgagtgccctacttgttttgctccaagacagcctgctagcaacagccagttctcccaaattctcagagcttgttatgaagtgtctctggagaatggttcgactgttgcctgataccatcaatagcattaacctagacagaattcttctggatatccacattttcatgaaggtcttccccaaagagaaactgaagcaatgcaaaagtgaatttcccataaggaccctaaagaccctgctacacaccttatgcaaattaaaagggcccaagatcctggaccacctaacgatgatcgacaacaaaaacgagtctgagctggaggcccatctctgccggatgatgaagcacagtatggaccagactgggagcaagtctgataaggaaacagaaaagggagcatctcgaatagatgaaaaatcatcaaaggccaaagtgaatgatttcttagctgagatttttaagaagattggctctaaagaaaacactaaagagggactagcagagttatatgaatataagaagaaatactcagatgctgacattgaaccatttctgaaaaattcctcacagttcttccagagctatgtcgaaagaggccttcgggtgattgagatggagagggagggcaaaggtcgtatttccacttcaacaggcatctcccctcagatggaagtcacatgtgtgcccacgcccacaagcacagtgtcctccataggtaacacaaatggggaagaagtggggccatctgtctacttggaaaggctaaagatcctccgacagcgatgtggtctggacaacacaaagcaagatgaccgacctcctttgacctctttgctctccaaaccagcagttcctactgtcgcctcttccacagacatgctccacagcaaactctctcagctccgggagtcacgggagcagcaccagcattcagacctggattctaaccagactcactcttcaggaactgtgacctcctcctcctccacagctaacatagacgacttgaaaaaaagactggagagaataaagagcagtcgcaaatgaagctgccccactcccccggcaccctgcagctttagtttactaaactagaagtcctcatagtttaaaatggcctcagcaggcctagtgtatacaaactggttgtatgtatcatgccgtggagctagggggaggagtcattgtggcacaagtatttgtacatactctgcttctctctgtcagcgtcctgctgctctagaagactgtccgtggatgagtttagtgtacagacttgtaaacagctgccccctctctgctcagtctagttcccagatccttttcttttctttttaattgctcatttgtaaaattgtcctaatctttcctagctttttaatagttaatattagaaactctttaatagttttcctttcagtttgtgagctcttctctgtcgccctgaagggtcactgtattctgtatgaatgcatggcatgatacaactaatttaagagtcttttataaataaagtttgcattaactatacctgactcccaagatgctccatatcatggagtgttgggcagcaattttttaacttttggtaccagctgggtattcagccagttagagaaaggttaattactgcttacagagcttccctttttcttggctcacagacttggagctgtcttttattcctttggaatggaaggaactctccttccctgctctccacaaacagctcctagggagcagaaaaatctcatccttccttgttttgagattttggtcatgatttccctccaattatcaccagtcgtttcaagaagctcttgggcatcctaccactttgctgaccaaaggcacacaagattgcgcccagagattggctgggcttcagtggttctcacactacaactagatttgtgttcatttgactaatggagtttgggaaatcttagtggtttgctgcttggttgtatgagtctcttttggtccaggctaacagttgcttcacattcagtcagagtaagg

SEQ ID NO: 23507 - DNA, 6120 bp, Artificial Sequence
  derived and/or modified sequence
atgggcgacgacagcgagtggctgaagctgcccgtggaccagaagtgcgagcacaagctgtggaaggccagactgagcggctacgaggaggccctgaagatcttccagaagatcaaggacgagaagagccccgagtggagcaagttcctgggcctgatcaagaagttcgtgaccgacagcaacgccgtggtgcagctgaagggcctggaggccgccctggtgtacgtggagaacgcccacgtggccggcaagaccaccggcgaggtggtgagcggcgtggtgagcaaggtgttcaaccagcccaaggccaaggccaaggagctgggcatcgagatctgcctgatgtacatcgagatcgagaagggcgaggccgtgcaggaggagctgctgaagggcctggacaacaagaaccccaagatcatcgtggcctgcatcgagaccctgagaaaggccctgagcgagttcggcagcaagatcatcctgctgaagcccatcatcaaggtgctgcccaagctgttcgagagcagagagaaggccgtgagagacgaggccaagctgatcgccgtggagatctacagatggatcagagacgccctgagaccccccctgcagaacatcaacagcgtgcagctgaaggagctggaggaggagtgggtgaagctgcccaccagcgcccccagacccaccagattcctgagaagccagcaggagctggaggccaagctggagcagcagcagagcgccggcggcgacgccgagggcggcggcgacgacggcgacgaggtgccccagatcgacgcctacgagctgctggaggccgtggagatcctgagcaagctgcccaaggacttctacgacaagatcgaggccaagaagtggcaggagagaaaggaggccctggagagcgtggaggtgctgatcaagaaccccaagctggaggccggcgactacgccgacctggtgaaggccctgaagaaggtggtgggcaaggacaccaacgtgatgctggtggccctggccgccaagtgcctgaccggcctggccgtgggcctgagaaagaagttcggccagtacgccggccacgtggtgcccaccatcctggagaagttcaaggagaagaagccccaggtggtgcaggccctgcaggaggccatcgacgccatcttcctgaccaccaccctgcagaacatcagcgaggacgtgctggccgtgatggacaacaagaaccccaccatcaagcagcagaccagcctgttcatcgccagaagcttcagacactgcaccgccagcaccctgcccaagagcctgctgaagcccttctgcgccgccctgctgaagcacatcaacgacagcgcccccgaggtgagagacgccgccttcgaggccctgggcaccgccctgaaggtggtgggcgagaaggccgtgaaccccttcctggccgacgtggacaagctgaagctggacaagatcaaggagtgcagcgagaaggtggagctgatccacggcaagaaggccggcctggccgccgacaagaaggagttcaagcccctgcccggcagaaccgccgccagcggcgccgccggcgacaaggacaccaaggacatcagcgcccccaagcccggccccctgaagaaggcccccgccgccaaggccggcggcccccccaagaagggcaagcccgccgcccccggcggcgccggcaacaccggcaccaagaacaagaagggcctggagaccaaggagatcgtggagcccgagctgagcatcgaggtgtgcgaggagaaggccagcgccgtgctgccccccacctgcatccagctgctggacagcagcaactggaaggagagactggcctgcatggaggagttccagaaggccgtggagctgatggacagaaccgagatgccctgccaggccctggtgagaatgctggccaagaagcccggctggaaggagaccaacttccaggtgatgcagatgaagctgcacatcgtggccctgatcgcccagaagggcaacttcagcaagaccagcgcccaggtggtgctggacggcctggtggacaagatcggcgacgtgaagtgcggcaacaacgccaaggaggccatgaccgccatcgccgaggcctgcatgctgccctggaccgccgagcaggtggtgagcatggccttcagccagaagaaccccaagaaccagagcgagaccctgaactggctgagcaacgccatcaaggagttcggcttcagcggcctgaacgtgaaggccttcatcagcaacgtgaagaccgccctggccgccaccaaccccgccgtgagaaccgccgccatcaccctgctgggcgtgatgtacctgtacgtgggccccagcctgagaatgttcttcgaggacgagaagcccgccctgctgagccagatcgacgccgagttcgagaagatgcagggccagagcccccccgcccccaccagaggcatcagcaagcacagcaccagcggcaccgacgagggcgaggacggcgacgagcccgacgacggcagcaacgacgtggtggacctgctgcccagaaccgagatcagcgacaagatcaccagcgagctggtgagcaagatcggcgacaagaactggaagatcagaaaggagggcctggacgaggtggccggcatcatcaacgacgccaagttcatccagcccaacatcggcgagctgcccaccgccctgaagggcagactgaacgacagcaacaagatcctggtgcagcagaccctgaacatcctgcagcagctggccgtggccatgggccccaacatcaagcagcacgtgaagaacctgggcatccccatcatcaccgtgctgggcgacagcaagaacaacgtgagagccgccgccctggccaccgtgaacgcctgggccgagcagaccggcatgaaggagtggctggagggcgaggacctgagcgaggagctgaagaaggagaaccccttcctgagacaggagctgctgggctggctggccgagaagctgcccaccctgagaagcacccccaccgacctgatcctgtgcgtgccccacctgtacagctgcctggaggacagaaacggcgacgtgagaaagaaggcccaggacgccctgcccttcttcatgatgcacctgggctacgagaagatggccaaggccaccggcaagctgaagcccaccagcaaggaccaggtgctggccatgctggagaaggccaaggtgaacatgcccgccaagcccgccccccccaccaaggccaccagcaagcccatgggcggcagcgcccccgccaagttccagcccgccagcgcccccgccgaggactgcatcagcagcagcaccgagcccaagcccgaccccaagaaggccaaggcccccggcctgagcagcaaggccaagagcgcccagggcaagaagatgcccagcaagaccagcctgaaggaggacgaggacaagagcggccccatcttcatcgtggtgcccaacggcaaggagcagagaatgaaggacgagaagggcctgaaggtgctgaagtggaacttcaccacccccagagacgagtacatcgagcagctgaagacccagatgagcagctgcgtggccaagtggctgcaggacgagatgttccacagcgacttccagcaccacaacaaggccctggccgtgatggtggaccacctggagagcgagaaggagggcgtgatcggctgcctggacctgatcctgaagtggctgaccctgagattcttcgacaccaacaccagcgtgctgatgaaggccctggagtacctgaagctgctgttcaccctgctgagcgaggaggagtaccacctgaccgagaacgaggccagcagcttcatcccctacctggtggtgaaggtgggcgagcccaaggacgtgatcagaaaggacgtgagagccatcctgaacagaatgtgcctggtgtaccccgccagcaagatgttccccttcatcatggagggcaccaagagcaagaacagcaagcagagagccgagtgcctggaggagctgggctgcctggtggagagctacggcatgaacgtgtgccagcccacccccggcaaggccctgaaggagatcgccgtgcacatcggcgacagagacaacgccgtgagaaacgccgccctgaacaccatcgtgaccgtgtacaacgtgcacggcgaccaggtgttcaagctgatcggcaacctgagcgagaaggacatgagcatgctggaggagagaatcaagagaagcgccaagagacccagcgccgcccccatcaagcaggtggaggagaagccccagagagcccagaacatcagcagcaacgccaacatgctgagaaagggccccgccgaggacatgagcagcaagctgaaccaggccagaagcatgagcggccaccccgaggccgcccagatggtgagaagagagttccagctggacctggacgagatcgagaacgacaacggcaccgtgagatgcgagatgcccgagctggtgcagcacaagctggacgacatcttcgagcccgtgctgatccccgagcccaagatcagagccgtgagcccccacttcgacgacatgcacagcaacaccgccagcaccatcaacttcatcatcagccaggtggccagcggcgacatcaacaccagcatccaggccctgacccagatcgacgaggtgctgagacaggaggacaaggccgaggccatgagcggccacatcgaccagttcctgatcgccaccttcatgcagctgagactgatctacaacacccacatggccgacgagaagctggagaaggacgagatcatcaagctgtacagctgcatcatcggcaacatgatcagcctgttccagatcgagagcctggccagagaggccagcaccggcgtgctgaaggacctgatgcacggcctgatcaccctgatgctggacagcagaatcgaggacctggaggagggccagcaggtgatcagaagcgtgaacctgctggtggtgaaggtgctggagaagagcgaccagaccaacatcctgagcgccctgctggtgctgctgcaggacagcctgctggccaccgccagcagccccaagttcagcgagctggtgatgaagtgcctgtggagaatggtgagactgctgcccgacaccatcaacagcatcaacctggacagaatcctgctggacatccacatcttcatgaaggtgttccccaaggagaagctgaagcagtgcaagagcgagttccccatcagaaccctgaagaccctgctgcacaccctgtgcaagctgaagggccccaagagctgcatgtgcctgccccagatcctggaccacctgaccatgatcgacaacaagaacgagagcgagctggaggcccacctgtgcagaatgatgaagcacagcatggaccagaccggcagcaagagcgacaaggagaccgagaagggcgccagcagaatcgacgagaagagcagcaaggccaaggtgaacgacttcctggccgagatcttcaagaagatcggcagcaaggagaacaccaaggagggcctggccgagctgtacgagtacaagaagaagtacagcgacgccgacatcgagcccttcctgaagaacagcagccagttcttccagagctacgtggagagaggcctgagagtgatcgagatggagagagagggcaagggcagaatcagcaccagcaccggcatcagcccccagatggaggtgacctgcgtgcccacccccaccagcaccgtgagcagcatcggcaacaccaacggcgaggaggtgggccccagcgtgtacctggagagactgaagatcctgagacagagatgcggcctggacaacaccaagcaggacgacagaccccccctgaccagcctgctgagcaagcccgccgtgcccaccgtggccagcagcaccgacatgctgcacagcaagctgagccagctgagagagagcagagagcagcaccagcacagcgacctggacagcaaccagacccacagcagcggcaccgtgaccagcagcagcagcaccgccaacatcgacgacctgaagaagagactggagagaatcaagagcagcagaaagtag

SEQ ID NO: 23508 - DNA, 456 bp, Artificial Sequence
  derived and/or modified sequence
atgggcgacgacagcgagtggctgaagctgcccgtggaccagaagtgcgagcacaagctgtggaaggccagactgagcggctacgaggaggccctgaagatcttccagaagatcaaggacgagaagagccccgagtggagcaagttcctgggcctgatcaagaagttcgtgaccgacagcaacgccgtggtgcagctgaagggcctggaggccgccctggtgtacgtggagaacgcccacgtggccggcaagaccaccggcgaggtggtgagcggcgtggtgagcaaggtgttcaaccagcccaaggccaaggccaaggagctgggcatcgagatctgcctgatgtacatcgagatcgagaagggcgaggccgtgcaggaggagctgctgaagggcctggacaacaagaaccccaagatcatcgtggcctgcatcgagaccctgagaaaggcctag

SEQ ID NO: 23509 - DNA, 6099 bp, Artificial Sequence
  derived and/or modified sequence
atgggcgacgacagcgagtggctgaagctgcccgtggaccagaagtgcgagcacaagctgtggaaggccagactgagcggctacgaggaggccctgaagatcttccagaagatcaaggacgagaagagccccgagtggagcaagttcctgggcctgatcaagaagttcgtgaccgacagcaacgccgtggtgcagctgaagggcctggaggccgccctggtgtacgtggagaacgcccacgtggccggcaagaccaccggcgaggtggtgagcggcgtggtgagcaaggtgttcaaccagcccaaggccaaggccaaggagctgggcatcgagatctgcctgatgtacatcgagatcgagaagggcgaggccgtgcaggaggagctgctgaagggcctggacaacaagaaccccaagatcatcgtggcctgcatcgagaccctgagaaaggccctgagcgagttcggcagcaagatcatcctgctgaagcccatcatcaaggtgctgcccaagctgttcgagagcagagagaaggccgtgagagacgaggccaagctgatcgccgtggagatctacagatggatcagagacgccctgagaccccccctgcagaacatcaacagcgtgcagctgaaggagctggaggaggagtgggtgaagctgcccaccagcgcccccagacccaccagattcctgagaagccagcaggagctggaggccaagctggagcagcagcagagcgccggcggcgacgccgagggcggcggcgacgacggcgacgaggtgccccagatcgacgcctacgagctgctggaggccgtggagatcctgagcaagctgcccaaggacttctacgacaagatcgaggccaagaagtggcaggagagaaaggaggccctggagagcgtggaggtgctgatcaagaaccccaagctggaggccggcgactacgccgacctggtgaaggccctgaagaaggtggtgggcaaggacaccaacgtgatgctggtggccctggccgccaagtgcctgaccggcctggccgtgggcctgagaaagaagttcggccagtacgccggccacgtggtgcccaccatcctggagaagttcaaggagaagaagccccaggtggtgcaggccctgcaggaggccatcgacgccatcttcctgaccaccaccctgcagaacatcagcgaggacgtgctggccgtgatggacaacaagaaccccaccatcaagcagcagaccagcctgttcatcgccagaagcttcagacactgcaccgccagcaccctgcccaagagcctgctgaagcccttctgcgccgccctgctgaagcacatcaacgacagcgcccccgaggtgagagacgccgccttcgaggccctgggcaccgccctgaaggtggtgggcgagaaggccgtgaaccccttcctggccgacgtggacaagctgaagctggacaagatcaaggagtgcagcgagaaggtggagctgatccacggcaagaaggccggcctggccgccgacaagaaggagttcaagcccctgcccggcagaaccgccgccagcggcgccgccggcgacaaggacaccaaggacatcagcgcccccaagcccggccccctgaagaaggcccccgccgccaaggccggcggcccccccaagaagggcaagcccgccgcccccggcggcgccggcaacaccggcaccaagaacaagaagggcctggagaccaaggagatcgtggagcccgagctgagcatcgaggtgtgcgaggagaaggccagcgccgtgctgccccccacctgcatccagctgctggacagcagcaactggaaggagagactggcctgcatggaggagttccagaaggccgtggagctgatggacagaaccgagatgccctgccaggccctggtgagaatgctggccaagaagcccggctggaaggagaccaacttccaggtgatgcagatgaagctgcacatcgtggccctgatcgcccagaagggcaacttcagcaagaccagcgcccaggtggtgctggacggcctggtggacaagatcggcgacgtgaagtgcggcaacaacgccaaggaggccatgaccgccatcgccgaggcctgcatgctgccctggaccgccgagcaggtggtgagcatggccttcagccagaagaaccccaagaaccagagcgagaccctgaactggctgagcaacgccatcaaggagttcggcttcagcggcctgaacgtgaaggccttcatcagcaacgtgaagaccgccctggccgccaccaaccccgccgtgagaaccgccgccatcaccctgctgggcgtgatgtacctgtacgtgggccccagcctgagaatgttcttcgaggacgagaagcccgccctgctgagccagatcgacgccgagttcgagaagatgcagggccagagcccccccgcccccaccagaggcatcagcaagcacagcaccagcggcaccgacgagggcgaggacggcgacgagcccgacgacggcagcaacgacgtggtggacctgctgcccagaaccgagatcagcgacaagatcaccagcgagctggtgagcaagatcggcgacaagaactggaagatcagaaaggagggcctggacgaggtggccggcatcatcaacgacgccaagttcatccagcccaacatcggcgagctgcccaccgccctgaagggcagactgaacgacagcaacaagatcctggtgcagcagaccctgaacatcctgcagcagctggccgtggccatgggccccaacatcaagcagcacgtgaagaacctgggcatccccatcatcaccgtgctgggcgacagcaagaacaacgtgagagccgccgccctggccaccgtgaacgcctgggccgagcagaccggcatgaaggagtggctggagggcgaggacctgagcgaggagctgaagaaggagaaccccttcctgagacaggagctgctgggctggctggccgagaagctgcccaccctgagaagcacccccaccgacctgatcctgtgcgtgccccacctgtacagctgcctggaggacagaaacggcgacgtgagaaagaaggcccaggacgccctgcccttcttcatgatgcacctgggctacgagaagatggccaaggccaccggcaagctgaagcccaccagcaaggaccaggtgctggccatgctggagaaggccaaggtgaacatgcccgccaagcccgccccccccaccaaggccaccagcaagcccatgggcggcagcgcccccgccaagttccagcccgccagcgcccccgccgaggactgcatcagcagcagcaccgagcccaagcccgaccccaagaaggccaaggcccccggcctgagcagcaaggccaagagcgcccagggcaagaagatgcccagcaagaccagcctgaaggaggacgaggacaagagcggccccatcttcatcgtggtgcccaacggcaaggagcagagaatgaaggacgagaagggcctgaaggtgctgaagtggaacttcaccacccccagagacgagtacatcgagcagctgaagacccagatgagcagctgcgtggccaagtggctgcaggacgagatgttccacagcgacttccagcaccacaacaaggccctggccgtgatggtggaccacctggagagcgagaaggagggcgtgatcggctgcctggacctgatcctgaagtggctgaccctgagattcttcgacaccaacaccagcgtgctgatgaaggccctggagtacctgaagctgctgttcaccctgctgagcgaggaggagtaccacctgaccgagaacgaggccagcagcttcatcccctacctggtggtgaaggtgggcgagcccaaggacgtgatcagaaaggacgtgagagccatcctgaacagaatgtgcctggtgtaccccgccagcaagatgttccccttcatcatggagggcaccaagagcaagaacagcaagcagagagccgagtgcctggaggagctgggctgcctggtggagagctacggcatgaacgtgtgccagcccacccccggcaaggccctgaaggagatcgccgtgcacatcggcgacagagacaacgccgtgagaaacgccgccctgaacaccatcgtgaccgtgtacaacgtgcacggcgaccaggtgttcaagctgatcggcaacctgagcgagaaggacatgagcatgctggaggagagaatcaagagaagcgccaagagacccagcgccgcccccatcaagcaggtggaggagaagccccagagagcccagaacatcagcagcaacgccaacatgctgagaaagggccccgccgaggacatgagcagcaagctgaaccaggccagaagcatgagcggccaccccgaggccgcccagatggtgagaagagagttccagctggacctggacgagatcgagaacgacaacggcaccgtgagatgcgagatgcccgagctggtgcagcacaagctggacgacatcttcgagcccgtgctgatccccgagcccaagatcagagccgtgagcccccacttcgacgacatgcacagcaacaccgccagcaccatcaacttcatcatcagccaggtggccagcggcgacatcaacaccagcatccaggccctgacccagatcgacgaggtgctgagacaggaggacaaggccgaggccatgagcggccacatcgaccagttcctgatcgccaccttcatgcagctgagactgatctacaacacccacatggccgacgagaagctggagaaggacgagatcatcaagctgtacagctgcatcatcggcaacatgatcagcctgttccagatcgagagcctggccagagaggccagcaccggcgtgctgaaggacctgatgcacggcctgatcaccctgatgctggacagcagaatcgaggacctggaggagggccagcaggtgatcagaagcgtgaacctgctggtggtgaaggtgctggagaagagcgaccagaccaacatcctgagcgccctgctggtgctgctgcaggacagcctgctggccaccgccagcagccccaagttcagcgagctggtgatgaagtgcctgtggagaatggtgagactgctgcccgacaccatcaacagcatcaacctggacagaatcctgctggacatccacatcttcatgaaggtgttccccaaggagaagctgaagcagtgcaagagcgagttccccatcagaaccctgaagaccctgctgcacaccctgtgcaagctgaagggccccaagatcctggaccacctgaccatgatcgacaacaagaacgagagcgagctggaggcccacctgtgcagaatgatgaagcacagcatggaccagaccggcagcaagagcgacaaggagaccgagaagggcgccagcagaatcgacgagaagagcagcaaggccaaggtgaacgacttcctggccgagatcttcaagaagatcggcagcaaggagaacaccaaggagggcctggccgagctgtacgagtacaagaagaagtacagcgacgccgacatcgagcccttcctgaagaacagcagccagttcttccagagctacgtggagagaggcctgagagtgatcgagatggagagagagggcaagggcagaatcagcaccagcaccggcatcagcccccagatggaggtgacctgcgtgcccacccccaccagcaccgtgagcagcatcggcaacaccaacggcgaggaggtgggccccagcgtgtacctggagagactgaagatcctgagacagagatgcggcctggacaacaccaagcaggacgacagaccccccctgaccagcctgctgagcaagcccgccgtgcccaccgtggccagcagcaccgacatgctgcacagcaagctgagccagctgagagagagcagagagcagcaccagcacagcgacctggacagcaaccagacccacagcagcggcaccgtgaccagcagcagcagcaccgccaacatcgacgacctgaagaagagactggagagaatcaagagcagcagaaagtag

SEQ ID NO: 23510 - protein, 52 aa, Artificial Sequence
  derived and/or modified sequence
MKFLVFAFILALMVSMIGADSSEEYGYGPYQPVPEQPLYPQPYQPQYQQYTF

SEQ ID NO: 23511 - DNA, 159 bp, Artificial Sequence
  derived and/or modified sequence
atgaagttcctggtgttcgccttcatcctggccctgatggtgagcatgatcggcgccgacagcagcgaggagtacggctacggcccctaccagcccgtgcccgagcagcccctgtacccccagccctaccagccccagtaccagcagtacaccttctag

SEQ ID NO: 23512 - DNA, 159 bp, Artificial Sequence
  derived and/or modified sequence
atgaagtttctggtgttcgcgtttatcttagcgttgatggttagtatgattggggcagacagctccgaagaatacgggtatgggccttaccagccagtgccagaacagccactgtacccacaaccgtatcaaccccaatatcaacagtatacattctag

SEQ ID NO: 23513 - DNA, 159 bp, Artificial Sequence
  derived and/or modified sequence
atgaagttcctggtgtttgccttcatcctggccctgatggtgtccatgattggagctgacagcagcgaggagtatggctacggcccctaccagcctgtgcctgagcagcccctgtacccccagccctaccagccccagtaccagcagtacaccttctag

SEQ ID NO: 23514 - DNA, 159 bp, Artificial Sequence
  derived and/or modified sequence
atgaagttcctggtgttcgccttcatcctggccctgatggtgagcatgatcggcgctgactcatctgaggagtacggatatggcccttatcagcctgtgccagaacagccactgtaccctcaaccataccaacctcagtaccagcagtacactttttag

SEQ ID NO: 23515 - DNA, 159 bp, Artificial Sequence
  derived and/or modified sequence
atgaagtttctcgtgttcgcctttattctcgcgcttatggtcagcatgatcggcgcagatagctccgaggaatacggatacgggccttaccagcccgttccggagcaaccattgtacccgcaaccctaccagccccagtaccaacagtataccttttag

SEQ ID NO: 23516 - DNA, 534 bp, Artificial Sequence
  derived and/or modified sequence
atcatctcttgaagcttcacttcaacttcactacttctgtagtctcatcttgagtaaaagagaacccagccaactatgaagttccttgtctttgccttcatcttggctctcatggtttccatgattggagctgattcatctgaagagtatgggtatggcccttatcagccagttccagaacaaccactatacccacaaccataccaaccacaataccaacaatataccttttaatatcatcagtaactgcaggacatgattattgaggcttgattggcaaatacgacttctacatccatattctcatctttcataccatatcacactactaccactttttgaagaatcatcaaagagcaatgcaaatgaaaaacactataatttactgtatactctttgtttcaggatacttgccttttcaattgtcacttgatgatataattgcaatttaaactgttaagctgtgttcagtactgtttctgaataatagaaatcacttctctaaaagcaataaatttcaagcacatttttaca

SEQ ID NO: 23517 - protein, 265 aa, Artificial Sequence
  derived and/or modified sequence
MRRAELAGLKTMAWVPAESAVEELMPRLLPVEPCDLTEGFDPSVPPRTPQEYLRRVQIEAAQCPDVVVAQIDPKKLKRKQSVNISLSGCQPAPEGYSPTLQWQQQQVAQFSTVRQNVNKHRSHWKSQQLDSNVTMPKSEDEEGWKKFCLGEKLCADGAVGPATNESPGIDYVQATVTSVLEYLSNWFGERDFTPELGRWLYALLACLEKPLLPEAHSLIRQLARRCSEVRLLVDSKDDERVPALNLLICLVSRYFDQRDLADEPS

SEQ ID NO: 23518 - DNA, 798 bp, Artificial Sequence
  derived and/or modified sequence
atgagaagagccgagctggccggcctgaagaccatggcctgggtgcccgccgagagcgccgtggaggagctgatgcccagactgctgcccgtggagccctgcgacctgaccgagggcttcgaccccagcgtgccccccagaaccccccaggagtacctgagaagagtgcagatcgaggccgcccagtgccccgacgtggtggtggcccagatcgaccccaagaagctgaagagaaagcagagcgtgaacatcagcctgagcggctgccagcccgcccccgagggctacagccccaccctgcagtggcagcagcagcaggtggcccagttcagcaccgtgagacagaacgtgaacaagcacagaagccactggaagagccagcagctggacagcaacgtgaccatgcccaagagcgaggacgaggagggctggaagaagttctgcctgggcgagaagctgtgcgccgacggcgccgtgggccccgccaccaacgagagccccggcatcgactacgtgcaggccaccgtgaccagcgtgctggagtacctgagcaactggttcggcgagagagacttcacccccgagctgggcagatggctgtacgccctgctggcctgcctggagaagcccctgctgcccgaggcccacagcctgatcagacagctggccagaagatgcagcgaggtgagactgctggtggacagcaaggacgacgagagagtgcccgccctgaacctgctgatctgcctggtgagcagatacttcgaccagagagacctggccgacgagcccagctag

SEQ ID NO: 23519 - DNA, 798 bp, Artificial Sequence
  derived and/or modified sequence
atgcgccgagctgagttagccgggttgaagaccatggcctgggtgcccgcagagtcagctgtggaggaattgatgcccagactactacctgtggagccttgcgacttgaccgagggatttgatccaagcgtgccaccgcggacaccccaagagtatctacgcagggtgcaaatcgaggcggcccagtgcccagatgtggtggtggcccaaatagatcctaaaaagctcaagcggaagcaaagcgtcaacatctccctctctggctgccaaccagctccagaaggctactcaccaacactgcagtggcagcaacaacaggtggcccagttttcaactgtgagacagaatgtcaacaaacatcgctcccactggaaatctcagcagcttgatagcaacgtgaccatgcctaaatcagaagacgaggagggatggaagaagttttgtctgggagaaaagctgtgtgctgacggagctgtgggccctgccacgaatgaaagcccagggattgattacgtccaggccacagtgacctccgtcctagaatacctgagtaattggttcggcgagagagattttactcccgaactcggaagatggctatacgctctactcgcatgccttgagaaacctttgctgcccgaagctcactcgcttattagacagctggcacggcgttgtagcgaagtgaggttattggtggattccaaggatgacgaacgtgttcccgcactgaacctgctgatctgcttagtctctaggtatttcgaccaaagggaccttgctgatgaaccatcctag

SEQ ID NO: 23520 - DNA, 1094 bp, Artificial Sequence
  derived and/or modified sequence
atgcgccgagcggaactggctggtttgaaaaccatggcgtgggtaccagcggagtccgcagtggaagagttgatgcctcggctattgccggtagagccttgcgacttgacggaaggtttcgatccctcggtacccccgaggacgcctcaggaatacctgaggcgggtccagatcgaagcagctcaatgtccagatgttgtggtagctcaaattgacccaaagaagttgaaaaggaagcaaagtgtgaatatttctctttcaggatgccaacccgcccctgaaggttattccccaacacttcaatggcaacagcaacaagtggcacagttttcaactgttcgacagaatgtgaacaaacatagaagtcactggaaatcacaacagttggatagtaatgtgacaatgccaaaatctgaagatgaagaaggctggaagaaattttgtctgggtgaaaagttatgtgctgacggggctgttggaccagccacaaatgaaagtcctggaatagattatgtacaagcaacagtaactagtgtcttggaatatctgagtaattggtttggagaaagagactttactccagaattgggaagatggctttatgctttattggcttgtcttgaaaagcctttgttacctgaggctcattcactgattcggcagcttgcaagaaggtgctctgaagtgaggctcttagtggatagcaaagatgatgagagggttcctgctttgaatttattaatctgcttggttagcaggtattttgaccaacgtgatttagctgatgagccatcttgatgtagctgatctctcagggatagaagatatttctcatgaaggcagcctaactctgaggaaaacaatgccaattcaagtacagatttcaacacatcttcaacactatgtgaagggttcacatcttaacctgtgcaattcagattgatactcagaatatgggttgatttgaatatctgaaatatcaatggaaaatcccactcagtttttgatgaacagtttgaacagttttctgtaatcaagcagcttgcatagaaattgtatgatgaaattttacataggttcttggtgctgttttg

SEQ ID NO: 23521 - DNA, 798 bp, Artificial Sequence
  derived and/or modified sequence
atgagaagagctgagctggccggcctgaagaccatggcctgggtgcctgctgagagcgctgtggaggagctgatgccccggctgctgcctgtggagccctgtgacctgacagagggctttgaccccagcgtgccccccaggaccccccaggagtacctgcggcgggtgcagatcgaggccgcccagtgcccagatgtggtggtggcccagattgaccccaagaagctgaagaggaagcagagcgtgaacatcagcctgagcggctgccagcctgcccctgagggctacagccccaccctgcagtggcagcagcagcaggtggcccagttcagcacagtgcggcagaatgtgaacaagcacaggagccactggaagagccagcagctggacagcaatgtgaccatgcccaagtcagaagatgaggagggctggaagaagttctgcctgggggagaagctgtgtgctgatggagctgtgggccctgccaccaatgaaagccctggcattgattatgtgcaggccaccgtgacctctgtgctggagtacctgagcaactggtttggagagcgggacttcaccccagagctgggccgctggctgtatgccctgctggcctgcctggagaagcccctgctgcctgaggcccacagcctcatccggcagctggcccggcgctgcagcgaggtgcggctgctggtggacagcaaggatgatgagcgggtgcctgccctgaacctgctgatctgcctggtgagccgctactttgaccagagggacctggctgatgagcccagctag

SEQ ID NO: 23522 - DNA, 798 bp, Artificial Sequence
  derived and/or modified sequence
atgcggcgggccgagctggccggcctgaagaccatggcctgggtgccagctgaaagcgccgtagaggaactgatgccgcgattgttaccggtggaaccctgcgaccttacagagggctttgatccatctgtgcccccccggacccctcaagagtacctcagaagagtgcagattgaggctgcccagtgcccagatgtggtggttgcccagatagatccaaagaaactcaaaagaaagcagtcagtgaacatctcactctctggatgccagccggcacccgaaggctatagcccaacgttacagtggcagcagcaacaggtagctcagttcagcactgtgcgacagaacgtgaacaagcataggagccattggaaatcccaacagttggactcgaatgtcactatgcccaaaagcgaagacgaagagggatggaagaaattctgcttgggagaaaagctctgtgccgacggtgccgtaggtcccgctaccaatgaatcgcctggcatcgattacgtgcaggctaccgttacttctgtactggagtatctgtctaactggttcggagagcgggatttcacccccgaactaggtcgctggctctatgccctgttggcttgcctagaaaagcccctgctgcccgaggcacatagtctgatccggcagctggcccggcgctgtagtgaggtccgactccttgttgattccaaggacgacgaaagggttccagccctgaatctgctgatctgtctggtgtcgcgctattttgaccagcgggatctggcggacgagccttcctag

SEQ ID NO: 23523 - DNA, 798 bp, Artificial Sequence
  derived and/or modified sequence
atgcgcagggccgagcttgcaggactgaaaaccatggcttgggttcctgctgaatcagcagttgaagaacttatgccaagactgctgcccgtggaaccatgcgatcttactgagggctttgatccctccgttccacccaggacgccccaagaatatctccgaagggtgcagatcgaagccgctcaatgtccggacgtggtggttgcccagattgacccaaagaagctcaagaggaagcagtctgtgaatatttcgctgagcggatgccagccagctccagaaggatactctccaaccctccagtggcagcagcagcaggtggcgcagttttccaccgttcgccagaatgttaacaaacataggagccactggaagagtcagcaactggactcaaacgtgactatgcccaagagcgaagatgaggaaggatggaagaaattttgcctgggagagaagctctgcgcagacggtgccgtggggcctgccaccaacgagagccctggaatcgactatgttcaggcaaccgtgacctctgtgttggaatatctgtcaaactggtttggcgaacgcgactttactcctgagctcggacgatggctctacgcccttttggcctgcctggaaaagcccctactgccagaagcccactctttaattagacaactggctcgcaggtgttccgaggtcagattactggtcgactctaaagacgatgaacgagttcctgccctcaatctcctgatttgcctcgtaagccgctactttgatcagcgggacctcgctgacgagccttcgtag

SEQ ID NO: 23524 - protein, 250 aa, Artificial Sequence
  derived and/or modified sequence
MRRAELAGLKTMAWVPAESAVEELMPRLLPVEPCDLTEGFDPSVPPRTPQEYLRRVQIEAAQCPDVVVAQIDPKKLKRKQSVNISLSGCQPAPEGYSPTLQWQQQQVAQFSTVRQNVNKHRSHWKSQQLDSNVTMPKSEDEEGWKKFCLGEKLCADGAVGPATNESPGIDYVQIGFPPLLSIVSRMNQATVTSVLEYLSNWFGERDFTPELGRWLYALLACLEKPLLPEAHSLIRQLARRCSEVRLLVVF

SEQ ID NO: 23525 - DNA, 753 bp, Artificial Sequence
  derived and/or modified sequence
atgagaagagccgagctggccggcctgaagaccatggcctgggtgcccgccgagagcgccgtggaggagctgatgcccagactgctgcccgtggagccctgcgacctgaccgagggcttcgaccccagcgtgccccccagaaccccccaggagtacctgagaagagtgcagatcgaggccgcccagtgccccgacgtggtggtggcccagatcgaccccaagaagctgaagagaaagcagagcgtgaacatcagcctgagcggctgccagcccgcccccgagggctacagccccaccctgcagtggcagcagcagcaggtggcccagttcagcaccgtgagacagaacgtgaacaagcacagaagccactggaagagccagcagctggacagcaacgtgaccatgcccaagagcgaggacgaggagggctggaagaagttctgcctgggcgagaagctgtgcgccgacggcgccgtgggccccgccaccaacgagagccccggcatcgactacgtgcagatcggcttcccccccctgctgagcatcgtgagcagaatgaaccaggccaccgtgaccagcgtgctggagtacctgagcaactggttcggcgagagagacttcacccccgagctgggcagatggctgtacgccctgctggcctgcctggagaagcccctgctgcccgaggcccacagcctgatcagacagctggccagaagatgcagcgaggtgagactgctggtggtgttctag

SEQ ID NO: 23526 - DNA, 753 bp, Artificial Sequence
  derived and/or modified sequence
atgaggagagccgagctcgccggcctgaagactatggcatgggtcccagccgagtcagctgtggaagagctcatgcctaggctactgccggtggagccctgtgatttaactgaggggtttgacccttctgtgccaccacgcaccccacaggagtacctgcgccgggtccagatagaggctgcacagtgtcccgacgtagtggtggcccagatcgacccaaagaagctcaaacgcaaacagtctgttaatatcagtttatccggctgtcagcctgcccccgagggctattcccctacgctgcagtggcagcagcaacaggttgctcagttttccaccgttcggcagaacgtgaataaacatcgaagccactggaaatcccagcagctggattcaaatgtcacaatgccgaaaagcgaagatgaagaagggtggaagaagttttgcttaggcgagaagttgtgcgccgatggggcggtcgggcctgctaccaacgagagtcctggtattgactacgtccagatcggattccccccgctgctttctattgtgagccgcatgaatcaggcgacagtaacctcagttctggagtatctgagtaactggtttggagagcgagactttacccccgagttagggaggtggctctacgccctgttagcctgcctggaaaaacctttactccccgaagcccacagcctgatcagacagctggcgcgtcggtgtagtgaagtgaggctcctcgtcgtgttctag

SEQ ID NO: 23527 - DNA, 801 bp, Artificial Sequence
  derived and/or modified sequence
atgcgccgagcggaactggctggtttgaaaaccatggcgtgggtaccagcggagtccgcagtggaagagttgatgcctcggctattgccggtagagccttgcgacttgacggaaggtttcgatccctcggtacccccgaggacgcctcaggaatacctgaggcgggtccagatcgaagcagctcaatgtccagatgttgtggtagctcaaattgacccaaagaagttgaaaaggaagcaaagtgtgaatatttctctttcaggatgccaacccgcccctgaaggttattccccaacacttcaatggcaacagcaacaagtggcacagttttcaactgttcgacagaatgtgaacaaacatagaagtcactggaaatcacaacagttggatagtaatgtgacaatgccaaaatctgaagatgaagaaggctggaagaaattttgtctgggtgaaaagttatgtgctgacggggctgttggaccagccacaaatgaaagtcctggaatagattatgtacaaattggttttcctcccttgcttagtattgttagcagaatgaatcaggcaacagtaactagtgtcttggaatatctgagtaattggtttggagaaagagactttactccagaattgggaagatggctttatgctttattggcttgtcttgaaaagcctttgttacctgaggctcattcactgattcggcagcttgcaagaaggtgctctgaagtgaggctcttagtggtattttgaccaacgtgatttagctgatgagccatcttgatgtagctgatctctcag

SEQ ID NO: 23528 - DNA, 753 bp, Artificial Sequence
  derived and/or modified sequence
atgagaagagctgagctggccggcctgaagaccatggcctgggtgcctgctgagagcgctgtggaggagctgatgccccggctgctgcctgtggagccctgtgacctgacagagggctttgaccccagcgtgccccccaggaccccccaggagtacctgcggcgggtgcagatcgaggccgcccagtgcccagatgtggtggtggcccagattgaccccaagaagctgaagaggaagcagagcgtgaacatcagcctgagcggctgccagcctgcccctgagggctacagccccaccctgcagtggcagcagcagcaggtggcccagttcagcacagtgcggcagaatgtgaacaagcacaggagccactggaagagccagcagctggacagcaatgtgaccatgcccaagtcagaagatgaggagggctggaagaagttctgcctgggggagaagctgtgtgctgatggagctgtgggccctgccaccaatgaaagccctggcattgattatgtgcagatcggcttcccccccctgctgagcatcgtgtccaggatgaaccaggccaccgtgacctctgtgctggagtacctgagcaactggtttggagagcgggacttcaccccagagctgggccgctggctgtatgccctgctggcctgcctggagaagcccctgctgcctgaggcccacagcctcatccggcagctggcccggcgctgcagcgaggtgcggctgctggtggtgttctag

SEQ ID NO: 23529 - DNA, 753 bp, Artificial Sequence
  derived and/or modified sequence
atgcggcgggccgagctggccggcctgaagaccatggcctgggtgcctgctgaatcagcggtggaggagctgatgccacgactgctcccagtagaaccatgcgatctcactgaaggttttgacccgagcgtgccccctcgcacccctcaggagtacttgcggagggtccagattgaagcagcacagtgcccagacgttgtagtggctcaaatcgaccccaaaaagctcaagaggaagcaatcagtcaatatttccctcagcggctgtcagcctgcccctgaaggctactcgcctacgttgcagtggcagcagcaacaggtggctcagttcagcacggtcaggcagaacgttaacaagcaccggtcccactggaagagtcagcagctggattctaacgtcaccatgccaaagtcagaagatgaggagggctggaagaagttttgcctcggcgagaaattgtgtgctgacggtgcggtcggcccagctacaaatgagtcccctggcatcgattatgtgcagattggctttccgccattgctgagtattgtaagccgaatgaatcaagccacggtgacgtccgttctggaatatctgtctaattggttcggtgaacgcgacttcactccggagctgggccgatggctctatgccctgcttgcgtgtttagaaaaacccctgcttccggaggctcacagccttatcagacagctggcccgccggtgctcagaggtcaggctcctcgtggtgttctag

SEQ ID NO: 23530 - DNA, 753 bp, Artificial Sequence
  derived and/or modified sequence
atgcgcagggccgaactggcgggactgaagaccatggcttgggtgcctgcagagtcagctgtggaggagctaatgccgaggctactgccagtggagccatgtgacttaacagaaggctttgaccctagcgtgccccctaggacacctcaggaatatctgcggcgtgtgcagattgaagcggctcaatgtccagatgttgtggtcgctcagatcgatccaaaaaagctgaagaggaagcagtcagtcaatatttcccttagcggctgccagccagctccggaggggtatagccctacattacagtggcaacagcaacaggttgcccagttttctaccgtgcgccaaaacgtgaacaagcacaggtcccattggaaaagccagcaactggatagtaacgttaccatgcccaaaagcgaggacgaggagggctggaagaaattttgcctgggggaaaagctgtgcgccgatggcgctgtggggcctgcaaccaatgagtcccccggtatagactacgtccagatcggattcccgcctctgttatccatagtctcccggatgaatcaggccactgtgacatcggtcctggaatacctgtcgaattggtttggtgaacgtgatttcacacctgaactgggaaggtggctgtacgcactccttgcctgcctggaaaaacctctcctcccagaggcccactctctaattcgacagctggccaggagatgtagtgaggtgcgtctgcttgtggtgttttag

SEQ ID NO: 23531 - protein, 371 aa, Artificial Sequence
  derived and/or modified sequence
MSHEKSFLVSGDNYPPPNPGYPGGPQPPMPPYAQPPYPGAPYPQPPFQPSPYGQPGYPHGPSPYPQGGYPQGPYPQGGYPQGPYPQEGYPQGPYPQGGYPQGPYPQSPFPPNPYGQPQVFPGQDPDSPQHGNYQEEGPPSYYDNQDFPATNWDDKSIRQAFIRKVFLVLTLQLSVTLSTVSVFTFVAEVKGFVRENVWTYYVSYAVFFISLIVLSCCGDFRRKHPWNLVALSVLTASLSYMVGMIASFYNTEAVIMAVGITTAVCFTVVIFSMQTRYDFTSCMGVLLVSMVVLFIFAILCIFIRNRILEIVYASLGALLFTCFLAVDTQLLLGNKQLSLSPEEYVFAALNLYTDIINIFLYILTIIGRAKE

SEQ ID NO: 23532 - protein, 274 aa, Artificial Sequence
  derived and/or modified sequence
MSHEKSFLVSGDNYPPPNPGYPGGPQPPMPPYAQPPYPGAPYPQPPFQPSPYGQPGYPHGPSPYPQGGYPQGPYPQGGYPQGPYPQEGYPQGPYPQGGYPQGPYPQSPFPPNPYGQPQVFPGQDPDSPQHGNYQEEGPPSYYDNQDFPATNWDDKSIRQAFIRKVFLVLTLQLSVTLSTVSVFTFVAEVKGFVRENVWTYYVSYAVFFISLIVLSCCGDFRRKHPWNLVALSVLTASLSYMVGMIASFYNTEAVIMAVGITTAVCFTVVIFSMQ

SEQ ID NO: 23533 - protein, 101 aa, Artificial Sequence
  derived and/or modified sequence
MSHEKSFLVSGDNYPPPNPGYPGGPQPPMPPYAQPPYPGAPYPQPPFQPSPYGQPGYPHGPSPYPQGGYPQGPYPQGGYPQGPYPQEGYPQGPYPQGGYPQ

SEQ ID NO: 23534 - protein, 352 aa, Artificial Sequence
  derived and/or modified sequence
MSHEKSFLVSGDNYPPPYPGAPYPQPPFQPSPYGQPGYPHGPSPYPQGGYPQGPYPQGGYPQGPYPQEGYPQGPYPQGGYPQGPYPQSPFPPNPYGQPQVFPGQDPDSPQHGNYQEEGPPSYYDNQDFPATNWDDKSIRQAFIRKVFLVLTLQLSVTLSTVSVFTFVAEVKGFVRENVWTYYVSYAVFFISLIVLSCCGDFRRKHPWNLVALSVLTASLSYMVGMIASFYNTEAVIMAVGITTAVCFTVVIFSMQTRYDFTSCMGVLLVSMVVLFIFAILCIFIRNRILEIVYASLGALLFTCFLAVDTQLLLGNKQLSLSPEEYVFAALNLYTDIINIFLYILTIIGRAKE

SEQ ID NO: 23535 - DNA, 1116 bp, Artificial Sequence
  derived and/or modified sequence
atgagccacgagaagagcttcctggtgagcggcgacaactaccccccccccaaccccggctaccccggcggcccccagccccccatgcccccctacgcccagcccccctaccccggcgccccctacccccagccccccttccagcccagcccctacggccagcccggctacccccacggccccagcccctacccccagggcggctacccccagggcccctacccccagggcggctacccccagggcccctacccccaggagggctacccccagggcccctacccccagggcggctacccccagggcccctacccccagagccccttcccccccaacccctacggccagccccaggtgttccccggccaggaccccgacagcccccagcacggcaactaccaggaggagggcccccccagctactacgacaaccaggacttccccgccaccaactgggacgacaagagcatcagacaggccttcatcagaaaggtgttcctggtgctgaccctgcagctgagcgtgaccctgagcaccgtgagcgtgttcaccttcgtggccgaggtgaagggcttcgtgagagagaacgtgtggacctactacgtgagctacgccgtgttcttcatcagcctgatcgtgctgagctgctgcggcgacttcagaagaaagcacccctggaacctggtggccctgagcgtgctgaccgccagcctgagctacatggtgggcatgatcgccagcttctacaacaccgaggccgtgatcatggccgtgggcatcaccaccgccgtgtgcttcaccgtggtgatcttcagcatgcagaccagatacgacttcaccagctgcatgggcgtgctgctggtgagcatggtggtgctgttcatcttcgccatcctgtgcatcttcatcagaaacagaatcctggagatcgtgtacgccagcctgggcgccctgctgttcacctgcttcctggccgtggacacccagctgctgctgggcaacaagcagctgagcctgagccccgaggagtacgtgttcgccgccctgaacctgtacaccgacatcatcaacatcttcctgtacatcctgaccatcatcggcagagccaaggagtag

SEQ ID NO: 23536 - DNA, 1116 bp, Artificial Sequence
  derived and/or modified sequence
atgtcgcatgagaaaagctttctagtgagcggcgacaactatcctccccccaaccccgggtatcccggcggaccccagccccccatgcctccttacgcacagccgccgtacccaggcgccccataccctcaaccaccatttcagccttcaccttatggacagcccggatatccacacggcccgtccccatacccacaaggcggctacccacagggaccctatccacaaggaggctatccacaggggccctatccgcaggaaggatacccccagggaccctaccctcaggggggatacccccagggcccgtatcctcagagcccattccctcccaacccttatggccaacctcaggtctttccaggccaggacccagacagcccacaacatggaaattatcaagaggaggggccgccaagttactatgataatcaagactttccggctacaaactgggatgacaaatccattagacaggcatttatcagaaaagtgtttttagtcttaactttgcagctgagcgtaacattaagtacggtgagtgtgttcacctttgtggccgaggtgaagggcttcgtcagggagaatgtctggacttactacgtgagctacgccgtgttttttattagcctcatcgttctcagttgttgcggggacttccggcggaagcacccctggaacctggtggccctctcagttttaacagcgagcctgagctacatggtcggtatgatcgcctctttttataacactgaggctgtgatcatggcggtggggataaccaccgctgtttgtttcacagtcgtgatcttctcgatgcagaccaggtatgacttcaccagctgcatgggggtcctgctggttagcatggtcgtgctattcatttttgcaattctttgcatattcatccgcaatagaatcctagagatcgtgtatgcttcgttgggtgccctgctgttcacctgttttctggccgttgacacgcaactgctgttgggtaataaacaattatcgctgtctcccgaagaatacgtgttcgccgcactcaacttgtatactgacattattaacatcttcctctacatactcaccataatcggtcgagcgaaagagtag

SEQ ID NO: 23537 - DNA, 1116 bp, Artificial Sequence
  derived and/or modified sequence
atgagccatgagaagagcttcctggtgtctggggacaactaccccccacccaaccctggctacccaggcggcccccagccccccatgccaccctatgcccagcccccctacccaggggccccctacccccagccccccttccagcccagcccctacggccagcccggctacccccacggccccagcccctacccccagggcggctacccccagggcccctacccccagggcggctacccccagggcccctacccccaggagggctacccccagggcccctacccccagggcggctacccccagggcccctacccccagagccccttcccccccaacccctacggccagccccaggtgtttcctggccaggaccctgacagcccccagcacggcaactaccaggaggagggcccccccagctactatgacaaccaggacttccctgccaccaactgggatgacaagagcatccggcaggccttcatcaggaaggtgttcctggtgctgaccctgcagctgtctgtgaccctgagcacagtgtctgtgttcacctttgtggccgaggtgaagggctttgtgagagaaaatgtgtggacctactacgtgtcctatgctgtgttcttcatcagcctcatcgtgctgagctgctgcggggacttccggaggaagcacccctggaacctggtggccctgtctgtgctgacagccagcctgagctacatggtgggcatgattgccagcttctacaacacagaagctgtgatcatggctgtgggcatcaccacagctgtgtgcttcaccgtggtgatcttctccatgcagaccaggtatgacttcaccagctgcatgggcgtgctgctggtgtccatggtggtgctcttcatctttgccatcctgtgcatcttcatccggaaccgcatcctggagatcgtgtatgccagcctgggcgccctgctcttcacctgcttcctggccgtggacacccagctgctgctgggcaacaagcagctgagcctgagccctgaggagtatgtgtttgctgccctgaacctgtacacagacatcatcaacatcttcctgtacatcctgaccatcatcggccgggccaaggagtag

SEQ ID NO: 23538 - DNA, 1814 bp, Artificial Sequence
  derived and/or modified sequence
tgagcggccgccgagcgggtgcgggtgcgggcgcatcggccatcaccgcgcggccgcgcagcggacaccgtgcgtaccggcctgcggcgcccggccaccggggcggaccgcggaacccgaggccatgtcccatgaaaagagttttttggtgtctggggacaactatcctccccccaaccctggatatccgggggggccccagccacccatgcccccctatgctcagcctccctaccctggggccccttacccacagccccctttccagccctccccctacggtcagccagggtacccccatggccccagcccctacccccaagggggctacccacagggtccctacccccaagggggctacccacagggcccctacccacaagagggctacccacagggcccctacccccaagggggctacccccaggggccatatccccagagccccttcccccccaacccctatggacagccacaggtcttcccaggacaagaccctgactcaccccagcatggaaactaccaggaggagggtcccccatcctactatgacaaccaggacttccctgccaccaactgggatgacaagagcatccgacaggccttcatccgcaaggtgttcctagtgctgaccttgcagctgtcggtgaccctgtccacggtgtctgtgttcacttttgttgcggaggtgaagggctttgtccgggagaatgtctggacctactatgtctcctatgctgtcttcttcatctctctcatcgtcctcagctgttgtggggacttccggcgaaagcacccctggaaccttgttgcactgtcggtcctgaccgccagcctgtcgtacatggtggggatgatcgccagcttctacaacaccgaggcagtcatcatggccgtgggcatcaccacagccgtctgcttcaccgtcgtcatcttctccatgcagacccgctacgacttcacctcatgcatgggcgtgctcctggtgagcatggtggtgctcttcatcttcgccattctctgcatcttcatccggaaccgcatcctggagatcgtgtacgcctcactgggcgctctgctcttcacctgcttcctcgcagtggacacccagctgctactggggaacaagcagctgtccctgagcccagaagagtatgtgtttgctgcgctgaacctgtacacagacatcatcaacatcttcctgtacatcctcaccatcattggccgcgccaaggagtagccgagctccagctcgctgtgcccgctcaggtggcacggctggcctggaccctgcccctggcacggcagtgccagctgtacttcccctctctcttgtccccaggcacagcctagggaaaaggatgcctctctccaaccctcctgtatgtacactgcagatacttccatttggacccgctgtggccacagcatggcccctttagtcctcccgcccccgccaaggggcaccaaggccacgtttccgtgccacctcctgtctactcattgttgcatgagccctgtctgccagcccaccccagggactgggggcagcaccaggtcccggggagagggattgagccaagaggtgagggtgcacgtcttccctcctgtcccagctccccagcctggcgtagagcacccctcccctcccccccacccccctggagtgctgccctctggggacatgcggagtgggggtcttatccctgtgctgagccctgagggcagagaggatggcatgtttcaggggagggggaagccttcctctcaatttgttgtcagtgaaattccaataaatgggatttgctctctgc

SEQ ID NO: 23539 - DNA, 1116 bp, Artificial Sequence
  derived and/or modified sequence
atgagccacgagaagagcttcctggtgagcggcgacaactacccccctccaaacccgggataccctggtgggccccagcccccaatgccaccatacgctcagcccccgtatcctggagcaccgtacccccaaccccctttccaacctagcccatatgggcaaccaggatacccccacgggcccagcccctatcctcaaggtggttacccacaggggccctatcctcagggcggctatcctcagggcccttacccacaggaaggatatccgcagggtccttatccccagggcggatatccccagggcccctatcctcaaagcccatttccaccaaatccgtatggtcagccccaggtgtttccaggacaggaccccgactcaccccagcacggtaattaccaggaggagggccctcctagctactacgataatcaggattttcccgccaccaattgggacgataaaagtatccggcaggcttttatccgtaaggtatttctggtactcacactgcagctctccgttactctgtcgacagtttctgtgtttacgttcgtcgctgaggtcaagggcttcgtcagggaaaatgtgtggacctactacgtgtcctacgcggtgttctttatatctctgattgtcttgagttgctgtggcgactttcgtcggaaacatccatggaacctcgtcgccttgagtgtgctcacagctagcttatcatatatggtggggatgatcgcctcattttataataccgaggccgtgattatggctgtggggatcaccaccgctgtgtgcttcaccgttgtaattttcagcatgcagacaagatacgactttaccagctgcatgggagtcttattggtaagcatggtcgtcttgtttatctttgcaatcctgtgcatttttatacgcaatcggatcctggagatcgtatacgcttctctcggggctctgctcttcacctgtttcttggctgtagatacccagctgctgctcggcaataaacagctgtccttgtccccggaggagtacgtatttgcagcactaaacttgtacactgatatcattaatatttttctctatatcctgaccattatcggtcgagctaaagagtag

SEQ ID NO: 23540 - DNA, 1116 bp, Artificial Sequence
  derived and/or modified sequence
atgagccatgagaagagtttccttgtatccggggataactatcccccacccaatccgggatatcctggtggacctcagccaccgatgcccccatacgcacaacctccctatcccggtgcaccttacccacagcctccctttcagcccagcccctatggccaacccggatacccccacggcccttctccgtacccccagggcggatacccccaggggccatacccacagggtggctacccacagggcccttaccctcaggaagggtatccccaggggccataccctcagggtggatacccacaggggccatacccgcagagtccttttcccccaaatccatatggccagcctcaggtattccctggccaggacccagactctccccagcatggaaattaccaggaggaaggaccaccgtcatactacgataatcaggatttccctgccacaaattgggacgacaagtccatcaggcaagcgtttattcggaaagtgttcctcgtgctgacactgcagctgtccgtgaccctgagtaccgtgagcgttttcactttcgtggccgaggtgaaaggcttcgtccgagaaaatgtgtggacctactacgtctcctacgccgtgtttttcatctctctgattgtactttcttgttgcggggactttcgcagaaaacatccctggaatctagtggcactgtcggtgttaactgcaagcctgtcatatatggttggcatgatagcctctttctacaacaccgaggcagtaatcatggcggtgggcataaccacagccgtctgctttacagttgtgattttctcaatgcagacaaggtatgattttacctcttgtatgggcgttttactggtgtccatggtggtgctgttcatttttgctattctgtgcatcttcatccgaaaccgcatcctggaaatagtgtatgcctctcttggcgctcttctgtttacgtgtttcttggcagtcgatacgcagctcctgctgggcaataagcagctaagcctgtctccagaggaatatgtgtttgcagccctaaatctttatacagacatcatcaatatttttctttacatactaacaataattgggagagcaaaggaatag

SEQ ID NO: 23541 - DNA, 1116 bp, Artificial Sequence
  derived and/or modified sequence
atgtcccatgaaaaatcctttctggtctcgggggacaattacccaccacctaaccctgggtaccctgggggcccccaacccccaatgcctccctatgctcagcctccgtaccccggagctccctacccccagcctccgttccaaccatcaccatacggccagcctggctatccgcatggaccctccccttacccacagggcggctacccacagggcccgtatccccagggtggttacccccagggcccctacccgcaggaaggctacccccagggcccatatccccagggggggtatccccaaggaccatatccgcagtccccctttcctcctaacccctacgggcagccccaggtgtttcccggacaggacccagattcaccacagcatgggaattaccaggaagaagggcccccttcttactatgacaatcaggattttccagccactaattgggacgataagtcaattaggcaggccttcataaggaaggtctttttggtgctgacactccagctgagcgttacactatctaccgtatccgtttttactttcgtagctgaggttaaaggcttcgtaagagaaaatgtttggacttattatgtgagttatgccgtattcttcatcagtttaatcgttctgtcttgctgcggagacttcagacgtaagcacccttggaatctcgtcgcgttgtcggtccttacggcttctctctcatatatggttgggatgattgcttccttttacaacaccgaggctgtgattatggcagtgggaatcacaacagctgtatgctttactgtcgtgatcttctctatgcagaccaggtatgactttacaagctgtatgggtgttttactggtgtccatggttgtgctctttatctttgccatcctatgtatctttatcaggaacaggatcctggaaattgtgtatgcgagtcttggtgcactgttattcacgtgttttctagccgtcgacactcaacttctgctcggtaataagcaactctccctctcgcctgaagaatacgtttttgcggctctcaacctgtataccgacataataaacatttttctctacatactgacgatcataggcagagctaaagaatag

SEQ ID NO: 23542 - DNA, 1116 bp, Artificial Sequence
  derived and/or modified sequence
atgagccacgagaaatctttccttgtgagtggggataactacccacctccgaatcccggctatcctggcgggccacaaccacccatgccaccatacgcgcagccaccctacccaggcgccccgtacccacagccgccctttcagcctagtccatacggccagccaggctatccccacggtcctagtccctatccacaagggggctatccccagggcccatatccccagggtgggtatccacaagggccctacccccaggaaggatacccacaaggaccctatccccagggcgggtatcctcaaggcccatatcctcaatcccctttccctccaaacccgtacggacagccccaggtatttcctggccaggatcccgacagccctcaacatggtaactaccaagaggaaggacctccttcatattacgacaatcaggattttccagctactaattgggatgacaaaagtattcggcaagcctttatcaggaaggtatttctggtcctgacactacagctctccgtaactctgagcacggtgagcgtgtttaccttcgtggcagaagtgaaaggattcgtgagggagaatgtctggacttattatgtttcttatgcggttttctttatcagcctgattgtgctgtcctgctgtggcgatttcagacgcaagcacccttggaatctcgtggccttgagtgttttgaccgcttccttatcatatatggtcggtatgatcgccagtttctacaacacagaggccgtgataatggcggttggcataacaacggccgtgtgctttaccgtggtgattttcagtatgcagaccagatacgacttcactagctgcatgggggtcctgctcgtctcaatggtcgtgctgttcatattcgccatcttgtgtatctttattcgcaaccggatcctggagatcgtctacgcttccctgggcgccctgctgttcacttgtttcttggctgtggatacacaactcttactgggcaataaacagttgagtttaagtcctgaagagtacgtcttcgcggccctaaatttatacaccgatataataaatatttttttatacatcctgacaatcatcggacgggcaaaggagtag

SEQ ID NO: 23543 - DNA, 825 bp, Artificial Sequence
  derived and/or modified sequence
atgtcccacgaaaagtcttttctcgttagcggcgataactaccccccacctaatcctggctacccaggaggtccgcaaccccccatgcctccttacgcccagccgccctatccaggagccccataccctcagccgcctttccagccaagcccatatggccagcccgggtaccctcacggaccgagtccctatccccaaggtggatatccccaggggccttacccacagggtgggtacccccagggaccttatccacaagagggttatccccaaggcccataccctcagggaggttatccgcagggaccgtacccgcagtccccattcccacctaatccttatgggcagccacaagtgtttcccggtcaggatccagactctcctcaacatgggaattaccaagaggagggtccaccaagctactatgataaccaggactttcccgctaccaactgggatgataaaagcattaggcaagcttttattcggaaagtgttcctggtgctcacactgcagctgtcagtgactctaagtacggtgagcgtgttcacatttgttgccgaggtgaagggtttcgtccgtgaaaacgtttggacttactacgtgagttatgccgttttttttatctcactaatcgtgcttagctgctgcggtgatttcagaagaaagcacccctggaacttagtggcacttagcgtgctgactgcctctctctcttacatggttggaatgatcgccagcttctataataccgaggcagtgatcatggccgtcggcatcaccacagccgtgtgcttcacggttgtcatattctccatgcagtag

SEQ ID NO: 23544 - DNA, 1059 bp, Artificial Sequence
  derived and/or modified sequence
atgagtcatgagaaaagctttctggtaagtggagataactatcctcctccctatccaggagcgccttacccacagccaccatttcagccttccccatatgggcagccgggatacccccacggcccatccccctatccccaggggggctatcctcaggggccctaccctcagggcggatatcctcagggcccatacccacaagaagggtatccacagggcccttatccccaagggggctacccacaggggccctatccacagagtcctttcccaccaaatccttacggacagccgcaggtattccccgggcaggatcccgactcaccacaacatgggaactaccaagaggaaggcccgccatcctactacgataatcaggactttccagccaccaattgggacgataaatctatacggcaggccttcatccgcaaagttttcttggtgctgacccttcagctcagtgtgaccctgtccactgtctctgtcttcacatttgtggcagaggtgaagggtttcgttagagaaaacgtgtggacatattacgtttcatatgccgtgttcttcatcagtctgatcgtactcagttgctgcggcgattttagaaggaaacatccctggaacctagtggccttaagcgtcctcactgcctcgctttcgtatatggtagggatgatcgcctcgttttataatacagaagctgttatcatggctgtgggaatcaccactgcagtgtgttttaccgtggttatattcagtatgcagaccagatacgattttactagctgcatgggggttctgctggtgtcaatggtggtgttatttatattcgccatcctctgcattttcattcgcaaccgcatcttggagatcgtctatgcctctctgggggccctccttttcacctgcttcctggcagttgacactcagttgctgctgggcaacaagcagctttccctgtccccagaagagtatgtgttcgctgcccttaacctgtataccgatataatcaacatattcttgtacatcctcaccatcattggacgggcaaaggaatag

SEQ ID NO: 23545 - DNA, 1968 bp, Artificial Sequence
  derived and/or modified sequence
aaggccccgctgcgtcttccgagccgcaggcgcaggcccagctgagcggccgccgagcgggtgcgggtgcgggcgcatcggccatcaccgcgcggccgcgcagcggacaccgtgcgtaccggcctgcggcgcccggccaccggtgagtccccggcccgagcccaggagcgcctctgacccgctgcgccgcgcggcctgccgcccccgcccccgcccccacgcggatcttgcgcatccgagcgtggccgcctcgggggcggaccgcggaacccgaggccatgtcccatgaaaagagttttttggtgtctggggacaactatcctccccccaaccctggatatccgggggggccccagccacccatgcccccctatgctcagcctccctaccctggggccccttacccacagccccctttccagccctccccctacggtcagccagggtacccccatggccccagcccctacccccaagggggctacccacagggtccctacccccaagggggctacccacagggcccctacccacaagagggctacccacagggcccctacccccaagggggctacccccaggggccatatccccagagccccttcccccccaacccctatggacagccacaggtcttcccaggacaagaccctgactcaccccagcatggaaactaccaggaggagggtcccccatcctactatgacaaccaggacttccctgccaccaactgggatgacaagagcatccgacaggccttcatccgcaaggtgttcctagtgctgaccttgcagctgtcggtgaccctgtccacggtgtctgtgttcacttttgttgcggaggtgaagggctttgtccgggagaatgtctggacctactatgtctcctatgctgtcttcttcatctctctcatcgtcctcagctgttgtggggacttccggcgaaagcacccctggaaccttgttgcactgtcggtcctgaccgccagcctgtcgtacatggtggggatgatcgccagcttctacaacaccgaggcagtcatcatggccgtgggcatcaccacagccgtctgcttcaccgtcgtcatcttctccatgcagacccgctacgacttcacctcatgcatgggcgtgctcctggtgagcatggtggtgctcttcatcttcgccattctctgcatcttcatccggaaccgcatcctggagatcgtgtacgcctcactgggcgctctgctcttcacctgcttcctcgcagtggacacccagctgctactggggaacaagcagctgtccctgagcccagaagagtatgtgtttgctgcgctgaacctgtacacagacatcatcaacatcttcctgtacatcctcaccatcattggccgcgccaaggagtagccgagctccagctcgctgtgcccgctcaggtggcacggctggcctggaccctgcccctggcacggcagtgccagctgtacttcccctctctcttgtccccaggcacagcctagggaaaaggatgcctctctccaaccctcctgtatgtacactgcagatacttccatttggacccgctgtggccacagcatggcccctttagtcctcccgcccccgccaaggggcaccaaggccacgtttccgtgccacctcctgtctactcattgttgcatgagccctgtctgccagcccaccccagggactgggggcagcaccaggtcccggggagagggattgagccaagaggtgagggtgcacgtcttccctcctgtcccagctccccagcctggcgtagagcacccctcccctcccccccacccccctggagtgctgccctctggggacatgcggagtgggggtcttatccctgtgctgagccctgagggcagagaggatggcatgtttcaggggagggggaagccttcctctcaatttgttgtcagtgaaattccaataaatgggatttgctctctgc

SEQ ID NO: 23546 - DNA, 1075 bp, Artificial Sequence
  derived and/or modified sequence
gcaggcgcaggcccagctgagcggccgccgagcgggtgcgggtgcgggcgcatcggccatcaccgcgcggccgcgcagcggacaccgtgcgtaccggcctgcggcgcccggccaccggtgagtccccggcccgagcccaggagcgcctctgacccgctgcgccgcgcggcctgccgcccccgcccccgcccccacgcggatcttgcgcatccgagcgtggccgcctcgggggcggaccgcggaacccgaggccatgtcccatgaaaagagttttttggtgtctggggacaactatcctccccccaaccctggatatccgggggggccccagccacccatgcccccctatgctcagcctccctaccctggggccccttacccacagccccctttccagccctccccctacggtcagccagggtacccccatggccccagcccctacccccaagggggctacccacagggtccctacccccaagggggctacccacagggcccctacccacaagagggctacccacagggcccctacccccaagggggctacccccaggggccatatccccagagccccttcccccccaacccctatggacagccacaggtcttcccaggacaagaccctgactcaccccagcatggaaactaccaggaggagggtcccccatcctactatgacaaccaggacttccctgccaccaactgggatgacaagagcatccgacaggccttcatccgcaaggtgttcctagtgctgaccttgcagctgtcggtgaccctgtccacggtgtctgtgttcacttttgttgcggaggtgaagggctttgtccgggagaatgtctggacctactatgtctcctatgctgtcttcttcatctctctcatcgtcctcagctgttgtggggacttccggcgaaagcacccctggaaccttgttgcactgtcggtcctgaccgccagcctgtcgtacatggtggggatgatcgccagcttctacaacaccgaggcagtcatcatggccgtgggcatcaccacagccgtctgcttcaccgtcgtcatcttctccatgcag

SEQ ID NO: 23547 - DNA, 558 bp, Artificial Sequence
  derived and/or modified sequence
gttgttgggctcgcgggggtgggggggctcgggcctttgttggtcacagatggcccggggatttcctgggatagaaatagccgccggctccggccccttaaagctgcttaaggggcgggatgcggaggggagggtccgggcacaccccacacgtccccggccgagaccccagcctccgcgctgagctcccacccgggagacgccggcagcggcgcaggcctccggttgcttgggcggaccgcggaacccgaggccatgtcccatgaaaagagttttttggtgtctggggacaactatcctccccccaaccctggatatccgggggggccccagccacccatgcccccctatgctcagcctccctaccctggggccccttacccacagccccctttccagccctccccctacggtcagccagggtacccccatggccccagcccctacccccaagggggctacccacagggtccctacccccaagggggctacccacagggcccctacccacaagagggctacccacagggcccctacccccaagggggctacccccag

SEQ ID NO: 23548 - DNA, 1633 bp, Artificial Sequence
  derived and/or modified sequence
atgtcccatgaaaagagttttttggtgtctggggacaactatcctcctccctaccctggggccccttacccacagccccctttccagccctccccctacggtcagccagggtacccccatggccccagcccctacccccaagggggctacccacagggtccctacccccaagggggctacccacagggcccctacccacaagagggctacccacagggcccctacccccaagggggctacccccaggggccatatccccagagccccttcccccccaacccctatggacagccacaggtcttcccaggacaagaccctgactcaccccagcatggaaactaccaggaggagggtcccccatcctactatgacaaccaggacttccctgccaccaactgggatgacaagagcatccgacaggccttcatccgcaaggtgttcctagtgctgaccttgcagctgtcggtgaccctgtccacggtgtctgtgttcacttttgttgcggaggtgaagggctttgtccgggagaatgtctggacctactatgtctcctatgctgtcttcttcatctctctcatcgtcctcagctgttgtggggacttccggcgaaagcacccctggaaccttgttgcactgtcggtcctgaccgccagcctgtcgtacatggtggggatgatcgccagcttctacaacaccgaggcagtcatcatggccgtgggcatcaccacagccgtctgcttcaccgtcgtcatcttctccatgcagacccgctacgacttcacctcatgcatgggcgtgctcctggtgagcatggtggtgctcttcatcttcgccattctctgcatcttcatccggaaccgcatcctggagatcgtgtacgcctcactgggcgctctgctcttcacctgcttcctcgcagtggacacccagctgctactggggaacaagcagctgtccctgagcccagaagagtatgtgtttgctgcgctgaacctgtacacagacatcatcaacatcttcctgtacatcctcaccatcattggccgcgccaaggagtagccgagctccagctcgctgtgcccgctcaggtggcacggctggcctggaccctgcccctggcacggcagtgccagctgtacttcccctctctcttgtccccaggcacagcctagggaaaaggatgcctctctccaaccctcctgtatgtacactgcagatacttccatttggacccgctgtggccacagcatggcccctttagtcctcccgcccccgccaaggggcaccaaggccacgtttccgtgccacctcctgtctactcattgttgcatgagccctgtctgccagcccaccccagggactgggggcagcaccaggtcccggggagagggattgagccaagaggtgagggtgcacgtcttccctcctgtcccagctccccagcctggcgtagagcacccctcccctcccccccacccccctggagtgctgccctctggggacatgcggagtgggggtcttatccctgtgctgagccctgagggcagagaggatggcatgtttcaggggagggggaagccttcctctcaatttgttgtcagtgaaattccaataaatgggatttgctctctgc

SEQ ID NO: 23549 - DNA, 825 bp, Artificial Sequence
  derived and/or modified sequence
atgagccatgagaagagcttcctggtgtctggggacaactaccccccacccaaccctggctacccaggcggcccccagccccccatgccaccctatgcccagcccccctacccaggggccccctacccccagccccccttccagcccagcccctacggccagcccggctacccccacggccccagcccctacccccagggcggctacccccagggcccctacccccagggcggctacccccagggcccctacccccaggagggctacccccagggcccctacccccagggcggctacccccagggcccctacccccagagccccttcccccccaacccctacggccagccccaggtgtttcctggccaggaccctgacagcccccagcacggcaactaccaggaggagggcccccccagctactatgacaaccaggacttccctgccaccaactgggatgacaagagcatccggcaggccttcatcaggaaggtgttcctggtgctgaccctgcagctgtctgtgaccctgagcacagtgtctgtgttcacctttgtggccgaggtgaagggctttgtgagagaaaatgtgtggacctactacgtgtcctatgctgtgttcttcatcagcctcatcgtgctgagctgctgcggggacttccggaggaagcacccctggaacctggtggccctgtctgtgctgacagccagcctgagctacatggtgggcatgattgccagcttctacaacacagaagctgtgatcatggctgtgggcatcaccacagctgtgtgcttcaccgtggtgatcttctccatgcagtag

SEQ ID NO: 23550 - DNA, 306 bp, Artificial Sequence
  derived and/or modified sequence
atgagccatgagaagagcttcctggtgtctggggacaactaccccccacccaaccctggctacccaggcggcccccagccccccatgccaccctatgcccagcccccctacccaggggccccctacccccagccccccttccagcccagcccctacggccagcccggctacccccacggccccagcccctacccccagggcggctacccccagggcccctacccccagggcggctacccccagggcccctacccccaggagggctacccccagggcccctacccccagggcggctacccccagtag

SEQ ID NO: 23551 - DNA, 1059 bp, Artificial Sequence
  derived and/or modified sequence
atgagccatgagaagagcttcctggtgtctggggacaactaccccccaccctacccaggggccccctacccccagccccccttccagcccagcccctacggccagcccggctacccccacggccccagcccctacccccagggcggctacccccagggcccctacccccagggcggctacccccagggcccctacccccaggagggctacccccagggcccctacccccagggcggctacccccagggcccctacccccagagccccttcccccccaacccctacggccagccccaggtgtttcctggccaggaccctgacagcccccagcacggcaactaccaggaggagggccccccatcctactatgacaaccaggacttccctgccaccaactgggatgacaagagcatccggcaggccttcatcaggaaggtgttcctggtgctgaccctgcagctgtctgtgaccctgagcacagtgtctgtgttcacctttgtggccgaggtgaagggctttgtgcgggagaatgtgtggacctactacgtgtcctatgctgtgttcttcatcagcctgattgtgctgagctgctgcggggacttccggaggaagcacccctggaacctggtggccctgtctgtgctgacagccagcctgagctacatggtgggcatgattgccagcttctacaacacagaggccgtcatcatggctgtgggcatcaccacagctgtgtgcttcaccgtggtgatcttctccatgcagaccaggtatgacttcaccagctgcatgggcgtgctgctggtgtccatggtggtgctcttcatctttgccatcctgtgcatcttcatccggaaccgcatcctggagatcgtgtatgccagcctgggcgccctgctcttcacctgcttcctggccgtggacacccagctgctgctgggcaacaagcagctgagcctgagccctgaggagtatgtgtttgctgccctgaacctgtacacagacatcatcaacatcttcctgtacatcctgaccatcatcggccgggccaaggagtag

SEQ ID NO: 23552 - DNA, 1116 bp, Artificial Sequence
  derived and/or modified sequence
atgagccacgagaagagcttcctggtgagcggcgacaactacccccctcctaatcccggctatcccggtggacctcaaccccccatgcccccctatgctcagcctccatacccaggcgccccttacccacaacctccgtttcagccatctccctacggccagcccggttatccacacgggcccagcccttacccccagggcggttatccgcaaggcccgtatccacaaggcggctacccacagggcccctaccctcaggaaggatacccacagggcccctatccccagggtgggtacccacagggaccttatcctcaatccccttttccacccaacccttacggacagccccaagtctttcccggccaggacccagacagtccacagcacggaaactaccaggaagagggcccaccttcttactatgacaatcaggattttcctgctaccaactgggatgataaatcaatccgtcaggcttttatccggaaggtatttctagtgctcacactgcagctgtctgtcacactaagcaccgtgagcgtctttactttcgtggctgaagttaaaggcttcgtaagggagaacgtgtggacgtattacgtctcctatgccgtttttttcatctctttgatcgtgctttcttgttgtggtgacttccgaagaaaacacccctggaacctggtggcactgagtgtgcttactgctagcctgtcatacatggtcggaatgattgcaagtttctacaacaccgaagctgtgattatggcggtggggattaccacagccgtatgtttcacagtcgtcatcttttccatgcaaaccaggtacgacttcacctcctgcatgggcgtgctgctagtatccatggtcgtgctgtttatcttcgccatcctttgcatcttcattagaaacaggattctggagattgtatatgcctcactcggcgccttgctgttcacctgttttcttgcggtggacacacaactgctattgggtaataagcagctctcactgtctccagaggaatatgtctttgccgccctgaatctgtacacggatataattaacatattcctctacatcctcacaatcatcgggcgagctaaggagtag

SEQ ID NO: 23553 - DNA, 1116 bp, Artificial Sequence
  derived and/or modified sequence
atgagccacgagaagagcttcctggtgagcggcgacaactacccccctccaaaccctggctacccagggggcccccagccgcctatgcccccttacgcccaacccccgtatcctggagcaccttatccgcagcctccgtttcaaccctcaccctatggacagccgggataccctcacggacccagcccttatccgcagggcggctacccccaaggaccgtacccacagggcggatacccacagggaccttatccacaggaaggctaccctcaggggccttacccccagggtggataccctcaaggtccttaccctcaatctcccttcccgccaaacccctatggccagccccaggtatttccaggtcaagatcccgactcaccccaacatggcaattaccaggaagagggccccccttcctactacgacaaccaagacttccccgccaccaactgggacgacaaaagcataaggcaggccttcattagaaaagtgtttcttgtactcacattacagctgtcagtaactctatccacagtttctgtgtttacattcgtggcggaggtgaaaggtttcgtccgggaaaatgtttggacctactacgtctcgtatgccgtattctttatcagcttgatcgtgctcagttgctgtggggacttcaggagaaaacacccctggaatttggtggccctttcggtgcttacagcatccctgtcatatatggttggcatgatagcctctttttataatacagaagccgtcatcatggcagtgggaatcaccaccgctgtttgcttcaccgtggtcatatttagcatgcaaactcggtatgacttcacctcctgcatgggcgtgctgctggtcagtatggtcgtcctctttattttcgccattttatgcatctttattcgtaatcgcattctcgagatcgtctatgcaagcctcggtgcattactgtttacatgctttttagccgtagacacacagctcttgctgggtaacaaacagctctctctgtcaccagaggaatacgttttcgcagctcttaatctgtacaccgacattataaacatatttctgtatattctgacgatcatcggaagggcgaaggagtag

SEQ ID NO: 23554 - DNA, 825 bp, Artificial Sequence
  derived and/or modified sequence
atgagccacgagaagagcttcctggtgagcggcgacaactacccccctccaaatcccggatatcccgggggaccccagcccccaatgcctccttatgcccagcctccttatccaggagctccctaccctcagcccccatttcagccaagcccttatggccagccgggctaccctcacgggccttctccctatcctcagggcggctacccacaaggaccctacccgcaggggggctatccacaggggccgtatcctcaggaaggctacccacagggaccatacccgcaaggtgggtacccacaggggccttatccacagtcaccgtttcccccaaatccgtacggacagccacaggttttcccgggccaggatcctgattctccacagcatggcaattatcaggaggaaggcccaccgagttattacgataatcaagatttcccagcgactaattgggatgataaatccatcagacaggcattcataaggaaggtcttcctggtgctgacgctccagctgtccgttacattgtctacagtgtcagtcttcacctttgtcgctgaggtgaaaggatttgtacgggaaaacgtctggacttactacgtcagctacgctgtgttctttatttccctcatcgtgctatcttgctgcggtgatttccgccgaaaacacccctggaatctcgtagccctgtctgtcctaacggccagcctgtcctacatggtaggtatgatcgccagcttctataacacagaggcggtaattatggctgtgggtattacgacagccgtatgtttcactgtggtcatattctccatgcaatag

SEQ ID NO: 23555 - DNA, 306 bp, Artificial Sequence
  derived and/or modified sequence
atgagccacgagaagagcttcctggtgagcggcgacaactacccccccccaaaccccggctatcccggcgggccgcagcctcctatgcccccctacgcgcagcccccctatccgggcgccccgtatccccagcctccctttcagccctctccatacggacagccaggatatcctcatggtcctagtccttatccgcagggagggtacccccagggtccctacccacaaggggggtaccctcaagggccctatccccaggaaggatatccgcagggcccatatcctcaagggggttatcctcaatag

SEQ ID NO: 23556 - DNA, 1059 bp, Artificial Sequence
  derived and/or modified sequence
atgagccacgagaagagcttcctggtgagcggcgacaactacccccctccatacccgggagccccatatccacagcctccctttcaaccctccccctatggccaacctggatatcctcatgggccaagcccgtacccccagggtggatacccccaggggccttatcctcaggggggatacccccaagggccttatcctcaagagggctaccctcaagggccatacccacaaggcggctatcctcaaggcccataccctcagtcaccttttccacccaatccctatggccagccacaggtgtttcctggccaggatcctgattccccgcagcacggcaactaccaagaggagggtccaccatcctactatgataaccaggactttcccgcgacaaactgggatgacaagtccatccggcaggcctttatcaggaaggtgttcctcgtgctcaccctacagctctccgtaacactgtctacagtcagtgttttcacattcgtggccgaggtgaaagggttcgtgagggagaacgtgtggacttattatgtctcctatgctgtgttttttataagcctgatcgtgctttcttgctgtggcgactttagacggaaacacccttggaatctggtggctctgagcgtgctgaccgcctccctgagctatatggtcggtatgattgcatcattttacaacacagaggccgtgattatggcggtcggcatcactacggccgtgtgtttcaccgtggttattttcagcatgcaaaccagatacgactttacatcatgtatgggagtcctcttggtatccatggttgtcttgtttatcttcgcgatcctgtgcatcttcatacggaatcggatccttgagatcgtgtacgcctcactgggagcattgctgtttacctgcttcttggccgtggatacacagttgctattaggcaacaagcaactgtccctatcaccggaagaatacgtgttcgccgccctgaacctctatacagatattatcaatatttttctctatatcctcacaataatcggacgtgcaaaagaatag

SEQ ID NO: 23557 - DNA, 1116 bp, Artificial Sequence
  derived and/or modified sequence
atgagtcatgaaaagagtttcctagtgtccggcgacaactatcccccaccaaatccaggctatccaggagggccacaaccacccatgccaccctacgctcagcctccctacccaggcgcaccatatccacaaccccctttccagccctcaccttacggacagcctggctatcctcatggtccctcaccatacccacagggtggctacccccagggcccttaccctcagggaggctatccgcaaggaccctatcctcaagagggatatccacagggcccataccctcagggtggatatcctcaagggccttacccacagtcacccttccctcccaacccgtacggccagcctcaagtgtttccgggacaggaccctgacagcccccagcacgggaactaccaggaggaaggccctccctcgtattatgacaaccaagattttccagctaccaactgggatgacaagtcaatacggcaggcgtttatcagaaaggtgttccttgtgcttacacttcagctgtcagtgacactgtctaccgtcagcgtgtttaccttcgtcgcagaagtgaagggatttgtgcgcgaaaacgtttggacatattatgtaagctacgcagtgttcttcataagtcttatcgtgttgagttgctgcggcgattttcgccgaaagcatccctggaatctcgtagctctatcagtactgaccgcatctctttcgtatatggtgggtatgattgcatctttttacaacaccgaggccgttataatggccgttggaatcactaccgcagtctgttttaccgtggtcattttttccatgcaaactagatatgactttaccagttgcatgggcgtgctgcttgtgtcgatggttgtactttttatttttgcaatcttgtgcatattcattcgcaatcgcatcttggaaatcgtctatgcgagccttggtgctctgctctttacctgtttcctggccgtcgatacacagctgctgctcggcaacaagcagctgtccctgtctcccgaagagtatgtttttgccgctttgaatctgtacactgacatcatcaacatcttcctttacattctgaccattatagggcgagcgaaggagtag

SEQ ID NO: 23558 - DNA, 1116 bp, Artificial Sequence
  derived and/or modified sequence
atgtctcacgaaaagagtttcctggtcagtggcgacaattatccaccgccaaatccaggctatcctgggggtccccaaccgcctatgcctccgtatgcacagcccccataccctggagcgccttaccctcaaccccctttccagccctcaccctacgggcagcctggatacccccacgggccttcaccctacccccagggtggttacccccagggcccatatccacagggagggtatccacagggaccttacccccaggagggctatccgcagggtccatatccccagggtggctacccccagggcccatatccacagagcccattccctcctaatccctatgggcagccgcaggtgtttccagggcaggatcctgacagtcctcaacacggaaattatcaggaggagggccctccatcttactacgacaaccaggacttccccgctacgaactgggacgataagtcgattcgtcaggccttcatcagaaaagtcttccttgttctgactctccagctgagcgtgactctcagcaccgtgtcagtttttacttttgtggctgaggtgaagggtttcgtgagagagaatgtttggacctactacgtttcgtatgccgtgttcttcattagtttaatcgttcttagttgttgcggcgactttcgcagaaaacatccctggaacctggtggctctatccgtgctgactgctagtctgtcatacatggtgggaatgatcgctagcttctacaacacggaagccgtcatcatggctgtgggaatcactaccgccgtctgtttcaccgttgttattttttcaatgcagacccggtatgacttcacttcttgtatgggcgtcttgctggtaagtatggtcgtactgttcatatttgcaattctctgcattttcatcaggaatcggatcttggagatagtctacgcttccctgggcgctcttctttttacgtgctttttagcagtcgatacacaattgttgttagggaataagcagctgtccctctcccccgaagaatacgtgtttgctgctttaaatctctacacagatatcattaatattttcctgtacatccttaccatcattggcagggccaaggaatag

SEQ ID NO: 23559 - DNA, 825 bp, Artificial Sequence
  derived and/or modified sequence
atgtctcatgagaagagtttcttggtgagcggagacaattaccccccacctaaccctgggtatccaggcggaccacagccccctatgcctccatacgcacaacctccataccctggtgcaccatatccacaacccccattccaacccagtccgtacggacagccagggtatccgcacggcccatccccataccctcaaggcggatacccacagggcccttacccccagggcggttatccgcaggggccttatccacaggagggatacccccagggaccctatccgcaggggggttatccacaggggccttatccccagagccctttcccgccaaatccgtacggccaaccacaggtgtttcccggacaagatccagacagcccacagcacgggaattatcaggaagaaggccctccttcttactatgacaatcaagacttcccagctactaattgggatgataagtccatccggcaggcttttattagaaaggtgttcctggtcttgactctgcaactgtccgtgacattgtcaaccgtgagtgtgttcaccttcgtcgctgaggtcaagggctttgtgagagaaaacgtctggacttactatgtgagctatgccgtattctttatctctctgattgtactgtcctgctgcggggattttcggaggaagcacccttggaacctggtggctttgtcggtattgactgcaagtctgtcctacatggtcggcatgatcgcgagtttctacaacaccgaggccgtcattatggcggtggggatcaccaccgccgtctgcttcaccgtcgttatcttctccatgcagtag

SEQ ID NO: 23560 - DNA, 1059 bp, Artificial Sequence
  derived and/or modified sequence
atgtcacacgaaaaaagctttcttgtgagtggagataattacccccctccatatccaggcgctccctacccacaacctccattccagcccagtccgtatgggcagcccggttatccgcacggtcccagcccttatccacaaggagggtacccgcaagggccttatccacagggcggataccctcagggcccatacccacaggaggggtaccctcaaggaccgtacccgcagggaggctacccccagggaccgtaccctcaaagcccatttcccccaaatccctatggacagccccaggtgttccccggacaggatccagacagtccccagcatgggaactaccaggaggaagggcctccttcttactatgacaatcaggacttcccagcgaccaactgggacgataagtcaatccgtcaggcgttcatccgcaaggttttcttagtgctgaccttacagttaagcgtcacactaagcactgtctccgtgtttacttttgtcgccgaggtcaagggctttgtccgcgagaacgtgtggacatactacgtgtcctacgccgtattttttatctccctcattgttcttagctgctgcggcgatttccgcaggaaacatccttggaatctggtggccctaagtgttctgacagcttcgttgtcctatatggttgggatgatcgcgtccttctacaataccgaagccgtcatcatggccgttggcatcacgacagcagtgtgcttcaccgtcgtgatcttttcaatgcagacgaggtatgactttaccagctgcatgggcgtgctgctggttagcatggtcgttctcttcattttcgcaattttgtgcattttcatccggaatcgcatcctcgagatagtctacgcctctctgggggcattgctcttcacgtgttttttggctgtggacacacagctgctgctgggaaacaaacagttgtcactatcgcccgaagaatatgtattcgccgctcttaacctgtatacagatatcatcaacatcttcctttatatactcacgatcataggcagggccaaagaatag

SEQ ID NO: 23561 - DNA, 825 bp, Artificial Sequence
  derived and/or modified sequence
atgagccacgagaagagcttcctggtgagcggcgacaactaccccccccccaaccccggctaccccggcggcccccagccccccatgcccccctacgcccagcccccctaccccggcgccccctacccccagccccccttccagcccagcccctacggccagcccggctacccccacggccccagcccctacccccagggcggctacccccagggcccctacccccagggcggctacccccagggcccctacccccaggagggctacccccagggcccctacccccagggcggctacccccagggcccctacccccagagccccttcccccccaacccctacggccagccccaggtgttccccggccaggaccccgacagcccccagcacggcaactaccaggaggagggcccccccagctactacgacaaccaggacttccccgccaccaactgggacgacaagagcatcagacaggccttcatcagaaaggtgttcctggtgctgaccctgcagctgagcgtgaccctgagcaccgtgagcgtgttcaccttcgtggccgaggtgaagggcttcgtgagagagaacgtgtggacctactacgtgagctacgccgtgttcttcatcagcctgatcgtgctgagctgctgcggcgacttcagaagaaagcacccctggaacctggtggccctgagcgtgctgaccgccagcctgagctacatggtgggcatgatcgccagcttctacaacaccgaggccgtgatcatggccgtgggcatcaccaccgccgtgtgcttcaccgtggtgatcttcagcatgcagtag

SEQ ID NO: 23562 - DNA, 306 bp, Artificial Sequence
  derived and/or modified sequence
atgagccacgagaagagcttcctggtgagcggcgacaactaccccccccccaaccccggctaccccggcggcccccagccccccatgcccccctacgcccagcccccctaccccggcgccccctacccccagccccccttccagcccagcccctacggccagcccggctacccccacggccccagcccctacccccagggcggctacccccagggcccctacccccagggcggctacccccagggcccctacccccaggagggctacccccagggcccctacccccagggcggctacccccagtag

SEQ ID NO: 23563 - DNA, 1059 bp, Artificial Sequence
  derived and/or modified sequence
atgagccacgagaagagcttcctggtgagcggcgacaactacccccccccctaccccggcgccccctacccccagccccccttccagcccagcccctacggccagcccggctacccccacggccccagcccctacccccagggcggctacccccagggcccctacccccagggcggctacccccagggcccctacccccaggagggctacccccagggcccctacccccagggcggctacccccagggcccctacccccagagccccttcccccccaacccctacggccagccccaggtgttccccggccaggaccccgacagcccccagcacggcaactaccaggaggagggcccccccagctactacgacaaccaggacttccccgccaccaactgggacgacaagagcatcagacaggccttcatcagaaaggtgttcctggtgctgaccctgcagctgagcgtgaccctgagcaccgtgagcgtgttcaccttcgtggccgaggtgaagggcttcgtgagagagaacgtgtggacctactacgtgagctacgccgtgttcttcatcagcctgatcgtgctgagctgctgcggcgacttcagaagaaagcacccctggaacctggtggccctgagcgtgctgaccgccagcctgagctacatggtgggcatgatcgccagcttctacaacaccgaggccgtgatcatggccgtgggcatcaccaccgccgtgtgcttcaccgtggtgatcttcagcatgcagaccagatacgacttcaccagctgcatgggcgtgctgctggtgagcatggtggtgctgttcatcttcgccatcctgtgcatcttcatcagaaacagaatcctggagatcgtgtacgccagcctgggcgccctgctgttcacctgcttcctggccgtggacacccagctgctgctgggcaacaagcagctgagcctgagccccgaggagtacgtgttcgccgccctgaacctgtacaccgacatcatcaacatcttcctgtacatcctgaccatcatcggcagagccaaggagtag

SEQ ID NO: 23564 - protein, 722 aa, Artificial Sequence
  derived and/or modified sequence
MLTFFLVSGGSLWLFVEFVLSLLEKMQTQEILRILRLPELGDLGQFFRSLSATTLVSMGALAAILAYWFTHRPKALQPPCNLLMQSEEVEDSGGARRSVIGSGPQLLTHYYDDARTMYQVFRRGLSISGNGPCLGFRKPKQPYQWLSYQEVADRAEFLGSGLLQHNCKACTDQFIGVFAQNRPEWIIVELACYTYSMVVVPLYDTLGPGAIRYIINTADISTVIVDKPQKAVLLLEHVERKETPGLKLIILMDPFEEALKERGQKCGVVIKSMQAVEDCGQENHQAPVPPQPDDLSIVCFTSGTTGNPKGAMLTHGNVVADFSGFLKVTEKVIFPRQDDVLISFLPLAHMFERVIQSVVYCHGGRVGFFQGDIRLLSDDMKALCPTIFPVVPRLLNRMYDKIFSQANTPLKRWLLEFAAKRKQAEVRSGIIRNDSIWDELFFNKIQASLGGCVRMIVTGAAPASPTVLGFLRAALGCQVYEGYGQTECTAGCTFTTPGDWTSGHVGAPLPCNHIKLVDVEELNYWACKGEGEICVRGPNVFKGYLKDPDRTKEALDSDGWLHTGDIGKWLPAGTLKIIDRKKHIFKLAQGEYVAPEKIENIYIRSQPVAQIYVHGDSLKAFLVGIVVPDPEVMPSWAQKRGIEGTYADLCTNKDLKKAILEDMVRLGKESGLHSFEQVKAIHIHSDMFSVQNGLLTPTLKAKRPELREYFKKQIEELYSISM

SEQ ID NO: 23565 - protein, 712 aa, Artificial Sequence
  derived and/or modified sequence
MQTQEILRILRLPELGDLGQFFRSLSATTLVSMGALAAILAYWFTHRPKALQPPCNLLMQSEEVEDSGGARRSVIGSGPQLLTHYYDDARTMYQVFRRGLSISGNGPCLGFRKPKQPYQWLSYQEVADRAEFLGSGLLQHNCKACTDQFIGVFAQNRPEWIIVELACYTYSMVVVPLYDTLGPGAIRYIINTGLSCQEGASATASTQADISTVIVDKPQKAVLLLEHVERKETPGLKLIILMDPFEEALKERGQKCGVVIKSMQAVEDCGQENHQAPVPPQPDDLSIVCFTSGTTGNPKGAMLTHGNVVADFSGFLKVTEKVIFPRQDDVLISFLPLAHMFERVIQSVVYCHGGRVGFFQGDIRLLSDDMKALCPTIFPVVPRLLNRMYDKIFSQANTPLKRWLLEFAAKRKQAEVRSGIIRNDSIWDELFFNKIQASLGGCVRMIVTGAAPASPTVLGFLRAALGCQVYEGYGQTECTAGCTFTTPGDWTSGHVGAPLPCNHIKLVDVEELNYWACKGEGEICVRGPNVFKGYLKDPDRTKEALDSDGWLHTGDIGKWLPAGTLKIIDRKKHIFKLAQGEYVAPEKIENIYIRSQPVAQIYVHGDSLKAFLVGIVVPDPEVMPSWAQKRGIEGTYADLCTNKDLKKAILEDMVRLGKESGLHSFEQVKAIHIHSDMFSVQNGLLTPTLKAKRPELREYFKKQIEELYSISM

SEQ ID NO: 23566 - DNA, 2169 bp, Artificial Sequence
  derived and/or modified sequence
atgctgacctttttcctggtcagtggtgggagcctgtggcttttcgtagaatttgtcctcagtctgcttgagaaaatgcagactcaggaaatacttcgcattctcagacttcctgagctgggcgacctcggacagttcttccggtccctcagcgctactaccctcgtatccatgggggccctcgccgccatactggcatattggttcacccatagacctaaggcactgcagcccccatgcaatctcctgatgcagagcgaggaggttgaagattcaggaggagcgagaaggtccgttattgggagcggcccccagttgctcacacactactacgatgatgcgagaactatgtaccaggtgtttaggcgagggctgagtattagcggaaatgggccatgtttagggttcagaaaacctaagcagccttatcagtggctctcataccaggaagtcgctgaccgagctgagtttcttgggagtgggttgctccaacataactgcaaggcctgcaccgaccagttcataggcgtattcgctcagaacaggccggaatggatcatagttgagctagcttgttacacctatagcatggtggtggtgccgctgtacgacacgcttggccccggagcaattagatatataatcaatacagcagacatttctacagtcatagtggataaaccccaaaaggccgtgctgctgcttgagcacgtggagcgaaaggagactcccggtttaaaattgatcatcctgatggacccgttcgaggaggcactgaaggagaggggccagaaatgtggagtagtgattaagagtatgcaggcagtcgaggactgcggtcaagagaaccaccaggctccggtaccaccccagcccgatgacctgtccatcgtatgctttacatcagggaccacaggaaaccccaagggagcaatgcttactcatgggaacgttgtcgcagatttcagcgggtttctcaaagttactgaaaaggtgatatttccaaggcaagatgatgtcctcatttcgttcttgccgctggcacacatgtttgagagggtcatccagagtgtagtgtattgtcacgggggacgggtggggtttttccaaggggacatccgactgctgagcgatgatatgaaggccctatgtccaactatctttccagtcgtgccccggctattgaacaggatgtatgacaagatcttcagtcaggcgaacacccctctgaagcgatggttactggagtttgccgccaaaaggaaacaggccgaagtacgcagtggcattatacggaacgattccatctgggacgaactcttctttaacaagattcaggccagcttgggaggttgcgtgcgcatgatcgtcacgggcgcggccccagctagtcctaccgtgctcggtttcctgcgggcagctttgggatgccaggtctatgagggatatggtcaaacggaatgtacagccggatgtaccttcacgacgcccggtgactggacctctggtcatgtaggtgctccacttccgtgcaaccacattaagctggtggatgtggaggaactcaattattgggcgtgcaagggagagggtgaaatttgcgtcagaggaccgaatgtgtttaagggatatttgaaagacccggatcgcacaaaagaggctctggacagcgacggctggctccacacaggcgacatagggaagtggttgcccgcaggcaccttgaagataatcgataggaagaaacatatctttaaactcgcccagggcgaatatgtcgccccagagaaaatcgagaatatctacatcagaagccagcctgtggcccagatctatgtgcatggggacagcttgaaggcctttctggtgggaattgtcgtgccagaccccgaagtgatgccctcgtgggctcagaagcgcggaatcgagggcacatacgcagacctgtgtaccaataaggacttgaaaaaggccatcctggaagacatggtgcggctaggcaaggaatctggcctgcactcattcgaacaggtgaaagcaattcatatccactctgacatgttttctgtccagaacgggcttctcacgcctacattgaaggcgaaacggcccgaactgcgggagtactttaagaaacagattgaagaactgtactcaattagcatgtag

SEQ ID NO: 23567 - DNA, 2169 bp, Artificial Sequence
  derived and/or modified sequence
atgctgaccttcttcctggtgtctgggggcagcctgtggctgtttgtggagtttgtgctgagcctgctggagaagatgcagacccaggagatcctgcgcatcctgcggctgcctgagctgggggacctgggccagttcttccgcagcctgagcgccaccaccctggtgtccatgggcgccctggccgccatcctggcctactggttcacccaccggcccaaggccctgcagcccccctgcaacctgctgatgcagagcgaggaggtggaggacagcggcggggcccggcgcagcgtcatcggcagcggcccccagctgctgacccactactatgatgatgcccggaccatgtaccaggtgttccggcggggcctgagcatctctggaaatggcccctgcctgggcttcaggaagcccaagcagccctaccagtggctgagctaccaggaggtggccgacagagctgagttcctgggcagcggcctgctgcagcacaactgcaaggcctgcacagaccagttcatcggcgtgtttgcccagaacagacctgagtggatcatcgtggagctggcctgctacacctacagcatggtggtggtgcccctgtatgacaccctgggccctggggccatccgctacatcatcaacacagctgacatcagcaccgtcatcgtggacaagccccagaaggctgtgctgctgctggagcacgtggagaggaaggagaccccaggcctgaagctgatcatcctgatggacccctttgaggaggccctgaaggagcggggccagaagtgtggggtggtgatcaagtccatgcaggccgtggaggactgtggccaggagaaccaccaggcccctgtgcccccccagccagatgacctgagcatcgtgtgcttcaccagcggcaccactggaaaccccaagggggccatgctgacccatggaaatgtggtggccgacttcagcggcttcctgaaggtgacagagaaggtgatcttcccccggcaggatgatgtgctgatctccttcctgcccctggcccacatgtttgagagggtcatccagagcgtggtgtactgccacggcggccgggtgggcttcttccagggcgacatccggctgctgagtgatgacatgaaggccctgtgccccaccatcttccctgtggtgccccggctgctgaacaggatgtatgacaagatcttcagccaggccaacacccccctgaagcgctggctgctggagtttgctgccaagaggaagcaggccgaggtgcgcagcggcatcatcagaaatgacagcatctgggatgagctgttcttcaacaagatccaggccagcctgggcggctgtgtgaggatgattgtgactggagctgccccagccagccccaccgtgctgggcttcctgcgggccgccctgggctgccaggtgtatgagggctacggccagacagaatgtacagctggctgcaccttcaccacccctggggactggaccagcggccacgtgggcgcccccctgccctgcaaccacatcaagctggtggatgtggaggagctgaactactgggcctgcaagggggagggggagatctgtgtgcggggccccaacgtgttcaagggctacctgaaggaccctgacaggaccaaggaggccctggacagtgatggctggctgcacactggagacatcggcaagtggctgcctgctggcaccctgaagatcatcgacaggaagaagcacatcttcaagctggcccagggcgagtatgtggcccctgagaagattgagaacatctacatccgcagccagcctgtggcccagatctacgtgcacggggacagcctgaaggccttcctggtgggcatcgtggtgcctgaccctgaggtgatgcccagctgggcccagaagaggggcatcgagggcacctatgctgacctgtgcaccaacaaggacctgaagaaggccatcctggaggacatggtgcggctgggcaaggagagcggcctgcacagctttgagcaggtgaaggccatccacatccacagcgacatgttttctgtgcagaatggcctgctgacccccaccctgaaggccaagaggcctgagctgcgggagtacttcaagaagcagatcgaggagctgtacagcatctccatgtag

SEQ ID NO: 23568 - DNA, 2169 bp, Artificial Sequence
  derived and/or modified sequence
atgctgaccttcttcctggtgagcggcggcagcctgtggctgttcgtagaattcgtattgtcactcctagaaaaaatgcagacccaggagatccttagaatcctgagactgcccgagctaggtgatttaggacaattctttcgcagccttagcgccactacactggtgtcgatgggcgcactggcagcaatcctggcttattggttcactcaccggcccaaggccctacagccaccctgtaacctgcttatgcaatctgaggaggtcgaagattctggcggcgcacggcgatccgtgattggatcagggccccagttgttgacccactattacgatgacgcaagaacgatgtaccaggtcttcaggcgcggcctctctatatcaggtaatggcccctgcttaggattcagaaaacccaaacagccatatcagtggctgagttaccaggaagtggctgaccgagctgagttcttggggtccggattgctgcagcataactgtaaagcgtgtactgatcagttcataggagtttttgcgcagaacaggccagagtggatcatcgtggaactggcatgttacacatattcaatggtagtggtgcctctgtatgacaccttaggaccaggggccatcaggtatatcattaacaccgctgacatttctaccgtgattgtagataagcctcaaaaggcagtcctgcttttggagcacgttgagcggaaagagacacccggtttgaagctcatcattcttatggatccctttgaagaagccttaaaagaacggggccagaaatgtggcgtggtcataaaatctatgcaggctgtcgaagactgtgggcaggaaaatcaccaggcacctgtccctccccagccagacgacctttcaattgtgtgtttcaccagtggaaccaccgggaatccaaaaggggcaatgctgacacacggtaatgttgtggcagatttctccggtttcctgaaggtaactgaaaaggttattttccccagacaggacgacgtgctcataagtttcttacctctcgcccatatgttcgaacgggtgatacagagtgtggtgtactgccatgggggtcgtgtcggcttcttccagggcgacattcggttgctgtctgacgatatgaaggcgctttgtccaactatcttcccggttgttccccgactcttgaatcggatgtacgacaaaatcttttcccaggccaatactcccctcaaacggtggctgctcgagttcgcggccaaacgcaagcaggctgaagtccgctctggaatcattcggaatgactccatctgggatgaactgtttttcaacaagatacaggccagtctcggaggctgtgtgcgtatgattgtcactggcgccgcgccagctagcccgaccgtgctagggtttctccgggccgcgttgggctgccaggtttacgaagggtacggccagactgaatgtacagccggctgcacattcacaacaccgggtgattggaccagcgggcacgtgggggcacctcttccctgcaatcacatcaagttggtcgatgtcgaagaactaaattactgggcctgcaaaggtgagggggagatctgcgtgcgtggtccgaacgtctttaagggctacttgaaagatcccgatcgtaccaaggaggcactagattctgatggatggctgcacacgggggacatcggcaagtggctacctgccggcaccctaaaaatcattgatcggaaaaagcacattttcaaactggcgcagggagagtatgtcgctcctgaaaaaattgagaacatatatatcagaagtcaacccgtcgcccaaatctatgttcatggcgactctctgaaggctttcttggttggaatcgtggtgcctgaccctgaagttatgccaagctgggctcaaaaaagaggcattgaaggcacttatgcagatctgtgtactaacaaagatcttaagaaggccatactagaggacatggtgaggctcggtaaggaatctgggctacactcctttgaacaggtcaaagctattcacattcactcagatatgttttctgtgcagaatgggctgttgacaccaaccctcaaagctaagcgccctgaactcagagagtattttaagaagcagatcgaggagctctactcaatttccatgtag

SEQ ID NO: 23569 - DNA, 2169 bp, Artificial Sequence
  derived and/or modified sequence
atgctgactttttttctcgtttctggtggtagtctctggctgtttgttgagtttgtgctatctctccttgaaaaaatgcagacccaggagattctcagaatccttcgcctcccagagctcggcgatcttgggcaattcttccggagtctatccgcgaccaccttggtctctatgggggcactggcagcgattcttgcttattggtttacgcatcgacccaaggccttacagcccccatgtaatctcctgatgcagtccgaggaggtggaagatagcgggggagcgaggcgatccgtcatcgggtccggccctcagttgttgacacattactacgacgacgcccgaactatgtatcaggtgtttaggagaggcttatctattagcggcaacggaccctgtcttggctttcgcaaacccaaacagccctaccagtggctcagctaccaggaggtggccgaccgcgcagaattcttggggagtggtctgttgcagcacaattgtaaggcttgtacagaccagtttatcggagtctttgcccaaaacagaccggagtggatcattgtggagctcgcatgctacacgtactctatggtggtcgtgcctctgtatgatactctcgggcctggggctattagatacatcattaacacagcggatatatctaccgtcatcgtagataaaccccagaaggccgtgcttttactcgaacacgtagagcggaaagaaacaccaggcctgaaattaatcatacttatggatcctttcgaagaggcgctcaaagagaggggacagaaatgtggcgtcgttattaaaagcatgcaggccgtagaggactgtggtcaggagaatcatcaagcccctgtgcctccccaaccagatgatttgtcaatagtgtgtttcacctcggggacgaccggcaatcccaaaggggctatgcttacccatggcaatgtggttgcggacttctccggctttcttaaagtaactgagaaagtcatcttccctagacaggacgacgtgctcatttcttttctgcctctggctcatatgtttgaaagagtcatccagagcgtcgtgtattgccacggcggtcgcgtaggcttcttccaaggcgacataagattacttagtgacgatatgaaggcactatgtcctactatttttccagtggtgccacgcctgcttaacagaatgtatgacaagatctttagtcaagccaacactccccttaagaggtggcttcttgaatttgctgcaaagaggaagcaggccgaggtaaggagcggaattattcgcaacgactccatctgggatgaactgttttttaataagattcaggcctccctcggcggatgtgtgcggatgattgtgacgggtgctgcgccagcttcccctactgttctcggttttcttagagctgcccttggttgccaagtgtatgagggctacggacagactgagtgtacagctggttgtacattcaccaccccaggtgactggacatctgggcacgtgggcgctcccctcccctgtaatcatattaagctcgttgacgttgaagagctaaactattgggcttgcaagggcgagggagagatctgcgtcagaggaccaaatgtctttaagggataccttaaggatcccgataggacaaaagaggcactggatagcgacggatggctgcacactggagacataggaaaatggcttccagccggtaccctgaagatcatcgatcgcaagaagcacattttcaaacttgcgcagggcgaatatgttgcccctgaaaaaattgaaaatatctacatcaggtcacagcccgtcgcgcagatttatgtacatggcgattctctgaaggcttttcttgttggaatcgtggttccggatccggaagttatgcccagttgggctcagaagagaggtatagagggtacctatgctgatctttgcactaacaaggatctcaagaaagccatcctagaggatatggtgaggttggggaaggagagcgggctgcactcctttgaacaagtcaaggcgatacacattcactcagatatgttttctgtgcagaatggcctgcttacaccaacgctgaaggctaaaaggcctgaactaagggaatactttaaaaagcaaatcgaagaattatactctatatccatgtag

SEQ ID NO: 23570 - DNA, 2169 bp, Artificial Sequence
  derived and/or modified sequence
atgctgaccttcttcctggtgagcggcggcagcctgtggctgttcgtggagttcgtgctgagcctgctggagaagatgcagacccaggagatcctgagaatcctgagactgcccgagctgggcgacctgggccagttcttcagaagcctgagcgccaccaccctggtgagcatgggcgccctggccgccatcctggcctactggttcacccacagacccaaggccctgcagcccccctgcaacctgctgatgcagagcgaggaggtggaggacagcggcggcgccagaagaagcgtgatcggcagcggcccccagctgctgacccactactacgacgacgccagaaccatgtaccaggtgttcagaagaggcctgagcatcagcggcaacggcccctgcctgggcttcagaaagcccaagcagccctaccagtggctgagctaccaggaggtggccgacagagccgagttcctgggcagcggcctgctgcagcacaactgcaaggcctgcaccgaccagttcatcggcgtgttcgcccagaacagacccgagtggatcatcgtggagctggcctgctacacctacagcatggtggtggtgcccctgtacgacaccctgggccccggcgccatcagatacatcatcaacaccgccgacatcagcaccgtgatcgtggacaagccccagaaggccgtgctgctgctggagcacgtggagagaaaggagacccccggcctgaagctgatcatcctgatggaccccttcgaggaggccctgaaggagagaggccagaagtgcggcgtggtgatcaagagcatgcaggccgtggaggactgcggccaggagaaccaccaggcccccgtgcccccccagcccgacgacctgagcatcgtgtgcttcaccagcggcaccaccggcaaccccaagggcgccatgctgacccacggcaacgtggtggccgacttcagcggcttcctgaaggtgaccgagaaggtgatcttccccagacaggacgacgtgctgatcagcttcctgcccctggcccacatgttcgagagagtgatccagagcgtggtgtactgccacggcggcagagtgggcttcttccagggcgacatcagactgctgagcgacgacatgaaggccctgtgccccaccatcttccccgtggtgcccagactgctgaacagaatgtacgacaagatcttcagccaggccaacacccccctgaagagatggctgctggagttcgccgccaagagaaagcaggccgaggtgagaagcggcatcatcagaaacgacagcatctgggacgagctgttcttcaacaagatccaggccagcctgggcggctgcgtgagaatgatcgtgaccggcgccgcccccgccagccccaccgtgctgggcttcctgagagccgccctgggctgccaggtgtacgagggctacggccagaccgagtgcaccgccggctgcaccttcaccacccccggcgactggaccagcggccacgtgggcgcccccctgccctgcaaccacatcaagctggtggacgtggaggagctgaactactgggcctgcaagggcgagggcgagatctgcgtgagaggccccaacgtgttcaagggctacctgaaggaccccgacagaaccaaggaggccctggacagcgacggctggctgcacaccggcgacatcggcaagtggctgcccgccggcaccctgaagatcatcgacagaaagaagcacatcttcaagctggcccagggcgagtacgtggcccccgagaagatcgagaacatctacatcagaagccagcccgtggcccagatctacgtgcacggcgacagcctgaaggccttcctggtgggcatcgtggtgcccgaccccgaggtgatgcccagctgggcccagaagagaggcatcgagggcacctacgccgacctgtgcaccaacaaggacctgaagaaggccatcctggaggacatggtgagactgggcaaggagagcggcctgcacagcttcgagcaggtgaaggccatccacatccacagcgacatgttcagcgtgcagaacggcctgctgacccccaccctgaaggccaagagacccgagctgagagagtacttcaagaagcagatcgaggagctgtacagcatcagcatgtag

SEQ ID NO: 23571 - DNA, 6539 bp, Artificial Sequence
  derived and/or modified sequence
cggcagcggcggcggcggcgcggctactgctggggctgctgggctgcggggctgcggggctgcgggtcggggaggccgggccgggccgggccgggccccgctgaccgccatgctgaccttcttcctcgtgtcggggggctccctctggctattcgtagagtttgtcctctcacttctggagaagatgcagacacaggagatcctgaggatactgcgactgcctgagctaggtgacttgggacagtttttccgcagcctctcggccaccaccctcgtgagtatgggtgccctggctgccatccttgcctactggttcactcaccggccaaaggccttgcagccgccatgcaacctcctgatgcagtcagaagaagtagaggacagtggcggggcacggcgatctgtgattgggtctggccctcagctacttacccactactatgatgatgcccggaccatgtaccaggtgttccgccgtgggcttagcatctcagggaatgggccctgtcttggtttcaggaagcctaagcagccttaccagtggctgtcctaccaggaggtggccgacagggctgaatttctggggtccggacttctccagcacaattgtaaagcatgcactgatcagtttattggtgtttttgcacaaaatcggccagagtggatcattgtggagctggcctgctacacatattccatggtggtggtcccgctctatgacaccctgggccctggggctatccgctacatcatcaatacagcggacatcagcaccgtgattgtggacaaacctcagaaggctgtgcttctgctagagcatgtggagaggaaggagactccaggcctcaagctgatcatcctcatggacccattcgaagaagccctgaaagagagagggcagaagtgcggggtggtcattaagtccatgcaggccgtggaggactgtggccaagagaatcaccaggctcctgtgcccccgcagcctgatgacctctccattgtgtgtttcacaagcggcacgacagggaacccaaaaggtgcgatgctcacccatgggaacgtggtggctgatttctcaggctttctgaaagtgacagagaaagtgatctttccgagacaggacgatgtgctcatctccttcctgcctctggctcacatgtttgagagagtaatccagtctgtcgtctattgccacggagggcgtgttggcttcttccagggagatatccgccttctctcagatgacatgaaggctctatgccccaccatcttccctgtggtcccacgactgctgaaccggatgtacgacaagatcttcagccaggcaaacacaccattaaagcgctggctcctggagtttgcagcaaagcgtaagcaagccgaggtccggagtggaatcatcaggaatgatagtatctgggatgaactcttctttaataagattcaggccagtcttggtgggtgtgtgcggatgattgttactggagcagccccagcatcaccaacagttctgggatttctccgggcagctctagggtgccaggtttatgaaggttatggccaaactgagtgcacagctggatgtaccttcaccactcctggcgactggacctcagggcacgtaggggcgccacttccctgcaatcatatcaagctcgttgatgttgaggaactgaactactgggcctgcaaaggagagggagagatatgtgtgagaggaccaaatgtgttcaaaggctacttgaaagatccagacaggacgaaggaggccctggacagcgatggctggcttcacactggagacatcggaaaatggctgccggcaggaactcttaaaattattgatcggaaaaagcatatatttaaacttgctcagggagaatatgttgcacccgagaagattgagaacatctacatccggagccaacctgtggcgcaaatctatgtccatggggacagcttaaaggcctttttggtaggcattgttgtgcctgaccctgaagttatgccctcctgggcccagaagagaggaattgaaggaacatatgcagatctctgcacaaataaggatctgaagaaagccattttggaagatatggtgaggttaggaaaagaaagtggactccattcttttgagcaggttaaagccattcacatccattctgacatgttctcagttcaaaatggcttgctgacaccaacactaaaagctaagagacctgagctgagagagtacttcaaaaaacaaatagaagagctttactcaatctccatgtgaagttcaaggaaagttcttctcagtgtaatgaactgtctagcaatattatagttattcttgaaagtaatgagtcaaaatgacacagctgaaaatgaataagcatctgattttatgactgagccttttcctgtcccaagaggtctttaacaatattttctctatcatcaatgagtatattttatttttattataaaaatgatattgtggtggactgctaaaaatatcacaaatggcaatgtaaaaatcaagacattttctcaagaactgtgtaccactaaaagtaatatattgtcaatgttcacagaactattaaacataaaggaaaaacataagtgatatattctacttaattatttgtgaatcagtaaccagatgcagcaaatatctaggcaatgtggactacctcattcagtaactgattgtcaaaatcacaattaaatcagacttcaaaaattaaagctaggtgtatagaatcatgctaaaagaaaacatgataactcatagtctacgtaacttcagagtctttaaacatgacaatccacattgtcatatgtgaaaattttctctctgatttttactttcattcatgaaaaatgaaaattcagaaattctttttttcctttttgttttgagacagggtctgctctgtcacctaggctggagtgcagtggcttaatcatggctcattgcagtctccatctcctgggctcgagtgatcctcctgtctcacctcccaagtagctgagactacagtacaggcacatgccaccacacctggctaatagaaattttttttttagagattttgctcaggctggtctcaaactcctgagctcaagggatcctcccgccttggcctccctaagtgctaggattacaggcatgagccattgttcccagccaaattcagatattattaaaacacatgtcatatttatatagtaacttacaaagacctttcaatacattttctcatttattaagctcattaaagtattcaggaactacctagaaaaaatataatgtaaaactattcaaggatagtgtgtgtatgttcatggacttcttattataatgaattctaaaagacatctgttgactctacaatgaatggatccttgaggaatacttgggagaagaaactcagagttatttctcagggtaggcagcaattaatgtacctacattccttgctggggtcttctagtcttccattcccaatgtgcccatgctatgcctggaaaccctatatggttgtaattctgaacaatttcactttttttccagtaagaatatcaaggcagaaggtgggaaggaggggacattatttccagggaaaatagtttttcaacaatataactttgataaacctctttaaaatgccccaagaaaactttttaagtccatagacaaagaaatactgcctaatggcataattacattcctaaaatctttaagcgtgccgaagtttaaccactaaaacctcctttcttgcattatgtatttagatgcaccctgtattggggtgtcaacaatttcttataattaaaggccagataccatggacagcaattaagttccaagctatagattgtgcctctgaaaaaggcatggaccccaggaacgtgtttttcttctgtagagacaagactctaaaagcatatcaacaatccatatgcaattcatgtgttaatttaaaatgtatgtgctcagtgtttgtagtctagaagctcctttcccttggaggaatgccaagcagtttgcaaaaataaatgctgttagttaaaaaccacataatcacatgggcctactgaataaatatgcatcagtgattatatacttatatttcagtcttgtcaaaagtgaatcactgtttcatttgatgtatttacccagtctttttatccagtttttcttgggcatattctctctgaagacccactgttgcacttctaaatttgacagttaagaaatgagctagttctatacacactgatttttaaaggcgtttctgaataaactaatacttaaaatgtccaaagtcacatctgtacagcattagatttttatatttaatatatatttgactaattaaaagtgaaagttgttacctgaactggatattcatactattttaagggcaagttgcttacatttcaataacaacaaaaaaagaatctgtttcccattgtcctcctactcaactaaaattcatagttggctttaagcccaaaagaattttgaacaatgtgacagaaacaagtaatgtaaaacttattttgttttatttatactttataatagttagatataacagattatggacaacttaatatttcttctttttggctgggcgcggtggctcatgcctgtaatcccagcactttgggaggccgaggcgggcagatcacgaagtcaggagatcgagaccatcctggctaacacagtgaaaccccgtctctactaaaaaaatacaaaaaattagccgggcgttgtggcgggcgcctgtagtcccagctactcgggaggctgaggcaggagaatggcatgaacctgggaggcggagcttgcagtgagccgagatcccgccactgtactccagcctgggcaacagaacgagactccgtctcaaaaagaaagaaaaaaaaaaaacaaaaacaaggtttcttctttttgccacttaaaatatcttatatttctagatttccaggtctatgtggaaatcatcacacttgggccaataaatgggttagttcagatgtgctgagaaaagtaaatagtgtaccctaaatatcttgcatgtacatttatctatttctctgtttaatgccacttaattttgtaagaaatgagaaatgaaaccctatgtatcagtggaaaaatccttcttgcttcagatttcccaactttattctggaggagaaaaaaatctgtatttctcattaacagagatagaaaaaggtgatgtacttacgatggtcacattcatattgggcattggatctatttaagcctagaagtataacagataatcagttccttaagtgtaaatatgttcttaaatgtttggcctttttatctgttattcaaatgtattagtaattctcatattttgcaaacagatccttttgtgtatattataaaatatataccaaatctgtttttccttttgctgtggaagatgtctttatataatattgagacttcccttgcaaatgagagacgggactctggtcaggtatagtgtgtaggcctagccccatgtattaggaactcataaactcagaaatccaaggattaaacattttatgtctccttcatttatgcaagtcatgctttcattctacatgtagttaaaactacaagtatgagaaaaaatagaactttccattggaattttttccaatcaggtaatgttttagcaacttgaaatcagcacttaatttgattgtattacctatcaaagaaccaataacctttcctttttctgcagtaaagaaaatgaaatatcctttattttccaaatgtatgaagcacaaatgcaatatagttatttaaaatataaaatactttaaaatgaatgtgaagaatgggaaaatatatttttgcatgaaaacagactacttacaaatgtgcttaatatctcaggaaaaaaagaatgaataaccgtatataaaattggtaaactataaattggctgtatttccttgccggttttaattttaaggaagcatttacatgaaaagaaaaaaggatcctagtagtctgaatttcctctcaagtatgctagaaaatactttctatgaatttacaattaactgcaataagaagtgggttagcattcaagtaaggtcaataccccaaatgagaaactcttcagttagaacacattagtggttgtaacacagaggcagtagataaatatttgaaatgtgagcatttctaaacttggtaccaaatggaaagggtttcatgaggtgacagtggcttttaaacattcatttgaccgattattctaattttccttgttaaatcattgcaacagttgcatgggggagaatggatattttttgaagaattgcttattccactttcaatttttaaaaatcgaggggattaaaatattactttttaaatatgcataaaagtatcttaactgtaattacattttcagttgctttgttatagtagcatgcatattaaatataaaatgcatttatgaaaatttttgtaaaaaataaaagatttttcatttctcaaa

SEQ ID NO: 23572 - DNA, 4913 bp, Artificial Sequence
  derived and/or modified sequence
gggctgcggggctgcggggctgcgggtcggggaggccgggccgggccgggccgggccccgctgaccgccatgctgaccttcttcctcgtgtcggggggctccctctggctattcgtagagtttgtcctctcacttctggagaagatgcagacacaggagatcctgaggatactgcgactgcctgagctaggtgacttgggacagtttttccgcagcctctcggccaccaccctcgtgagtatgggtgccctggctgccatccttgcctactggttcactcaccggccaaaggccttgcagccgccatgcaacctcctgatgcagtcagaagaagtagaggacagtggcggggcacggcgatctgtgattgggtctggccctcagctacttacccactactatgatgatgcccggaccatgtaccaggtgttccgccgtgggcttagcatctcagggaatgggccctgtcttggtttcaggaagcctaagcagccttaccagtggctgtcctaccaggaggtggccgacagggctgaatttctggggtccggacttctccagcacaattgtaaagcatgcactgatcagtttattggtgtttttgcacaaaatcggccagagtggatcattgtggagctggcctgctacacatattccatggtggtggtcccgctctatgacaccctgggccctggggctatccgctacatcatcaatacagggctcagctgccaagaaggagcctctgcaacagcctccacacaggcggacatcagcaccgtgattgtggacaaacctcagaaggctgtgcttctgctagagcatgtggagaggaaggagactccaggcctcaagctgatcatcctcatggacccattcgaagaagccctgaaagagagagggcagaagtgcggggtggtcattaagtccatgcaggccgtggaggactgtggccaagagaatcaccaggctcctgtgcccccgcagcctgatgacctctccattgtgtgtttcacaagcggcacgacagggaacccaaaaggtgcgatgctcacccatgggaacgtggtggctgatttctcaggctttctgaaagtgacagagaaagtgatctttccgagacaggacgatgtgctcatctccttcctgcctctggctcacatgtttgagagagtaatccagtctgtcgtctattgccacggagggcgtgttggcttcttccagggagatatccgccttctctcagatgacatgaaggctctatgccccaccatcttccctgtggtcccacgactgctgaaccggatgtacgacaagatcttcagccaggcaaacacaccattaaagcgctggctcctggagtttgcagcaaagcgtaagcaagccgaggtccggagtggaatcatcaggaatgatagtatctgggatgaactcttctttaataagattcaggccagtcttggtgggtgtgtgcggatgattgttactggagcagccccagcatcaccaacagttctgggatttctccgggcagctctagggtgccaggtttatgaaggttatggccaaactgagtgcacagctggatgtaccttcaccactcctggcgactggacctcagggcacgtaggggcgccacttccctgcaatcatatcaagctcgttgatgttgaggaactgaactactgggcctgcaaaggagagggagagatatgtgtgagaggaccaaatgtgttcaaaggctacttgaaagatccagacaggacgaaggaggccctggacagcgatggctggcttcacactggagacatcggaaaatggctgccggcaggaactcttaaaattattgatcggaaaaagcatatatttaaacttgctcagggagaatatgttgcacccgagaagattgagaacatctacatccggagccaacctgtggcgcaaatctatgtccatggggacagcttaaaggcctttttggtaggcattgttgtgcctgaccctgaagttatgccctcctgggcccagaagagaggaattgaaggaacatatgcagatctctgcacaaataaggatctgaagaaagccattttggaagatatggtgaggttaggaaaagaaagtggactccattcttttgagcaggttaaagccattcacatccattctgacatgttctcagttcaaaatggcttgctgacaccaacactaaaagctaagagacctgagctgagagagtacttcaaaaaacaaatagaagagctttactcaatctccatgtgaagttcaaggaaagttcttctcagtgtaatgaactgtctagcaatattatagttattcttgaaagtaatgagtcaaaatgacacagctgaaaatgaataagcatctgattttatgactgagccttttcctgtcccaagaggtctttaacaatattttctctatcatcaatgagtatattttatttttattataaaaatgatattgtggtggactgctaaaaatatcacaaatggcaatgtaaaaatcaagacattttctcaagaactgtgtaccactaaaagtaatatattgtcaatgttcacagaactattaaacataaaggaaaaacataagtgatatattctacttaattatttgtgaatcagtaaccagatgcagcaaatatctaggcaatgtggactacctcattcagtaactgattgtcaaaatcacaattaaatcagacttcaaaaattaaagctaggtgtatagaatcatgctaaaagaaaacatgataactcatagtctacgtaacttcagagtctttaaacatgacaatccacattgtcatatgtgaaaattttctctctgatttttactttcattcatgaaaaatgaaaattcagaaattctttttttcctttttgttttgagacagggtctgctctgtcacctaggctggagtgcagtggcttaatcatggctcattgcagtctccatctcctgggctcgagtgatcctcctgtctcacctcccaagtagctgagactacagtacaggcacatgccaccacacctggctaatagaaattttttttttagagattttgctcaggctggtctcaaactcctgagctcaagggatcctcccgccttggcctccctaagtgctaggattacaggcatgagccattgttcccagccaaattcagatattattaaaacacatgtcatatttatatagtaacttacaaagacctttcaatacattttctcatttattaagctcattaaagtattcaggaactacctagaaaaaatataatgtaaaactattcaaggatagtgtgtgtatgttcatggacttcttattataatgaattctaaaagacatctgttgactctacaatgaatggatccttgaggaatacttgggagaagaaactcagagttatttctcagggtaggcagcaattaatgtacctacattccttgctggggtcttctagtcttccattcccaatgtgcccatgctatgcctggaaaccctatatggttgtaattctgaacaatttcactttttttccagtaagaatatcaaggcagaaggtgggaaggaggggacattatttccagggaaaatagtttttcaacaatataactttgataaacctctttaaaatgccccaagaaaactttttaagtccatagacaaagaaatactgcctaatggcataattacattcctaaaatctttaagcgtgccgaagtttaaccactaaaacctcctttcttgcattatgtatttagatgcaccctgtattggggtgtcaacaatttcttataattaaaggccagataccatggacagcaattaagttccaagctatagattgtgcctctgaaaaaggcatggaccccaggaacgtgtttttcttctgtagagacaagactctaaaagcatatcaacaatccatatgcaattcatgtgttaatttaaaatgtatgtgctcagtgtttgtagtctagaagctcctttcccttggaggaatgccaagcagtttgcaaaaataaatgctgttagttaaaaaccacataatcacatgggcctactgaataaatatgcatcagtgattatatacttatatttcagtcttgtcaaaagtgaatcactgtttcatttgatgtatttacccagtctttttatccagtttttcttgggcatattctctctgaagacccactgttgcacttctaaatttgacagttaagaaatgagctagttctatacacactgatttttaaaggcgtttctgaataaactaatacttaaaatgtccaaagtcacatctgtacagcattagatttttatatttaatatatatttgactaattaaaagtgaaagttgttacctgaactggatattcatactattttaagggcaagttgcttacatttcaataacaacaaaaaaagaatctgtttcccattgtcctcctactcaactaaaattcatagttggctttaagcccaaaagaattttgaacaatgtgacagaaacaagtaatgtaaaacttattttgttttatttatactttataatagttagatataacagattatggacaacttaatatttcttctttttggctgggcgcggtggctcatgcctgtaatcccagcactttgggaggccgaggcgggcagatcacgaagtcaggagatcgagaccatcctggctaacacagtgaaaccccgtctctactaaaaaaatacaaaaaattagccgggcgttgtggcgggcgcctgtagtcccagctactcgggaggctgaggcaggagaatggcatgaacctgggaggcggagcttgcagtgagccgagatcccgccactgtactccagcctgggcaacagaacgagactccgtctc

SEQ ID NO: 23573 - protein, 486 aa, Artificial Sequence
  derived and/or modified sequence
MAAVKTLNPKAEVARAQAALAVNISAARGLQDVLRTNLGPKGTMKMLVSGAGDIKLTKDGNVLLHEMGLHPRIITEGFEAAKEKALQFLEEVKVSREMDRETLIDVARTSLRTKVHAELADVLTEAVVDSILAIKKQDEPIDLFMIEIMEMKHKSETDTSLIRGLVLDHGARHPDMKKRVEDAYILTCNVSLEYEKTEVNSGFFYKSAEEREKLVKAERKFIEDRVKKIIELKRKVCGDSDKGFVVINQKGIDPFSLDALSKEGIVALRRAKRRNMERLTLACGGVALNSFDDLSPDCLGHAGLVYEYTLGEEKFTFIEKCNNPRSVTLLIKGPNKHTLTQIKDAVRDGLRAVKNAIDDGCVVPGAGAVEVAMAEALIKHKPSVKGRAQLGVQAFADALLIIPKVLAQNSGFDLQETLVKIQAEHSESGQLVGVDLNTGEPMVAAEVGVWDNYCVKKQLLHSCTVIATNILLVDEIMRAGMSSLKG

SEQ ID NO: 23574 - DNA, 1461 bp, Artificial Sequence
  derived and/or modified sequence
atggccgccgtgaagaccctgaaccccaaggccgaggtggccagagcccaggccgccctggccgtgaacatcagcgccgccagaggcctgcaggacgtgctgagaaccaacctgggccccaagggcaccatgaagatgctggtgagcggcgccggcgacatcaagctgaccaaggacggcaacgtgctgctgcacgagatgggcctgcaccccagaatcatcaccgagggcttcgaggccgccaaggagaaggccctgcagttcctggaggaggtgaaggtgagcagagagatggacagagagaccctgatcgacgtggccagaaccagcctgagaaccaaggtgcacgccgagctggccgacgtgctgaccgaggccgtggtggacagcatcctggccatcaagaagcaggacgagcccatcgacctgttcatgatcgagatcatggagatgaagcacaagagcgagaccgacaccagcctgatcagaggcctggtgctggaccacggcgccagacaccccgacatgaagaagagagtggaggacgcctacatcctgacctgcaacgtgagcctggagtacgagaagaccgaggtgaacagcggcttcttctacaagagcgccgaggagagagagaagctggtgaaggccgagagaaagttcatcgaggacagagtgaagaagatcatcgagctgaagagaaaggtgtgcggcgacagcgacaagggcttcgtggtgatcaaccagaagggcatcgaccccttcagcctggacgccctgagcaaggagggcatcgtggccctgagaagagccaagagaagaaacatggagagactgaccctggcctgcggcggcgtggccctgaacagcttcgacgacctgagccccgactgcctgggccacgccggcctggtgtacgagtacaccctgggcgaggagaagttcaccttcatcgagaagtgcaacaaccccagaagcgtgaccctgctgatcaagggccccaacaagcacaccctgacccagatcaaggacgccgtgagagacggcctgagagccgtgaagaacgccatcgacgacggctgcgtggtgcccggcgccggcgccgtggaggtggccatggccgaggccctgatcaagcacaagcccagcgtgaagggcagagcccagctgggcgtgcaggccttcgccgacgccctgctgatcatccccaaggtgctggcccagaacagcggcttcgacctgcaggagaccctggtgaagatccaggccgagcacagcgagagcggccagctggtgggcgtggacctgaacaccggcgagcccatggtggccgccgaggtgggcgtgtgggacaactactgcgtgaagaagcagctgctgcacagctgcaccgtgatcgccaccaacatcctgctggtggacgagatcatgagagccggcatgagcagcctgaagggctag

SEQ ID NO: 23575 - DNA, 2529 bp, Artificial Sequence
  derived and/or modified sequence
agcgggcgccggacgacctgtggcccaatggcggcggcgcgcgggcacgctgggggccggccagacgggccgacttttccagaagacccggatagttcctcccggccacgccgcgccggctctgggcactcagcatcgtttccttttcctccgctggagcagctatggcggcggtgaagaccctgaaccccaaggccgaggtggcccgagcgcaggcggcgctggcggtcaacatcagcgcagcgcggggtctgcaggacgtgctaaggaccaacctggggcccaagggcaccatgaagatgctcgtttctggcgctggagacatcaaacttactaaagacggcaatgtgctgcttcacgaaatgggccttcatcctagaataatcactgaaggatttgaagctgcaaaggaaaaggcccttcagtttttggaagaagtcaaagtaagcagagagatggacagggaaacacttatagatgtggccagaacatctcttcgtactaaagttcatgctgaacttgcagatgtcttaacagaggctgtagtggactccattttggccattaaaaagcaagatgaacctattgatctcttcatgattgagatcatggagatgaaacataaatctgaaactgatacaagcttaatcagagggcttgttttggaccacggagcacggcatcctgatatgaagaaaagggtggaggatgcatacatcctcacttgtaacgtgtcattagagtatgagaaaacagaagtgaattctggctttttttacaagagtgcagaagagagagaaaaactcgtgaaagctgaaagaaaattcattgaagatagggttaaaaaaataatagaactgaaaaggaaagtctgtggcgattcagataaaggatttgttgttattaatcaaaagggaattgaccccttttccttagatgctctttcaaaagaaggcatagttgctctgcgcagagctaaaaggagaaatatggagaggctgactcttgcttgtggtggggtagccctgaattcttttgacgacctaagtcctgactgcttgggacatgcaggacttgtatatgagtatacattgggagaagagaagtttacctttattgagaaatgtaacaaccctcgttctgtcacattattgatcaaaggaccaaataagcacacactcactcagatcaaagatgcagtgagggacggcttgagggctgtcaaaaatgctattgatgatggctgtgtggttccaggtgctggtgccgtggaagtggcaatggcagaagccctgattaaacataagcccagtgtaaagggcagggcacagcttggagtccaagcatttgctgatgcattgctcattattcccaaggttcttgctcagaactctggttttgaccttcaggaaacattagttaaaattcaagcagaacattcagaatcaggtcagcttgtgggtgtggacctgaacacaggtgagccaatggtggcagcagaagtaggcgtatgggataactattgtgtaaagaaacagcttcttcactcctgcactgtgattgccaccaacattctcttggttgatgagatcatgcgagctggaatgtcttctctgaaaggttgaattgaagcttcctctgtatctgaatcttgaagactgcaaagtgatcctgaggattacagctgtggaatttttgtccaagcttcaaataattttgaaagaaattttcccatatgaaaaaaggagagaacactggcatctgttgaaatttggaagttctgaaattatagtatttttaaaaattgcactgaagtgtatacacataaagcaggtcttttatccagtgaacaggatgttttgctttagcagcagtgacataaaattccatgttagataagcatatgttacttaccttgttattaaatatttcttgaaaagcaaattttaatggtttaattttatgtggacgtatgttaaattatccaactaccctattgttaagcatttggttttaaaatttttatgctaatataaatgctcaagtaatttaaaatattgaaagcatccctgttggtataaatttctgagtaaatgcattggatcagttggactttgaacgcctttgaaatggctttgctaaaatgctcccgccacaaagttgtaggaaatgggaagaggagtcaactagaggcaagggagttgagagagctgcaactgtaaagggcaagaacaggcagaggtaaaaagatgatggaaggtgtggtgactaagggccacggttattgggtgaaatttgagattgtaggccaactgtattttcaagcttctgaacttaggcaaaatattcatcgcaaagtctctagcgtcatatttttctcacccaaattacgtttccacgagattatttatatatagttggtctatctctgcagtccttgaaggtgaagttgtgtgttactaggctgtgttttgggatgtcagcagtggcctgaagtgagttgtgcaataaatgttaagttgaaacctc

SEQ ID NO: 23576 - DNA, 1170 bp, Artificial Sequence
  derived and/or modified sequence
atggacagagagaccctgatcgacgtggccagaaccagcctgagaaccaaggtgcacgccgagctggccgacgtgctgaccgaggccgtggtggacagcatcctggccatcaagaagcaggacgagcccatcgacctgttcatgatcgagatcatggagatgaagcacaagagcgagaccgacaccagcctgatcagaggcctggtgctggaccacggcgccagacaccccgacatgaagaagagagtggaggacgcctacatcctgacctgcaacgtgagcctggagtacgagaagaccgaggtgaacagcggcttcttctacaagagcgccgaggagagagagaagctggtgaaggccgagagaaagttcatcgaggacagagtgaagaagatcatcgagctgaagagaaaggtgtgcggcgacagcgacaagggcttcgtggtgatcaaccagaagggcatcgaccccttcagcctggacgccctgagcaaggagggcatcgtggccctgagaagagccaagagaagaaacatggagagactgaccctggcctgcggcggcgtggccctgaacagcttcgacgacctgagccccgactgcctgggccacgccggcctggtgtacgagtacaccctgggcgaggagaagttcaccttcatcgagaagtgcaacaaccccagaagcgtgaccctgctgatcaagggccccaacaagcacaccctgacccagatcaaggacgccgtgagagacggcctgagagccgtgaagaacgccatcgacgacggctgcgtggtgcccggcgccggcgccgtggaggtggccatggccgaggccctgatcaagcacaagcccagcgtgaagggcagagcccagctgggcgtgcaggccttcgccgacgccctgctgatcatccccaaggtgctggcccagaacagcggcttcgacctgcaggagaccctggtgaagatccaggccgagcacagcgagagcggccagctggtgggcgtggacctgaacaccggcgagcccatggtggccgccgaggtgggcgtgtgggacaactactgcgtgaagaagcagctgctgcacagctgcaccgtgatcgccaccaacatcctgctggtggacgagatcatgagagccggcatgagcagcctgaagggctag

SEQ ID NO: 23577 - DNA, 1461 bp, Artificial Sequence
  derived and/or modified sequence
atggctgccgtgaaaaccctgaacccgaaagccgaggtcgctcgcgcccaagcagcgctggcagtcaacataagcgcagcgagaggcttacaggatgtcctccgcacgaacctcggcccaaagggcaccatgaaaatgttggtgagtggggcaggggacattaagttgaccaaagatggcaacgtgttgcttcatgaaatgggactccatccccgcattattaccgagggcttcgaggcagccaaagagaaagccctgcaatttctcgaagaagtgaaagtgtcaagagaaatggatcgggaaacgctgatcgacgtggcgcggacatctcttagaactaaagtgcatgccgagctcgccgacgtccttacagaggccgtggtagacagcatcctggccatcaagaagcaggatgaaccaatcgatctcttcatgatcgagatcatggagatgaagcataaaagcgagactgacaccagtctcataaggggtctagtgctggaccatggagccagacatcctgatatgaagaaacgcgtcgaggatgcctacatactgacatgtaatgtatctctggagtatgagaaaaccgaggttaacagtggctttttctataagtctgccgaggaaagggagaaattagtgaaggcggagagaaagttcatcgaggaccgcgtgaagaaaatcatcgaactgaaacgtaaggtatgcggggacagcgataaaggcttcgttgtgatcaatcaaaagggcatcgatccgttttcattggacgcattgtccaaggaaggcattgtggcccttagaagggcaaagcggagaaatatggaaagactcacactcgcctgtgggggtgtcgcgctgaattcatttgatgatctgtcgcccgactgcttagggcacgctggattggtatatgagtacactctcggcgaggagaagttcacgtttatagagaaatgtaacaacccgagatccgttactctgctgattaagggacccaataaacatactctaacacagatcaaggacgctgtgcgagatggacttagagccgtgaagaatgctattgatgacggatgcgtggtgccaggagccggagctgtcgaagtggctatggctgaggcactcatcaaacataagcctagcgtgaagggacgcgcccagttgggagtgcaggcctttgcggacgcgcttctcatcatccccaaagttcttgcgcaaaactctggcttcgacctgcaggagacactcgtgaagatccaggcagagcattctgaaagcggtcagctcgtgggggtagatctaaacaccggcgaaccaatggtagccgcggaagtgggcgtctgggacaattattgtgtgaagaagcagctgctgcactcttgtaccgtgatcgcgactaacatactgctggttgatgaaattatgcgggcaggtatgagcagcctcaagggttag

SEQ ID NO: 23578 - DNA, 1170 bp, Artificial Sequence
  derived and/or modified sequence
atggaccgagagacactgatcgatgtggccaggacctctctgagaactaaagtccacgctgagctggctgatgtcctcaccgaggccgtggttgattctatacttgccatcaaaaaacaggatgaacctattgacttgtttatgatcgagatcatggagatgaaacacaaatcagagactgatacaagtctgattagaggccttgttttggaccacggggctcgccacccagacatgaagaagcgtgtggaggatgcatatatactgacttgcaatgtgtcactagagtacgagaagactgaagtgaacagcggatttttctataagagtgccgaggagagagaaaaactggtaaaagctgaacggaaatttatcgaagacagagtcaaaaagattatcgaactaaaacgcaaggtctgcggcgactcagataaaggatttgtggtgattaaccaaaaagggatagatcccttctccctggacgcgctctccaaggaggggattgtggcactgcgccgagctaaacgcagaaatatggagcgactgacattggcttgtggtggcgtggcattgaactcctttgacgacctgtcgccagactgtctcggccacgcaggactcgtttacgagtatacattgggggaggagaagttcaccttcatcgaaaagtgcaataatcctcgatccgtgaccctgctgatcaaggggcctaataagcacactctaactcagattaaggacgccgtacgcgatggactgcgggccgtgaagaatgcaatcgatgacgggtgcgtggtccccggagccggggctgtcgaagtggccatggccgaggcccttattaaacacaagcccagcgtcaaggggcgggcccaactgggggtccaggcttttgccgacgcattgctgatcattccaaaagtcctcgcccaaaattctggttttgatctccaggaaaccctcgtcaaaatccaagcggaacactctgaatctgggcagcttgttggcgttgatctcaatactggggagccaatggttgccgcagaggtgggcgtttgggacaattattgtgttaaaaagcagctgcttcattcttgtacagtgatagcaactaatattttactggtggacgagataatgagagcaggaatgtcatctctcaagggatag

SEQ ID NO: 23579 - DNA, 1461 bp, Artificial Sequence
  derived and/or modified sequence
atggctgctgtgaagaccctgaaccccaaggccgaggtggcccgggcccaggccgccctggccgtgaacatctctgctgcccggggcctgcaggatgtgctgcggaccaacctgggccccaagggcaccatgaagatgctggtgtctggagctggggacatcaagctgaccaaggatggaaatgtgctgctgcacgagatgggcctgcacccccgcatcatcacagagggctttgaggccgccaaggagaaggccctgcagttcctggaggaggtgaaggtgtcccgggagatggaccgggagaccctgattgatgtggcccggaccagcctgcggaccaaggtgcatgctgagctggctgatgtgctgacagaggccgtggtggacagcatcctggccatcaagaagcaggatgagcccatcgacctcttcatgattgagatcatggagatgaagcacaagtcagaaacagacaccagcctcatccggggcctggtgctggaccatggagcccggcacccagacatgaagaagagggtggaggatgcctacatcctgacctgcaatgtgtccctggagtatgagaagacagaggtgaacagcggcttcttctacaagtctgctgaggagcgggagaagctggtgaaggccgagaggaagttcattgaagatagagtgaagaagatcatcgagctgaagaggaaggtgtgtggggacagcgacaagggctttgtggtgatcaaccagaagggcatcgaccccttcagcctggatgccctgagcaaggagggcatcgtggccctgcggcgggccaagagaagaaacatggagcggctgaccctggcctgtggcggcgtggccctgaacagctttgatgacctgagcccagactgcctgggccacgccggcctggtgtatgagtacaccctgggggaggagaagttcaccttcatcgagaagtgcaacaaccccaggtctgtgaccctgctgatcaagggccccaacaagcacaccctgacccagatcaaggatgctgtgagagatggcctgcgggctgtgaagaatgccattgatgatggctgtgtggtgcctggggccggggctgtggaggtggccatggccgaggccctgatcaagcacaagcccagcgtgaagggccgggcccagctgggcgtgcaggcctttgctgatgccctgctgatcatccccaaggtgctggcccagaacagcggctttgacctgcaggagaccctggtgaagatccaggccgagcacagcgagagcggccagctggtgggcgtggacctgaacacaggagagcccatggtggccgctgaggtgggcgtgtgggacaactactgtgtgaagaagcagctgctgcacagctgcaccgtcatcgccaccaacatcctgctggtggatgagatcatgagagctggcatgagcagcctgaagggctag

SEQ ID NO: 23580 - DNA, 1170 bp, Artificial Sequence
  derived and/or modified sequence
atggaccgggagaccctgattgatgtggcccggaccagcctgcggaccaaggtgcacgccgagctggctgatgtgctgacagaagctgtggtggacagcatcctggccatcaagaagcaggatgagcccatcgacctcttcatgattgagatcatggagatgaagcacaagtcagaaacagacaccagcctcatccggggcctggtgctggaccacggggcccggcacccagacatgaagaagagggtggaggatgcctacatcctgacctgcaatgtgtccctggagtatgagaagacagaggtgaacagcggcttcttctacaagtctgctgaggagcgggagaagctggtgaaggccgagaggaagttcatcgaggacagagtgaagaagatcatcgagctgaagaggaaggtgtgtggggacagcgacaagggctttgtggtgatcaaccagaagggcatcgaccccttcagcctggatgccctgagcaaggagggcatcgtggccctgcggcgggccaagagaagaaacatggagcggctgaccctggcctgtggcggcgtggccctgaacagctttgatgacctgagcccagactgcctgggccatgctggcctggtgtatgagtacaccctgggggaggagaagttcaccttcatcgagaagtgcaacaaccccaggtctgtgaccctgctgatcaagggccccaacaagcacaccctgacccagatcaaggatgctgtgagagatggcctgcgggctgtgaagaatgccattgatgatggctgtgtggtgcctggagctggagctgtggaggtggccatggccgaggccctgatcaagcacaagcccagcgtgaagggccgggcccagctgggcgtgcaggcctttgctgatgccctgctgatcatccccaaggtgctggcccagaacagcggctttgacctgcaggagaccctggtgaagatccaggccgagcacagcgagagcggccagctggtgggcgtggacctgaacacaggagagcccatggtggccgctgaggtgggcgtgtgggacaactactgtgtgaagaagcagctgctgcacagctgcaccgtgattgccaccaacatcctgctggtggatgagatcatgagagctggcatgagcagcctgaagggctag

SEQ ID NO: 23581 - DNA, 1461 bp, Artificial Sequence
  derived and/or modified sequence
atggccgccgtgaagaccctgaaccccaaggccgaggtggcccgggcccaggccgcactagctgtcaacatttcagccgcccgaggcctccaggacgtgctgagaaccaatctgggtcctaagggtacaatgaaaatgctcgtgagcggagctggagatatcaagctgaccaaagacggtaacgtgctgttgcatgagatggggctccatcctaggattattacagaaggctttgaggcggccaaggagaaagcattacaatttctagaggaagtgaaggtgagccgggaaatggatcgcgagactctgattgacgttgcacgcacatcattgcggacgaaagttcacgcagaattagcagacgtgttgaccgaagccgttgtggactctattctggcgatcaaaaaacaggatgagcctatcgaccttttcatgatcgagatcatggagatgaaacataaatctgaaaccgatacatctttgatccgtggcttggtgctcgaccatggggctagacacccagacatgaaaaaacgagtcgaggatgcctatatcctgacatgtaatgtaagcctagagtatgagaagactgaggtcaattctggcttcttctacaagtccgccgaggagcgagagaagctagtgaaagccgaacggaaatttatcgaggatagggtaaaaaagataatagagctgaaacgtaaagtctgtggtgactccgacaagggattcgtggtgatcaaccagaagggcatagacccgttctcattggatgctctgtccaaagagggaattgtggctctcaggcgggctaaaaggcgaaatatggagcgactgacacttgcatgcggcggggttgccctgaattcctttgatgatctttccccagattgcttaggacatgcgggcctggtgtacgagtatacacttggagaagaaaagtttacattcattgaaaaatgcaacaaccctcgaagtgtgactctgctgatcaaaggtcctaataaacacaccttaacacaaattaaagatgctgtcagggacggcctgcgggcggtgaaaaacgccatagacgacggttgcgtggttccgggcgctggggcagtggaggtggccatggccgaagctctcattaaacacaaaccaagcgttaagggaagggctcaactcggagtacaggcgtttgcagacgcactgctcatcatcccgaaggttttagcccagaatagtggttttgatctgcaggagacacttgtgaaaattcaggcagagcactccgaatcaggtcagttggttggggttgacttaaacactggggagcccatggtggcggctgaggtgggagtgtgggacaactactgtgtgaaaaagcaactgctgcattcctgtaccgtgattgctacaaacatccttttggtggacgaaattatgagagccggtatgagctcactcaagggatag

SEQ ID NO: 23582 - DNA, 1170 bp, Artificial Sequence
  derived and/or modified sequence
atggaccgggagaccctgatcgacgtggcccggaccagcctgcggaccaaagtgcacgccgagctggcagatgttctgacggaagctgtggtggatagcatcttagctataaagaagcaagatgaacctattgacctgttcatgatcgagatcatggagatgaaacacaaaagtgaaaccgacacctccctgattcgtggccttgtgcttgaccatggcgccaggcatcccgacatgaagaaaagagttgaggacgcatatatcctgacctgcaatgtgagtttggagtatgagaagactgaggtcaactctggattcttttataagtccgccgaagagcgtgagaagttggttaaggctgagcgaaagtttattgaggaccgcgttaagaaaatcatagaacttaaacgcaaagtctgcggcgattcagacaagggattcgtggtcataaaccagaaaggaatcgacccattcagccttgacgcattatctaaggaagggatagtcgctctgaggagggccaagcggcgcaacatggagcgcctgactttagcctgcggcggcgtggccctgaattcatttgatgacctgtcacctgactgcctgggtcatgcaggtctggtttacgaatacaccttgggcgaagagaagttcacattcatagagaagtgcaacaatccccgctccgtgacgctcctgattaagggcccgaacaagcacactttaactcagattaaagatgccgttagggacggtttaagggcggtgaagaatgcgatcgatgacgggtgtgttgtacctggagcgggcgcagtggaagtggcgatggctgaagccttgataaagcataagccgtctgttaaaggcagagctcagctgggtgttcaggcctttgccgatgcgctgctcatcatcccaaaggtgctggctcaaaacagcggctttgatctccaagagactctcgtgaagatccaggctgagcactctgaatcaggtcagttagtgggggtggacctgaacaccggcgaaccgatggtcgctgccgaggtaggagtatgggataattattgtgtcaagaaacaacttctgcactcctgcactgttattgccactaatatcctgctggtcgatgagatcatgagggctggaatgtcttcactgaaaggctag

SEQ ID NO: 23583 - DNA, 1461 bp, Artificial Sequence
  derived and/or modified sequence
atggctgcggttaaaacgctgaaccctaaagctgaagtcgctagggcccaggcagcccttgctgttaacatctcggctgctcgcggtctgcaagacgtgctgcgcacaaacctgggacccaaaggaaccatgaaaatgcttgtgtccggcgcaggagatattaaactgaccaaggatgggaacgtcctgctccacgaaatgggtcttcaccctcggatcatcactgaggggttcgaggccgcaaaggagaaggcactccaatttctggaggaggtaaaggtctcaagagaaatggacagagagaccctgatagacgtggcccgaacatcattaaggacaaaagtccacgctgagctagccgatgttctgactgaggccgttgtggactctattcttgctatcaaaaaacaggacgaaccaattgatttattcatgatcgagatcatggagatgaaacacaagtctgaaacagatacaagcctcataaggggactggttctcgaccacggagctaggcatccagatatgaagaaacgtgttgaggacgcatacattctcacatgtaatgtgagtctggagtacgagaagacagaggtcaattcagggtttttttacaagagcgccgaggaacgtgagaaactcgtaaaggccgagcgcaagttcatcgaggaccgcgtgaagaaaatcatcgagttaaagcgcaaggtatgtggcgatagtgacaagggatttgtggtaatcaatcagaagggtatcgaccctttcagcctggacgctttgtcaaaggaggggatcgtagccctccgcagggctaagagaagaaacatggagcggctcaccttggcttgtggaggagtggctctgaattcattcgacgaccttagcccggactgcctggggcacgctgggctggtctacgagtacactttaggagaagagaagttcacctttattgaaaagtgcaacaatcctaggtctgtgactctcctgataaaagggccaaacaagcacacattaactcagattaaggatgctgtaagagatgggctgcgggcagtaaagaacgccattgatgacggatgcgttgtgccgggagctggcgctgttgaggtggctatggccgaggcactaatcaagcataagcccagcgtcaaaggcagggcacagctgggtgtgcaggcgtttgctgacgcactgcttatcattccaaaggtactcgctcagaattctgggtttgatctgcaggaaaccctagtgaaaatccaagctgaacattccgaatctggacaacttgtgggggttgatctcaacacaggggaacccatggtagctgctgaagtcggcgtgtgggacaattactgcgtcaagaagcagctgctgcactcttgcaccgtgattgcgacaaacatcctgctggtagatgagattatgagggccggtatgagctcactgaagggttag

SEQ ID NO: 23584 - DNA, 1170 bp, Artificial Sequence
  derived and/or modified sequence
atggaccgagaaacgctcatcgacgtggccagaacttcgctgcgaactaaggtgcacgctgaactggccgatgtcctcacggaggcagtcgtcgacagcatactggcaattaagaagcaggacgaaccaattgacctctttatgatcgagataatggagatgaagcacaagtcagaaacagatacatctctgattagaggactcgtgctagatcatggagctcgccatccagatatgaagaaacgggttgaagatgcctatatcttgacatgcaatgttagtttggagtatgaaaagacggaggtgaattccggatttttttataagtccgctgaagaaagggagaagttggtaaaggctgaacggaagttcattgaggatcgcgtcaagaaaataatcgagctgaagcgaaaggtatgtggagattctgacaaaggctttgtcgtcattaaccagaaggggatcgatcctttttccttggacgcgctgagcaaggaagggatcgtggctctgcgcagagccaaacggcgaaacatggaacgcctaactctggcttgcggaggagtggccctcaacagcttcgacgacctctccccggattgcttggggcacgcagggctggtgtacgaatataccctcggggaggaaaaatttacattcattgagaaatgtaataaccccagaagtgtgaccctattaatcaagggcccaaataaacacacgttgactcagatcaaggatgccgttcgcgacggattgcgtgccgtgaaaaatgccattgacgacggctgcgtcgtgccaggagccggtgctgtcgaagtggctatggccgaagcactcataaaacataagccttcggttaagggcagagcacagctgggcgttcaggcctttgccgacgctttacttattatcccgaaagtgctggcccagaatagtgggttcgacctgcaggagactttggtgaagattcaggccgagcacagtgagagtggccaattggtgggcgtggacctgaatacgggagagccaatggtggctgctgaggtaggtgtgtgggacaattactgtgtgaagaagcagcttctccacagctgcactgtcatcgccacaaacatcctgctcgtagatgagatcatgcgcgctgggatgagctctttgaaaggctag

SEQ ID NO: 23585 - protein, 309 aa, Artificial Sequence
  derived and/or modified sequence
MDDKAFTKELDQWVEQLNECKQLNENQVRTLCEKAKEILTKESNVQEVRCPVTVCGDVHGQFHDLMELFRIGGKSPDTNYLFMGDYVDRGYYSVETVTLLVALKVRYPERITILRGNHESRQITQVYGFYDECLRKYGNANVWKYFTDLFDYLPLTALVDGQIFCLHGGLSPSIDTLDHIRALDRLQEVPHEGPMCDLLWSDPDDRGGWGISPRGAGYTFGQDISETFNHANGLTLVSRAHQLVMEGYNWCHDRNVVTIFSAPNYCYRCGNQAAIMELDDTLKYSFLQFDPAPRRGEPHVTRRTPDYFL

SEQ ID NO: 23586 - DNA, 930 bp, Artificial Sequence
  derived and/or modified sequence
atggatgataaggcatttaccaaggaactcgaccagtgggtggagcaactgaacgagtgtaaacagcttaacgaaaaccaggtgaggaccttatgtgagaaggccaaagaaatcctcacaaaagaatcaaacgtgcaggaagtgcgctgcccggtgacagtgtgcggggacgttcacggacagtttcatgacctgatggagctcttccgcatcgggggcaaaagccccgacactaactatctattcatgggggactacgtcgatcggggctactatagcgttgagactgtcaccctgctggtcgcgctcaaggtgcggtaccccgaacgcattacaatcctccgcggcaaccacgagagcagacagatcactcaggtgtatgggttctacgatgagtgtctccgaaaatatggaaacgctaacgtgtggaagtactttacagacttattcgactacctcccgttaacagctctagtggatggccagatcttttgcctacatggtgggctgagcccctccattgacacacttgaccatatccgggccctggatagattgcaggaggtaccacacgagggacccatgtgcgacctgctctggtccgatcctgacgaccggggggggtggggtattagtccaagaggcgctggatacacattcggtcaagatatcagtgaaaccttcaaccacgccaacggcctgacactagtttcaagggcacatcaactggtgatggagggttataattggtgccatgatagaaacgtcgttactattttttccgctccgaactattgctatcgatgtggaaaccaagccgctatcatggagctcgatgacaccttaaagtacagttttctgcagtttgaccctgctccccggaggggagagccccacgtaactcgccgaacacccgattactttctctag

SEQ ID NO: 23587 - DNA, 930 bp, Artificial Sequence
  derived and/or modified sequence
atggacgataaggcgttcacaaaagaattggaccagtgggtggaacagctcaatgaatgcaagcagctgaacgagaaccaggtccggacactttgtgagaaagccaaggaaatcttgactaaggagtccaatgtgcaggaggtcaggtgcccagttactgtgtgtggcgacgtacatgggcaattccacgacctcatggaacttttccgtattggagggaagtctccggacacgaactacctgtttatgggtgactacgtggatcggggctactattctgtcgagaccgtaacactgctggtagcactgaaagtccgatatcctgagcgcataacaattctgagaggcaatcatgaaagccgccagatcactcaggtgtacggcttctacgacgaatgcctgcggaaatacggtaacgctaacgtgtggaagtatttcactgacctctttgattacctcccacttaccgcattggtggacggacagattttctgcctccatggaggcctttccccatctatagatactttagatcatatccgcgctctggacaggctgcaggaggttccgcacgaggggcctatgtgcgatctgctgtggtccgatccagatgacagaggaggatggggcatcagcccaaggggcgcaggatacacattcggccaagatatttcagaaaccttcaatcacgctaatggcctgaccctggtttcacgggcccaccaactcgtgatggaggggtacaactggtgtcatgatagaaacgtagtgaccatttttagtgcacccaactattgttatagatgtgggaaccaggcggctatcatggagctggatgacaccctgaagtactcatttcttcagttcgaccccgctccgagaaggggcgaacctcacgtaacccgccggaccccggactacttcctgtag

SEQ ID NO: 23588 - DNA, 930 bp, Artificial Sequence
  derived and/or modified sequence
atggatgacaaggccttcaccaaggagctggaccagtgggtggagcagctgaatgaatgcaagcagctgaatgaaaaccaggtgaggaccctgtgtgagaaggccaaggagatcctgaccaaggagagcaatgtgcaggaggtgcgctgccctgtgacagtgtgtggagatgtgcacggccagttccatgacctgatggagctgttcagaattggaggcaagagcccagacaccaactacctgttcatgggagactatgtggaccggggctactacagcgtggagaccgtgaccctgctggtggccctgaaggtgcgctacccagagcgcatcaccatcctgcggggcaaccacgagagccggcagatcacccaggtgtatggcttctatgatgagtgcctgaggaaatatggaaatgccaacgtgtggaagtacttcacagacctgtttgactacctgcccctgacagccctggtggatggccagatcttctgcctgcatggaggcctgagccccagcattgacaccctggaccacatccgggccctggaccggctgcaggaggtgccccatgagggccccatgtgtgacctgctgtggagcgaccctgatgacagaggaggctggggcatcagccccaggggggccggctacaccttcggccaggacatcagcgagaccttcaaccacgccaacggcctgaccctggtgtcccgggcccaccagctggtgatggagggctacaactggtgccacgacagaaatgtggtgaccatcttcagcgcccccaactactgctaccgctgtggcaaccaggccgccatcatggagctggatgacaccctgaagtacagcttcctgcagtttgatcctgccccccggcggggggagccccacgtgaccaggaggaccccagactacttcctgtag

SEQ ID NO: 23589 - DNA, 930 bp, Artificial Sequence
  derived and/or modified sequence
atggacgacaaggccttcaccaaggagctggaccagtgggtggagcagctcaatgagtgtaaacagctcaacgagaatcaagtacgcacactgtgtgaaaaagctaaggaaatattgaccaaggagagtaatgtgcaggaggtcaggtgtccagtgacagtttgtggggacgtgcatggtcagttccacgatctgatggaactattcaggatcggcggtaagagccccgatacgaactacttattcatgggcgactacgtggataggggttactacagcgtcgagacagtgacactcctcgtggcactgaaagtgaggtaccccgaaagaatcactattcttaggggaaaccacgagtctcgccaaattactcaggtgtatggattctacgacgaatgcttaagaaagtacggcaatgcaaatgtgtggaaatactttactgacctgttcgactatttgccactaacggcactggtggacggtcagatcttctgtctgcacggcggtctgtccccctccattgacacgctggaccacatcagagctctcgacagattgcaggaggtgccccatgaggggcccatgtgtgacctactctggagcgaccctgacgaccgaggtgggtggggtatcagtcctagaggggccggatacactttcggacaggatatatcggaaactttcaaccatgcgaacggcctgacgctcgtgagtcgcgcccaccagctcgtcatggagggctataattggtgccatgaccgaaatgtggtcacgattttctccgcccctaattactgttatagatgcggtaaccaggcggccatcatggaactggacgacacactgaagtacagctttctgcagttcgatcccgcccccagacgcggcgaaccgcacgtgactagacgcacacccgattacttcctgtag

SEQ ID NO: 23590 - DNA, 930 bp, Artificial Sequence
  derived and/or modified sequence
atggacgacaaggccttcaccaaggagctggaccagtgggtggagcagttaaacgagtgtaagcagctaaatgaaaaccaggtgcgtacactgtgcgaaaaagcgaaggagatactcaccaaagagagcaatgtacaggaagtacgctgcccggtgaccgtctgtggggatgtgcacgggcagttccacgacctcatggagctgtttcgaattgggggcaaatctccagataccaattatctgtttatgggggactacgtcgaccgcggctattattccgtggaaacagtaactctgctcgttgctctcaaggtgcgctatccagagaggattactatcctgcgcggcaaccacgagagtcgccaaatcacccaggtttatggcttctacgacgagtgtcttcggaaatacggaaacgcaaacgtatggaagtactttactgacctattcgactacctcccactcaccgctcttgtcgacggccagattttctgcctccatggcggtttgtctccttccatcgacacactggatcatatccgggcactggacaggctgcaagaggtgcctcacgagggaccgatgtgtgacctgctttggagcgatcccgatgacagaggcgggtggggaataagtccccgcggtgctggctatacattcggccaggacatctctgaaaccttcaatcatgctaacggtctgacattagtcagcagggcgcatcagcttgttatggagggatataattggtgtcacgacaggaacgttgtcaccatttttagcgctcctaactattgttacaggtgcggaaaccaggctgcaatcatggaactagacgatactttgaaatatagcttcctacagttcgatcccgccccgcggcggggggaaccacacgtgaccaggcggacaccagactacttcctgtag

SEQ ID NO: 23591 - DNA, 930 bp, Artificial Sequence
  derived and/or modified sequence
atggatgacaaagccttcacgaaagagttagatcagtgggtggaacagctcaatgagtgtaaacagcttaatgagaatcaggtccgaaccttatgcgagaaggccaaggagattttaactaaagaaagcaatgtccaagaggtgcgctgccctgtcaccgtgtgcggagacgtgcacgggcagttccatgacctaatggaactcttccgaattggcggaaagtcccccgacacaaactatctctttatgggagattacgtggatcgcggttactattccgttgagacagtcaccttactagtcgcgctcaaagtgcggtatccagagagaatcaccattctgcggggtaatcacgagagtagacaaatcacacaagtgtatgggttctatgacgagtgcttgcggaaatatggcaatgccaacgtctggaagtattttactgatttattcgattacttgcccctgaccgccctggtggatggacagatcttttgcttacacggagggctctctccgtcgattgacactctagaccacattcgggcattagaccgacttcaagaagttccgcatgaggggcctatgtgcgaccttctgtggtctgacccagatgaccggggagggtggggtatctctccacgcggagccggatatactttcggccaggatatcagtgagacttttaaccatgctaacgggctaactttggtctcccgcgctcatcagttggttatggagggctacaactggtgccatgaccggaacgtcgtgacgattttttcagccccaaattactgctacaggtgtgggaaccaggctgctataatggagcttgacgacaccctgaagtactcttttctgcagtttgatcccgcaccccgacgcggagagccccacgtcacacgaagaactccagactacttcttatag

SEQ ID NO: 23592 - DNA, 930 bp, Artificial Sequence
  derived and/or modified sequence
atggacgacaaggcctttaccaaggagctcgaccagtgggtggagcagctgaatgagtgtaaacagttaaacgagaatcaagtacgtactctgtgcgaaaaggccaaagagatccttacaaaagagagcaacgttcaagaggtgcgctgccctgtcaccgtgtgtggggacgtacatgggcaattccacgaccttatggaattgttccgaatcggcggaaagtccccagatactaattacctgttcatgggggactacgtggatcgcggttactacagtgtggagacggtgacattgttggtcgccctgaaggtccgatacccagaaaggatcacaatcctaaggggcaaccacgagtcgaggcagatcacgcaggtgtatggattctatgacgaatgcctgagaaaatacggaaatgcgaatgtgtggaaatactttacggatttgttcgactacttgcccctgacagctctcgtggacggacagatcttctgcttgcacggtggcctgtctccatctatcgacacattagaccacattcgagcactggatcggctacaagaagtaccccatgaaggaccaatgtgcgaccttctgtggtccgatcccgatgacagaggagggtggggaatctcacctcgaggcgcaggctacacctttggtcaggacatttctgaaactttcaatcacgctaacggcctgactctcgtgtcacgcgcacaccagttagtgatggaaggttacaactggtgtcacgatcgcaacgtggtgaccatctttagcgcaccaaattactgttatcgatgcgggaatcaagcagctatcatggaattggacgatacattgaagtattcgttcctgcagtttgatccggctccaagaaggggtgagccccacgtgactagacggacaccggactacttcttatag

SEQ ID NO: 23593 - DNA, 2006 bp, Artificial Sequence
  derived and/or modified sequence
cggcggaaatgcccgagcgatgacggaaacccggagggaggggagagaaagagcgagagaaggggaaagacaagtcgggagaggccggtaggcgtgaggcgggcctgaagcggcagcgggcggccttcgtccggcgagagctaggccgaggacccgcgccgcgctccccggcacctcaccgcgtccttcaccgactcccgcggcgcgcggccgggcggggaagggcgggcgggggtctcctccaggctgcgcgctcggagccgcctgctgggcttgggcggggcgcggggcccgcggccgccctacccggctcagtcctccccctgtgggacctggcgacggcggcggagggagaggggagcggcgcccgggccggggccgggggcgggtggggaggggggagggcggcggccgggctggggctcgggatccgcatcgggatcgggccgccatggacgacaaggcgttcaccaaggagctggaccagtgggtcgagcagctgaacgagtgtaagcagctgaacgagaaccaagtgcggacgctgtgcgagaaggcaaaggaaattttaacaaaagaatcaaatgtgcaagaggttcgttgccctgttactgtctgtggagatgtgcatggtcaatttcatgatcttatggaactctttagaattggtggaaaatcaccggatacaaactacttattcatgggtgactatgtagacagaggatattattcagtggagactgtgactcttcttgtagcattaaaggtgcgttatccagaacgcattacaatattgagaggaaatcacgaaagccgacaaattacccaagtatatggcttttatgatgaatgtctgcgaaagtatgggaatgccaacgtttggaaatattttacagatctctttgattatcttccacttacagctttagtagatggacagatattctgcctccatggtggcctctctccatccatagacacactggatcatataagagccctggatcgtttacaggaagttccacatgagggcccaatgtgtgatctgttatggtcagatccagatgatcgtggtggatggggtatttcaccacgtggtgctggctacacatttggacaagacatttctgaaacctttaaccatgccaatggtctcacactggtttctcgtgcccaccagcttgtaatggagggatacaattggtgtcatgatcggaatgtggttaccattttcagtgcacccaattactgttatcgttgtgggaaccaggctgctatcatggaattagatgacactttaaaatattccttccttcaatttgacccagcgcctcgtcgtggtgagcctcatgttacacggcgcaccccagactacttcctataaatttctcctgggaaacctgcctttgtatgtggaagtatacctggctttttaaaatatatgtatttaaaaacaaaaagcaacagtaatctatgtgtttctgtaacaaattgggatctgtcttggcattaaaccacatcatggaccaaatgtgccatactaatgatgagcatttagcacaatttgagactgaaatttagtacactatgttctaggtcagtctaacagtttgcctgctgtatttatagtaaccattttcctttggactgttcaagcaaaaaaggtaactaactgcttcatctccttttgcgcttatttggaaattttagttatagtgtttaactggcatggattaatagagttggagttttatttttaagaaaaattcacaagctaacttccactaatccattatcctttattttattgaaatgtataattaacttaactgaagaaaaggttcttcttgggagtatgttgtcataacatttaaagagatttcccttcatttaaactaaattactgttttatgttgatctgcatatttctgtatatttgtcatgacagtgcttgcatcctatttggtgtactcagcaaataaacttttcattttaaacaaaaacattca

SEQ ID NO: 23594 - DNA, 1723 bp, Artificial Sequence
  derived and/or modified sequence
aagtcgggagaggccggtaggcgtgaggcgggcctgaagcggcagcgggcggccttcgtccggcgagagctaggccgaggacccgcgccgcgctccccggcacctcaccgcgtccttcaccgactcccgcggcgcgcggccgggctggggctcgggatccgcatcgggatcgggccgccatggacgacaaggcgttcaccaaggagctggaccagtgggtcgagcagctgaacgagtgtaagcagctgaacgagaaccaagtgcggacgctgtgcgagaaggcaaaggaaattttaacaaaagaatcaaatgtgcaagaggttcgttgccctgttactgtctgtggagatgtgcatggtcaatttcatgatcttatggaactctttagaattggtggaaaatcaccggatacaaactacttattcatgggtgactatgtagacagaggatattattcagtggagactgtgactcttcttgtagcattaaaggtgcgttatccagaacgcattacaatattgagaggaaatcacgaaagccgacaaattacccaagtatatggcttttatgatgaatgtctgcgaaagtatgggaatgccaacgtttggaaatattttacagatctctttgattatcttccacttacagctttagtagatggacagatattctgcctccatggtggcctctctccatccatagacacactggatcatataagagccctggatcgtttacaggaagttccacatgagggcccaatgtgtgatctgttatggtcagatccagatgatcgtggtggatggggtatttcaccacgtggtgctggctacacatttggacaagacatttctgaaacctttaaccatgccaatggtctcacactggtttctcgtgcccaccagcttgtaatggagggatacaattggtgtcatgatcggaatgtggttaccattttcagtgcacccaattactgttatcgttgtgggaaccaggctgctatcatggaattagatgacactttaaaatattccttccttcaatttgacccagcgcctcgtcgtggtgagcctcatgttacacggcgcaccccagactacttcctataaatttctcctgggaaacctgcctttgtatgtggaagtatacctggctttttaaaatatatgtatttaaaaacaaaaagcaacagtaatctatgtgtttctgtaacaaattgggatctgtcttggcattaaaccacatcatggaccaaatgtgccatactaatgatgagcatttagcacaatttgagactgaaatttagtacactatgttctaggtcagtctaacagtttgcctgctgtatttatagtaaccattttcctttggactgttcaagcaaaaaaggtaactaactgcttcatctccttttgcgcttatttggaaattttagttatagtgtttaactggcatggattaatagagttggagttttatttttaagaaaaattcacaagctaacttccactaatccattatcctttattttattgaaatgtataattaacttaactgaagaaaaggttcttcttgggagtatgttgtcataacatttaaagagatttcccttcatttaaactaaattactgttttatgttgatctgcatatttctgtatatttgtcatgacagtgcttgcatcctatttggtgtactcagcaaataaacttttcattttaaac

SEQ ID NO: 23595 - DNA, 930 bp, Artificial Sequence
  derived and/or modified sequence
atggacgacaaggccttcaccaaggagctggaccagtgggtggagcagctgaacgagtgcaagcagctgaacgagaaccaggtgagaaccctgtgcgagaaggccaaggagatcctgaccaaggagagcaacgtgcaggaggtgagatgccccgtgaccgtgtgcggcgacgtgcacggccagttccacgacctgatggagctgttcagaatcggcggcaagagccccgacaccaactacctgttcatgggcgactacgtggacagaggctactacagcgtggagaccgtgaccctgctggtggccctgaaggtgagataccccgagagaatcaccatcctgagaggcaaccacgagagcagacagatcacccaggtgtacggcttctacgacgagtgcctgagaaagtacggcaacgccaacgtgtggaagtacttcaccgacctgttcgactacctgcccctgaccgccctggtggacggccagatcttctgcctgcacggcggcctgagccccagcatcgacaccctggaccacatcagagccctggacagactgcaggaggtgccccacgagggccccatgtgcgacctgctgtggagcgaccccgacgacagaggcggctggggcatcagccccagaggcgccggctacaccttcggccaggacatcagcgagaccttcaaccacgccaacggcctgaccctggtgagcagagcccaccagctggtgatggagggctacaactggtgccacgacagaaacgtggtgaccatcttcagcgcccccaactactgctacagatgcggcaaccaggccgccatcatggagctggacgacaccctgaagtacagcttcctgcagttcgaccccgcccccagaagaggcgagccccacgtgaccagaagaacccccgactacttcctgtag

SEQ ID NO: 23596 - DNA, 2373 bp, Artificial Sequence
  derived and/or modified sequence
atgaacattatgaatacagaacagtcgcagaacagcatagttagccgtatcaaggtattcgaagggcagaccaacatcgaaacttcaggtctaccaaagaaaccggagatcacgccaaggtctctccctccgaagcccactgtttcctcaggtaaaccctctgtggcccccaagcctgccgcgaaccgggcatctggggagtgggattctggaacagagaacaggctcaaagttactagcaaggagggcctgacaccctaccctccactgcaggaggccggcagcatccctgtgaccaagccggagctccccaaaaagcccaacccaggtctgataagatcagttaatcccgagattccaggtagggggccacttgccgaaagctccgactccgggaagaaagtgcctactcccgcacccagacctctgctcctcaaaaaatcggtgagctccgaaaatcccacatatccctctgccccgctgaagcctgtcacagttcctccccgcctggccggcgcctcccaggcaaaggcttacaagtccctcggcgaaggccccccggccaacccaccagtgccagtcctccagtcaaaaccgctcgtggacattgatttgatttcattcgatgatgatgttctcccaacccccagtggaaatctcgctgaggagtccgtggggagcgagatggttctggaccctttccagctgccagccaagactgagcctattaaggaacgggctgttcagccagctccaacgcgcaagccaaccgtcattagaattcctgcgaaaccaggaaaatgcttgcatgaagacccccagagtcccccgcctcttccggccgagaaacctatcggaaatacattttcgactgtcagcggtaagctgtctaacgtcgaacggacacgcaacctggaatctaatcacccgggtcagaccggcggctttgtccgcgtccccccccgcttacccccaagacccgtcaacggcaagacgatccctacccaacaacccccaactaaggtaccaccggaaagacccccccctcccaagctcagtgccacccggcgctctaacaaaaaattaccattcaaccggagcagttcggacatggacttgcagaagaagcagtccaacctggcgactggactgtctaaggccaaatctcaagtttttaagaatcaagatcctgtactgcccccgagacccaagcccggtcatcctctttattccaagtatatgttgtctgtgccccatggtattgcgaatgaggatatagtatctcagaacccgggtgaactgagctgtaagcgaggggatgttctggtcatgctgaagcaaactgaaaataattatctcgagtgccagaaaggtgaggacactgggagagttcacctgagtcagatgaagattatcacaccactagacgaacatctgaggagccgccctaacgaccccagtcatgctcagaagccagtggattctggagccccgcatgctgtggtacttcacgactttccagctgagcaggtggacgacctcaatttaaccagcggcgaaattgtatacctcctcgaaaagattgacaccgactggtacaggggcaactgtcggaaccagataggtattttccccgcaaattacgtgaaggtgatcatcgatattcccgaaggtggaaatgggaaacgcgagtgtgtgtcctcgcactgtgtgaaaggatcacgttgcgtcgcacgcttcgaatatatcggagaacaaaaggacgaactgtctttcagtgagggtgagatcataattctgaaggagtacgtgaacgaggagtgggctcgaggcgaagtgcgggggcgaactggtatattccccctgaactttgtagagccagtcgaagactatcccacttcaggcgccaacgttctgagtaccaaagtgcctctgaagaccaaaaaggaagatagcggctccaatagccaagtcaactccctacccgccgaatggtgcgaggcactgcatagcttcactgctgagacctcagatgatctgtcttttaagcggggggaccggatacaaatactcgagcgcctcgacagcgactggtgtagaggacgcctgcaggacagggagggcatctttcccgcagtgtttgtcaggccatgcccggccgaagccaaaagcatgctcgccattgtgccaaaaggcagaaaagctaaagctctgtacgactttagaggggagaacgaggatgagctctcctttaaagctggagatatcattactgagctggagtccgttgacgatgattggatgtccggcgagctgatgggcaagtctgggatttttcctaagaactacatacaatttctgcagatctcttag

SEQ ID NO: 23597 - DNA, 2373 bp, Artificial Sequence
  derived and/or modified sequence
atgaatataatgaataccgagcagagccagaactcaattgtgagccggataaaggtcttcgagggtcagacgaacatcgagacttccggccttcctaagaagccagaaatcactcctaggtccctgccacccaagcccaccgtgagctctggaaaaccgagcgtggcacccaaaccggcagcaaaccgagcatccggggaatgggattccggaaccgaaaacaggctgaaagttacatctaaggagggtctaaccccctacccacccctgcaggaggcgggcagtatacctgtgacaaaacctgagttgcccaagaaacctaatccgggcttaatacgtagtgtcaatccagagataccaggacggggacccctagctgagtcatccgattccggaaaaaaggtgcccacacccgccccacgaccgctgttattgaagaagtctgtttccagcgagaaccccacgtatccatccgcgcctctgaagcctgtgacagtccccccccggctggcaggcgcttcccaagccaaagcttacaaaagcctgggtgagggccctccagccaaccctcctgtgcccgtgctgcaatccaaacccttggtagacattgacctgatctcatttgacgatgatgttttaccgacaccatctgggaacctagctgaggagtctgtcggatcagagatggtgctggatcccttccagctgcccgccaagacagaacccattaaggaaagggcggtgcagcccgctccgacacgcaaacccaccgtgatcaggatccctgccaagcccggtaagtgcctgcatgaggaccctcagtcacccccaccactgcccgccgagaaaccaattggaaacacgttctcgacagtcagtggtaagctgagtaacgtcgagcgcacacgcaatctggagagtaatcacccaggacaaaccggaggtttcgtcagggttcctccacgcctgcctccacgcccggtcaacggaaaaactattcccactcagcagccacccaccaaggtgcctcctgaacggcctccacccccaaaactatcggcgacccggcggtctaataagaagttacctttcaataggagttcgtccgacatggatctccagaaaaagcagtcaaacctggccaccggcctgagcaaggccaagagccaggtgttcaagaatcaggaccctgtgcttccacctaggccaaaacccggccatcccttatatagcaaatacatgctgtccgttccacatggcattgctaacgaagacatcgtgtctcagaatcctggtgagttgagttgcaagcgaggcgacgtgctggtgatgttgaagcagacagagaataactacctcgaatgtcagaaaggagaggatacaggacgcgtgcatctgtcacagatgaagatcatcacaccactcgatgagcacttgcgcagcaggcctaatgatcctagccacgcccaaaagcctgtggatagcggagctcctcacgccgtagtgttacatgattttcccgctgagcaggtggatgatctcaacctcacaagtggggaaattgtttatctgctcgagaaaattgatactgactggtaccgcggcaactgcaggaaccagattggaatattccccgccaattacgtgaaggtgataattgatatccccgagggaggtaacggaaagagggagtgcgtgagcagtcattgcgtgaaaggttcgcggtgcgtggcgcgttttgagtacataggtgagcaaaaggatgagctttccttttcagaaggcgagatcatcatccttaaagagtacgtgaacgaggaatgggcccgcggagaggtgcggggcaggacaggcatctttccacttaacttcgtggagccagtcgaagactaccccacaagtggtgcaaacgtgctttccaccaaagtgcccctgaagactaaaaaagaagacagcggctccaactcacaggtcaattctctccccgcagagtggtgcgaagccctccactcatttaccgctgagacaagtgatgacttgtcctttaaaaggggcgaccgtatccaaatcctcgagaggcttgacagcgactggtgtaggggaaggctccaagatagggagggcatattcccagcagttttcgtacgcccatgtcccgcagaggcaaagtcgatgctcgccatcgttcccaaaggacgaaaggccaaagcattgtacgacttcaggggagaaaatgaggacgaactgtccttcaaggctggggacatcattacggagctagagagtgttgatgatgactggatgtctggggagctgatggggaagtcagggatttttcccaaaaattacatccagttcttgcagatcagttag

SEQ ID NO: 23598 - DNA, 2373 bp, Artificial Sequence
  derived and/or modified sequence
atgaacatcatgaacacagagcagagccagaacagcatcgtgagccgcatcaaggtgtttgagggccagaccaacatcgagaccagcggcctgcccaagaagccagagatcacccccaggagcctgccccccaagcccaccgtgagcagcggcaagcccagcgtggcccccaagccagctgccaacagagccagcggggagtgggacagcggcacagaaaatcggctgaaggtgaccagcaaggagggcctgaccccctacccacccctgcaggaggccggcagcatccctgtgaccaagccagagctgcccaagaagcccaaccctggcctcatccgctctgtgaaccctgagatccctggccggggccccctggccgagagcagtgacagcggcaagaaggtgcccaccccagccccccggcccctgctgctgaagaagtctgtgtcctctgagaaccccacctaccccagcgcccccctgaagcctgtgacagtgcccccccggctggccggggccagccaggccaaggcctacaagagcctgggggagggccccccagccaacccccctgtgcctgtgctgcagagcaagcccctggtggacatcgacctgatcagctttgatgatgatgtgctgcccaccccatctggcaacctggccgaggagagcgtgggcagcgagatggtgctggaccccttccagctgcctgccaagacagagcccatcaaggagagagctgtgcagcctgcccccaccaggaagcccaccgtcatccgcatcccagccaagccaggcaagtgcctgcacgaggacccccagagccccccacccctgcctgctgagaagcccatcggcaacaccttcagcacagtgtctgggaagctgagcaatgtggagaggaccaggaacctggagagcaaccaccctggccagacaggaggctttgtgcgggtgcccccccggctgccccccaggcctgtgaatggcaagaccatccccacccagcagccccccaccaaggtgcccccagagaggcctcctccacccaagctgagcgccacccggcgcagcaacaagaagctgcccttcaacagaagcagcagtgacatggacctgcagaagaagcagagcaacctggccaccggcctgagcaaggccaagagccaggtgttcaagaaccaggaccctgtgctgcccccccggcccaagccaggccaccccctgtacagcaagtacatgctgtctgtgccccatggaattgccaatgaagacatcgtgtcccagaaccctggagagctgagctgcaagagaggagatgtgctggtgatgctgaagcagacagagaacaactacctggagtgccagaagggggaggacaccggccgggtgcacctgagccagatgaagatcatcacccccctggatgagcacctgcggagccggcccaatgaccccagccacgcccagaagcctgtggacagcggggcccctcatgctgtggtgctgcatgacttccctgctgagcaggtggatgacctgaacctgaccagcggggagatcgtgtacctgctggagaagattgacacagactggtaccggggcaactgcaggaaccagatcggcatcttccctgccaactacgtgaaggtgatcatcgacatccctgagggcggcaatggcaagcgggagtgtgtgagcagccactgtgtgaagggcagccgctgtgtggccaggtttgagtacatcggggagcagaaggatgagctgtccttcagcgagggggagatcatcatcctgaaggagtatgtgaatgaggagtgggcccggggggaggtgcggggccgcacaggcatcttccccctgaactttgtggagcctgtggaggactaccccaccagcggggccaacgtgctgagcaccaaggtgcccctgaagaccaagaaggaggacagcggcagcaacagccaggtgaacagcctgcctgctgagtggtgtgaggccctgcacagcttcaccgctgagaccagtgatgacctgtccttcaagagaggagaccgcatccagatcctggagcggctggacagcgactggtgccggggccgcctgcaggaccgggagggcatcttccctgctgtgtttgtgcggccctgcccagctgaggccaagtccatgctggccatcgtgcccaagggcaggaaggccaaggccctgtatgacttccggggggagaatgaagatgagctgtccttcaaggccggggacatcatcacagagctggagagcgtggatgatgactggatgtctggagagctgatgggcaagagcggcatcttccccaagaactacatccagttcctgcagatctcctag

SEQ ID NO: 23599 - DNA, 2373 bp, Artificial Sequence
  derived and/or modified sequence
atgaacatcatgaacaccgagcagagccagaacagcatcgtgagccgtatcaaggtctttgaggggcaaaccaatatcgaaactagtggtctgcctaaaaagcccgagattacgcctaggtcgctgccacccaagccgacggtgagttccggaaagcccagtgtagcgcctaagcctgcggctaacagagcttcaggtgagtgggactccggcactgagaacaggttgaaagttacgagcaaagaggggctgaccccttatccccctctccaagaggcaggcagcatccctgtgaccaaacccgaactcccaaaaaaacccaaccctggactcattcgcagcgtcaaccctgaaattccaggccgagggcctctggccgagtcttccgattcggggaaaaaagtcccaaccccagctcctcggcccctactcttgaaaaagtccgtctcatccgagaaccccacgtaccccagtgcacccctgaaaccagtcactgtgccaccaagacttgcgggcgcatcccaagcaaaagcctacaagtctctcggcgaaggtccacctgccaatcccccggtccccgtgctccaatccaagcctctcgtcgatattgatctgatctcattcgacgacgatgtgctccccaccccatcaggtaatttggcagaggaatctgtgggaagtgaaatggtcctggaccctttccaactgcccgccaaaacagaacccattaaagagcgagcagttcagcctgctcctactcgcaagcccactgtaatcaggatcccagccaagccaggaaaatgcctccatgaagatccacagagcccccctccactacccgctgaaaagcccataggtaacacctttagcactgtctcaggcaaactgagtaacgttgagcggaccaggaacttggagtccaatcacccagggcagactgggggcttcgtgcgggtaccgccaaggctgccacctcggccagtaaacggcaaaactattccaacccaacaaccacccaccaaagtacccccagaaaggcctccccctcctaaactgagcgcaactcggagaagcaataagaaactgcccttcaaccgcagcagctccgacatggatctccaaaaaaagcagtccaacctagctaccggactttctaaggccaaatctcaggtttttaaaaaccaggaccccgtgctccctccacgacctaaacccggacatcccctgtactccaagtacatgctctcggtaccacacggcatagccaacgaagatatcgtctcacagaatccgggcgagctctcctgcaaacgtggagacgtactcgttatgctcaaacagactgagaacaattacctggaatgccagaaaggggaagatacagggagagttcacctcagtcagatgaaaatcattacaccactggatgaacaccttcgcagccggccaaatgacccaagccacgcacagaaacccgtggattccggagctccccacgccgtggtactccacgacttccctgcggaacaggtggacgatctgaacctgacttcgggggagattgtgtaccttctggagaaaattgacacagattggtacaggggaaactgtcgtaatcagatcggcatcttcccagccaattatgtgaaggtaattattgacataccggaagggggaaatggaaaacgcgagtgcgtctcaagtcattgcgtgaaaggtagcagatgcgtggccagatttgaatacattggggagcagaaagatgaactgtctttctccgagggcgaaattatcatactgaaagagtatgtcaacgaagagtgggcacgtggagaagttcgaggtcggacaggtatcttcccattgaacttcgtagaaccagtagaagattaccccacctcaggagccaacgtgctttcaaccaaggtgcctctgaagaccaaaaaagaagattccggctcaaattcacaagttaactctctcccagctgagtggtgcgaggcgttgcattccttcaccgccgagacctcggacgacctgtctttcaagcgcggtgaccgcatccaaattctggagcgactggacagcgactggtgtcggggtaggctccaggaccgggaggggattttcccagccgtattcgtccgcccatgccctgccgaagctaaatctatgctagctattgtgccgaaaggccgtaaggccaaggcactctacgacttccggggagagaacgaggatgaattgtccttcaaagctggcgatattataactgagttagagtcggtggatgatgactggatgtccggcgagctgatgggcaagtccggcatcttccctaagaattatattcagttccttcagatatcatag

SEQ ID NO: 23600 - DNA, 2373 bp, Artificial Sequence
  derived and/or modified sequence
atgaacatcatgaacaccgagcagagccagaacagcatcgtgagccgaataaaagtgttcgaaggacagacaaatatcgagacgagcggcttgcctaagaagccagagattacacccagaagcctacccccaaagccgaccgtctcttcaggcaagccaagcgtcgcacctaagccagccgctaaccgagcgagtggtgaatgggatagtgggaccgagaatcgccttaaagtaactagcaaggaaggactaactccctacccgcccctgcaagaggccggatctatcccagtgacaaaaccagaacttccaaagaaacctaaccctgggctgatacgatccgtcaatcctgagatccccggtaggggccctctggcagagtccagtgattctggcaagaaggtgcccactccagcgccacgccctctgctgctgaaaaagtcagtgagctcagagaacccaacgtatcccagtgccccacttaagccagtgacagtcccgccaagactggccggagccagtcaggccaaagcgtataagtcactgggagagggccccccggctaatcctcccgttccggtgcttcagagcaaaccgctggtggacatcgacctaatttcgttcgacgatgatgtgctaccaactccatccggcaatctggcagaagagagcgtcgggagcgaaatggtgcttgaccctttccagctgccagctaagactgagccaattaaggaaagggcagtacaacccgccccaaccagaaagccaacagtcatcaggatccctgccaaaccaggaaagtgtctgcacgaagatccacaatctcctccaccactcccggctgaaaaaccgatcggcaacacatttagtacagtgtctggcaaattatccaacgtcgagaggacaaggaacctcgaatctaaccacccgggccagacgggtgggttcgtacgcgtccctccaagattgcctccgcggccagtgaacggaaaaactatccctactcagcagccgcctacaaaagtacctcccgaaagaccccccccccccaaactaagtgctacccgccgaagcaataagaagctgccattcaatcgctcatctagtgacatggatttgcagaaaaaacagtcaaacctggcaactggtctgtccaaggcaaaaagccaagtgttcaagaaccaggacccagtgctgccgccaagaccaaagcccggtcacccactctattcgaagtatatgctttccgtacctcatggcatagctaacgaggacatagtcagccagaaccccggcgagcttagctgcaaacgcggcgacgtgctggtaatgctgaagcaaaccgaaaataattatttggaatgccaaaagggtgaggatactggaagggtgcacctctcccagatgaaaataataaccccactggacgagcacttgcgcagcaggcctaacgatccctcgcacgcccagaagcccgtcgattctggcgccccacacgccgtggtgttgcatgacttcccggccgagcaggtagacgatctgaaccttacaagcggggagatcgtgtaccttctggaaaaaatcgacacggactggtaccgaggtaactgcaggaatcaaattggcatttttcccgcgaattatgtcaaagtcatcattgacatccccgagggcggaaatggaaaacgggaatgcgtgagttctcattgtgttaaaggtagccgctgcgtggcccgctttgaatatattggggaacagaaggacgaactaagtttctcggagggtgaaatcattatactgaaggagtacgtcaacgaggagtgggccaggggagaggtgcgtggacgcaccggaatctttcccttaaatttcgtcgagcccgtggaggattatccaacttcaggggctaatgtcctgtccacaaaggtgcctttgaagaccaagaaggaagactctggtagtaatagccaagtgaatagcttaccggccgagtggtgcgaagctctgcattctttcaccgctgagacctctgatgacctgtcctttaagaggggtgatcgaatacagattcttgaaaggctcgacagcgactggtgcaggggaaggcttcaagatcgggaaggcatctttcctgccgtgtttgtaaggccttgtccggcagaggctaagagcatgttggcaatagtgccaaagggcaggaaggccaaagccttatacgacttccgcggggaaaatgaagatgagttatcattcaaggccggtgacataataacagaactggagtcagtggatgatgactggatgtccggcgaactcatgggcaaaagcggtatcttcccgaaaaattatatccagttcctccagatttcatag

SEQ ID NO: 23601 - DNA, 2373 bp, Artificial Sequence
  derived and/or modified sequence
atgaacataatgaatacagaacaaagtcagaacagtatcgtttccaggattaaagtgtttgagggccagacaaacatcgaaacatctgggttacctaagaaaccagaaataactccccgatcactgccccctaagccaacagtctcaagtggaaagccctccgtggcccctaaacctgccgcaaatagggcgtcaggagagtgggacagcgggaccgaaaaccgactgaaagttacatcaaaggagggactcacaccctatcctccacttcaggaagcaggctcgataccggtgaccaagccagagctgccgaagaaacccaatcctggtctcattcgctcagttaatccagagatccccggacgaggtcccctagccgagagctccgatagcgggaagaaagtccctacccccgcaccacggcctttgctcctgaagaagtctgtctcctcggagaaccccacctatccgtcggctccgctgaagccagtcaccgtgcccccacgattagctggcgctagccaagcaaaggcctacaaatcactgggagagggtcctcccgctaaccctccggtccctgttctccagtcaaagcccctggtggatatcgacttgatctctttcgatgatgacgtgctgcccactcctagtgggaacctggctgaagagtccgttggcagcgagatggtgctggacccatttcagctacctgctaagaccgaaccaatcaaagaacgtgcagtccagcctgcgccaacgaggaaacccacagtgattaggattccagccaagcctggcaaatgtcttcacgaagacccacagagtcccccacccctgccagcggaaaaacctatcgggaacaccttttcaacagtgagcgggaagctgtcaaacgtggagcgtacaaggaatctcgaatcaaatcatccaggtcagactggaggattcgtccgggtcccgcctcgtctgccaccacggccagtgaacggtaagaccatccccacccagcagcctcctacgaaggtgccacctgagaggcccccacccccaaagctttctgccaccagacgatctaacaagaaattgcccttcaataggagctctagcgacatggacctgcagaaaaagcaaagcaatttagccacaggtctatccaaggcgaagtcccaagttttcaagaaccaagatcctgttctgccaccacggccaaaacctggccatccattatattcaaaatacatgctgagcgtaccacatggaatagctaatgaggacatcgtaagtcagaatccaggggagctgagctgtaagcgtggggatgtgctggtgatgcttaagcaaacggagaacaattatctggagtgtcagaagggagaggacacaggcagagtgcacctgtcacaaatgaaaattattacacccctggacgagcatttgagaagccgtccaaatgacccctcacatgcccagaagccggttgactccggtgctccccacgcagttgttctgcatgatttcccagcagagcaggtagacgaccttaacctcacgagcggggaaatcgtgtatctcctggaaaagatcgacaccgactggtacaggggtaattgtagaaatcagatcggaatctttcctgctaactacgtcaaagtcataatcgatatcccagagggcggaaacggaaagagggagtgcgtttcttcccattgtgtcaaggggtcccggtgcgtggcccgatttgagtatatcggggagcagaaggacgagctctccttttccgagggggagataatcatcctgaaggaatacgtcaacgaggaatgggctcggggtgaggtccgcggaaggaccggcatttttccgctcaacttcgtcgaacccgtggaagattatccaacatcaggagctaacgtactaagtaccaaagtgcccctcaagaccaagaaggaagactccggcagcaactctcaggtgaacagcctccctgccgagtggtgtgaagctctgcactccttcactgccgagacatccgatgacctttccttcaagcggggagatagaatacagatcctcgaaagactggactcagactggtgtcggggacggcttcaggatcgggagggaatatttccggcagtgtttgtgaggccttgccccgcagaggccaagtccatgcttgcaatcgtgccgaaaggtcgcaaggctaaagccctgtatgacttccgaggggaaaacgaggacgagctctccttcaaagctggggacatcattaccgagcttgaatccgtcgacgatgactggatgtccggcgagcttatgggcaaatccggcatcttccctaaaaactacattcagttcctgcagataagctag

SEQ ID NO: 23602 - DNA, 2373 bp, Artificial Sequence
  derived and/or modified sequence
atgaatataatgaacactgagcaaagtcagaattcgattgttagtcggattaaagttttcgaggggcagactaatatcgagacaagcggccttccgaagaaacccgaaatcaccccgagatcactcccaccaaaacccacagtgagtagcggaaagccttccgtggcacccaaacccgcagctaaccgggcttctggtgaatgggattctgggacagagaatcgcttaaaagttacgtcaaaggagggattgactccttacccccctcttcaggaggcgggaagcattcctgtgacaaaaccggagttgccaaagaagcctaacccaggccttatccgaagtgttaaccctgaaatccccggacggggacctctggccgagagctccgatagtggcaaaaaggtgcccacacccgcacctcgccctcttctgttgaagaagtctgtttcctcggaaaatccgacctaccccagcgcgccattgaaaccagtgacagtgcccccacgcctggcaggagcttcgcaggccaaagcgtacaaaagcctcggcgaggggcctcccgctaaccctccggtgccagttcttcaaagcaaacctctggtggatattgatttaatcagcttcgacgatgacgtacttccgactcctagtggaaatctggcagaggaaagtgtcggaagcgagatggtgctggatccattccaattgcccgctaaaactgagcccatcaaagaacgtgccgttcaacccgctccgactcggaagcctaccgtgatccgaatccccgctaagcctggtaaatgtctgcatgaagaccctcagtcacccccacccttgcctgcggaaaaacctataggaaataccttttccaccgtttccggcaagctgagtaacgttgagcggaccaggaacctcgagtccaatcaccctggccagactgggggattcgtgcgcgtccctccacgactaccccctagaccagttaatgggaaaacgattccaacacagcaacctccaaccaaagtgccgccagaaaggccccctcctcctaagttgtctgctacgagaaggagtaacaaaaaattgcccttcaaccgatcaagctccgatatggacttgcagaagaaacagtcaaaccttgccacagggctgtcaaaggctaaatcccaagttttcaagaatcaggaccccgtcctgccacccagacccaaacccggacatcccctttatagcaagtacatgctaagcgtgcctcacggtatcgccaacgaggatatcgtttcacagaacccaggggaactatcctgcaagaggggggatgttcttgtgatgctgaaacagacagaaaacaactacctggagtgccagaaaggtgaggatactgggagggtccacctgtctcaaatgaagattatcacacctttagacgagcatctgagatcccggcctaatgatccctcccacgctcagaagccagtcgatagtggggctccccacgccgttgtcctccatgactttccagccgaacaggtggacgaccttaatctgaccagcggagaaattgtgtacttactggaaaagatcgacaccgactggtacagaggcaactgtaggaaccagattggaatcttccccgctaattacgtcaaggttataatcgatatccccgaaggcggtaacggaaagagggagtgcgtgagctctcattgcgtaaaaggaagccgctgcgtggcgaggttcgagtatatcggcgaacaaaaggacgaactgtccttctccgagggcgaaattattattctgaaagagtatgtaaacgaagaatgggctaggggagaggtgcgcggaagaacgggaatctttccgctgaactttgttgaaccagttgaagactaccctacctctggtgccaatgtactctccaccaaggttcctttgaagaccaaaaaggaagactctggttcgaacagccaggtcaacagtcttccagccgaatggtgtgaagcgttgcattctttcacagccgagactagcgacgatctctccttcaaaagaggtgaccgaattcagattctagagcgactggattccgactggtgtaggggacgactgcaggatagggagggcatcttcccagccgttttcgtcagaccttgccctgccgaggcaaagagtatgttggccattgtccctaagggccgtaaagccaaagccttatatgactttagaggggagaatgaggatgaactcagcttcaaagcgggagatattataacagagctggaatctgtggacgatgactggatgtccggggagctcatgggtaagtctggcatttttccaaaaaactatatccagtttttgcaaattagctag

SEQ ID NO: 23603 - DNA, 2373 bp, Artificial Sequence
  derived and/or modified sequence
atgaacatcatgaacaccgagcagagccagaacagcatcgtgagcagaatcaaggtgttcgagggccagaccaacatcgagaccagcggcctgcccaagaagcccgagatcacccccagaagcctgccccccaagcccaccgtgagcagcggcaagcccagcgtggcccccaagcccgccgccaacagagccagcggcgagtgggacagcggcaccgagaacagactgaaggtgaccagcaaggagggcctgaccccctacccccccctgcaggaggccggcagcatccccgtgaccaagcccgagctgcccaagaagcccaaccccggcctgatcagaagcgtgaaccccgagatccccggcagaggccccctggccgagagcagcgacagcggcaagaaggtgcccacccccgcccccagacccctgctgctgaagaagagcgtgagcagcgagaaccccacctaccccagcgcccccctgaagcccgtgaccgtgccccccagactggccggcgccagccaggccaaggcctacaagagcctgggcgagggcccccccgccaacccccccgtgcccgtgctgcagagcaagcccctggtggacatcgacctgatcagcttcgacgacgacgtgctgcccacccccagcggcaacctggccgaggagagcgtgggcagcgagatggtgctggaccccttccagctgcccgccaagaccgagcccatcaaggagagagccgtgcagcccgcccccaccagaaagcccaccgtgatcagaatccccgccaagcccggcaagtgcctgcacgaggacccccagagccccccccccctgcccgccgagaagcccatcggcaacaccttcagcaccgtgagcggcaagctgagcaacgtggagagaaccagaaacctggagagcaaccaccccggccagaccggcggcttcgtgagagtgccccccagactgccccccagacccgtgaacggcaagaccatccccacccagcagccccccaccaaggtgccccccgagagaccccccccccccaagctgagcgccaccagaagaagcaacaagaagctgcccttcaacagaagcagcagcgacatggacctgcagaagaagcagagcaacctggccaccggcctgagcaaggccaagagccaggtgttcaagaaccaggaccccgtgctgccccccagacccaagcccggccaccccctgtacagcaagtacatgctgagcgtgccccacggcatcgccaacgaggacatcgtgagccagaaccccggcgagctgagctgcaagagaggcgacgtgctggtgatgctgaagcagaccgagaacaactacctggagtgccagaagggcgaggacaccggcagagtgcacctgagccagatgaagatcatcacccccctggacgagcacctgagaagcagacccaacgaccccagccacgcccagaagcccgtggacagcggcgccccccacgccgtggtgctgcacgacttccccgccgagcaggtggacgacctgaacctgaccagcggcgagatcgtgtacctgctggagaagatcgacaccgactggtacagaggcaactgcagaaaccagatcggcatcttccccgccaactacgtgaaggtgatcatcgacatccccgagggcggcaacggcaagagagagtgcgtgagcagccactgcgtgaagggcagcagatgcgtggccagattcgagtacatcggcgagcagaaggacgagctgagcttcagcgagggcgagatcatcatcctgaaggagtacgtgaacgaggagtgggccagaggcgaggtgagaggcagaaccggcatcttccccctgaacttcgtggagcccgtggaggactaccccaccagcggcgccaacgtgctgagcaccaaggtgcccctgaagaccaagaaggaggacagcggcagcaacagccaggtgaacagcctgcccgccgagtggtgcgaggccctgcacagcttcaccgccgagaccagcgacgacctgagcttcaagagaggcgacagaatccagatcctggagagactggacagcgactggtgcagaggcagactgcaggacagagagggcatcttccccgccgtgttcgtgagaccctgccccgccgaggccaagagcatgctggccatcgtgcccaagggcagaaaggccaaggccctgtacgacttcagaggcgagaacgaggacgagctgagcttcaaggccggcgacatcatcaccgagctggagagcgtggacgacgactggatgagcggcgagctgatgggcaagagcggcatcttccccaagaactacatccagttcctgcagatcagctag

SEQ ID NO: 23604 - protein, 640 aa, Artificial Sequence
  derived and/or modified sequence
MKISTTQIERRFEISSSLVGLIDGSFEIGNLFVIVFVSYFGSKLHRPKLIGIGCFLMGTGSILMALPHFFMGYYRYSKETNIDPSENSTSNLPNCLINQMLSLNRTPSEIIERGCVKESGSHMWIYVFMGNMLRGIGETPIVPLGISYIDDFAKEGHSSLYLGTVNVMGMTGLVFAFMLGSLFAKMYVDIGYVDLSTIRITPKDSRWVGAWWLGFLVSGIVSIISSIPFFFLPLNPNKPQKERKVSLFLHVLKTNDKRNQIANLTNRRKYITKNVTGFFQSLKSILTNPLYVIFVIFTLLHMSSYIASLTYIIKMVEQQYGWSASKTNFLLGVLALPAVAIGMFSGGYIIKKFKLSLVGLAKLAFCSATVHLLSQVLYFFLICESKSVAGLTLTYDGNSPVRSHVDVPLSYCNSECNCDESQWEPVCGNNGITYLSPCLAGCKSSSGNKEPIVFYNCSCVEVIGLQNKNYSAHLGECPRDDACTRKSYVYFVIQVLDAFLCAVGLTSYSVLVIRIVQPELKALAIGFHSMIMRSLGGILVPIYFGALIDTTCMKWSTNSCGARGACRIYNSTYLGRAFFGLKVALIFPVLVLLTVFIFVVRKKSHGKDTKVLENERQVMDEANLEFLNDSEHFVPSAEEQ

SEQ ID NO: 23605 - protein, 687 aa, Artificial Sequence
  derived and/or modified sequence
MDQHQHLNKTAESASSEKKKTRRCNGFKMFLAALSFSYIAKALGGIIMKISITQIERRFDISSSLAGLIDGSFEIGNLLVIVFVSYFGSKLHRPKLIGIGCLLMGTGSILTSLPHFFMGYYRYSKETNIDPSENSTSNLPNCLINQMLSLNRTPSEIIERGCVKESGSHMWIYVFMGNMLRGIGETPIVPLGISYIDDFAKEGHSSLYLGTVNVMGMTGLVFAFMLGSLFAKMYVDIGYVDLSTIRITPKDSRWVGAWWLGFLVSGIVSIISSIPFFFLPLNPNKPQKERKVSLFLHVLKTNDKRNQIANLTNRRKYITKNVTGFFQSLKSILTNPLYVIFVIFTLLHMSSYIASLTYIIKMVEQQYGWSASKTNFLLGVLALPAVAIGMFSGGYIIKKFKLSLVGLAKLAFCSATVHLLSQVLYFFLICESKSVAGLTLTYDGNSPVRSHVDVPLSYCNSECNCDESQWEPVCGNNGITYLSPCLAGCKSSSGNKEPIVFYNCSCVEVIGLQNKNYSAHLGECPRDDACTRKSYVYFVIQVLDAFLCAVGLTSYSVLVIRIVQPELKALAIGFHSMIMRSLGGILVPIYFGALIDTTCMKWSTNSCGARGACRIYNSTYLGRAFFGLKVALIFPVLVLLTVFIFVVRKKSHGKDTKVLENERQVMDEANLEFLNDSEHFVPSAEEQ

SEQ ID NO: 23606 - DNA, 1923 bp, Artificial Sequence
  derived and/or modified sequence
atgaagatcagcaccacccagatcgagagaagattcgagatcagcagcagcctggtgggcctgatcgacggcagcttcgagatcggcaacctgttcgtgatcgtgttcgtgagctacttcggcagcaagctgcacagacccaagctgatcggcatcggctgcttcctgatgggcaccggcagcatcctgatggccctgccccacttcttcatgggctactacagatacagcaaggagaccaacatcgaccccagcgagaacagcaccagcaacctgcccaactgcctgatcaaccagatgctgagcctgaacagaacccccagcgagatcatcgagagaggctgcgtgaaggagagcggcagccacatgtggatctacgtgttcatgggcaacatgctgagaggcatcggcgagacccccatcgtgcccctgggcatcagctacatcgacgacttcgccaaggagggccacagcagcctgtacctgggcaccgtgaacgtgatgggcatgaccggcctggtgttcgccttcatgctgggcagcctgttcgccaagatgtacgtggacatcggctacgtggacctgagcaccatcagaatcacccccaaggacagcagatgggtgggcgcctggtggctgggcttcctggtgagcggcatcgtgagcatcatcagcagcatccccttcttcttcctgcccctgaaccccaacaagccccagaaggagagaaaggtgagcctgttcctgcacgtgctgaagaccaacgacaagagaaaccagatcgccaacctgaccaacagaagaaagtacatcaccaagaacgtgaccggcttcttccagagcctgaagagcatcctgaccaaccccctgtacgtgatcttcgtgatcttcaccctgctgcacatgagcagctacatcgccagcctgacctacatcatcaagatggtggagcagcagtacggctggagcgccagcaagaccaacttcctgctgggcgtgctggccctgcccgccgtggccatcggcatgttcagcggcggctacatcatcaagaagttcaagctgagcctggtgggcctggccaagctggccttctgcagcgccaccgtgcacctgctgagccaggtgctgtacttcttcctgatctgcgagagcaagagcgtggccggcctgaccctgacctacgacggcaacagccccgtgagaagccacgtggacgtgcccctgagctactgcaacagcgagtgcaactgcgacgagagccagtgggagcccgtgtgcggcaacaacggcatcacctacctgagcccctgcctggccggctgcaagagcagcagcggcaacaaggagcccatcgtgttctacaactgcagctgcgtggaggtgatcggcctgcagaacaagaactacagcgcccacctgggcgagtgccccagagacgacgcctgcaccagaaagagctacgtgtacttcgtgatccaggtgctggacgccttcctgtgcgccgtgggcctgaccagctacagcgtgctggtgatcagaatcgtgcagcccgagctgaaggccctggccatcggcttccacagcatgatcatgagaagcctgggcggcatcctggtgcccatctacttcggcgccctgatcgacaccacctgcatgaagtggagcaccaacagctgcggcgccagaggcgcctgcagaatctacaacagcacctacctgggcagagccttcttcggcctgaaggtggccctgatcttccccgtgctggtgctgctgaccgtgttcatcttcgtggtgagaaagaagagccacggcaaggacaccaaggtgctggagaacgagagacaggtgatggacgaggccaacctggagttcctgaacgacagcgagcacttcgtgcccagcgccgaggagcagtag

SEQ ID NO: 23607 - DNA, 2064 bp, Artificial Sequence
  derived and/or modified sequence
atggaccagcaccagcacctgaacaagaccgccgagagcgccagcagcgagaagaagaagaccagaagatgcaacggcttcaagatgttcctggccgccctgagcttcagctacatcgccaaggccctgggcggcatcatcatgaagatcagcatcacccagatcgagagaagattcgacatcagcagcagcctggccggcctgatcgacggcagcttcgagatcggcaacctgctggtgatcgtgttcgtgagctacttcggcagcaagctgcacagacccaagctgatcggcatcggctgcctgctgatgggcaccggcagcatcctgaccagcctgccccacttcttcatgggctactacagatacagcaaggagaccaacatcgaccccagcgagaacagcaccagcaacctgcccaactgcctgatcaaccagatgctgagcctgaacagaacccccagcgagatcatcgagagaggctgcgtgaaggagagcggcagccacatgtggatctacgtgttcatgggcaacatgctgagaggcatcggcgagacccccatcgtgcccctgggcatcagctacatcgacgacttcgccaaggagggccacagcagcctgtacctgggcaccgtgaacgtgatgggcatgaccggcctggtgttcgccttcatgctgggcagcctgttcgccaagatgtacgtggacatcggctacgtggacctgagcaccatcagaatcacccccaaggacagcagatgggtgggcgcctggtggctgggcttcctggtgagcggcatcgtgagcatcatcagcagcatccccttcttcttcctgcccctgaaccccaacaagccccagaaggagagaaaggtgagcctgttcctgcacgtgctgaagaccaacgacaagagaaaccagatcgccaacctgaccaacagaagaaagtacatcaccaagaacgtgaccggcttcttccagagcctgaagagcatcctgaccaaccccctgtacgtgatcttcgtgatcttcaccctgctgcacatgagcagctacatcgccagcctgacctacatcatcaagatggtggagcagcagtacggctggagcgccagcaagaccaacttcctgctgggcgtgctggccctgcccgccgtggccatcggcatgttcagcggcggctacatcatcaagaagttcaagctgagcctggtgggcctggccaagctggccttctgcagcgccaccgtgcacctgctgagccaggtgctgtacttcttcctgatctgcgagagcaagagcgtggccggcctgaccctgacctacgacggcaacagccccgtgagaagccacgtggacgtgcccctgagctactgcaacagcgagtgcaactgcgacgagagccagtgggagcccgtgtgcggcaacaacggcatcacctacctgagcccctgcctggccggctgcaagagcagcagcggcaacaaggagcccatcgtgttctacaactgcagctgcgtggaggtgatcggcctgcagaacaagaactacagcgcccacctgggcgagtgccccagagacgacgcctgcaccagaaagagctacgtgtacttcgtgatccaggtgctggacgccttcctgtgcgccgtgggcctgaccagctacagcgtgctggtgatcagaatcgtgcagcccgagctgaaggccctggccatcggcttccacagcatgatcatgagaagcctgggcggcatcctggtgcccatctacttcggcgccctgatcgacaccacctgcatgaagtggagcaccaacagctgcggcgccagaggcgcctgcagaatctacaacagcacctacctgggcagagccttcttcggcctgaaggtggccctgatcttccccgtgctggtgctgctgaccgtgttcatcttcgtggtgagaaagaagagccacggcaaggacaccaaggtgctggagaacgagagacaggtgatggacgaggccaacctggagttcctgaacgacagcgagcacttcgtgcccagcgccgaggagcagtag

SEQ ID NO: 23608 - DNA, 1923 bp, Artificial Sequence
  derived and/or modified sequence
atgaagatcagtacaacccaaatcgagagaagatttgaaatcagctcatccctcgtgggattgatcgacgggtcttttgagattggcaacctgttcgtaatagtcttcgttagctacttcgggtcaaagctgcaccggcccaaactgatcgggatcggatgtttcctgatgggcactggttctatcctgatggcgctccctcacttcttcatggggtattacaggtactccaaagagacaaacatcgatccttccgagaactctacaagcaatctgcccaactgcctcatcaatcagatgctcagcctgaatcgcactccgtccgaaatcatcgagaggggttgtgtaaaggagtccggatctcacatgtggatttatgtttttatgggtaatatgcttagaggtataggagaaacacccattgtccccctgggtataagctacatcgatgactttgccaaagagggccattcaagtctatatttaggcactgtcaacgtaatgggcatgaccggccttgttttcgccttcatgttgggatccttatttgctaaaatgtatgtcgatatcggctacgtggatcttagtactattaggattactccaaaggatagtcgctgggtgggagcctggtggctgggtttcttagtgtctgggatagtcagcatcatcagctcgatccccttcttctttctgcctcttaatcctaacaagccacagaaggaacggaaagttagtttgtttttgcacgtgttaaagacgaacgacaagcgaaatcaaatagcaaatctgacaaacaggaggaagtacattacaaagaatgttaccgggttctttcagtccttgaagagcatccttaccaatcctttgtatgtgatatttgtcatcttcacactcctgcacatgagcagttatatagcctctctgacatatattatcaaaatggtggagcagcaatatggctggagcgctagcaaaaccaactttctcttaggagttctggcactcccagcggtggccatcggtatgttttccggcggttacatcatcaagaaatttaagctgtctctggttggcttagctaaactagcgttctgttccgccaccgtccatctcctttcacaggtcctctactttttcctcatttgcgagtctaaatcggtggccggattaacccttacctatgatggcaattctccggttaggtcccacgttgacgtgccactgagctattgcaactctgaatgtaactgcgacgaaagccaatgggagccagtgtgcggcaacaacgggattacatatttgtcaccgtgccttgccggatgcaagtcaagttccggcaataaagaacccattgtgttctataactgttcatgtgttgaggtgataggccttcagaacaaaaactatagcgctcatcttggagagtgcccacgcgacgatgcatgcacccgtaagtcttatgtttatttcgtcatccaagtgctggacgcgtttctatgcgccgtgggactgacttcatatagcgtgttggtgatacgtatcgtacagcccgaactgaaggctctggctattggttttcactcaatgattatgcgatctttgggggggattctagtcccaatatactttggggctctaattgacacgacatgtatgaaatggtctactaatagttgtggagcacgaggtgcttgtaggatatacaactctacatatcttggacgcgccttctttggcctgaaagtggctctgatttttcctgtgttggtattgctcaccgtattcatttttgttgtgcgcaaaaaatctcatgggaaggacactaaggtgctcgagaacgagcgtcaggttatggatgaggcaaatctagaattcttgaatgatagcgaacactttgttccttctgctgaagagcagtag

SEQ ID NO: 23609 - DNA, 2064 bp, Artificial Sequence
  derived and/or modified sequence
atggatcagcatcagcatctgaataaaactgccgaatccgcttcgtccgaaaagaagaaaacccggcggtgcaacggctttaagatgtttcttgcggcactgtccttcagttacatcgccaaagccctggggggaatcatcatgaaaataagcatcacccaaattgaacgcaggttcgacatcagtagctcattggctggtctcattgacggttcattcgaaattggcaatcttctagtcatcgtgtttgtttcttactttggcagcaagttgcatcggccaaagcttattggaatcggttgtctgctcatgggcaccggatccatcttgacatctctgccacactttttcatggggtactacagatactctaaggagacgaatatcgacccaagtgaaaactcaacgagcaacctccctaattgcctcattaaccagatgctctctctaaaccgcacacccagcgaaattatcgaacggggatgcgttaaggaatctggatcgcatatgtggatttacgtattcatgggcaatatgctgcgagggatcggtgagacacccatcgtgccactcggtatctcctacatcgatgatttcgctaaagagggtcattcctccctttatctggggacagtcaacgtgatggggatgacaggactggtctttgcttttatgttgggcagcttgttcgctaaaatgtacgtcgacatcggatacgtagacctaagcaccatccgcataacacccaaggactcacggtgggtgggtgcatggtggctcggatttctcgtttctgggattgtatccataatttcttctattcctttcttctttctcccccttaaccctaataagcctcagaaggagagaaaggtttccctcttcctgcacgtccttaaaacaaacgacaagaggaatcagatcgcaaatctgacaaacagacgaaaatacatcaccaaaaatgttacaggattcttccaaagtctcaagtccatcttgacaaatcccctttacgtgattttcgtgatttttacattactgcatatgagtagctatatcgcctcccttacgtatatcattaaaatggttgagcaacaatacggttggagcgcctctaagacgaacttcctcctgggcgtacttgcccttccagcagttgcaatcggaatgtttagtgggggttatattattaagaaattcaagctgagtctggtaggactggccaagctggcgttctgttccgccaccgtgcaccttctgagccaggtactctattttttcctgatctgtgagtccaagagtgttgctggcctgactcttacttacgatggcaacagccctgtcaggtcccatgttgacgtaccactttcctactgcaatagcgagtgcaactgtgatgagagtcagtgggagcctgtatgcggtaataatggcataacctatttgtcaccatgcctggctggctgtaaatcttcctccgggaataaagaacctatcgttttctacaattgttcatgcgtggaggtcatcggactccagaataagaattattcagcccacctaggggaatgcccccgagatgatgcctgcacacgaaaatcatacgtgtattttgtcatacaagttctcgatgccttcttgtgtgctgtgggtcttacctcttatagcgtactggtcatccgtatcgtgcagccagagttgaaggctctggctattggtttccatagtatgatcatgaggagcctggggggcattcttgtcccgatatatttcggcgctctcattgatacgacttgcatgaaatggagtactaacagctgtggggcccgaggagcctgtcgcatctataatagcacatacttaggaagggccttctttggacttaaagtagctctgatctttcctgtgctagtactgttaacagtgttcatatttgtcgtacgtaagaagtctcacggtaaggacacaaaagtcctcgagaatgagcgacaagtgatggacgaggccaacttggagttcctcaatgactcagagcactttgttccatccgccgaagagcaatag

SEQ ID NO: 23610 - DNA, 1923 bp, Artificial Sequence
  derived and/or modified sequence
atgaagatcagcaccacccagatcgagaggagatttgagatcagcagcagcctggtgggcctgattgatggcagctttgagatcggcaacctcttcgtcatcgtgtttgtgtcctacttcggcagcaagctgcaccggcccaagctgattggcatcggctgcttcctgatgggcaccggcagcatcctgatggccctgccccacttcttcatgggctactaccgctacagcaaggagaccaacatcgaccccagcgagaacagcaccagcaacctgcccaactgcctgatcaaccagatgctgagcctgaacagaacacccagcgagatcatcgagcggggctgtgtgaaggagagcggcagccacatgtggatctacgtgttcatgggcaacatgctgcggggcatcggggagacccccatcgtgcccctgggcatctcctacattgatgactttgccaaggagggccacagcagcctgtacctgggcaccgtgaatgtgatgggcatgacaggcctggtgtttgccttcatgctgggcagcctgtttgccaagatgtatgtggacatcggctacgtggacctgagcaccatccgcatcacccccaaggacagccgctgggtgggcgcctggtggctgggcttcctggtgtctggcatcgtgtccatcatcagcagcatccccttcttcttcctgcccctgaaccccaacaagccccagaaggagaggaaggtgtccctcttcctgcacgtgctgaagaccaatgacaagaggaaccagatcgccaacctgaccaacagaaggaagtacatcaccaagaatgtgacaggcttcttccagagcctgaagagcatcctgaccaaccccctgtatgtgatcttcgtcatcttcaccctgctgcacatgagcagctacatcgccagcctgacctacatcatcaagatggtggagcagcagtatggctggagcgccagcaagaccaacttcctgctgggcgtgctggccctgcctgctgtggccatcggcatgttttctgggggctacatcatcaagaagttcaagctgagcctggtgggcctggccaagctggccttctgcagcgccaccgtgcacctgctgagccaggtgctgtacttcttcctgatctgtgagagcaagtctgtggccggcctgaccctgacctatgatggcaacagccctgtgcgcagccacgtggatgtgcccctgagctactgcaacagcgagtgcaactgtgatgagagccagtgggagcctgtgtgtggcaacaacggcatcacctacctgagcccctgcctggccggctgcaagagcagcagcggcaacaaggagcccatcgtgttctacaactgcagctgtgtggaggtgattggcctgcagaacaagaactacagcgcccacctgggggagtgccccagagatgatgcctgcaccaggaagagctatgtgtactttgtgatccaggtgctggatgccttcctgtgtgctgtgggcctgaccagctacagcgtgctggtgatcagaattgtgcagcctgagctgaaggccctggccatcggcttccacagcatgatcatgaggagcctgggcggcatcctggtgcccatctactttggagccctgattgacaccacctgcatgaagtggagcaccaacagctgtggggcccggggggcctgccgcatctacaacagcacctacctgggccgggccttcttcggcctgaaggtggccctgatcttccctgtgctggtgctgctgaccgtcttcatctttgtggtgaggaagaagagccacggcaaggacaccaaggtgctggagaatgaaaggcaggtgatggatgaggccaacctggagttcctgaatgacagcgagcactttgtgcccagcgctgaggagcagtag

SEQ ID NO: 23611 - DNA, 2064 bp, Artificial Sequence
  derived and/or modified sequence
atggaccagcaccagcacctgaacaagacagctgagagcgccagcagcgagaagaagaagacccggcgctgcaatggcttcaagatgttcctggccgccctgtccttctcctacatcgccaaggccctgggcggcatcatcatgaagatcagcatcacccagattgaaagaagatttgacatcagcagcagcctggccggcctgattgatggcagctttgaaattggcaacctgctggtgattgtgtttgtgtcctacttcggcagcaagctgcaccggcccaagctgattggaattggctgcctgctgatgggcaccggcagcatcctgaccagcctgccccacttcttcatgggctactaccgctacagcaaggagaccaacatcgaccccagcgagaacagcaccagcaacctgcccaactgcctgatcaaccagatgctgagcctgaacagaacaccttctgagatcatcgagcggggctgtgtgaaggagagcggcagccacatgtggatctacgtgttcatgggcaacatgctgcggggcattggagagacccccatcgtgcccctgggcatctcctacattgatgactttgccaaggagggccacagcagcctgtacctgggcaccgtgaatgtgatgggcatgacaggcctggtgtttgccttcatgctgggcagcctgtttgccaagatgtatgtggacatcggctacgtggacctgagcaccatccgcatcacccccaaggacagccgctgggtgggcgcctggtggctgggcttcctggtgtctggaattgtgtccatcatcagcagcatccccttcttcttcctgcccctgaaccccaacaagccccagaaggagaggaaggtgtccctcttcctgcacgtgctgaagaccaatgacaagaggaaccagatcgccaacctgaccaacagaaggaagtacatcaccaagaatgtgacaggcttcttccagagcctgaagagcatcctgaccaaccccctgtatgtgatctttgtgatcttcaccctgctgcacatgagcagctacatcgccagcctgacctacatcatcaagatggtggagcagcagtatggctggagcgccagcaagaccaacttcctgctgggcgtgctggccctgcctgctgtggccatcggcatgttcagcggcggctacatcatcaagaagttcaagctgagcctggtgggcctggccaagctggccttctgcagcgccaccgtgcacctgctgagccaggtgctgtacttcttcctgatctgtgagagcaagtctgtggccggcctgaccctgacctatgatggcaacagccctgtgcgcagccacgtggatgtgcccctgagctactgcaacagcgagtgcaactgtgatgagagccagtgggagcctgtgtgtggcaacaacggcatcacctacctgagcccctgcctggccggctgcaagagcagcagcggcaacaaggagcccatcgtgttctacaactgcagctgtgtggaggtgattggcctgcagaacaagaactacagcgcccacctgggagaatgtcccagagatgatgcctgcaccaggaagagctatgtgtacttcgtcatccaggtgctggatgccttcctgtgtgctgtgggcctgaccagctacagcgtgctggtgatccgcatcgtgcagcctgagctgaaggccctggccatcggcttccacagcatgatcatgaggagcctgggcggcatcctggtgcccatctactttggagccctgattgacaccacctgcatgaagtggagcaccaacagctgtggggcccggggggcctgccgcatctacaacagcacctacctgggccgggccttcttcggcctgaaggtggccctgatcttccctgtgctggtgctgctgactgtgttcatctttgtggtgaggaagaagagccacggcaaggacaccaaggtgctggagaatgaaaggcaggtgatggatgaggccaacctggagttcctgaatgattctgagcactttgtgcccagcgctgaggagcagtag

SEQ ID NO: 23612 - DNA, 1923 bp, Artificial Sequence
  derived and/or modified sequence
atgaagatcagcaccacccagatcgagcggcggttcgagatcagcagcagtcttgtgggtttgatagacggctcttttgaaattgggaatttgttcgtaatcgtctttgtcagctattttggctctaagctgcatcgcccaaagctgattggaatcggatgcttcctgatgggcaccggctcgattctgatggctctgccacacttcttcatgggctattacaggtacagcaaagaaacaaacatcgatccaagtgaaaattcgactagcaatctgcccaactgcctaattaaccagatgctgagcctcaatagaactccctccgagatcattgagcgcggctgtgtcaaagagagcgggtcccatatgtggatctatgtatttatgggaaatatgctccgtggcatcggggagactccaatagtgccgcttggcatctcttatattgatgacttcgctaaggagggtcacagtagcctgtatctgggcacagtgaacgtgatgggcatgacaggtctcgtcttcgcctttatgcttggctcattgttcgcgaaaatgtatgtggacatcggatacgtggatctctctactattcgaatcactcctaaagattccagatgggtcggcgcatggtggctgggattcttagtatccgggattgtgagcattatatcttcaatcccgttcttctttctcccactgaacccaaacaagcctcaaaaggaaagaaaagtcagcttgtttctgcatgtgctgaagaccaatgataaaaggaatcagatcgcgaatctaactaataggcgtaaatatatcactaagaatgttacgggtttcttccagtccctgaagtccatcctgaccaacccactctacgtcatcttcgtcatcttcaccttactgcatatgagcagctacatcgccagtctgacatacatcatcaagatggtggaacaacagtatggttggagcgcatcaaaaactaacttcctcctgggcgttctcgctctgcctgccgtggcaattggaatgtttagcggaggctacataatcaagaagttcaagctttccctggtcggtctcgctaaactggccttctgctccgctacagtgcaccttctgtctcaggtgctgtatttttttttgatctgcgagtccaagagtgtggcaggcctcactttaacttacgatgggaattcccctgtcagatcccacgtcgatgttccactgtcctattgcaatagtgagtgcaactgtgacgaatcacagtgggaaccagtgtgcggaaacaacggtatcacatatctgagcccctgtctggccgggtgcaaatccagctctggcaataaggagcctattgtgttttataactgctcttgtgtcgaggttataggcctgcagaataagaattacagtgcacacctgggcgaatgccctcgggatgacgcctgtacaagaaaatcttacgtttactttgtaatccaggtactggatgctttcctctgcgccgtcggactgacctcttattcggtgctggtgataaggatagtccaacctgagctgaaggcgctggccattggattccacagcatgattatgcggtcacttggcggaatcttagtgccaatatactttggtgctttgatcgacactacttgcatgaaatggtccactaattcctgcggggctcgtggggcgtgtcgaatttacaattcaacctatttgggtagggcattttttggacttaaagtggccctcatatttcctgtgctggtgctgctgacagtgttcatctttgtcgtcaggaagaaaagccatggtaaagataccaaggttctggagaacgagagacaggttatggatgaagctaatctggagttcctaaatgacagtgaacatttcgtcccaagcgcagaggagcaatag

SEQ ID NO: 23613 - DNA, 2064 bp, Artificial Sequence
  derived and/or modified sequence
atggaccagcaccagcacctgaacaagaccgccgagagcgccagctcagagaaaaagaagaccagacgatgcaacgggttcaagatgtttctggccgctctctccttttcctacattgcaaaagcactcggggggattataatgaagatttctatcacgcagatcgaaaggcgtttcgatatttccagttcactggccggactgatcgacggaagctttgagataggtaatctgcttgttattgtgttcgtcagctactttggctcaaagcttcatcggcctaagttaatcgggatcggctgcctcctgatggggacagggtccatcctgacctcgctaccacacttctttatgggttattataggtactccaaggagaccaacatagatcctagcgagaattccacctcaaaccttcccaattgcctgattaatcagatgctgagtcttaacagaactccaagcgaaattatagagcgcggatgtgtcaaagagtctggctcacacatgtggatctacgtgtttatgggcaacatgttgagggggattggagaaactccgatcgtgccactgggaatcagttacatagatgatttcgctaaggaaggacacagcagcctgtacctcgggactgttaatgtgatgggcatgacgggtctggtgttcgctttcatgctggggtccctgtttgccaaaatgtacgtagatattggatacgtggacctgagcaccataagaatcacccctaaggatagtaggtgggtgggagcttggtggctcggctttctggttagtggcattgttagcatcatctcatctatcccttttttctttttgcccctcaatccaaacaagccacaaaaagagaggaaggttagtttgtttctgcatgttctgaaaactaatgataagcggaatcagatcgctaacttgaccaatcgcagaaagtacatcaccaagaacgttacaggattctttcagtctctgaaatccatcttgaccaaccctttgtacgtgatctttgtaatcttcactctgctccatatgtcctcatatattgcctcactaacatacattatcaaaatggtcgaacagcagtacggttggagcgccagtaagacaaacttcctgctgggggtgctagccctgccagccgtcgccatcggcatgttctctggagggtatatcattaaaaaatttaaactatccctagtgggattggcaaagctcgctttctgcagcgccaccgtgcacctgctctcccaagttttgtacttctttctcatctgtgagtctaagtcagttgccggcctgacactcacatacgacgggaactcccctgttcggagtcatgttgatgtcccactgtcctattgtaactcagagtgcaactgcgacgaaagtcagtgggaaccggtctgcggcaataacggaatcacatacctctctccttgtcttgctggctgtaagtcttcgtccggcaataaggagcctatcgtcttttataattgctcatgcgttgaagtgatcggcttgcagaacaaaaactactcggcacacttgggcgagtgtcccagggacgatgcatgcacacgcaagagctacgtgtacttcgtgatccaggtcttggacgcttttctctgcgctgttgggttgaccagttattctgtgctcgtaattcgcattgtccagccagaactgaaggccctggcgatcggcttccatagcatgattatgcgttctttgggcggcattctcgtgcccatctacttcggggcattgatcgatactacgtgtatgaagtggtctacaaatagctgcggtgcccggggggcttgtagaatttataactcaacttacctaggtcgggccttttttggacttaaagtggccctgatttttcctgtacttgtccttctgactgtctttatcttcgttgttcgcaaaaaatcacacggtaaagatacaaaggtgctagagaacgagagacaagtcatggacgaggcgaatctggagttcctaaatgattcggaacactttgtgccctccgcagaagaacagtag

SEQ ID NO: 23614 - DNA, 1923 bp, Artificial Sequence
  derived and/or modified sequence
atgaagatttccacaacacaaatcgagcgtaggttcgagatcagtagttccctcgtaggactgatcgacggatcattcgagatcggcaatctgtttgtcatcgtctttgtcagctatttcggtagtaaactccacagacccaaactcattggcattggttgcttcctgatgggcacaggaagcatcctcatggcgctaccccacttttttatgggttattacagatattctaaggagacaaatatcgatccttcagaaaactcaacttccaatcttccaaactgcttgatcaatcaaatgctctccctcaacaggacaccctcagaaatcatcgaaaggggctgcgttaaggaatcaggaagccacatgtggatctatgtgttcatggggaatatgctcaggggaatcggagagacccccatcgtgccgttgggcatctcctatatagacgatttcgcgaaggaggggcattcttccttatacctgggcaccgtaaacgtcatgggcatgaccgggttggtttttgccttcatgcttggctccctttttgcaaagatgtatgtggatatcggctatgtggacttgagcaccatcaggattaccccgaaagactcgcggtgggttggcgcatggtggctaggattcctagtgtccggaatcgtgtccattatttcatccatcccctttttctttttgcctctgaacccgaacaagccacagaaggaaaggaaagtgtctttgtttctgcatgtactaaagactaacgacaaacgcaaccagatcgctaatttgactaacagacgaaaatacatcacaaagaacgttactggatttttccagtcgctaaaaagcatcttgacaaatccactctatgtgatctttgtgatatttaccctgttgcacatgtcttcctatatcgcttccctgacatatatcatcaagatggtggagcagcagtacggctggtccgccagcaaaaccaacttcctgttgggagtcctggccttgcctgcagtggccatagggatgttttccggcggttatattataaaaaagtttaagctgtctctcgtcggtcttgcaaaactggctttctgctccgccactgtgcacctgctgtcccaggtactctatttctttctgatttgtgagagtaaaagtgtggctggactgaccttaacctacgatggcaacagtcccgttagaagtcacgttgacgttccgctatcctactgcaactcagaatgtaactgcgatgaaagccagtgggagccagtctgtggaaacaatggcatcacttacctgagcccgtgcttggccggttgcaaatcctcatccggtaacaaagagcccatagtgttttacaactgctcgtgcgtcgaggtgattggtctccagaacaagaactatagcgcacatctgggtgagtgtcctcgcgatgacgcatgcacccgtaaatcctatgtgtatttcgtgatacaggtcctagacgcttttctgtgcgctgttggtctgacctcttactctgtgctggtgataaggatcgtccagcctgagctcaaagctttggctattggctttcatagtatgattatgcgcagtctcggaggaatccttgtaccaatttactttggcgctcttatcgacacaacatgcatgaaatggagcactaatagttgcggtgctcgcggagcttgtcgtatatacaacagtacatatcttggcagggcctttttcgggctgaaagttgcactgatttttccagttctcgtgctgctgaccgtgtttattttcgtggtaaggaagaaaagccatggaaaagacactaaagtgttggagaatgagagacaagtgatggatgaagccaaccttgagtttcttaatgactcggaacacttcgttccctcagctgaggagcaatag

SEQ ID NO: 23615 - DNA, 2064 bp, Artificial Sequence
  derived and/or modified sequence
atggaccagcaccagcatttgaacaaaactgcagagtcagctagcagtgagaagaagaagacaagaaggtgcaatggcttcaagatgttcctggcagccctatcattcagttacatagccaaggccctgggcggaattatcatgaagataagcattacccaaattgagcgacgctttgacatttcatcttccctggccggtctcattgacgggagcttcgaaatcgggaacctcctcgtgatagtattcgtctcttacttcggatctaagctacatagaccaaaattgattggaatcgggtgtctgctgatgggaaccggctccatattaacaagtctgcctcacttcttcatgggatattataggtactctaaggagactaacatcgacccttctgagaatagtacgtccaacttgccgaactgcttaatcaatcagatgctctccctgaacagaacccccagcgagataatagagcgaggatgtgtgaaggaatctggatcccatatgtggatctacgtcttcatgggtaacatgctccgcggtatcggtgaaacacccattgttccacttggcatttcttacatagatgattttgctaaagagggacacagctcgctgtatctaggtactgtgaatgtgatggggatgaccggtctggtgttcgcatttatgcttggctcgttgtttgctaaaatgtacgtcgacatcgggtacgtggatctttctacaatccggatcactcccaaagactctcgctgggtcggagcgtggtggttagggttcctggttagtggcatcgtgagtatcatctctagcattccattcttcttcctcccactgaatccaaataagccgcaaaaagaaaggaaggtgtccttgtttcttcacgtactgaaaacgaatgataaacggaaccaaattgctaatcttactaaccgcaggaaatatatcacgaagaatgtgacaggatttttccaatctctgaagagtatcctcaccaatccgctgtatgttatctttgtgatattcacactcctccacatgtcttcttacattgccagcctgacttatattatcaagatggtggaacagcaatatgggtggagcgcctctaaaaccaacttcttactgggagtattggcgctgcctgctgtcgcaatagggatgtttagcggaggctatatcattaaaaaatttaaattgtctctggtggggctcgcaaaactcgctttctgttccgccacagtgcatttgctaagccaggttctgtacttcttcttgatatgcgagagcaaatctgtggccggactgacgctgacctacgatgggaactcgcccgttcggagccatgttgacgtcccgttgagctactgcaattcagaatgtaactgtgacgagtcacagtgggaacccgtgtgcgggaataacgggatcacgtatctctctccgtgtctggccggttgcaagtctagcagcggcaataaagagcccattgtgttctacaactgcagctgcgtggaagtcatagggctgcagaacaagaactacagcgcacacttaggagagtgtccacgcgacgacgcttgtactcggaagtcatacgtgtatttcgttatccaagtcctggatgcctttctctgcgcggtgggtctcaccagttactcagtgctcgtcattaggatcgtgcaacctgagttgaaagccctggcaatcggcttccattcaatgattatgaggagcttgggaggcattttggtaccgatctacttcggtgccctgattgacactacatgcatgaaatggtcgaccaacagttgcggcgcacggggagcttgtcgcatctataatagcacctacctggggcgtgcattttttggtttaaaggtcgcccttatcttcccggtgctcgtattactgacggtgttcatctttgttgtgcgaaagaagtcccacgggaaggacaccaaagtgctggagaacgagagacaggtaatggacgaagctaacctggaattcctcaatgactcagagcattttgtccccagtgctgaggaacagtag

SEQ ID NO: 23616 - DNA, 1923 bp, Artificial Sequence
  derived and/or modified sequence
atgaaaatatcaaccactcaaatagaaaggagatttgagatatcctcttctcttgttggtttaattgatggaagcttcgaaataggaaatttgtttgtgattgtatttgtaagttactttggatctaaactacacagaccgaagttaattggaattggttgttttcttatgggaactggaagtattttgatggctttaccacatttcttcatgggatattacaggtattctaaagaaaccaatattgatccatcagaaaattcaacatcaaacttaccaaactgtttaattaatcaaatgttatcactcaatagaacaccgtctgagataatagaaagaggttgtgtgaaggaatctgggtcacacatgtggatctatgtcttcatgggtaatatgcttcgtggcataggggaaacccccatagtaccattggggatttcttacattgatgattttgcaaaagaaggacattcttccttgtatttaggtactgtgaatgtaatgggaatgactggtctagtttttgcctttatgctgggatctctgtttgctaaaatgtatgtggatatcggatatgtggatctgagcactatcaggataactcctaaggactctcgttgggttggagcttggtggcttggtttccttgtgtctggaatagtatccattatttcttctataccattctttttcttgcctctaaatccaaataaaccacagaaagaaaggaaagtttcactatttttgcatgtgctaaaaactaatgataaaaggaatcaaatagctaatttgaccaaccgaagaaaatatattaccaaaaatgtgactggctttttccagtctttgaaaagcatccttaccaatcccctgtatgttatatttgtaatttttacattgttacacatgagcagctacattgcttctcttacttatatcattaaaatggtggagcaacagtatggttggtctgcatctaagactaactttttgttgggagtcctcgccctacctgctgttgcaattggcatgttttcaggaggatatatcattaaaaaattcaaattgtctttagttggacttgccaaattggcattttgttctgcaacagtgcatctcttatctcaagttttatatttctttctaatctgtgaaagcaaatcagttgccggcctaaccttgacctatgatggaaatagtccagtaagatctcatgtagatgtaccactttcttattgcaactcagagtgcaattgtgatgaaagtcaatgggaacccgtctgtggaaacaatggaataacttacctgtcaccttgtctagcaggatgcaaatcttcaagtggtaataaagagcccatagtgttttataactgtagctgtgtggaagtaattggtctccagaacaaaaattactcagcgcacttgggtgaatgcccaagagatgatgcttgtacaaggaaatcttacgtttattttgtaattcaagtcttagatgctttcctctgtgcagttggacttacctcatattccgtgctggtgattaggattgttcaacctgaattgaaagcacttgcaatcggcttccattcaatgattatgcgatcgctaggaggtattctagttccaatatattttggggctctgattgatacaacgtgtatgaagtggtccaccaacagctgtggagcacgaggggcttgtaggatatataattccacatatttgggaagagccttcttcggcttgaaggtagccctaatatttccagtacttgttttacttactgtatttatttttgttgtaaggaaaaaatcccatggaaaggataccaaagtattagaaaatgaaagacaagtaatggatgaagcaaacttagaattcttaaacgacagtgaacattttgtaccttctgctgaagaacagtaa

SEQ ID NO: 23617 - DNA, 2064 bp, Artificial Sequence
  derived and/or modified sequence
atggaccaacatcaacatttgaataaaacagcagagtcagcatcttcagagaaaaagaaaacaagacgctgcaatggattcaagatgttcttggcagccctgtcattcagctatattgctaaagcactaggtggaatcattatgaaaatttccatcactcaaatagaaaggagatttgacatatcctcttctcttgctggtttaattgatggaagctttgaaattggaaatttgcttgtgattgtatttgtaagttactttggatctaaactacacagaccgaagttaattggaattggttgtctccttatgggaactggaagtattttgacatctttaccacatttcttcatgggatattacaggtattctaaagaaaccaatattgatccatcagaaaattcaacatcaaacttaccaaactgtttaattaatcaaatgttatcactcaatagaacaccgtctgagataatagaaagaggttgtgtgaaggaatctgggtcacacatgtggatctatgtcttcatgggtaatatgcttcgtggcataggggaaacccccatagtaccattggggatttcttacattgatgattttgcaaaagaaggacattcttccttgtatttaggtactgtgaatgtaatgggaatgactggtctagtttttgcctttatgctgggatctctgtttgctaaaatgtatgtggatatcggatatgtggatctgagcactatcaggataactcctaaggactctcgttgggttggagcttggtggcttggtttccttgtgtctggaatagtatccattatttcttctataccattctttttcttgcctctaaatccaaataaaccacagaaagaaaggaaagtttcactatttttgcatgtgctaaaaactaatgataaaaggaatcaaatagctaatttgaccaaccgaagaaaatatattaccaaaaatgtgactggctttttccagtctttgaaaagcatccttaccaatcccctgtatgttatatttgtaatttttacattgttacacatgagcagctacattgcttctcttacttatatcattaaaatggtggagcaacagtatggttggtctgcatctaagactaactttttgttgggagtcctcgccctacctgctgttgcaattggcatgttttcaggaggatatatcattaaaaaattcaaattgtctttagttggacttgccaaattggcattttgttctgcaacagtgcatctcttatctcaagttttatatttctttctaatctgtgaaagcaaatcagttgccggcctaaccttgacctatgatggaaatagtccagtaagatctcatgtagatgtaccactttcttattgcaactcagagtgcaattgtgatgaaagtcaatgggaacccgtctgtggaaacaatggaataacttacctgtcaccttgtctagcaggatgcaaatcttcaagtggtaataaagagcccatagtgttttataactgtagctgtgtggaagtaattggtctccagaacaaaaattactcagcgcacttgggtgaatgcccaagagatgatgcttgtacaaggaaatcttacgtttattttgtaattcaagtcttagatgctttcctctgtgcagttggacttacctcatattccgtgctggtgattaggattgttcaacctgaattgaaagcacttgcaatcggcttccattcaatgattatgcgatcgctaggaggtattctagttccaatatattttggggctctgattgatacaacgtgtatgaagtggtccaccaacagctgtggagcacgaggggcttgtaggatatataattccacatatttgggaagagccttcttcggcttgaaggtagccctaatatttccagtacttgttttacttactgtatttatttttgttgtaaggaaaaaatcccatggaaaggataccaaagtattagaaaatgaaagacaagtaatggatgaagcaaacttagaattcttaaacgacagtgaacattttgtaccttctgctgaagaacagtaa

SEQ ID NO: 23618 - protein, 315 aa, Artificial Sequence
  derived and/or modified sequence
MEKYEKLAKTGEGSYGVVFKCRNKTSGQVVAVKKFVESEDDPVVKKIALREIRMLKQLKHPNLVNLIEVFRRKRKMHLVFEYCDHTLLNELERNPNGVADGVIKSVLWQTLQALNFCHIHNCIHRDIKPENILITKQGIIKICDFGFAQILIPGDAYTDYVATRWYRAPELLVGDTQYGSSVDIWAIGCVFAELLTGQPLWPGKSDVDQLYLIIRTLGKLIPRHQSIFKSNGFFHGISIPEPEDMETLEEKFSDVHPVALNFMKGCLKMNPDDRLTCSQLLESSYFDSFQEAQIKRKARNEGRNRRRQQVLPLKS

SEQ ID NO: 23619 - DNA, 948 bp, Artificial Sequence
  derived and/or modified sequence
atggagaagtacgagaagctggccaagaccggcgagggcagctacggcgtggtgttcaagtgcagaaacaagaccagcggccaggtggtggccgtgaagaagttcgtggagagcgaggacgaccccgtggtgaagaagatcgccctgagagagatcagaatgctgaagcagctgaagcaccccaacctggtgaacctgatcgaggtgttcagaagaaagagaaagatgcacctggtgttcgagtactgcgaccacaccctgctgaacgagctggagagaaaccccaacggcgtggccgacggcgtgatcaagagcgtgctgtggcagaccctgcaggccctgaacttctgccacatccacaactgcatccacagagacatcaagcccgagaacatcctgatcaccaagcagggcatcatcaagatctgcgacttcggcttcgcccagatcctgatccccggcgacgcctacaccgactacgtggccaccagatggtacagagcccccgagctgctggtgggcgacacccagtacggcagcagcgtggacatctgggccatcggctgcgtgttcgccgagctgctgaccggccagcccctgtggcccggcaagagcgacgtggaccagctgtacctgatcatcagaaccctgggcaagctgatccccagacaccagagcatcttcaagagcaacggcttcttccacggcatcagcatccccgagcccgaggacatggagaccctggaggagaagttcagcgacgtgcaccccgtggccctgaacttcatgaagggctgcctgaagatgaaccccgacgacagactgacctgcagccagctgctggagagcagctacttcgacagcttccaggaggcccagatcaagagaaaggccagaaacgagggcagaaacagaagaagacagcaggtgctgcccctgaagagctag

SEQ ID NO: 23620 - DNA, 948 bp, Artificial Sequence
  derived and/or modified sequence
atggaaaaatacgagaagctggcaaagacaggagaggggagctatggggtggtgttcaagtgcagaaataagacttcgggtcaggtggttgcagtgaagaaatttgtcgagtccgaagatgacccggtagtgaagaaaattgcgttaagggagattcggatgctgaagcaactaaaacatccaaatcttgtgaatctgatcgaagtgttcagacggaaaagaaaaatgcacctcgtgttcgaatattgcgatcatactttgcttaatgaactcgaaaggaatcccaatggagtcgccgatggtgtcataaagagtgttctgtggcaaaccctgcaggcattgaatttttgtcatatccacaattgcatccaccgtgatatcaagccagagaatattctaattacaaagcaaggtatcatcaaaatttgcgactttggctttgcacagattctaatccccggtgatgcatataccgattacgtggccaccagatggtatcgagctcctgagctgctggtaggggatacccagtacggatcatctgtagatatctgggctattggttgcgtcttcgcagagctcctgacagggcaacccctgtggccaggtaagtctgacgtcgatcagctgtacttgatcatccgcacactcggtaaactcatccctcggcaccagagtatatttaaaagcaacggcttttttcatggaatctccataccggagccggaagacatggagactttagaggagaaattctccgacgtccatcccgttgctttgaactttatgaagggctgcctcaaaatgaacccggacgataggcttacctgttcacagctgctagaatcttcctactttgactccttccaagaggctcagatcaaaagaaaggcgagaaacgaagggcgaaatcgtcggcgccagcaggtgctgccactgaagagttag

SEQ ID NO: 23621 - DNA, 948 bp, Artificial Sequence
  derived and/or modified sequence
atggagaagtatgagaagctggccaagacaggagagggcagctatggagtggtgttcaagtgcaggaacaagaccagcggccaggtggtggccgtgaagaagtttgtggagagtgaagatgatcctgtggtgaagaagatcgccctgcgggagatccgcatgctgaagcagctgaagcaccccaacctggtgaacctgattgaggtgttccggaggaagaggaagatgcacctggtgtttgagtactgtgaccacaccctgctgaatgagctggagaggaaccccaacggggtggctgatggagtcatcaagtctgtgctgtggcagaccctgcaggccctgaacttctgccacatccacaactgcatccaccgggacatcaagccagagaacatcctgatcaccaagcagggcatcatcaagatctgtgactttggatttgcccagatcctgatccctggagatgcctacacagattatgtggccacccgctggtaccgggcccctgagctgctggtgggggacacccagtatggcagctctgtggacatctgggccatcggctgtgtgtttgctgagctgctgaccggccagcccctgtggccaggcaagagtgatgtggaccagctgtacctgatcatccgcaccctgggcaagctgatccccaggcaccagagcatcttcaagagcaatggcttcttccacggcatcagcatccctgagcctgaggacatggagaccctggaggagaagttcagtgatgtgcaccctgtggccctgaacttcatgaagggctgcctgaagatgaacccagatgaccggctgacctgcagccagctgctggagagcagctactttgacagcttccaggaggcccagatcaagaggaaggccagaaatgaaggaagaaacagaagacggcagcaggtgctgcccctgaagagctag

SEQ ID NO: 23622 - DNA, 1567 bp, Artificial Sequence
  derived and/or modified sequence
atggaaaagtatgaaaaattagctaagactggagaagggtcttatggggttgtattcaaatgcagaaacaaaacctctggacaagtagtagctgttaaaaaatttgtggaatctgaagatgatcctgttgttaagaaaatagcactaagagaaatacgtatgttgaagcaattaaaacatccaaatcttgtgaacctcatcgaggtgttcaggagaaaaaggaaaatgcatttagtttttgaatactgtgatcatacacttttaaatgagctggaaagaaacccaaatggagttgctgatggagtgatcaaaagcgtattatggcaaacacttcaagctcttaatttctgtcatatacataactgtattcacagagatataaaacctgaaaatattctaataactaagcaaggaataatcaagatttgtgacttcgggtttgcacaaattctgattccaggagatgcctacaccgattatgtagctacgagatggtaccgagctcctgaacttcttgtgggagatactcagtatggttcttcagtcgatatatgggctattggttgtgtttttgcagagctcctgacaggccagccactgtggcctggaaaatcagatgtggaccaactttatctgataatcagaacactaggaaaattaatcccaagacatcaatcaatctttaaaagtaacgggtttttccatggcatcagtatacctgagccagaagacatggaaactcttgaggaaaagttctcagatgttcatcctgtggctctgaacttcatgaaggggtgtctgaagatgaatccagatgacagattaacctgttcccaactcctggagagctcctactttgattcttttcaagaggcccaaattaaaagaaaagcacgtaatgaaggaagaaacagaagacgccaacaggtacttccgctcaaaagttaaagtgctataaaaataattccttttttgtttttgtttgtctgcctttcaaagtgagacaaggtggacaccaagacctttcatttgtactggtgtagttgtatttgtctagcttaataaatattggtaattgatgtaataaaaccatagaactatgaaaatatcaagattattgcaaaaatcttattccaaacacacctgaatcaaatcgttacgcaactctttggctgctctgattggatatcccacccacaagatcgtatacccataatataacaacttcatataataaaatgctgattccaacaggactgagttttgccagcattgcaaaggaatccaagtgcctttctgtagcctccagatgtgcaataacggtaacttgactcttccatcttttcacccacagcaggcacctaagtctgcctttcctaggctttttctcaaaaccaagatctgccaggtacaaaggaatgaaacccagacatctgggaaccaaattctacccaatgggccaatattgcagaacagtatggtgactgttatgacaaacattaattctgcagtttatcaggtgactgtccttcacttgctttcagaaaactttgaagttaaatcgtaa

SEQ ID NO: 23623 - DNA, 948 bp, Artificial Sequence
  derived and/or modified sequence
atggagaagtacgagaagctggccaagaccggcgagggcagctacggcgtggtgttcaagtgtagaaataaaacgagcggtcaggtcgtggcggttaagaaatttgtggagtccgaggatgatcccgtcgtgaaaaagatagccctgagagaaattagaatgctgaagcagttaaagcaccccaacttggtgaacctcatcgaggtttttagaaggaagagaaaaatgcaccttgtgttcgagtactgtgatcatactttattgaatgagctggagaggaatcccaacggggtggcggatggggtcattaagtctgtactctggcagaccctgcaggcattaaatttttgtcacatccacaattgcatccaccgggatattaaacctgagaacattttaatcaccaaacagggtattattaaaatctgtgacttcggtttcgctcaaattctgatacccggcgatgcttatactgactatgtggccactagatggtaccgggcccccgagctgttagtgggcgacacgcaatacggcagctctgttgatatttgggcgatcgggtgcgtgttcgctgaactgcttacagggcagcccctatggcccgggaagagcgatgtggatcagctttatctgatcattagaacccttgggaagctgatcccacgccatcagtctatttttaaaagcaacggctttttccatggtatctctatcccagaacccgaggatatggaaactctggaggagaaatttagcgacgtgcatccggttgcgctgaactttatgaaagggtgtcttaaaatgaaccctgacgatcgcctaacgtgttcccaacttctggaatcttcatactttgacagcttccaggaggcacagatcaaaaggaaggctaggaatgagggaaggaataggcgacgccagcaagtgctgcctctaaaatcttag

SEQ ID NO: 23624 - DNA, 948 bp, Artificial Sequence
  derived and/or modified sequence
atggagaagtatgaaaagcttgccaagaccggcgaaggatcgtacggggtggtctttaagtgtagaaataaaacatcaggtcaggtggtggctgtcaaaaaattcgtggaaagcgaagacgaccccgtggttaagaagatcgctctgcgtgagatccgcatgctcaagcagctcaagcatcccaatctcgtgaaccttattgaggtcttcaggaggaaacggaaaatgcacttagtctttgagtactgtgatcatacccttcttaatgagcttgagcgtaatcctaacggcgtcgccgatggtgtgattaagagcgtgctctggcagacactgcaggctctgaatttttgtcatatacacaactgtatacaccgggacatcaaaccggaaaatattcttattaccaagcaggggatcatcaagatctgtgacttcgggtttgcgcaaattcttatacctggagacgcctacacagattatgtggcaacgcgatggtacagagctcccgagctgctcgtgggtgacactcagtatggatcgagcgtggacatttgggcaattgggtgcgtctttgcggagctgcttacaggccagcccttatggcccggtaagagtgacgtggaccagctctacctgatcattcggactctgggcaaactaattccaagacaccaaagcatttttaagtcaaatgggtttttccacgggattagcattcccgaacctgaggatatggagacattagaagagaaattctcagatgtgcaccccgttgcattgaactttatgaaaggctgcttgaagatgaatcctgatgaccgcctgacatgtagccaacttttggagtcgagttatttcgattctttccaggaggcacagatcaagcggaaggccaggaacgaagggcgaaaccggcgtcgccagcaggtcctacctcttaaatcatag

SEQ ID NO: 23625 - DNA, 1020 bp, Artificial Sequence
  derived and/or modified sequence
atgatggacagccagctggtggccggcgtggccttcaagaagaccttcagctacgccggcttcgagatgcagcccaagaagtaccacaaccccaagatcgccctgctgaacgtggagctggagctgaaggccgagaaggacaacgccgagatcagagtgcacaccgtggaggactaccaggccatcgtggacgccgagtggaacatcctgtacgacaagctggagaagatccaccacagcggcgccaaggtggtgctgagcaagctgcccatcggcgacgtggccacccagtacttcgccgacagagacatgttctgcgccggcagagtgcccgaggaggacctgaagagaaccatgatggcctgcggcggcagcatccagaccagcgtgaacgccctgagcgccgacgtgctgggcagatgccaggtgttcgaggagacccagatcggcggcgagagatacaacttcttcaccggctgccccaaggccaagacctgcaccttcatcctgagaggcggcgccgagcagttcatggaggagaccgagagaagcctgcacgacgccatcatgatcgtgagaagagccatcaagaacgacagcgtggtggccggcggcggcgccatcgagatggagctgagcaagtacctgagagactacagcagaaccatccccggcaagcagcagctgctgatcggcgcctacgccaaggccctggagatcatccccagacagctgtgcgacaacgccggcttcgacgccaccaacatcctgaacaagctgagagccagacacgcccagggcggcacctggtacggcgtggacatcaacaacgaggacatcgccgacaacttcgaggccttcgtgtgggagcccgccatggtgagaatcaacgccctgaccgccgccagcgaggccgcctgcctgatcgtgagcgtggacgagaccatcaagaaccccagaagcaccgtggacgcccccaccgccgccggcagaggcagaggcagaggcagaccccactag

SEQ ID NO: 23626 - DNA, 1020 bp, Artificial Sequence
  derived and/or modified sequence
atgatggactcacagctggtggctggggtcgcgtttaaaaagacattcagttacgccggatttgaaatgcagcctaagaaatatcacaatcccaagatcgccctgctgaacgtggagctcgagttaaaggccgaaaaagataacgctgagatccgggtccacacagtggaggactatcaagccattgtggatgcagagtggaacatcctgtatgacaagttagagaagatacaccacagcggggccaaagtcgtcctgtcaaaattacccattggggacgtagcgactcagtacttcgcagacagagacatgttttgcgctgggagagttcccgaggaagacttgaaaagaacaatgatggcatgcggagggagcattcaaactagcgtgaatgcactcagcgcagacgtcctaggtcgatgtcaggtgtttgaggagactcagatcggaggtgaaaggtataacttctttaccgggtgtcctaaagctaagacatgtaccttcatcctacgtggaggggccgaacagttcatggaggagactgaaaggtctctccacgatgcaatcatgatcgttcgtagagctatcaagaacgactccgtcgtcgccggaggaggtgctatcgaaatggagctctctaagtacttgcgcgattattcccggaccatcccagggaagcagcagttgctgataggcgcatatgcaaaggctctggagatcattcctcggcagctctgcgataatgcagggttcgacgcaaccaatattctaaacaaattgcgggccagacatgctcagggggggacatggtatggcgtagatataaacaacgaagacattgctgacaatttcgaggctttcgtgtgggaacctgccatggtgcggattaacgccttgactgccgctagcgaggccgcctgcctcattgtgtccgtcgatgaaaccattaagaacccccggtccactgtcgacgcccctactgccgccggcagagggaggggacggggtagaccacattag

SEQ ID NO: 23627 - DNA, 1020 bp, Artificial Sequence
  derived and/or modified sequence
atgatggacagccagctggtggccggcgtggccttcaagaagaccttctcctatgccggctttgagatgcagcccaagaagtaccacaaccccaagatcgccctgctgaatgtggagctggagctgaaggccgagaaggacaatgctgagatccgggtgcacacagtggaggactaccaggccatcgtggatgctgagtggaacatcctgtatgacaagctggagaagatccaccacagcggggccaaggtggtgctgagcaagctgcccatcggagatgtggccacccagtactttgctgaccgggacatgttctgtgccggccgggtgcctgaggaggacctgaagaggaccatgatggcctgtggcggcagcatccagacctctgtgaatgccctgtctgcagatgtgctgggccgctgccaggtgtttgaggagacccagattggaggagagcgctacaacttcttcaccggctgccccaaggccaagacctgcaccttcatcctgcggggcggcgctgagcagttcatggaggagacagagaggagcctgcatgatgccatcatgattgtgagaagagccatcaagaatgacagcgtggtggccggcggcggggccatcgagatggagctgagcaagtacctgcgggactacagcaggaccatccctgggaagcagcagctgctgattggagcctatgccaaggccctggagatcatcccccggcagctgtgtgacaatgccggctttgatgccaccaacatcctgaacaagctgcgggcccggcatgcccagggcggcacctggtatggagtggacatcaacaatgaagatattgctgacaactttgaggcctttgtgtgggagcccgccatggtgcgcatcaatgccctgacagctgccagcgaggccgcctgcctgattgtgtctgtggatgagaccatcaagaaccccaggagcacagtggatgcccccacagctgctggccggggccggggccggggccggccccactag

SEQ ID NO: 23628 - DNA, 1234 bp, Artificial Sequence
  derived and/or modified sequence
attgtgggttgctgggcggcccggtctcggagaagaggggagagtggcgggccgctgaataagcttccaaaatgatggattctcagctggtagctggtgttgcattcaagaagactttctcttacgctgggtttgaaatgcaacccaaaaagtaccacaatcccaagattgcccttttgaatgtcgagctcgagttgaaagctgagaaagacaatgctgagataagagtccacacagttgaggattatcaggcaattgttgatgctgagtggaacattctctatgacaagttagagaagatccatcattctggagccaaagttgtcttgtccaaactccccattggggatgtggccacccagtactttgctgacagggacatgttctgtgctggccgagtacctgaggaggatctgaagaggacaatgatggcctgtggaggctcaatccagaccagtgtgaatgctctgtcagcagatgtgctgggtcgatgccaggtgtttgaagagacccagattggaggcgagaggtacaatttttttactggctgccccaaggccaagacatgcaccttcattctccgtggcggcgccgagcagtttatggaggagacagagcggtccctgcatgatgccatcatgatcgtcaggagggccatcaagaatgattcagtggtggctggtggcggggccattgagatggaactctccaagtacctgcgggattactcaaggactattccaggaaaacagcagctgttgattggggcatatgccaaggccttggagattatcccacgccagctgtgtgacaatgctggctttgatgccacaaacattctcaacaagctgcgggctcggcatgcccaggggggtacatggtatggagtagacatcaacaacgaggacattgctgacaactttgaagctttcgtgtgggagccagctatggtgcggatcaatgcgctgacagcagcctctgaggctgcgtgcctgatcgtgtctgtagatgaaaccatcaagaacccccgctcgactgtggatgctcccacagcagcaggccggggccgtggtcgtggccgcccccactgagaggcaccccacccatcacatggctggctggctgctgggtgcacttaccctccttggcttggttacttcattttacaaggaaggggtagtaattggcccactctcttcttactggaggctatttaaataaaatgtaagacttc

SEQ ID NO: 23629 - DNA, 1020 bp, Artificial Sequence
  derived and/or modified sequence
atgatggacagccagctggtggccggcgtggccttcaagaagaccttctcctatgcaggttttgagatgcaacccaaaaaatatcataaccccaagatcgcccttcttaatgtggagttggagctgaaggctgagaaggacaacgcggagatccgggtccatacggttgaggattatcaggctatcgttgacgcagagtggaatattctgtacgataagttagagaaaatccaccattccggagcgaaggttgtcttgtccaaacttcctattggtgatgttgccacgcaatatttcgcagaccgggacatgttctgtgcgggccgggtgccagaagaagaccttaagcgcacgatgatggcctgtgggggctccattcagaccagcgtcaatgcactgtccgctgatgtgttgggccgttgccaggtctttgaggaaactcaaataggaggggagcggtacaattttttcactggttgtccaaaagccaagacttgcacattcattctgcgtgggggtgccgagcagtttatggaagaaacagagagatcacttcacgacgcgatcatgatagtgagaagggctattaagaacgatagcgtcgtggccggtgggggcgcaattgagatggaattgtcaaaatatctcagggattactcccgcaccatacctgggaagcagcagctgctgatcggcgcctacgccaaggctctcgagatcataccgagacaactctgcgataacgctgggttcgacgctaccaacattctcaataaactgagggcacgccacgcccagggcggtacatggtatggcgttgatattaacaacgaggatattgccgacaactttgaggcgtttgtttgggaaccagccatggtccggataaatgccctcacagcagcatcagaggctgcttgcctgattgtatcagtcgatgagactataaaaaaccccaggtctacagtggatgctcccactgcagccggtcgggggcgaggccgcgggcggcctcactag

SEQ ID NO: 23630 - DNA, 1020 bp, Artificial Sequence
  derived and/or modified sequence
atgatggattcccagcttgtggccggtgtggcatttaaaaagacgttcagctatgcaggatttgagatgcagcctaaaaaataccataacccaaagatcgccctcctgaacgtcgagctggaactgaaggcagagaaggacaatgccgaaatccgagtgcacactgtggaggactaccaggcaattgtggatgccgaatggaacattctctacgacaagctggaaaaaatacatcactccggtgctaaagtggtcctgagtaaactaccgattggcgatgttgctacgcagtattttgccgaccgcgatatgttctgcgctggcagggtcccagaagaagacttaaaaaggacaatgatggcatgcggtggatccatccagactagcgtgaatgcactgagtgcagatgtgctgggccgttgccaggttttcgaggagactcaaatcggaggggagcggtacaacttctttaccggctgtccaaaagctaagacctgtacatttattctgcgcggtggtgccgagcaattcatggaagaaaccgaacgctccctacacgacgcaataatgattgttcgtcgcgcaatcaaaaatgactctgtggtggccggtggcggagccatcgaaatggaactgtccaaatacctgagggactatagtcgtaccattcccggtaagcaacagctgctaatcggtgcttatgcaaaggcccttgaaattatacctcgccagctgtgtgataacgctggctttgacgcaacaaacatcctgaacaagctacgcgcaaggcacgcccagggcggaacatggtacggcgtggatattaacaacgaagacatagccgataactttgaggccttcgtgtgggaacccgctatggtgaggatcaatgctctcactgccgcttcagaagcggcatgcttgatcgtgtccgtcgacgaaactatcaagaatccccgatctacagttgatgctcctactgctgctggaaggggccgaggcaggggcaggccccactag

SEQ ID NO: 23631 - protein, 1255 aa, Artificial Sequence
  derived and/or modified sequence
MLDPSSSEEESDEGLEEESRDVLVAAGSSQRAPPAPTREGRRDAPGRAGGGGAARSVSPSPSVLSEGRDEPQRQLDDEQERRIRLQLYVFVVRCIAYPFNAKQPTDMARRQQKLNKQQLQLLKERFQAFLNGETQIVADEAFCNAVRSYYEVFLKSDRVARMVQSGGCSANDFREVFKKNIEKRVRSLPEIDGLSKETVLSSWIAKYDAIYRGEEDLCKQPNRMALSAVSELILSKEQLYEMFQQILGIKKLEHQLLYNACQLDNADEQAAQIRRELDGRLQLADKMAKERKFPKFIAKDMENMYIEELRSSVNLLMANLESLPVSKGGPEFKLQKLKRSQNSAFLDIGDENEIQLSKSDVVLSFTLEIVIMEVQGLKSVAPNRIVYCTMEVEGEKLQTDQAEASRPQWGTQGDFTTTHPRPVVKVKLFTESTGVLALEDKELGRVILYPTSNSSKSAELHRMVVPKNSQDSDLKIKLAVRMDKPAHMKHSGYLYALGQKVWKRWKKRYFVLVQVSQYTFAMCSYREKKSEPQELMQLEGYTVDYTDPHPGLQGGCMFFNAVKEGDTVIFASDDEQDRILWVQAMYRATGQSYKPVPAIQTQKLNPKGGTLHADAQLYADRFQKHGMDEFISANPCKLDHAFLFRILQRQTLDHRLNDSYSCLGWFSPGQVFVLDEYCARYGVRGCHRHLCYLAELMEHSENGAVIDPTLLHYSFAFCASHVHGNRPDGIGTVSVEEKERFEEIKERLSSLLENQISHFRYCFPFGRPEGALKATLSLLERVLMKDIATPIPAEEVKKVVRKCLEKAALINYTRLTEYAKIEETMNQASPARKLEEILHLAELCIEVLQQNEEHHAEAFAWWPDLLAEHAEKFWALFTVDMDTALEAQPQDSWDSFPLFQLLNNFLRNDTLLCNGKFHKHLQEIFVPLVVRYVDLMESSIAQSIHRGFEQETWQPVNNGSATSEDLFWKLDALQMFVFDLHWPEQEFAHHLEQRLKLMASDMLEACVKRTRTAFELKLQKASKTTDLRIPASVCTMFNVLVDAKKQSTKLCALDGGQEVCRIFQQYHSKIDDLIDNSVKEIISLLVSKFVSVLEGVLSKLSRYDEGTFFSSILSFTVKAAAKYVDVPKPGMDLADTYIMFVRQNQDILREKVNEEMYIEKLFDQWYSSSMKVICVWLTDRLDLQLHIYQLKTLIKIVKKTYRDFRLQGVLEGTLNSKTYDTVHRRLTVEEATASVSEGGGLQGITMKDSDEEEEG

SEQ ID NO: 23632 - protein, 1255 aa, Artificial Sequence
  derived and/or modified sequence
MLDPSSSEEESDEGLEEESRDVLVAAGSSQRAPPAPTREGRRDAPGRAGGGGAARSVSPSPSVLSEGRDEPQRQLDDEQERRIRLQLYVFVVRCIAYPFNAKQPTDMARRQQKLNKQQLQLLKERFQAFLNGETQIVADEAFCNAVRSYYEVFLKSDRVARMVQSGGCSANDFREVFKKNIEKRVRSLPEIDGLSKETVLSSWIAKYDAIYRGEEDLCKQPNRMALSAVSELILSKEQLYEMFQQILGIKKLEHQLLYNACQLDNADEQAAQIRRELDGRLQLADKMAKERKFPKFIAKDMENMYIEELRSSVNLLMANLESLPVSKGGPEFKLQKLKRSQNSAFLDIGDENEIQLSKSDVVLSFTLEIVIMEVQGLKSVAPNRIVYCTMEVEGEKLQTDQAEASRPQWGTQGDFTTTHPRPVVKVKLFTESTGVLALEDKELGRVILYPTSNSSKSAELHRMVVPKNSQDSDLKIKLAVRMDKPAHMKHSGYLYALGQKVWKRWKKRYFVLVQVSQYTFAMCSYREKKSEPQELMQLEGYTVDYTDPHPGLQGGCMFFNAVKEGDTVIFASDDEQDRILWVQAMYRATGQSYKPVPAIQTQKLNPKGGTLHADAQLYADRFQKHGMDEFISANPCKLDHAFLFRILQRQTLDHRLNDSYSCLGWFSPGQVFVLDEYCARYGVRGCHRHLCYLAELMEHSENGAVIDPTLLHYSFAFCASHVHGNRPDGIGTVSVEEKERFEEIKERLSSLLENQISHFRYCFPFGRPEGALKATLSLLERVLMKDIATPIPAEEVKKVVRKCLEKAALINYTRLTEYAKIEETMNQASPARKLEEILHLAELCIEVLQQNEEHHAEAFAWWPDLLAEHAEKFWALFTVDMDTALEAQPQDSWDSFPLFQLLNNFLRNDTLLCNGKFHKHLQEIFVPLVVRYVDLMESSIAQSIHRGFEQETWQPVNNGSATSEDLFWKLDALQMFVFDLHWPEQEFAHHLEQRLKLMASDMLEACVKRTRTAFELKLQKASKTTDLRIPASVCTMFNVLVDAKKQSTKLCALDGGQEFGSQWQQYHSKIDDLIDNSVKEIISLLVSKFVSVLEGVLSKLSRYDEGTFFSSILSFTVKAAAKYVDVPKPGMDLADTYIMFVRQNQDILREKVNEEMYIEKLFDQWYSSSMKVICVWLTDRLDLQLHIYQLKTLIKIVKKTYRDFRLQGVLEGTLNSKTYDTVHRRLTVEEATASVSEGGGLQGITMKDSDEEEEG

SEQ ID NO: 23633 - protein, 1222 aa, Artificial Sequence
  derived and/or modified sequence
MLDPSSSEEESDEGLEEESRDVLVAAGSSQRAPPAPTREGQLDDEQERRIRLQLYVFVVRCIAYPFNAKQPTDMARRQQKLNKQQLQLLKERFQAFLNGETQIVADEAFCNAVRSYYEVFLKSDRVARMVQSGGCSANDFREVFKKNIEKRVRSLPEIDGLSKETVLSSWIAKYDAIYRGEEDLCKQPNRMALSAVSELILSKEQLYEMFQQILGIKKLEHQLLYNACQLDNADEQAAQIRRELDGRLQLADKMAKERKFPKFIAKDMENMYIEELRSSVNLLMANLESLPVSKGGPEFKLQKLKRSQNSAFLDIGDENEIQLSKSDVVLSFTLEIVIMEVQGLKSVAPNRIVYCTMEVEGEKLQTDQAEASRPQWGTQGDFTTTHPRPVVKVKLFTESTGVLALEDKELGRVILYPTSNSSKSAELHRMVVPKNSQDSDLKIKLAVRMDKPAHMKHSGYLYALGQKVWKRWKKRYFVLVQVSQYTFAMCSYREKKSEPQELMQLEGYTVDYTDPHPGLQGGCMFFNAVKEGDTVIFASDDEQDRILWVQAMYRATGQSYKPVPAIQTQKLNPKGGTLHADAQLYADRFQKHGMDEFISANPCKLDHAFLFRILQRQTLDHRLNDSYSCLGWFSPGQVFVLDEYCARYGVRGCHRHLCYLAELMEHSENGAVIDPTLLHYSFAFCASHVHGNRPDGIGTVSVEEKERFEEIKERLSSLLENQISHFRYCFPFGRPEGALKATLSLLERVLMKDIATPIPAEEVKKVVRKCLEKAALINYTRLTEYAKIEETMNQASPARKLEEILHLAELCIEVLQQNEEHHAEAFAWWPDLLAEHAEKFWALFTVDMDTALEAQPQDSWDSFPLFQLLNNFLRNDTLLCNGKFHKHLQEIFVPLVVRYVDLMESSIAQSIHRGFEQETWQPVNNGSATSEDLFWKLDALQMFVFDLHWPEQEFAHHLEQRLKLMASDMLEACVKRTRTAFELKLQKASKTTDLRIPASVCTMFNVLVDAKKQSTKLCALDGGQEFGSQWQQYHSKIDDLIDNSVKEIISLLVSKFVSVLEGVLSKLSRYDEGTFFSSILSFTVKAAAKYVDVPKPGMDLADTYIMFVRQNQDILREKVNEEMYIEKLFDQWYSSSMKVICVWLTDRLDLQLHIYQLKTLIKIVKKTYRDFRLQGVLEGTLNSKTYDTVHRRLTVEEATASVSEGGGLQGITMKDSDEEEEG

SEQ ID NO: 23634 - DNA, 3768 bp, Artificial Sequence
  derived and/or modified sequence
atgctcgatccctcttctagcgaggaagagagcgatgaaggcttggaggaggaatctagagacgtgctggtggccgcaggcagctctcagagggctcccccagccccgacacgggaagggcgaagggatgccccagggcgtgccggcggtgggggagctgcgagaagcgtaagtccctctccgtcagtgctctctgagggcagagacgagcctcagagacaactggacgacgaacaggagcgccgaatcagactgcaactgtacgtctttgtggtccgctgcatcgcctacccatttaacgctaaacagcctacagacatggcgcggcgtcagcagaagctgaacaaacaacaactgcagctgctgaaggaacggtttcaggctttccttaatggggagacgcagatcgtcgccgatgaggcgttctgcaatgccgtgaggtcctactatgaggtttttctgaaatctgatcgggtggcgcgaatggtgcagtcagggggatgttctgctaatgattttcgggaagtgttcaaaaagaatattgagaagcgggttcgcagtctccccgagatcgacgggcttagcaaagagaccgtattaagctcctggatagccaagtacgacgcgatttaccgaggtgaggaagacctctgtaaacaaccaaaccgaatggctctgagcgcggtatccgaacttattcttagtaaggaacaactctacgaaatgttccagcagatcctcggcatcaagaagctggagcatcaacttctgtacaatgcctgccagctggacaacgcagatgaacaggcagcccaaattcgacgcgagttagatggacgcctgcagttggcagacaagatggcaaaggaacgaaagtttcctaaattcatagctaaagatatggaaaacatgtacatcgaagaacttcgatccagcgtaaatctgcttatggcaaatctcgagtcactgcctgtgagcaagggcggccccgaattcaaactccaaaaacttaaacgcagccagaactccgcttttctggacataggggacgagaatgagatacagctctctaaaagcgatgtggttctctccttcacactggagatcgttataatggaggtccagggcttaaagtctgtggctccaaatcgtatcgtctattgtactatggaggtggaaggtgagaaattgcagacagatcaggctgaggcttccaggccccagtggggtacccaaggggatttcacaacaacgcatcctcgaccagtcgtcaaagttaagctctttactgaatccactggtgtcctggcccttgaagacaaggagctgggacgtgtgattctttacccaaccagtaactccagcaaaagtgctgaactacacagaatggtggtccccaagaacagtcaagactccgatttgaaaattaaacttgcggtgcgcatggacaaaccagcccacatgaaacattctggatatctctacgccttaggtcagaaagtgtggaaaagatggaagaaacggtattttgtcctggtgcaggtgtctcagtacacctttgccatgtgcagttacagggagaaaaagtcagagccacaggaactcatgcagctagaaggctatacagtggattacacagatcctcatccaggccttcagggtggatgtatgttttttaacgctgtgaaggagggagatactgtgattttcgcctcagacgacgagcaagaccggatcctatgggtccaggccatgtacagagctacggggcagagctacaagccagtcccagcaattcagacccagaagttaaaccccaagggcggtactctacacgcagatgcacaactctatgccgataggttccagaaacacggtatggacgagttcatatctgctaatccctgtaagctcgatcatgcatttctgtttcggatcttgcaaaggcagactctggaccatagactgaatgatagctactcgtgtttgggctggttcagcccaggacaggtctttgtgcttgacgagtattgtgcccgctatggggtccgggggtgtcatcggcatttgtgctaccttgctgagttaatggaacattcagagaacggagcagtgattgacccaactctgctgcattacagcttcgccttctgtgcatcccatgtgcacggaaatagacccgacggcatcggcactgtgtccgtggaagaaaaggagcgctttgaggagattaaagaacggctgtccagccttctcgagaatcagatttctcacttccggtactgcttcccttttgggcggcccgagggcgccctgaaggcgactctctctctgctcgaacgagtgctcatgaaggacatcgccacccctattcccgctgaggaggttaaaaaagtcgttcggaagtgtctggaaaaggcggcccttatcaactatacaagattgactgagtatgctaagatagaggagactatgaaccaagcgagcccagcgagaaagttagaggaaattttgcacctcgccgaattatgcattgaagtgctccaacaaaatgaggaacaccatgctgaggcttttgcttggtggcctgacctgctcgcagagcatgcagagaaattctgggctctcttcacagtcgacatggatacagctctggaagcccagcctcaggactcatgggacagttttccacttttccaactactaaacaacttcttgcgcaacgataccctcctttgcaacgggaagtttcataaacacctgcaggagatcttcgtccctttggtagtgagatatgttgacttaatggaatcttccatcgctcagagcatccacagagggtttgaacaagaaacctggcagcctgtgaacaatggctctgcaacctctgaggatctgttttggaaactagacgcccttcagatgttcgtgttcgatctacattggccagagcaggaattcgcacaccatctggaacagcgtctgaagcttatggctagcgatatgcttgaagcatgcgttaagagaacccggactgcctttgaattaaagttacagaaggccagcaagacgactgacctccgtataccagcttctgtgtgcactatgttcaacgttctcgtggatgctaaaaagcagagcaccaagttgtgcgccctggatggtggacaggaagtgtgcagaatttttcagcagtaccactccaaaatagatgaccttattgacaacagtgtgaaggaaattatttcacttttagtgagcaaatttgtgtctgtgttggaaggcgtgctgagtaagctgtctcggtacgacgagggcacgtttttttccagcatcctgagtttcactgtgaaggcagccgcaaagtacgtggatgtgccaaagccaggcatggacctggctgacacatacatcatgtttgtccgccagaaccaagacatcctccgggaaaaggtgaacgaggagatgtatattgaaaaactgttcgaccagtggtactcatcttctatgaaagtgatttgcgtttggttaactgatcgcttagacttacagctacatatctaccagcttaagacactcatcaaaattgtaaagaaaacgtaccgtgattttcggctgcagggagtgctcgaaggcaccttgaactccaagacatacgacaccgtccaccgacgcctcacagtagaggaagcgactgccagcgtgtccgagggcggaggactccagggcattactatgaaggatagcgacgaagaagaggaaggttag

SEQ ID NO: 23635 - DNA, 3768 bp, Artificial Sequence
  derived and/or modified sequence
atgctggacccgagctcatctgaagaggaatcagatgaaggtcttgaggaggagtcaagggacgtcctcgtcgctgcaggatcgagtcaacgcgcgcctcccgcacccacgcgggagggtagaagagatgcacccggccgtgccggtggtggaggggcagcccgctcagtcagccccagcccatcagtcctgtctgaggggcgcgatgaaccacagcggcagctcgatgacgagcaggagagacgtattcgcttgcagctctacgtgttcgtggtgaggtgcatcgcctacccattcaacgctaaacagccaacagatatggctcgtagacagcagaagctgaacaaacagcagctgcagctgctaaaagagcgcttccaggccttcctgaatggggaaacccagattgttgccgacgaagctttctgcaacgctgtgcgcagttactacgaagtttttcttaagtcagatagagtggcccgcatggttcagagtggcgggtgttccgctaacgacttcagggaagtcttcaagaagaatatcgagaagagggtccggtcccttcctgagatagacggactgagcaaggagacagtgctgagctcttggatcgcgaaatatgacgcgatctatcggggagaggaggatttatgtaaacagcctaaccgaatggctctgtcggccgtcagtgagcttatactttccaaggagcagttgtacgagatgtttcagcagattctcggcatcaaaaagctggagcatcagctcctttacaacgcctgccagctggacaatgcggacgaacaagccgcccagatccggcgggagctcgatggaaggctgcagcttgcagacaaaatggcaaaagaaaggaagttccccaagttcatcgctaaagatatggaaaacatgtacatcgaagagctgcgatcaagcgtgaatctactgatggctaatctggaaagtctccctgtgtctaaaggcgggccggaattcaaactccagaaactcaaacggtcacagaacagcgcctttctggacataggggacgagaacgagattcagcttagcaaaagcgatgtcgtgctgagctttacattggagattgtgataatggaggtgcaggggctaaagagcgtggctccaaataggatagtttattgcacaatggaagtggaaggcgaaaagctccagacagatcaggctgaggccagtaggccgcaatggggaacgcaaggagattttaccaccacacaccccagacccgtggtgaaggtgaaactcttcaccgaatcaacgggggttcttgctctggaggacaaagagctagggcgcgtgatcttgtacccgacatctaactcctcaaaaagtgctgagctacacagaatggtcgtccccaagaacagccaggacagtgacctgaaaataaaactcgccgttcggatggacaagcccgcgcacatgaaacacagcggttacttatacgccctggggcagaaggtgtggaaacgttggaaaaaacgatattttgtgttagttcaggttagtcagtatacctttgctatgtgcagctatagagaaaagaaatctgagcctcaggaattaatgcaattggagggctatacagtcgattacacagatccccaccctggtctgcaaggcgggtgtatgttcttcaacgccgttaaagaaggagataccgtgatcttcgcatctgatgacgagcaagatcggatcctgtgggttcaggctatgtaccgggccaccggccagagttacaaaccagtgccagccatccagacacagaagttgaaccctaaggggggcacccttcatgctgacgctcagctctacgccgatcggttccaaaaacacggaatggacgagttcatttccgctaatccctgtaaacttgatcatgccttcctttttcgaatcctgcaaaggcagactctggaccaccgtctcaacgatagttactcatgtcttggctggttctctccgggccaggtgtttgtccttgacgaatactgcgccaggtatggcgttagaggttgtcataggcatctgtgttatttggctgagctgatggaacacagtgagaacggggctgtcatcgacccaaccctcctgcactattcttttgccttctgcgcctcccatgtgcatggtaatcggcctgacggtattggcacagtctccgtagaggaaaaagagagattcgaggagataaaggaaaggttgtccagcctgctggagaatcagatttcccatttccggtattgctttccttttggtagacccgagggcgcactcaaagccaccttgtccctgctcgaaagagtcttaatgaaggatattgctacgccaattcctgccgaggaggtgaaaaaggtggtcaggaagtgcctggagaaggccgctttgatcaactatacccggctaaccgagtacgccaaaattgaggagacgatgaaccaggccagtcccgcaaggaagctcgaggaaattctgcatctggccgagctgtgcattgaagtgctccagcagaacgaagaacatcacgctgaggccttcgcttggtggccagatctgctagccgagcacgcagagaagttttgggctctgttcaccgttgacatggataccgcactcgaagcacagccccaggatagctgggatagcttccctcttttccaactgcttaacaatttcctccgcaacgacactttgctctgtaatggaaaattccacaaacatttgcaagaaatcttcgtccctctggtagtgaggtacgtcgacctgatggaaagttccattgctcagtcaatccatcgaggatttgagcaggagacctggcagcctgtaaacaatggctcagccacctcggaagacctgttctggaagttagatgccctgcagatgtttgtatttgatctgcactggcctgaacaggaatttgcccaccacctggaacagcgcctgaagcttatggccagtgacatgctggaggcatgcgtgaagagaacacgcaccgcattcgaattgaaactacaaaaggcctcaaaaacaacagaccttaggattccagcaagtgtgtgtacaatgttcaacgtgcttgttgacgcaaaaaagcagtccaccaagctctgtgccttggacggcggccaggaattcggatctcagtggcaacagtatcacagcaagatcgacgacctaatagataacagtgtgaaggagatcatctctctcctggtgtccaagttcgtgtctgtattggaaggggtcctgagcaaacttagtcgctatgacgagggaacattcttttcctcaatcctctccttcaccgtgaaagctgccgcgaaatatgttgacgttccaaaaccagggatggacctggctgatacatatattatgttcgtcaggcagaatcaggatatcttgagagagaaagtcaatgaggagatgtacattgaaaaactttttgaccagtggtactcctcttccatgaaggtcatttgcgtgtggcttaccgatagacttgatctacagcttcatatttatcagcttaagacactgattaaaatcgtcaagaagacttacagggattttaggttacagggtgtgctggaagggacactcaactcaaaaacatacgatacggtccatcgacggcttaccgtggaggaggccacagcttccgtgagtgagggtggtggcctccagggcattacaatgaaagactcagacgaagaagaggagggctag

SEQ ID NO: 23636 - DNA, 3669 bp, Artificial Sequence
  derived and/or modified sequence
atgctggatccaagctccagtgaagaagagtcagacgagggtcttgaggaggagtctcgtgatgttttggtggcagcgggctcatcccagcgggctccccccgccccgactagagagggccaactggacgatgagcaggaacggagaattaggttgcagctgtatgtctttgtggtacgctgcattgcgtaccccttcaatgcaaaacagccaacagatatggcacgaagacagcagaaacttaacaagcaacagctacagttgctgaaggagcgcttccaggcttttttaaatggggaaacccagatcgtggctgacgaggccttttgcaacgctgtccgctcatactacgaggttttcttgaagtccgatagggtagcgcggatggtgcaaagcgggggctgcagcgccaatgacttccgggaggtgtttaagaaaaacattgagaagcgggtgcgcagtctgccagaaatagatggactttcgaaggagacagttctgtcaagctggatcgcaaagtacgatgccatttatagaggcgaagaagacttgtgtaaacagcctaataggatggctctctcagctgtgtccgaactgatcctgtccaaggagcagctgtacgagatgtttcagcaaattttgggaataaagaaactcgaacatcaactgctttacaacgcttgtcagctagataatgcagacgaacaggccgcccagattaggcgcgagctagacggtaggctgcaactcgccgacaagatggcaaaggagcggaaattccccaaatttattgccaaggatatggaaaatatgtatattgaggagctccgctcctcagtgaatctgctgatggccaaccttgagtcactgccggtctctaagggcggcccggaattcaaattgcagaagctcaagagatcacaaaactcagcatttcttgacattggggatgagaatgagatccagctgtctaaatctgatgtcgtgttgtccttcacactggaaatagtgataatggaagtccaggggttaaaatctgtagcccctaataggatagtctactgtactatggaggtggagggggagaaactgcagacagatcaagccgaagcctcacgtcctcagtggggtacacagggcgactttaccacaacccatccaaggcccgtcgtaaaggtcaagttgttcaccgaaagtacgggggtactagcgttggaagacaaggagcttgggcgggtgatcctatatcctacctctaatagcagcaaaagtgccgagctgcaccggatggtggtgcccaaaaattcccaagactcagatttgaaaatcaaactcgcggtaagaatggataaacctgcgcatatgaagcactctggctacttgtatgcattaggacagaaggtttggaagcgttggaagaagaggtattttgtcctcgtccaggttagtcagtacacctttgcaatgtgctcatacagagagaagaaaagtgagcctcaggagttgatgcagctggagggttatactgtcgattacacagatccccaccccggtctccagggcggctgtatgttctttaacgccgttaaggagggggacaccgtgatctttgccagcgacgacgaacaggaccggatcctatgggttcaggcgatgtacagggccaccggccagagctacaaacctgtgcctgcaatccaaacacagaaactgaatccaaaaggtggaaccctgcacgcagatgcacaattgtatgctgacaggttccaaaagcatggcatggacgaattcatttctgccaatccctgcaaactggatcatgcctttctattcagaattttgcagagacaaactctagaccatagacttaacgactcatactcatgcctcggctggttttcccctggccaagttttcgttctggacgagtactgtgcccgctatggggtacggggatgccaccggcacctctgctacctcgccgagttgatggagcacagcgaaaacggagccgttatcgatcctacactattacattacagcttcgccttttgtgcaagccacgtccacggaaaccgccctgacggcatcggcaccgtgtccgtggaggaaaaagagcgctttgaggaaatcaaagaacggctctccagtctgctcgaaaaccagatcagtcatttcaggtactgctttccctttggtaggcccgagggagctctcaaggcgacactgtcgctgctggagcgagttctgatgaaggatattgccacgccaatacccgctgaggaggtaaaaaaagtggtgagaaagtgtctggagaaggccgcactgatcaactacaccagactcacagagtatgccaaaatcgaggaaactatgaaccaggcaagtccagcaaggaaacttgaggagattctccacttggcagaactgtgcattgaggttctacaacagaatgaagagcaccacgccgaggcctttgcatggtggccagacctcctggcggagcatgcggaaaaattctgggctctgtttactgtggacatggacaccgctctggaagcacagccccaggactcatgggactcctttccactgttccaactgttaaacaatttcctgaggaacgacaccctcttgtgcaatggaaaatttcataagcacctccaagaaatctttgtgccattggtcgtgcgctatgtagacttaatggaaagctcgattgcacaatccatccatagaggcttcgagcaggaaacgtggcagcctgtcaataatggatctgccacgtccgaagacctcttctggaagttggacgcactgcagatgttcgttttcgaccttcactggcctgagcaggaatttgctcatcacttagaacagaggctcaagctaatggcatccgacatgctggaggcatgcgtgaaaagaactagaacagcctttgaactgaagctccagaaagctagcaaaacaactgatttgcgcattcctgcatccgtgtgcacaatgttcaatgtgctcgtcgacgccaagaaacaatcaactaagctgtgtgctcttgatggaggccaagagttcggctctcaatggcagcagtatcattcgaaaatcgacgacctgattgataattctgtgaaggagataatttcactgctggtgtcaaaattcgtgtccgtgctcgagggcgtactgtctaaactgagtaggtatgacgagggtacgtttttctcatctatcctctctttcactgtgaaggctgccgctaagtatgtagacgtccctaagcctggaatggacttggcagacacctacatcatgtttgtgcggcaaaaccaggacattctccgtgagaaagtaaacgaggaaatgtacatcgagaagctgttcgatcagtggtactcatcatccatgaaggttatctgtgtgtggctcacagatagactggatctccaactccacatttaccagctgaaaacactgataaaaatagtcaagaagacctatcgggactttcgcctacagggagtgctggagggtacattaaattccaaaacatatgataccgtgcatcgacggctcacggttgaggaggccaccgccagcgtgtcagagggcggtggcctgcagggcattaccatgaaggattcagatgaggaggaggaagggtag

SEQ ID NO: 23637 - DNA, 3768 bp, Artificial Sequence
  derived and/or modified sequence
atgctggaccccagcagcagcgaggaggagagtgatgagggcctggaggaggagagcagagatgtgctggtggccgccggcagcagccagagggcccccccagcccccacccgggagggcagaagagatgcccctggccgggccggcggcggcggggccgcccggtctgtgagccccagccccagcgtgctgtctgagggcagagatgagccccagaggcagctggatgatgagcaggagcggcgcatccggctgcagctgtatgtgtttgtggtgcgctgcatcgcctaccccttcaatgccaagcagcccacagacatggcccggcggcagcagaagctgaacaagcagcagctgcagctgctgaaggagcgcttccaggccttcctgaatggagagacccagatcgtggctgatgaggccttctgcaatgctgtgcgcagctactatgaggtgttcctgaagagtgacagagtggccaggatggtgcagagcggcggctgcagcgccaatgacttccgggaggtgttcaagaagaacatcgagaagagggtgcgcagcctgcctgagattgatggcctgagcaaggagaccgtgctgagctcctggatcgccaagtatgatgccatctacagaggagaggaggacctgtgcaagcagcccaacaggatggccctgtctgctgtgtctgagctgatcctgagcaaggagcagctgtatgagatgttccagcagatcctgggcatcaagaagctggagcaccagctgctgtacaatgcctgccagctggacaatgctgatgagcaggccgcccagatccggcgggagctggatggccgcctgcagctggccgacaagatggccaaggagaggaagttccccaagttcatcgccaaggacatggagaacatgtacatcgaggagctgcggagctctgtgaacctgctgatggccaacctggagagcctgcctgtgtccaaaggaggccctgagttcaagctgcagaagctgaagaggagccagaacagcgccttcctggacattggagatgaaaatgagatccagctgagcaagagtgatgtggtgctgtccttcaccctggagatcgtcatcatggaggtgcagggcctgaagtctgtggcccccaacagaattgtgtactgcaccatggaggtggagggggagaagctgcagacagaccaggccgaggccagccggccccagtggggcacccagggcgacttcaccaccacccaccccaggcctgtggtgaaggtgaagctgttcacagagagcactggagtgctggccctggaggacaaggagctgggccgggtcatcctgtaccccaccagcaacagcagcaagtctgctgagctgcacaggatggtggtgcccaagaacagccaggacagcgacctgaagatcaagctggccgtgaggatggacaagccagcccacatgaagcacagcggctacctgtatgccctgggccagaaggtgtggaagcgctggaagaagcgctactttgtgctggtgcaggtgtcccagtacacctttgccatgtgcagctaccgggagaagaagtctgagccccaggagctgatgcagctggagggctacacagtggactacacagacccccaccctggcctgcagggcggctgcatgttcttcaatgctgtgaaggagggggacaccgtcatctttgccagtgatgatgagcaggaccgcatcctgtgggtgcaggccatgtaccgggccaccggccagagctacaagcctgtgcctgccatccagacccagaagctgaaccccaagggcggcaccctgcatgctgatgcccagctgtatgctgaccgcttccagaagcacggcatggatgagttcatcagcgccaacccctgcaagctggaccacgccttcctgttccgcatcctgcagaggcagaccctggaccaccggctgaatgacagctacagctgcctgggctggttcagccctggccaggtgtttgtgctggatgagtactgtgcccgctatggagtgcggggctgccaccgccacctgtgctacctggccgagctgatggagcacagtgaaaatggagctgtgattgaccccaccctgctgcactacagctttgccttctgtgccagccacgtgcacggcaacagaccagatggcatcggcaccgtgtctgtggaggagaaggagagatttgaggagatcaaggagcggctgagcagcctgctggagaaccagatcagccacttccgctactgcttccccttcggccggcctgagggcgccctgaaggccaccctgagcctgctggagcgggtgctgatgaaggacatcgccacccccatcccagctgaggaggtgaagaaggtggtgaggaagtgcctggagaaggccgccctgatcaactacacccggctgacagaatatgccaagattgaggagaccatgaaccaggccagccctgccaggaagctggaggagatcctgcacctggccgagctgtgcatcgaggtgctgcagcagaatgaggagcaccacgccgaggcctttgcctggtggccagacctgctggccgagcacgccgagaagttctgggccctcttcaccgtggacatggacacagccctggaggcccagccccaggacagctgggacagcttccccctcttccagctgctgaacaacttcctgagaaatgacaccctgctgtgcaatggcaagttccacaagcacctgcaggagatctttgtgcccctggtggtgcgctacgtggacctgatggagagcagcatcgcccagagcatccaccggggctttgagcaggagacctggcagcctgtgaacaacggcagcgccaccagcgaggacctcttctggaagctggatgccctgcagatgtttgtgtttgacctgcactggccagagcaggagtttgcccaccacctggagcagaggctgaagctgatggccagtgacatgctggaggcctgtgtgaagaggaccaggacagcctttgagctgaagctgcagaaggccagcaagaccacagacctgcgcatcccagcctctgtgtgcaccatgttcaacgtgctggtggatgccaagaagcagagcaccaagctgtgtgccctggatggcggccaggaggtgtgccgcatcttccagcagtaccacagcaagattgatgacctgattgacaacagcgtgaaggagatcatcagcctgctggtgtccaagtttgtgtctgtgctggagggcgtgctgagcaagctgagccgctatgatgagggcaccttcttcagcagcatcctgtccttcaccgtgaaggccgccgccaagtatgtggatgtgcccaagccaggcatggacctggccgacacctacatcatgtttgtgcggcagaaccaggacatcctgcgggagaaggtgaatgaggagatgtacatcgagaagctgtttgaccagtggtacagcagctccatgaaggtgatctgtgtgtggctgacagaccggctggacctgcagctgcacatctaccagctgaagaccctcatcaagatcgtgaagaagacctacagagacttccggctgcagggcgtgctggagggcaccctgaacagcaagacctatgacacagtgcaccggcggctgactgtggaggaggccacagcctctgtgtctgagggcggcggcctgcagggcatcaccatgaaggacagtgatgaggaggaggagggctag

SEQ ID NO: 23638 - DNA, 3768 bp, Artificial Sequence
  derived and/or modified sequence
atgctggaccccagcagcagcgaggaggagagtgatgagggcctggaggaggagagcagagatgtgctggtggccgccggcagcagccagagggcccccccagcccccacccgggagggcagaagagatgcccctggccgggccggcggcggcggggccgcccggtctgtgagccccagccccagcgtgctgtctgagggcagagatgagccccagaggcagctggatgatgagcaggagcggcgcatccggctgcagctgtatgtgtttgtggtgcgctgcatcgcctaccccttcaatgccaagcagcccacagacatggcccggcggcagcagaagctgaacaagcagcagctgcagctgctgaaggagcgcttccaggccttcctgaatggagagacccagatcgtggctgatgaggccttctgcaatgctgtgcgcagctactatgaggtgttcctgaagagtgacagagtggccaggatggtgcagagcggcggctgcagcgccaatgacttccgggaggtgttcaagaagaacatcgagaagagggtgcgcagcctgcctgagattgatggcctgagcaaggagaccgtgctgagctcctggatcgccaagtatgatgccatctacagaggagaggaggacctgtgcaagcagcccaacaggatggccctgtctgctgtgtctgagctgatcctgagcaaggagcagctgtatgagatgttccagcagatcctgggcatcaagaagctggagcaccagctgctgtacaatgcctgccagctggacaatgctgatgagcaggccgcccagatccggcgggagctggatggccgcctgcagctggccgacaagatggccaaggagaggaagttccccaagttcatcgccaaggacatggagaacatgtacatcgaggagctgcggagctctgtgaacctgctgatggccaacctggagagcctgcctgtgtccaaaggaggccctgagttcaagctgcagaagctgaagaggagccagaacagcgccttcctggacattggagatgaaaatgagatccagctgagcaagagtgatgtggtgctgtccttcaccctggagatcgtcatcatggaggtgcagggcctgaagtctgtggcccccaacagaattgtgtactgcaccatggaggtggagggggagaagctgcagacagaccaggccgaggccagccggccccagtggggcacccagggcgacttcaccaccacccaccccaggcctgtggtgaaggtgaagctgttcacagagagcactggagtgctggccctggaggacaaggagctgggccgggtcatcctgtaccccaccagcaacagcagcaagtctgctgagctgcacaggatggtggtgcccaagaacagccaggacagcgacctgaagatcaagctggccgtgaggatggacaagccagcccacatgaagcacagcggctacctgtatgccctgggccagaaggtgtggaagcgctggaagaagcgctactttgtgctggtgcaggtgtcccagtacacctttgccatgtgcagctaccgggagaagaagtctgagccccaggagctgatgcagctggagggctacacagtggactacacagacccccaccctggcctgcagggcggctgcatgttcttcaatgctgtgaaggagggggacaccgtcatctttgccagtgatgatgagcaggaccgcatcctgtgggtgcaggccatgtaccgggccaccggccagagctacaagcctgtgcctgccatccagacccagaagctgaaccccaagggcggcaccctgcatgctgatgcccagctgtatgctgaccgcttccagaagcacggcatggatgagttcatcagcgccaacccctgcaagctggaccacgccttcctgttccgcatcctgcagaggcagaccctggaccaccggctgaatgacagctacagctgcctgggctggttcagccctggccaggtgtttgtgctggatgagtactgtgcccgctatggagtgcggggctgccaccgccacctgtgctacctggccgagctgatggagcacagtgaaaatggagctgtgattgaccccaccctgctgcactacagctttgccttctgtgccagccacgtgcacggcaacagaccagatggcatcggcaccgtgtctgtggaggagaaggagagatttgaggagatcaaggagcggctgagcagcctgctggagaaccagatcagccacttccgctactgcttccccttcggccggcctgagggcgccctgaaggccaccctgagcctgctggagcgggtgctgatgaaggacatcgccacccccatcccagctgaggaggtgaagaaggtggtgaggaagtgcctggagaaggccgccctgatcaactacacccggctgacagaatatgccaagattgaggagaccatgaaccaggccagccctgccaggaagctggaggagatcctgcacctggccgagctgtgcatcgaggtgctgcagcagaatgaggagcaccacgccgaggcctttgcctggtggccagacctgctggccgagcacgccgagaagttctgggccctcttcaccgtggacatggacacagccctggaggcccagccccaggacagctgggacagcttccccctcttccagctgctgaacaacttcctgagaaatgacaccctgctgtgcaatggcaagttccacaagcacctgcaggagatctttgtgcccctggtggtgcgctacgtggacctgatggagagcagcatcgcccagagcatccaccggggctttgagcaggagacctggcagcctgtgaacaacggcagcgccaccagcgaggacctcttctggaagctggatgccctgcagatgtttgtgtttgacctgcactggccagagcaggagtttgcccaccacctggagcagaggctgaagctgatggccagtgacatgctggaggcctgtgtgaagaggaccaggacagcctttgagctgaagctgcagaaggccagcaagaccacagacctgcgcatcccagcctctgtgtgcaccatgttcaacgtgctggtggatgccaagaagcagagcaccaagctgtgtgccctggatggcggccaggagtttggcagccagtggcagcagtaccacagcaagattgatgacctgattgacaacagcgtgaaggagatcatcagcctgctggtgtccaagtttgtgtctgtgctggagggcgtgctgagcaagctgagccgctatgatgagggcaccttcttcagcagcatcctgtccttcaccgtgaaggccgccgccaagtatgtggatgtgcccaagccaggcatggacctggccgacacctacatcatgtttgtgcggcagaaccaggacatcctgcgggagaaggtgaatgaggagatgtacatcgagaagctgtttgaccagtggtacagcagctccatgaaggtgatctgtgtgtggctgacagaccggctggacctgcagctgcacatctaccagctgaagaccctcatcaagatcgtgaagaagacctacagagacttccggctgcagggcgtgctggagggcaccctgaacagcaagacctatgacacagtgcaccggcggctgactgtggaggaggccacagcctctgtgtctgagggcggcggcctgcagggcatcaccatgaaggacagtgatgaggaggaggagggctag

SEQ ID NO: 23639 - DNA, 3669 bp, Artificial Sequence
  derived and/or modified sequence
atgctggaccccagcagcagcgaggaggagagtgatgagggcctggaggaggagagcagagatgtgctggtggccgccggcagcagccagagggcccccccagcccccacccgggagggccagctggatgatgagcaggagcggcgcatccggctgcagctgtatgtgtttgtggtgcgctgcatcgcctaccccttcaatgccaagcagcccacagacatggcccggcggcagcagaagctgaacaagcagcagctgcagctgctgaaggagcgcttccaggccttcctgaatggagagacccagatcgtggctgatgaggccttctgcaatgctgtgcgcagctactatgaggtgttcctgaagagtgacagagtggccaggatggtgcagagcggcggctgcagcgccaatgacttccgggaggtgttcaagaagaacatcgagaagagggtgcgcagcctgcctgagattgatggcctgagcaaggagaccgtgctgagctcctggatcgccaagtatgatgccatctacagaggagaggaggacctgtgcaagcagcccaacaggatggccctgtctgctgtgtctgagctgatcctgagcaaggagcagctgtatgagatgttccagcagatcctgggcatcaagaagctggagcaccagctgctgtacaatgcctgccagctggacaatgctgatgagcaggccgcccagatcagaagagagctggatggccgcctgcagctggccgacaagatggccaaggagaggaagttccccaagttcatcgccaaggacatggagaacatgtacatcgaggagctgcggagctctgtgaacctgctgatggccaacctggagagcctgcctgtgtccaagggcggccctgagttcaagctgcagaagctgaagaggagccagaacagcgccttcctggacattggagatgaaaatgagatccagctgagcaagagtgatgtggtgctgtccttcaccctggagatcgtcatcatggaggtgcagggcctgaagtctgtggcccccaaccgcatcgtgtactgcaccatggaggtggagggggagaagctgcagacagaccaggccgaggccagccggccccagtggggcacccagggcgacttcaccaccacccaccccaggcctgtggtgaaggtgaagctgttcacagagagcactggagtgctggccctggaggacaaggagctgggccgggtcatcctgtaccccaccagcaacagcagcaagtctgctgagctgcacaggatggtggtgcccaagaacagccaggacagcgacctgaagatcaagctggccgtgaggatggacaagccagcccacatgaagcacagcggctacctgtatgccctgggccagaaggtgtggaagcgctggaagaagcgctactttgtgctggtgcaggtgtcccagtacacctttgccatgtgcagctaccgggagaagaagtctgagccccaggagctgatgcagctggagggctacacagtggactacacagacccccaccctggcctgcagggcggctgcatgttcttcaatgctgtgaaggagggggacaccgtcatctttgccagtgatgatgagcaggaccgcatcctgtgggtgcaggccatgtaccgggccaccggccagagctacaagcctgtgcctgccatccagacccagaagctgaaccccaagggcggcaccctgcacgcagatgcccagctgtatgctgaccgcttccagaagcacggcatggatgagttcatcagcgccaacccctgcaagctggaccacgccttcctgttccgcatcctgcagaggcagaccctggaccaccggctgaatgacagctacagctgcctgggctggttcagccctggccaggtgtttgtgctggatgagtactgtgcccgctatggagtgcggggctgccaccgccacctgtgctacctggccgagctgatggagcacagtgaaaatggagctgtgattgaccccaccctgctgcactacagctttgccttctgtgccagccacgtgcacggcaacagaccagatggcattggaacagtgtctgtggaggagaaggagagatttgaggagatcaaggagcggctgagcagcctgctggagaaccagatcagccacttccgctactgcttccccttcggccggcctgagggcgccctgaaggccaccctgagcctgctggagcgggtgctgatgaaggacatcgccacccccatcccagctgaggaggtgaagaaggtggtgaggaagtgcctggagaaggccgccctgatcaactacacccggctgacagaatatgccaagattgaggagaccatgaaccaggccagccctgccaggaagctggaggagatcctgcacctggccgagctgtgcatcgaggtgctgcagcagaatgaggagcaccacgccgaggcctttgcctggtggccagacctgctggccgagcacgccgagaagttctgggccctcttcaccgtggacatggacacagccctggaggcccagccccaggacagctgggacagcttccccctcttccagctgctgaacaacttcctgagaaatgacaccctgctgtgcaatggcaagttccacaagcacctgcaggagatctttgtgcccctggtggtgcgctacgtggacctgatggagagcagcatcgcccagagcatccaccggggctttgagcaggagacctggcagcctgtgaacaatggaagtgccaccagtgaagatctcttctggaagctggatgccctgcagatgtttgtgtttgacctgcactggccagagcaggagtttgcccaccacctggagcagaggctgaagctgatggccagtgacatgctggaggcctgtgtgaagaggaccaggacagcctttgagctgaagctgcagaaggccagcaagaccacagacctgcgcatcccagcctctgtgtgcaccatgtttaatgtgctggtggatgccaagaagcagagcaccaagctgtgtgccctggatggcggccaggagtttggcagccagtggcagcagtaccacagcaagattgatgacctgattgacaacagcgtgaaggagatcatcagcctgctggtgtccaagtttgtgtctgtgctggagggcgtgctgagcaagctgagccgctatgatgagggcaccttcttcagcagcatcctgtccttcaccgtgaaggctgctgccaagtatgtggatgtgcccaagccaggcatggacctggccgacacctacatcatgtttgtgcggcagaaccaggacatcctgcgggagaaggtgaatgaggagatgtacatcgagaagctgtttgaccagtggtacagcagctccatgaaggtgatctgtgtgtggctgacagaccggctggacctgcagctgcacatctaccagctgaagaccctcatcaagatcgtgaagaagacctacagagacttccggctgcagggcgtgctggagggcaccctgaacagcaagacctatgacacagtgcaccggcggctgactgtggaggaggccacagcctctgtgtctgagggcggcggcctgcagggcatcaccatgaaggacagtgatgaggaggaggagggctag

SEQ ID NO: 23640 - DNA, 3768 bp, Artificial Sequence
  derived and/or modified sequence
atgctggaccccagcagcagcgaggaggagagcgacgagggcctggaagaagagtcgagggacgtgctggtagctgctggttcttcccaaagagctcctccagccccgacacgggaagggaggagagatgcccctggcagggcagggggcggcggcgctgctcgcagcgtgtccccctctccctctgtgctgtccgaagggcgggatgaaccccagcgtcagcttgacgacgagcaggagagaaggatccggcttcaactgtatgttttcgtcgttcggtgtattgcttatccattcaacgccaagcagccaaccgatatggccagaagacagcagaaactcaacaaacagcagctacagctcctcaaggagaggtttcaggcctttctgaatggtgagacccagattgtggcagacgaggccttctgcaatgccgtcaggagctactatgaagtgttcttgaagtccgatagggtggctcgcatggtacagagtggtggctgctctgctaacgatttcagggaagtctttaagaagaacatcgaaaagcgagtgcggagtttacccgaaatcgatggattgtccaaggagacagtgctgtcatcctggatcgccaagtacgacgcgatttacaggggcgaggaggatttgtgcaagcagccaaacagaatggccctgagcgcagtgagtgagcttatccttagcaaagaacagctgtacgagatgtttcagcagatcctaggaatcaagaagctggaacaccagctcctctataatgcctgtcaactggacaacgccgacgagcaggccgctcaaatccgtagggagctcgacggccggttgcaactagccgacaaaatggctaaagagagaaagttccccaagtttatcgccaaagatatggagaacatgtatattgaggaactcaggtccagcgtcaatctgctgatggctaatctggagagtctccctgtgagcaaggggggccctgagttcaaattacaaaaactgaaacggtcccaaaattccgcatttctggacattggtgatgaaaacgagattcagctgagtaagtctgacgttgttctcagcttcacgcttgagatcgttattatggaggtgcaggggctgaaaagcgttgctcctaatcggattgtttactgcacaatggaagtggagggagaaaagctgcagacagaccaagccgaggcctcacgtccacagtgggggacacaaggggactttacaaccactcacccaagacccgttgttaaggtgaagctgttcacggaatctaccggcgtgctcgcattggaagacaaggagttaggacgggtcatcctctaccccacatcaaacagctcaaaaagcgccgaattgcacaggatggtggtccccaaaaacagccaggactccgatctgaaaataaaactcgctgtgagaatggacaagccggcccacatgaaacacagcggatatctgtacgcactaggccagaaggtttggaagcgatggaaaaaacggtattttgtgttggtacaagtgtcccaatacaccttcgctatgtgctcttatagagagaaaaagtctgaaccgcaggagctgatgcaattagaagggtacactgttgattacaccgacccccacccaggactgcaagggggatgcatgttttttaacgccgttaaggaaggagacaccgttatcttcgcctctgatgacgagcaggacagaattctatgggtccaagctatgtaccgggcaacggggcaaagctacaagcccgttccggcaatccagacgcagaagctcaaccccaaaggcggaacactgcacgcagacgcccagctttacgctgataggtttcagaaacacgggatggatgaattcatttccgccaatccttgtaagcttgatcatgcctttttattcaggattctgcaacgccagactttggaccatcgtctgaacgactcttacagctgcctgggttggttttccccgggacaggtttttgtgctagacgaatactgtgctaggtatggagttagaggctgccaccggcacctatgttacctcgctgagctcatggaacacagcgagaatggagccgtcatcgatccaacccttctccactactcatttgcattttgcgcaagtcatgtgcacggaaaccggcctgatggtattgggacagttagcgtggaggagaaggaaaggtttgaagagattaaagaaaggctttcttcccttttagaaaatcagatcagtcacttccgctattgctttccatttggaagaccggagggcgcccttaaggccactttatctctcttggagagggtcttgatgaaggacatcgccacgccaatccctgccgaggaagtgaagaaggtggtgagaaaatgtctcgaaaaagccgccctcattaactacacccgtctaaccgagtacgctaagatcgaagaaaccatgaatcaagcaagccctgctagaaaactggaggaaatcctgcatttggccgaactttgtatagaggtgctgcaacagaatgaagagcatcacgccgaagcctttgcttggtggcctgatctgctcgcagaacatgctgaaaaattctgggctctatttacagttgacatggacacagccttagaagcgcaacctcaggacagctgggattcgttcccactctttcaactcctcaacaactttctaagaaatgacactctgctttgtaatggaaaattccacaagcacctgcaagagattttcgtgccactggtggtgcggtacgtcgacctcatggagtcctccattgcccaatcaatacatcgcggattcgagcaggagacttggcagcccgtgaacaatggatccgcaacgagtgaggaccttttttggaagttagacgcgcttcagatgttcgtctttgatctccactggcccgaacaggagtttgcccatcacttagagcaaagactgaagctcatggcaagcgatatgctcgaggcttgcgttaagcgcacgaggaccgccttcgaactgaaactgcagaaggcaagtaagactaccgatctccggattccagcctcagtgtgtacaatgttcaatgtgctggtggatgcaaagaagcagtcgacaaagctgtgtgccctggacggcggccaagaggtgtgcagaatctttcagcagtatcatagtaagatcgatgacctgatagacaactccgttaaagagattatttcactgctggtgagtaaatttgtctcggtgcttgagggagtgctcagcaaactgagccgctacgacgaaggcacttttttttcatctattctttcctttaccgtcaaagccgctgctaaatatgtggatgtccccaaaccaggcatggatttggcagacacttatataatgttcgttagacaaaatcaggacatcttgcgcgaaaaggtaaatgaggaaatgtacattgagaagctatttgaccagtggtactcctcctctatgaaagttatatgcgtctggctgactgacaggctagatctccagctacacatttatcagctgaaaaccctaataaagatcgttaagaagacttatcgcgattttcggctacagggtgtgttggagggtaccctcaacagcaaaacatacgataccgtccatcgacgtttaactgttgaagaggcaacagcaagtgttagcgagggaggtggcctgcagggaataaccatgaaggactcggatgaggaggaggagggctag

SEQ ID NO: 23641 - DNA, 3768 bp, Artificial Sequence
  derived and/or modified sequence
atgctggaccccagcagcagcgaggaggagagcgacgagggcctggaggaggagagcagggacgtgcttgtcgctgcaggctcctcgcagagagcccctcctgcccccacgcgtgagggccggcgggacgccccgggaagggccggtggaggcggcgcggcgaggtccgtgtcaccctcaccaagtgttctgtctgaaggccgggacgaacctcaaaggcaattagatgatgagcaggaaaggcggataaggctccagttatatgtcttcgtggttcggtgcattgcctatccattcaacgccaagcagccgacagacatggcccgcaggcagcagaagctaaataagcagcagcttcaactgctgaaagaaaggttccaagcttttttaaacggggaaacccaaatcgtcgccgacgaggcattttgcaatgccgtgaggagttactacgaggtgttcttaaagtctgaccgagtagcaagaatggttcagagtggcggctgctccgccaatgatttccgggaagtgttcaagaagaatatcgagaaaagagtgaggagccttcccgaaattgacggcttaagcaaagagacagtactgtcttcatggatcgctaagtatgatgccatatatcgtggagaagaggatctctgcaagcaaccaaaccgcatggcgctttcagccgtgagcgaactgattctgagcaaggagcaactttatgagatgttccaacagattcttgggatcaagaaattggagcatcagctgctttataatgcatgccagctggataatgcagacgagcaggccgctcagatccgcagggagttggatggccggttgcagctcgccgacaaaatggccaaagagaggaaatttccaaaattcattgccaaagacatggaaaacatgtatattgaagagctccgcagctccgtgaacctactgatggcaaatctggagtctcttcccgtaagtaagggcggtcctgaattcaaacttcaaaaactcaagagatctcagaactccgctttcctggacattggtgatgagaacgagatccagctgtcaaaaagcgacgtggtcctgtcgttcacgctcgaaatcgtaattatggaggtgcaggggctgaaatccgttgcacccaatcgaatcgtctactgcactatggaagtggagggggagaagctccagacagaccaggcggaggcctcaaggccacagtggggaacacagggcgattttaccaccacccacccacggcccgtggtgaaagtaaaactcttcactgagtcaacgggcgttctcgcccttgaagacaaagaacttggccgcgtgattctgtaccctacctctaattcaagtaaatcagcggagctgcaccgtatggtcgtgccaaaaaacagccaggacagcgatttaaagatcaaactcgcagtgcggatggataagcccgcccatatgaaacactccggttacctctacgctctgggacaaaaagtgtggaaacgatggaagaagaggtattttgtgctcgtccaggtgtcccagtacaccttcgcaatgtgctcttacagggagaagaaatcagaaccacaggagctaatgcagctcgagggctatacagtagattataccgacccgcaccctggtctgcagggcggctgcatgttcttcaatgccgtcaaagagggcgacactgtgatatttgcctccgacgacgaacaggaccgtattttatgggtccaggctatgtatcgcgcgactgggcagtcttacaagcctgtgcccgccatccagacccagaaattaaacccaaagggaggaactctgcacgccgacgcacaactgtacgccgatcgctttcagaagcacggcatggacgagtttatcagtgccaatccctgcaaacttgaccacgcctttttatttagaattctgcagagacagactctcgatcatagactgaatgacagctatagctgcctggggtggttcagcccggggcaagtgtttgtactggatgaatactgcgcccgctacggggtgcgcggttgtcacaggcatttgtgttatcttgctgagctgatggagcattccgagaatggggcagtcattgatcccacgctcctacactacagctttgctttctgcgcctcccacgtgcatgggaacagacccgacggtatcggaaccgtttcagtggaggaaaaggagcgcttcgaggagattaaggagcggctgagctctctgctcgaaaatcagataagtcacttccgctactgtttcccctttggacgccccgagggggctttgaaggccaccctgagccttctggagagggtgttaatgaaagatatcgctacacccattcctgccgaggaagtgaaaaaggtcgtaagaaagtgtctggaaaaggcagctttaataaactataccagactgactgagtatgctaagatagaggaaactatgaatcaagcgtcccccgctaggaaactcgaggagatactgcacttagctgaactgtgtattgaagtgttgcagcaaaatgaggagcatcatgctgaagcctttgcttggtggcccgaccttttggccgaacatgccgaaaaattctgggcgttattcaccgtggatatggataccgcccttgaagctcagcctcaggattcctgggatagttttccgctcttccaactcctgaacaatttcctgcggaatgacaccctgctttgcaatgggaaattccataaacacctgcaggagatctttgtgccattggtggtgagatacgttgatctcatggagtcgtccatagctcagagcatccacaggggttttgagcaggagacctggcagcctgttaataatgggtctgcaacgtccgaggacctcttctggaagcttgacgcacttcagatgttcgttttcgacttacattggcccgaacaggagtttgctcatcatttagagcagcgtctgaaactcatggctagcgatatgctagaggcctgtgtgaagcggacaaggacggccttcgaactgaagctacagaaagcctcaaagacaactgatctgcgaatacctgcttcagtctgcacaatgttcaacgtacttgtggacgctaagaagcagtctacaaagctgtgtgccctggacgggggccaggaattcggttctcagtggcaacagtaccacagcaagatcgatgatctgattgacaactcagtgaaagaaattatcagtctgctcgtctccaagtttgtgtctgtcctggagggggtattgtctaagctgagcaggtatgatgagggaacttttttctcctcaatattatccttcacggtgaaggccgctgccaaatacgtcgacgttccaaagccaggaatggatctggccgatacctatattatgttcgtgcgacagaatcaggatatcctgagagaaaaggtgaacgaggagatgtacattgaaaagctctttgaccaatggtactccagtagcatgaaagtcatctgtgtgtggttgactgatcgactggaccttcagcttcacatctaccagctcaagacgctcataaagattgtgaagaagacataccgcgactttcgcttgcaaggggttctggaagggacccttaacagcaaaacgtacgataccgttcacagaagactgactgttgaggaagccacagcaagtgtgagtgaggggggcggactccaggggataactatgaaggactccgacgaagaggaagaaggttag

SEQ ID NO: 23642 - DNA, 3669 bp, Artificial Sequence
  derived and/or modified sequence
atgctggaccccagcagcagcgaggaggagagcgacgagggcctggaggaggagtcccgcgatgtgctggtggccgccggatcgtcccagagagcaccccctgcgcctaccagggagggacagctcgatgacgagcaggagcgccgaatacggctccagctgtacgtgttcgtggtccggtgtatagcctatccttttaatgctaaacagcccacagacatggccaggcgacaacagaagctgaacaagcagcagcttcagttgctcaaagaaagattccaggcctttctcaacggtgagacgcagattgtggcagacgaggcgttctgcaacgccgtgagatcctattacgaggtcttcttgaagagcgacagggtggcacgtatggtgcagtccggaggctgcagcgctaacgactttagagaggtgttcaaaaagaacatcgagaagagagtccggtcactgcccgagatcgatggactttccaaagaaaccgtgctgtcttcctggattgcaaaatacgatgcgatctataggggggaggaggacttatgcaaacagccaaaccggatggccctctctgctgtctcagagctgattttatctaaggagcagctctacgagatgttccagcagatcctaggcataaaaaagctcgagcatcaacttttgtacaatgcctgtcaattagacaacgctgacgaacaggccgcgcagatccgacgcgagcttgatgggcggttgcagctggccgacaagatggccaaagagaggaagttcccaaagttcatagcgaaggacatggagaacatgtacatcgaggagttacgctcatcggtcaacctcctcatggcgaatctcgagagccttcccgtatccaagggaggccctgagttcaagctgcagaagttaaagcggtcacagaattccgccttcctggatatcggggacgaaaacgagattcagctatctaagagtgacgttgtgctgtccttcacattggagatcgtgatcatggaagtgcaaggactgaagtctgtggcacctaacaggatagtttactgtactatggaagtagagggggagaaacttcagacagaccaagccgaagcgtctcggccacaatggggcactcagggggattttaccaccactcacccccgtccagtcgtgaaggtcaaattgttcactgagagcaccggtgtgctagctctcgaagacaaagagctcggccgggtgattttataccctacttccaacagcagcaagagcgcggagctgcaccgaatggtggtgcctaagaactcccaggattctgacctaaagatcaaattggcggtcaggatggataaaccggctcacatgaagcattcaggctacctttatgccctgggacagaaggtttggaagaggtggaaaaagcgctacttcgtcttggtgcaggtctcccagtataccttcgctatgtgtagttaccgcgaaaagaaatccgaacctcaggaattaatgcagctggaggggtacactgttgattacaccgacccccatcccggcttgcagggcggatgtatgttctttaacgccgtgaaggagggtgacacggtgatctttgcaagcgacgacgagcaggacaggatcctctgggtccaagccatgtacagggccactggccagagttacaaacctgtaccagccattcaaacacagaagcttaatcccaaaggaggcaccctccatgctgatgcccagctgtacgccgacagattccagaaacacggaatggacgagttcatctccgcgaacccttgtaaattagatcacgcctttctgttccgcattctccaaagacaaaccttagatcaccgtcttaacgatagctacagctgtttggggtggttttcacccggccaagttttcgtgctagacgagtattgcgctcgatacggtgttagggggtgccaccgacacctgtgctacttggccgagcttatggagcattccgagaatggcgcagttatcgatccaactctgctgcactattcatttgccttctgcgcgtctcatgtgcacggaaatcgcccagatgggattgggactgttagtgtggaagaaaaggaacggttcgaggaaattaaggagagactatcctccctgttggagaaccagatctcccacttccggtattgttttccattcggccgacccgaaggggcgcttaaagctaccctgtctctcctcgaacgggtgctcatgaaagatatcgctaccccgatccccgcggaggaagtgaagaaggttgttcggaagtgcctcgaaaaggctgcactcattaattatacccgtttgactgagtacgctaagatcgaggagactatgaaccaggcaagtcccgcacggaaattggaggagattctccaccttgccgagctgtgcattgaggtgcttcagcagaacgaggagcaccacgcggaggctttcgcctggtggcctgatctgctcgcagaacatgcagaaaaattttgggccctattcaccgtggacatggatactgccttagaggctcagccacaggacagctgggactctttccccctgttccagctgctcaataattttttacggaatgacacactactatgcaatggcaagtttcacaaacatctgcaggagatatttgtgcccctcgtcgttaggtacgtggacttgatggaatccagtattgctcaatctatccaccgtggttttgagcaagaaacatggcagcctgtgaataatggctccgccacatcggaagacctcttttggaagctcgatgccctgcagatgttcgttttcgatctccattggcccgagcaggagttcgcccaccatctggaacaacgcctgaaattgatggcaagtgacatgctggaggcgtgtgtgaagcgcacccgcaccgcttttgagttaaagctccagaaggctagcaagaccacagatctgaggatcccagcttccgtgtgcactatgttcaacgtcctggtggatgccaagaagcagtccaccaaactgtgcgccctggacggcggacaggagttcggctctcagtggcagcaataccacagtaagattgatgatctaatcgacaacagcgtgaaagagatcattagtctgctggtctcgaagtttgtgtcagtgctagaaggagtgctgagcaaactgtcacgctacgatgaaggaacctttttcagcagcatactgagttttactgtcaaggcagctgcaaagtatgtggacgtgcctaagccgggaatggatctggcagacacgtatatcatgtttgtgcgccagaaccaggacatcctcagagagaaagtgaatgaagaaatgtacatcgagaaactcttcgaccagtggtattcatccagcatgaaagtgatttgcgtgtggttgaccgaccgacttgatctgcagctccacatttatcagctcaaaacattaattaaaatcgtcaagaagacctacagagacttccggcttcagggcgtcctggaggggacactgaattcaaaaacatacgacacagtacaccgtcgcctaacagtagaggaggcaaccgctagcgtgagcgagggcggcgggcttcaaggcattacaatgaaagactccgatgaagaggaagagggatag

SEQ ID NO: 23643 - DNA, 3768 bp, Artificial Sequence
  derived and/or modified sequence
atgctagacccttccagctcagaggaagagtccgacgaaggactagaggaagaaagcagggatgtgctggttgccgctggttcctcccagagggcacctcctgcacctacacgagaaggtcgaagggacgccccaggaagagcaggtggtggcggagccgctaggtcggtcagcccttctccatccgtcttgagtgaaggccgagatgaaccgcaacgccagttggacgatgagcaggagcggaggatacgtctgcagctgtacgtcttcgtagttcggtgcattgcctatccttttaatgccaagcagcccaccgacatggctaggcgacagcagaagctgaataagcagcagctgcagcttctgaaggaacgattccaggccttcctgaatggtgaaactcagatcgtggctgacgaagcattctgcaacgcagtgagatcatactatgaagtctttctcaaatctgatagagtggcacggatggtgcagtcaggtggatgttcagcaaatgatttccgtgaggtctttaagaagaatatcgagaagagagtccggtccctgcccgagatagatggcttaagcaaggagacagtgctctcttcttggatcgccaagtatgatgccatttatagaggagaggaggacttgtgcaagcaaccgaatcggatggccctgagtgccgtttccgagcttatactgtcaaaagagcagttatacgagatgttccagcaaatccttggcataaagaagttggagcaccagctgctctacaatgcctgccagctggataacgccgacgagcaggctgctcagataagaagggaactcgatggaaggttgcagttagctgataaaatggcaaaagagaggaaattcccaaagttcatcgccaaggatatggagaatatgtatatcgaagaactgaggtccagcgttaacctgctcatggccaacttggaatccctgcccgtttccaagggcggtccagagttcaaactgcaaaagttgaagaggtcccagaatagtgcatttctggacataggagacgagaacgaaatacagctttcgaagtcggatgtcgtgttatccttcaccttggagattgtaataatggaagtgcagggactgaagtctgtggctcccaacaggatcgtctattgtacaatggaggtggagggggagaagctccaaacagatcaggccgaggctagtaggccccagtggggaacccagggggacttcaccacgacgcaccccagacccgtggtcaaggtaaagctatttacagagagcaccggagtgctggcgcttgaggacaaggaactcggtcgagtgatactttatcctacatcgaattcaagcaaaagtgctgaactccaccgcatggtggtccctaaaaattcccaggattccgatctgaaaatcaagttagctgtgaggatggataagccagcccacatgaagcattcgggctacctatacgccctcggccaaaaagtgtggaagagatggaaaaaaaggtatttcgtcctggtccaggtgtcccagtacacgttcgcgatgtgtagttacagggagaaaaagagcgagccccaagagcttatgcagctcgagggctatactgtggattacaccgaccctcaccccggactccagggagggtgcatgttcttcaacgctgtgaaagagggtgacacagtgatttttgccagtgacgacgagcaggaccgtattctgtgggtgcaggctatgtatcgcgctactggtcagtcatacaaacccgtgccagccatccaaactcaaaagctcaatcctaagggaggtactctgcacgcagatgctcaactctacgctgatagatttcagaaacacggtatggatgaattcatatctgcaaatccctgcaaactcgatcacgcatttctcttccgcatactgcagaggcagactctggaccaccgtttaaacgacagttattcctgcttgggctggttctcccctggacaggttttcgtactggacgagtattgcgctagatatggggtgcggggatgccaccggcacctgtgctacctggccgagctgatggagcattccgagaacggcgctgtgatagacccaactctgttgcactactcctttgccttttgtgctagccacgtccacgggaacagaccggatggcatcggcaccgtatccgtagaggaaaaagaacggttcgaagagatcaaggagcggttgagctcattactcgagaaccaaatttcacattttcggtactgttttccctttggcagaccagaaggcgctttaaaggcgactctctccctgcttgagagggtgctcatgaaagatatcgccacacccatccccgcagaggaagtgaagaaggttgttcgtaagtgtctggagaaagctgcgctcataaattacaccagattgacggagtatgcaaaaatcgaggaaaccatgaaccaggcgtcgccagcccgaaaactcgaagaaatccttcatttggcagaactctgcatcgaggtgttgcaacaaaatgaagagcatcatgccgaggccttcgcgtggtggccagacttgctggccgagcacgccgaaaagttttgggccctgtttactgtggacatggatacggcgttagaagcccagccccaggatagttgggattcatttccgctatttcagcttctgaataactttttacgtaacgacaccctcttgtgtaatggaaaattccacaagcacttacaggagattttcgtgcccctcgttgtgagatacgtggatcttatggagagctctattgcacagagcattcatcggggatttgagcaagaaacctggcagcctgtgaataatggttctgcgacatcggaagatctgttctggaaacttgacgccctccagatgtttgttttcgatcttcactggcctgagcaagaattcgcgcatcatctggaacagagattaaagctgatggccagcgatatgctcgaggcttgcgtgaagcggactagaacggccttcgagctaaagttgcagaaagcttcgaagacaaccgacctcaggatcccagcttcagtatgtaccatgttcaatgtcctagtggacgcaaaaaaacagagtaccaagctgtgtgcactcgatggcggacaggaggtatgtcgcatcttccagcagtatcatagtaaaatagatgacttaattgataattctgtcaaggaaattatttcactgctggtcagcaagtttgtctcagttctcgagggagtactgtcaaagctcagccgctatgatgagggcacatttttctcaagcatcctgagcttcacagttaaggcagccgctaaatacgtagacgtgccaaagcctggtatggacttagctgatacctatatcatgttcgtgcgccaaaaccaggacattttacgggagaaggtaaacgaggaaatgtacatcgagaagcttttcgatcagtggtactcttcttcaatgaaagtgatctgcgtatggttaaccgacaggcttgacctccaactccacatttaccagctcaagaccctgatcaaaatagtgaaaaagacctatagggacttccgcctacagggggtacttgagggcacacttaattcaaagacatacgataccgttcatagacggcttactgtagaggaggccactgcctcagtatcagaaggagggggtctccagggcataacaatgaaggactcagacgaagaggaggagggatag

SEQ ID NO: 23644 - DNA, 3768 bp, Artificial Sequence
  derived and/or modified sequence
atgctggatccatcatcaagtgaggaagagagcgacgaaggcctggaggaggagtcacgagatgtcctggtggctgccggaagctcccagcgagcgcctccagcccctacccgggagggacggcgtgacgcccctggccgtgccggagggggaggcgcagctagatccgtgtcacccagccccagcgtgctgagtgagggcagagatgaacctcagcgccagctggacgacgaacaggagcgcaggattcgcctgcagctatacgtcttcgtcgtgcggtgtattgcataccccttcaatgcaaagcagccaacagatatggcaagaagacagcagaagctgaacaaacagcagctgcagctgctgaaagagagatttcaggcatttctgaacggggagacccaaatcgtagcggatgaagctttttgcaacgccgtgcgctcctactacgaggtattcctgaaaagcgaccgagtggctcggatggtacaatctggagggtgctcagcaaatgattttcgtgaggtattcaagaagaatattgagaagagagtgcgcagtttaccggaaatcgatgggctgagcaaagaaactgttctgtcatcttggattgcgaagtatgatgctatataccggggagaagaagacctatgtaaacagcccaacaggatggccctgagtgctgtgtccgaactgatccttagtaaagagcagctctacgaaatgtttcagcagatactggggattaagaaacttgagcatcagctcctctacaacgcttgccaactcgataacgccgatgaacaggcagcccagattcggcgtgagttagatggaagactacaactcgcggataagatggctaaagagcgcaagttccccaagtttatagcgaaggatatggagaatatgtacatcgaggaactcaggtccagcgtgaatttgctgatggcaaacctggaatctttacccgtgagtaaagggggtcctgagtttaagctgcagaagttaaagcgttcccaaaacagcgctttcctggatatcggggatgaaaacgaaatacagctgtctaaaagcgatgttgttttgagctttacgctggaaatcgtcattatggaggtgcagggtttgaagagtgtggccccaaatcggattgtttattgcactatggaagtggagggcgagaagctccaaaccgaccaagctgaggccagccggccacagtggggcacccaaggggatttcacaactacacaccccaggcccgtcgtgaaggtgaagctattcaccgaatccacaggagtgcttgccctggaggataaggagcttggacgagtgattttataccccacaagcaactccagcaagagcgcagaacttcatcgcatggttgtacctaaaaacagccaggattctgaccttaagattaagctggccgtgcgtatggataagccagcgcacatgaaacatagcggttatttgtacgcacttggtcagaaagtgtggaaaaggtggaagaaacggtacttcgttttggtgcaggtttcacagtacacgtttgctatgtgcagctacagagaaaaaaagtctgaaccacaggaacttatgcagctggagggttatacagtcgattacactgaccctcacccaggactgcagggtggctgcatgttcttcaacgccgtcaaagaaggcgacactgtgatattcgcttccgacgacgaacaggacagaatcctgtgggtgcaggctatgtatagagccaccggccagtcctataaacctgtgcctgcgatccagacacagaagttgaatcccaaggggggtaccttacatgcagatgcgcagctctacgctgaccgtttccagaagcacgggatggacgaattcattagtgctaacccttgcaagctcgatcacgcattccttttcaggattctccaaaggcagaccctggaccaccgactgaacgactcttatagttgcctgggctggttcagtcctggacaggtgtttgtgctggacgaatactgtgcccgatacggggtgagaggatgtcacagacacttatgctacctggccgagctgatggagcactctgagaatggggcagtgatcgatcccaccctcctacattattcgttcgcattttgcgcatctcatgtgcacggaaaccggccagacggcattggaacagtctccgttgaagaaaaagaacgctttgaggagattaaggaacgactttcctcattgctggagaaccagatcagccattttcggtattgctttccattcggcagaccagaaggcgcactgaaggcaaccctgtctcttcttgaacgggtgctaatgaaggatatcgctactcccatacccgcagaggaagtgaagaaggtggtcagaaaatgcctggaaaaggctgcacttatcaactatacccgcctgacagagtacgcgaagattgaggagacaatgaaccaggccagtcctgccaggaaacttgaagagatccttcatctggcagagttatgcatcgaggtcttacagcagaacgaagagcatcatgccgaagcattcgcctggtggcctgacttgctggcagaacatgccgagaaattctgggcattgttcactgtcgatatggacactgctctcgaggctcagccccaggatagttgggactcatttcccctgttccagctgctaaataatttcctgcgaaacgatactctgctgtgcaatgggaagttccacaaacacctgcaggaaattttcgttcccctggtcgtcaggtacgtcgacctcatggaaagctctatcgcacaaagtatacatcgcggattcgagcaagagacttggcagccagttaataatggcagcgccacatctgaggacctgttttggaagctggacgctctgcagatgttcgtttttgatctccattggccggagcaggagttcgcccaccacctggagcagcgtctgaaactcatggcctcagacatgttggaggcgtgcgtgaaaagaactaggactgctttcgaactcaagctgcagaaggcctccaagactaccgatctgcgcatcccggcttccgtctgcaccatgttcaacgtcctggtggatgcaaagaagcagagcaccaagctttgtgcgcttgacggcggacaggagtttggttcccaatggcagcagtaccattccaaaattgacgacctgattgacaactcggtcaaagagatcatttccctgcttgtgtccaagtttgtttctgtgctcgaaggcgtcttaagcaagctctcgagatatgacgagggcaccttttttagctccattctgtcatttactgttaaagctgctgcaaaatacgtcgacgtccctaagccaggaatggacttagcagatacttacataatgtttgttcgacagaatcaagatatcttgcgcgaaaaggttaacgaagaaatgtacattgagaagctctttgaccaatggtactcaagcagtatgaaggtcatctgtgtgtggttgactgatagactcgacctgcaattacacatataccaactgaagaccctgattaaaatagtgaagaaaacctatcgggactttcgcctgcagggggtactcgaaggaacactgaacagcaagacctacgacaccgtgcaccgaaggttgacagttgaagaagctacagccagcgtaagcgaggggggtggcctacaaggcataacaatgaaagacagcgatgaagaagaggaggggtag

SEQ ID NO: 23645 - DNA, 3669 bp, Artificial Sequence
  derived and/or modified sequence
atgctagatcctagttctagtgaggaagaatctgacgagggtcttgaagaggagtcccgcgatgtgctggtggctgccggatcgtcccagcgcgctccgccagcacctactagagagggccagctcgacgatgaacaggagcggcgaatccgcctgcaactgtatgtgtttgtggtacggtgtatcgcctatccgtttaacgccaagcagcctacagatatggctagacgccaacagaagcttaataaacagcagctgcagcttctcaaggagcgatttcaggcctttttaaacggcgaaacccaaatcgtggccgacgaggctttttgcaatgcggtgcgttcctattatgaggtgtttctgaaatccgaccgtgttgctcgcatggtgcagtccggtgggtgcagcgcaaatgacttccgggaagtcttcaagaaaaatattgaaaagagagtcaggtccctccctgagatcgacggactaagcaaggaaacggtcctctctagttggatcgccaagtacgacgctatctaccgcggtgaagaggatctctgtaagcagcctaacaggatggctctgtccgccgtgagtgaactcatcctgtccaaagagcagctctatgaaatgttccagcaaattctcggaatcaaaaagctggagcatcagctgttgtacaatgcatgccagttggacaacgccgacgaacaggcggctcagataagacgggagctggatgggaggttacagctggctgacaaaatggccaaggaacgtaaatttcccaagtttattgcaaaagatatggagaacatgtacattgaggaactccgctcttcggtgaatttattgatggcgaatctggaatccctcccagtttcgaagggaggcccagagtttaagttgcagaagctgaagcggagtcaaaactcagcatttttagacattggcgacgaaaatgaaatacagttgtccaaaagtgacgtggtgctatctttcaccctggagattgtgatcatggaagtgcaggggctaaagagtgttgctccgaacagaatcgtctactgcactatggaagtcgagggcgagaagctgcagactgatcaggccgaagccagcagaccacaatggggaacccagggagatttcacaaccacccatcccagacctgtggtcaaggtaaaactgttcactgaaagcaccggggtgctggccctggaagataaagagctcgggagagtgatcctgtaccctactagcaattcttcaaaatccgctgagctacatagaatggtggtgcccaaaaatagccaggacagcgacctgaagatcaaattggccgtccgtatggataaacccgctcacatgaagcactcaggctatctttatgcccttggacaaaaggtgtggaaaagatggaagaaaagatattttgttctggtccaggtgtcccagtatacctttgctatgtgctcttatcgagagaaaaagagtgagccacaagagctgatgcagctcgaagggtatacagtggactacacggatccacatccaggactccagggtggctgcatgtttttcaatgcggtgaaagaaggggatactgtgatcttcgcctcagacgacgaacaagatagaattctctgggttcaggcaatgtatagagcaacgggccagtcctacaagcctgtgcctgcaatccagacccagaagctcaatcctaagggtggcaccctccacgcggatgcacagctttacgcagatagatttcagaagcatggcatggatgagtttatttcagcgaacccttgcaagctggaccatgctttcctctttcggatattacagcggcagacactcgatcacagattaaatgactcctattcttgcctcggatggttttcgccaggccaagtctttgtcctagacgaatactgtgccagatacggagtgcgaggttgtcaccgccacctctgctacctcgctgagttgatggagcatagcgagaacggggcagtcatcgatcctactctgcttcattactcttttgcattttgcgcgtcccatgtgcacggaaacagaccggatgggattggaactgtctcagtcgaagagaaagagcggttcgaggaaattaaggaacggctatcatccttgttggaaaatcaaatctctcacttcagatactgcttcccctttggacgcccagagggcgctctgaaagccaccctcagccttctggaacgagtactgatgaaggatatcgccacgccaatccctgctgaggaggtaaagaaagtggtgcggaagtgtttagagaaagccgcactgattaactatactaggctcactgagtacgcaaagatcgaggagactatgaatcaggcctcccccgcacgaaagttggaggaaattctgcacttagccgaactgtgcattgaagtgctgcagcagaatgaagaacatcacgcagaggcctttgcgtggtggcctgacttgctggcagagcacgccgagaagttctgggcgctcttcacagtcgacatggacacagctcttgaggcccagcctcaagatagttgggatagcttccctctgttccaactgttaaataatttcctcaggaatgacacgcttctgtgcaacggcaaatttcacaagcatttgcaggaaattttcgtgcccctagtcgtacgttacgtggatctgatggaaagctctatcgcacagagtattcatcgcggtttcgaacaggagacctggcagccagtaaacaatggcagcgccacttctgaagacttgttctggaaactggatgccctgcagatgtttgtgtttgacctgcattggcctgaacaggaatttgcacatcatctggagcagcgtctaaagctgatggcctcagacatgctagaagcatgtgtaaaacgaacgaggaccgcttttgagctcaagctgcagaaagcctccaaaacaacagatttacgcatcccagcctccgtgtgcacaatgtttaacgtgttggttgacgccaagaagcaatcaacaaagttatgcgctcttgacggtggccaagaattcggatctcaatggcagcagtaccatagcaagattgatgatctgatagacaatagcgttaaagaaattatttcactcctcgtgtccaaatttgtctcggtgctggagggagtgctctcgaaactgtcacgttatgacgagggcacattcttcagcagtatcctcagcttcaccgtgaaagctgccgctaagtacgtcgacgtgcccaagcccggaatggacctagcagacacgtacatcatgttcgtgaggcagaaccaggatatccttagagagaaagttaacgaggagatgtacatagagaaactctttgaccagtggtacagcagtagcatgaaggtgatatgtgtgtggctgactgacagactggacctacagctgcacatttaccaactcaaaacactgatcaagatagttaaaaagacctacagagacttcaggctgcaaggcgtgttagaaggcaccctcaattctaagacctacgacacagtgcaccggaggttgactgtggaagaagccaccgctagcgtgtccgagggaggtgggctgcagggcataactatgaaagactcagatgaggaagaggagggttag

SEQ ID NO: 23646 - DNA, 5928 bp, Artificial Sequence
  derived and/or modified sequence
attcaattccacgtgttgcttgttgtaggcgccacaggttccccacctgcgtccgggcgctcgggcggctccgcctctgccggcgggctctggggaaccgctgggtcggcgcgcccggggctggcggagcaattcctgaggcgcccaagctcacccccaacgctaactccgcctattcagtcccggcggctccccctctcccccctcccaatcctcctcccggctcctgcccgcccctttcgccctggtggtaggaaacactcctgaatctaactcgacgtgtccggaaagccctggccagttttcctttcgttctgcggccgctgcagccagccccgcggctccctcagacccgcgggcgcagccgccgggggtgaggcgcttggggaccgcgggccgagcggcggggatccccgagcaccatgctggacccgtcttccagcgaagaggagtcggacgaggggctggaagaggaaagccgcgatgtgctggtggcagccggcagctcgcagcgagctcctccagccccgactcgggaagggcggcgggacgcgccggggcgcgcgggcggcggcggcgcggccagatctgtgagcccgagcccctctgtgctcagcgaggggcgagacgagccccagcggcagctggacgatgagcaggagcggaggatccgcctgcagctctacgtcttcgtcgtgaggtgcatcgcgtaccccttcaacgccaagcagcccaccgacatggcccggaggcagcagaagcttaacaaacaacagttgcagttactgaaagaacggttccaggccttcctcaatggggaaacccaaattgtagctgacgaagcattttgcaacgcagttcggagttattatgaggtttttctaaagagtgaccgagtggccagaatggtacagagtggagggtgttctgctaatgacttcagagaagtatttaagaaaaacatagaaaaacgtgtgcggagtttgccagaaatagatggcttgagcaaagagacagtgttgagctcatggatagccaaatatgatgccatttacagaggtgaagaggacttgtgcaaacagccaaatagaatggccctaagtgcagtgtctgaacttattctgagcaaggaacaactctatgaaatgtttcagcagattctgggtattaaaaaactggaacaccagctcctttataatgcatgtcagctggataacgcagatgaacaagcagcccagatcagaagggaacttgatggccggctgcaattggcagataaaatggcaaaggaaagaaaattccccaaatttatagcaaaagatatggagaatatgtatatagaagagttgcggtcttcagtgaatttgctaatggccaatttggaaagtcttccagtttcgaaaggtggtccggaatttaaattacaaaaattaaaacgttcacagaactctgcatttttggacataggagatgagaatgagattcagctgtcaaagtccgacgtggtactgtcattcaccttagagattgtcataatggaagtgcaaggcctgaagtcagttgctcccaatcgaattgtttactgtacaatggaagtggaaggagaaaaacttcagacagaccaggccgaagcctcaaggccacaatgggggactcaaggagatttcaccaccacccatcctcggcctgtggtcaaagtgaaactcttcacagaaagcactggagttctggccctggaagataaagaactgggaagggtgatattatacccaacttctaatagctccaaatcagctgaattacaccgaatggtagttccaaaaaatagccaggattctgacttaaaaatcaaactggcagtgcgaatggataaaccagcacatatgaagcatagtggatatctgtatgcccttggacagaaggtttggaaaagatggaaaaaacgttactttgttctagttcaggttagccaatatacctttgctatgtgcagttatagagaaaagaagtctgaaccacaagaattaatgcagcttgaaggctatactgtggattataccgatccccacccaggccttcagggtggttgtatgttctttaatgctgttaaagaaggagatactgtaatctttgccagtgatgatgaacaggacagaatattatgggttcaagccatgtatagggccacaggtcaatcatataaaccagttcctgcaattcaaacccagaaactgaatcctaaaggaggaactctccatgcagatgctcagctttatgcagatcgttttcagaaacatggtatggatgagtttatttctgcaaacccctgcaagcttgatcatgccttcctttttagaatactccagaggcagactttggatcacagactgaatgattcctattcttgcttgggatggtttagccctggccaagtctttgtgttagatgagtactgtgcccgttatggtgtgagaggctgtcacagacatctctgctaccttgcagaactgatggaacattcagaaaatggtgctgtcattgaccctaccctgctccattacagctttgcattctgtgcctctcatgtgcacggcaacaggcctgatggaattgggactgtttcagtggaagaaaaagaaagatttgaggagataaaagagagactctcttcccttttagaaaatcagataagccatttcagatactgttttccctttggacgacctgaaggtgctctaaaagctacactttcattacttgaaagggttttaatgaaagatattgccactcccataccagcagaagaggtgaagaaagtggtcagaaaatgtctcgagaaagctgccttgatcaattacactagactcacagaatatgccaaaatagaagagaccatgaaccaggcatctcctgctagaaagctggaagagattcttcatctggcagagctctgcatagaagtcttacagcagaatgaagagcatcatgcagaggcatttgcctggtggcctgatttattggctgaacatgcagagaaattttgggctttatttacagtggatatggacactgcactagaggctcaaccgcaagactcctgggatagttttcctcttttccaactgcttaataatttcctccgaaatgacacacttttgtgtaatggaaaatttcacaaacacttgcaagaaatctttgtacccttggttgtccgctatgtggatctcatggagtcttccatcgcccagtcaattcacagaggttttgagcaggagacatggcagcctgtcaacaatggctcagcaacatcagaagaccttttttggaagcttgatgcactgcaaatgtttgtctttgatctgcactggccagaacaggaatttgcccaccacttagagcaaagacttaaactaatggccagtgatatgctagaggcctgtgtcaaaagaacaagaactgcatttgaactcaagctacaaaaggcaagcaaaacaactgacttgcgcattccagcttccgtttgcactatgtttaatgtattagtcgatgccaaaaagcaaagcaccaaactctgtgccctggatggaggacaagaggtatgtagaatttttcaacagtaccattcaaaaatagatgatctgatcgacaacagtgtaaaagaaatcatttcactgttagtttcaaagtttgtttcagtgttggaaggcgtgttgtctaagctgtcaaggtatgatgaaggcactttcttttcatccattctgtcattcactgtgaaagcagctgcaaaatatgttgatgttccaaaaccaggaatggatctggcagacacctatattatgtttgttcggcaaaaccaagatattcttcgagaaaaggtcaatgaggaaatgtatatagaaaagttatttgatcaatggtacagcagttccatgaaagtcatttgcgtgtggttgactgatagattagacctccaactccatatttaccagctgaagacgctcatcaagattgtgaagaaaacctacagggactttcgattgcagggtgtgttggaaggaacactgaacagtaagacttatgatactgtgcacagacgtttaacagtagaggaggccacagcctctgtttcagaaggaggaggacttcagggcattactatgaaagacagtgacgaagaagaagaaggctgatatcacacagctttgcagaaggaaggaagaccttgatcgacattgttttttatttttttaaccttgtccttgtaattacattcattgtttgttttggccaaataaaaatgcttgtatttctttaaaaagtaagcctgaatgtagagtaaaaggggaaatgccaagattttggggtttttttgtttcctttttttgtttgtttgtttgtttgtttttttggagaagagcatcctcttttgtgtagtttgacctaaaaatgaaccttggctctgcttgtgatcagaacatgaacttttttttttaaagaagatttgagcatttttctgtaatcacatcaaaatgatgttttctgtgtaaagcgagatacatatttctcataatgcagcattgtgagaagtcagttcggaccactgcaccaacactgtcgtatccttgttaaaatggtgtgtaccttacaaattataatttatgtgccaggttcgttttgtacttaatttgctattattgtgatgtgtataaaatctttaatcttggttcttagtactttgaattggtctacaggtatattcctgggatgaaaggattgccaaacccaaatatagactagattatccaatgggtttgtgtctttgttccattctcaacatttcttctttcaactataagtaatccccaggtgtggggtagcaagtgtgcttccgtcaagataccatattctcctgctccagtataacagcttgcaggcaataaaaatctatttgctcataactacttctgtatttattagacttatatagagcaaatgcagtaaaagaggtttgcagtgtttcaaacatcccaactatctgactctgtgtttttgtttcttgagttttttgtttgttttgtttgtaatattttgtttttaatcaaatgagtaaaagatagtaacactgactgttctttgtacctaataggcacatacattgttaaaagaattactatgacagcatatttccatagcagaggaaatatatatttcatatattattagttaatattagtaatcaatgttaactaataattagtaatgttagtaatattaactagtaattcacattattagtggttctctcaaaatattttcttgctagggtttgagagataattgtattatgttgcgtaagttctctatgaattatttttgtgatatttcccaaaacatattggcagattgtgctactgcatttattaataagtaatttttaaatgaaggcagttaatgcagaataagtggaggtatccctgcatttatgaaaacgtttattctgaaactttagaaatgaaacaacttggacctccagattcgttctcccatggtgtaataagtggtcgttaggtacctagactagccttaaaaatctatttaatctacagttactatttagcattgttttggctcattttctgggccctagggctaagataacaaacaaggaaatttcttccttcttccgggattaaagactaactctaccaactcactatctttgaaaggcagtttgggaatgttctccctccttttcttctctattcacacaccaaatactattttctccaaaccctcaaatgtccagtcatgctatcccaaactctccaatggcaccatccccaagcttgctgttccacgacacattgctctgtacttagtaattacccacccttcttttcctttcaataaaatgtccatttccttgat

SEQ ID NO: 23647 - DNA, 4308 bp, Artificial Sequence
  derived and/or modified sequence
ttttcctttcgttctgcggccgctgcagccagccccgcggctccctcagacccgcgggcgcagccgccgggggtgaggcgcttggggaccgcgggccgagcggcggggatccccgagcaccatgctggacccgtcttccagcgaagaggagtcggacgaggggctggaagaggaaagccgcgatgtgctggtggcagccggcagctcgcagcgagctcctccagccccgactcgggaagggcggcgggacgcgccggggcgcgcgggcggcggcggcgcggccagatctgtgagcccgagcccctctgtgctcagcgaggggcgagacgagccccagcggcagctggacgatgagcaggagcggaggatccgcctgcagctctacgtcttcgtcgtgaggtgcatcgcgtaccccttcaacgccaagcagcccaccgacatggcccggaggcagcagaagcttaacaaacaacagttgcagttactgaaagaacggttccaggccttcctcaatggggaaacccaaattgtagctgacgaagcattttgcaacgcagttcggagttattatgaggtttttctaaagagtgaccgagtggccagaatggtacagagtggagggtgttctgctaatgacttcagagaagtatttaagaaaaacatagaaaaacgtgtgcggagtttgccagaaatagatggcttgagcaaagagacagtgttgagctcatggatagccaaatatgatgccatttacagaggtgaagaggacttgtgcaaacagccaaatagaatggccctaagtgcagtgtctgaacttattctgagcaaggaacaactctatgaaatgtttcagcagattctgggtattaaaaaactggaacaccagctcctttataatgcatgtcagctggataacgcagatgaacaagcagcccagatcagaagggaacttgatggccggctgcaattggcagataaaatggcaaaggaaagaaaattccccaaatttatagcaaaagatatggagaatatgtatatagaagagttgcggtcttcagtgaatttgctaatggccaatttggaaagtcttccagtttcgaaaggtggtccggaatttaaattacaaaaattaaaacgttcacagaactctgcatttttggacataggagatgagaatgagattcagctgtcaaagtccgacgtggtactgtcattcaccttagagattgtcataatggaagtgcaaggcctgaagtcagttgctcccaatcgaattgtttactgtacaatggaagtggaaggagaaaaacttcagacagaccaggccgaagcctcaaggccacaatgggggactcaaggagatttcaccaccacccatcctcggcctgtggtcaaagtgaaactcttcacagaaagcactggagttctggccctggaagataaagaactgggaagggtgatattatacccaacttctaatagctccaaatcagctgaattacaccgaatggtagttccaaaaaatagccaggattctgacttaaaaatcaaactggcagtgcgaatggataaaccagcacatatgaagcatagtggatatctgtatgcccttggacagaaggtttggaaaagatggaaaaaacgttactttgttctagttcaggttagccaatatacctttgctatgtgcagttatagagaaaagaagtctgaaccacaagaattaatgcagcttgaaggctatactgtggattataccgatccccacccaggccttcagggtggttgtatgttctttaatgctgttaaagaaggagatactgtaatctttgccagtgatgatgaacaggacagaatattatgggttcaagccatgtatagggccacaggtcaatcatataaaccagttcctgcaattcaaacccagaaactgaatcctaaaggaggaactctccatgcagatgctcagctttatgcagatcgttttcagaaacatggtatggatgagtttatttctgcaaacccctgcaagcttgatcatgccttcctttttagaatactccagaggcagactttggatcacagactgaatgattcctattcttgcttgggatggtttagccctggccaagtctttgtgttagatgagtactgtgcccgttatggtgtgagaggctgtcacagacatctctgctaccttgcagaactgatggaacattcagaaaatggtgctgtcattgaccctaccctgctccattacagctttgcattctgtgcctctcatgtgcacggcaacaggcctgatggaattgggactgtttcagtggaagaaaaagaaagatttgaggagataaaagagagactctcttcccttttagaaaatcagataagccatttcagatactgttttccctttggacgacctgaaggtgctctaaaagctacactttcattacttgaaagggttttaatgaaagatattgccactcccataccagcagaagaggtgaagaaagtggtcagaaaatgtctcgagaaagctgccttgatcaattacactagactcacagaatatgccaaaatagaagagaccatgaaccaggcatctcctgctagaaagctggaagagattcttcatctggcagagctctgcatagaagtcttacagcagaatgaagagcatcatgcagaggcatttgcctggtggcctgatttattggctgaacatgcagagaaattttgggctttatttacagtggatatggacactgcactagaggctcaaccgcaagactcctgggatagttttcctcttttccaactgcttaataatttcctccgaaatgacacacttttgtgtaatggaaaatttcacaaacacttgcaagaaatctttgtacccttggttgtccgctatgtggatctcatggagtcttccatcgcccagtcaattcacagaggttttgagcaggagacatggcagcctgtcaacaatggctcagcaacatcagaagaccttttttggaagcttgatgcactgcaaatgtttgtctttgatctgcactggccagaacaggaatttgcccaccacttagagcaaagacttaaactaatggccagtgatatgctagaggcctgtgtcaaaagaacaagaactgcatttgaactcaagctacaaaaggcaagcaaaacaactgacttgcgcattccagcttccgtttgcactatgtttaatgtattagtcgatgccaaaaagcaaagcaccaaactctgtgccctggatggaggacaagagtttggtagtcaatggcaacagtaccattcaaaaatagatgatctgatcgacaacagtgtaaaagaaatcatttcactgttagtttcaaagtttgtttcagtgttggaaggcgtgttgtctaagctgtcaaggtatgatgaaggcactttcttttcatccattctgtcattcactgtgaaagcagctgcaaaatatgttgatgttccaaaaccaggaatggatctggcagacacctatattatgtttgttcggcaaaaccaagatattcttcgagaaaaggtcaatgaggaaatgtatatagaaaagttatttgatcaatggtacagcagttccatgaaagtcatttgcgtgtggttgactgatagattagacctccaactccatatttaccagctgaagacgctcatcaagattgtgaagaaaacctacagggactttcgattgcagggtgtgttggaaggaacactgaacagtaagacttatgatactgtgcacagacgtttaacagtagaggaggccacagcctctgtttcagaaggaggaggacttcagggcattactatgaaagacagtgacgaagaagaagaaggctgatatcacacagctttgcagaaggaaggaagaccttgatcgacattgttttttatttttttaaccttgtccttgtaattacattcattgtttgttttggccaaataaaaatgcttgtatttctttaaaaagtaagcctgaatgtagagtaaaaggggaaatgccaagattttggggtttttttgtttcctttttttgtttgtttgtttgtttgtttttttggagaagagcatcctcttttgtgtagtttgacctaaaaatgaaccttggctctgcttgtgatcagaacatgaacttttttttttaaagaagatttgagcatttttctgtaatcacatcaaaatgatgttttctgtgtaaagcgagatacatatttctcataatgcagcattgtgagaagtcagttcggaccactgcaccaa

SEQ ID NO: 23648 - DNA, 4631 bp, Artificial Sequence
  derived and/or modified sequence
agttttcctttcgttctgcggccgctgcagccagccccgcggctccctcagacccgcgggcgcagccgccgggggtgaggcgcttggggaccgcgggccgagcggcggggatccccgagcaccatgctggacccgtcttccagcgaagaggagtcggacgaggggctggaagaggaaagccgcgatgtgctggtggcagccggcagctcgcagcgagctcctccagccccgactcgggaagggcagctggacgatgagcaggagcggaggatccgcctgcagctctacgtcttcgtcgtgaggtgcatcgcgtaccccttcaacgccaagcagcccaccgacatggcccggaggcagcagaagcttaacaaacaacagttgcagttactgaaagaacggttccaggccttcctcaatggggaaacccaaattgtagctgacgaagcattttgcaacgcagttcggagttattatgaggtttttctaaagagtgaccgagtggccagaatggtacagagtggagggtgttctgctaatgacttcagagaagtatttaagaaaaacatagaaaaacgtgtgcggagtttgccagaaatagatggcttgagcaaagagacagtgttgagctcatggatagccaaatatgatgccatttacagaggtgaagaggacttgtgcaaacagccaaatagaatggccctaagtgcagtgtctgaacttattctgagcaaggaacaactctatgaaatgtttcagcagattctgggtattaaaaaactggaacaccagctcctttataatgcatgtcagctggataacgcagatgaacaagcagcccagatcagaagggaacttgatggccggctgcaattggcagataaaatggcaaaggaaagaaaattccccaaatttatagcaaaagatatggagaatatgtatatagaagagttgcggtcttcagtgaatttgctaatggccaatttggaaagtcttccagtttcgaaaggtggtccggaatttaaattacaaaaattaaaacgttcacagaactctgcatttttggacataggagatgagaatgagattcagctgtcaaagtccgacgtggtactgtcattcaccttagagattgtcataatggaagtgcaaggcctgaagtcagttgctcccaatcgaattgtttactgtacaatggaagtggaaggagaaaaacttcagacagaccaggccgaagcctcaaggccacaatgggggactcaaggagatttcaccaccacccatcctcggcctgtggtcaaagtgaaactcttcacagaaagcactggagttctggccctggaagataaagaactgggaagggtgatattatacccaacttctaatagctccaaatcagctgaattacaccgaatggtagttccaaaaaatagccaggattctgacttaaaaatcaaactggcagtgcgaatggataaaccagcacatatgaagcatagtggatatctgtatgcccttggacagaaggtttggaaaagatggaaaaaacgttactttgttctagttcaggttagccaatatacctttgctatgtgcagttatagagaaaagaagtctgaaccacaagaattaatgcagcttgaaggctatactgtggattataccgatccccacccaggccttcagggtggttgtatgttctttaatgctgttaaagaaggagatactgtaatctttgccagtgatgatgaacaggacagaatattatgggttcaagccatgtatagggccacaggtcaatcatataaaccagttcctgcaattcaaacccagaaactgaatcctaaaggaggaactctccatgcagatgctcagctttatgcagatcgttttcagaaacatggtatggatgagtttatttctgcaaacccctgcaagcttgatcatgccttcctttttagaatactccagaggcagactttggatcacagactgaatgattcctattcttgcttgggatggtttagccctggccaagtctttgtgttagatgagtactgtgcccgttatggtgtgagaggctgtcacagacatctctgctaccttgcagaactgatggaacattcagaaaatggtgctgtcattgaccctaccctgctccattacagctttgcattctgtgcctctcatgtgcacggcaacaggcctgatggaattgggactgtttcagtggaagaaaaagaaagatttgaggagataaaagagagactctcttcccttttagaaaatcagataagccatttcagatactgttttccctttggacgacctgaaggtgctctaaaagctacactttcattacttgaaagggttttaatgaaagatattgccactcccataccagcagaagaggtgaagaaagtggtcagaaaatgtctcgagaaagctgccttgatcaattacactagactcacagaatatgccaaaatagaagagaccatgaaccaggcatctcctgctagaaagctggaagagattcttcatctggcagagctctgcatagaagtcttacagcagaatgaagagcatcatgcagaggcatttgcctggtggcctgatttattggctgaacatgcagagaaattttgggctttatttacagtggatatggacactgcactagaggctcaaccgcaagactcctgggatagttttcctcttttccaactgcttaataatttcctccgaaatgacacacttttgtgtaatggaaaatttcacaaacacttgcaagaaatctttgtacccttggttgtccgctatgtggatctcatggagtcttccatcgcccagtcaattcacagaggttttgagcaggagacatggcagcctgtcaacaatggctcagcaacatcagaagaccttttttggaagcttgatgcactgcaaatgtttgtctttgatctgcactggccagaacaggaatttgcccaccacttagagcaaagacttaaactaatggccagtgatatgctagaggcctgtgtcaaaagaacaagaactgcatttgaactcaagctacaaaaggcaagcaaaacaactgacttgcgcattccagcttccgtttgcactatgtttaatgtattagtcgatgccaaaaagcaaagcaccaaactctgtgccctggatggaggacaagagtttggtagtcaatggcaacagtaccattcaaaaatagatgatctgatcgacaacagtgtaaaagaaatcatttcactgttagtttcaaagtttgtttcagtgttggaaggcgtgttgtctaagctgtcaaggtatgatgaaggcactttcttttcatccattctgtcattcactgtgaaagcagctgcaaaatatgttgatgttccaaaaccaggaatggatctggcagacacctatattatgtttgttcggcaaaaccaagatattcttcgagaaaaggtcaatgaggaaatgtatatagaaaagttatttgatcaatggtacagcagttccatgaaagtcatttgcgtgtggttgactgatagattagacctccaactccatatttaccagctgaagacgctcatcaagattgtgaagaaaacctacagggactttcgattgcagggtgtgttggaaggaacactgaacagtaagacttatgatactgtgcacagacgtttaacagtagaggaggccacagcctctgtttcagaaggaggaggacttcagggcattactatgaaagacagtgacgaagaagaagaaggctgatatcacacagctttgcagaaggaaggaagaccttgatcgacattgttttttatttttttaaccttgtccttgtaattacattcattgtttgttttggccaaataaaaatgcttgtatttctttaaaaagtaagcctgaatgtagagtaaaaggggaaatgccaagattttggggtttttttgtttcctttttttgtttgtttgtttgtttgtttttttggagaagagcatcctcttttgtgtagtttgacctaaaaatgaaccttggctctgcttgtgatcagaacatgaacttttttttttaaagaagatttgagcatttttctgtaatcacatcaaaatgatgttttctgtgtaaagcgagatacatatttctcataatgcagcattgtgagaagtcagttcggaccactgcaccaacactgtcgtatccttgttaaaatggtgtgtaccttacaaattataatttatgtgccaggttcgttttgtacttaatttgctattattgtgatgtgtataaaatctttaatcttggttcttagtactttgaattggtctacaggtatattcctgggatgaaaggattgccaaacccaaatatagactagattatccaatgggtttgtgtctttgttccattctcaacatttcttctttcaactataagtaatccccaggtgtggggtagcaagtgtgcttccgtcaagataccatattctcctgctccagtataacagcttgcaggcaataaaaatctatttgctcataactacttctgtatttattagacttatatagagcaaatgcagtaaaagaggtttgcagtgtttcaaacatccc

SEQ ID NO: 23649 - DNA, 3768 bp, Artificial Sequence
  derived and/or modified sequence
atgctggaccccagcagcagcgaggaggagagcgacgagggcctggaggaggagagcagagacgtgctggtggccgccggcagcagccagagagccccccccgcccccaccagagagggcagaagagacgcccccggcagagccggcggcggcggcgccgccagaagcgtgagccccagccccagcgtgctgagcgagggcagagacgagccccagagacagctggacgacgagcaggagagaagaatcagactgcagctgtacgtgttcgtggtgagatgcatcgcctaccccttcaacgccaagcagcccaccgacatggccagaagacagcagaagctgaacaagcagcagctgcagctgctgaaggagagattccaggccttcctgaacggcgagacccagatcgtggccgacgaggccttctgcaacgccgtgagaagctactacgaggtgttcctgaagagcgacagagtggccagaatggtgcagagcggcggctgcagcgccaacgacttcagagaggtgttcaagaagaacatcgagaagagagtgagaagcctgcccgagatcgacggcctgagcaaggagaccgtgctgagcagctggatcgccaagtacgacgccatctacagaggcgaggaggacctgtgcaagcagcccaacagaatggccctgagcgccgtgagcgagctgatcctgagcaaggagcagctgtacgagatgttccagcagatcctgggcatcaagaagctggagcaccagctgctgtacaacgcctgccagctggacaacgccgacgagcaggccgcccagatcagaagagagctggacggcagactgcagctggccgacaagatggccaaggagagaaagttccccaagttcatcgccaaggacatggagaacatgtacatcgaggagctgagaagcagcgtgaacctgctgatggccaacctggagagcctgcccgtgagcaagggcggccccgagttcaagctgcagaagctgaagagaagccagaacagcgccttcctggacatcggcgacgagaacgagatccagctgagcaagagcgacgtggtgctgagcttcaccctggagatcgtgatcatggaggtgcagggcctgaagagcgtggcccccaacagaatcgtgtactgcaccatggaggtggagggcgagaagctgcagaccgaccaggccgaggccagcagaccccagtggggcacccagggcgacttcaccaccacccaccccagacccgtggtgaaggtgaagctgttcaccgagagcaccggcgtgctggccctggaggacaaggagctgggcagagtgatcctgtaccccaccagcaacagcagcaagagcgccgagctgcacagaatggtggtgcccaagaacagccaggacagcgacctgaagatcaagctggccgtgagaatggacaagcccgcccacatgaagcacagcggctacctgtacgccctgggccagaaggtgtggaagagatggaagaagagatacttcgtgctggtgcaggtgagccagtacaccttcgccatgtgcagctacagagagaagaagagcgagccccaggagctgatgcagctggagggctacaccgtggactacaccgacccccaccccggcctgcagggcggctgcatgttcttcaacgccgtgaaggagggcgacaccgtgatcttcgccagcgacgacgagcaggacagaatcctgtgggtgcaggccatgtacagagccaccggccagagctacaagcccgtgcccgccatccagacccagaagctgaaccccaagggcggcaccctgcacgccgacgcccagctgtacgccgacagattccagaagcacggcatggacgagttcatcagcgccaacccctgcaagctggaccacgccttcctgttcagaatcctgcagagacagaccctggaccacagactgaacgacagctacagctgcctgggctggttcagccccggccaggtgttcgtgctggacgagtactgcgccagatacggcgtgagaggctgccacagacacctgtgctacctggccgagctgatggagcacagcgagaacggcgccgtgatcgaccccaccctgctgcactacagcttcgccttctgcgccagccacgtgcacggcaacagacccgacggcatcggcaccgtgagcgtggaggagaaggagagattcgaggagatcaaggagagactgagcagcctgctggagaaccagatcagccacttcagatactgcttccccttcggcagacccgagggcgccctgaaggccaccctgagcctgctggagagagtgctgatgaaggacatcgccacccccatccccgccgaggaggtgaagaaggtggtgagaaagtgcctggagaaggccgccctgatcaactacaccagactgaccgagtacgccaagatcgaggagaccatgaaccaggccagccccgccagaaagctggaggagatcctgcacctggccgagctgtgcatcgaggtgctgcagcagaacgaggagcaccacgccgaggccttcgcctggtggcccgacctgctggccgagcacgccgagaagttctgggccctgttcaccgtggacatggacaccgccctggaggcccagccccaggacagctgggacagcttccccctgttccagctgctgaacaacttcctgagaaacgacaccctgctgtgcaacggcaagttccacaagcacctgcaggagatcttcgtgcccctggtggtgagatacgtggacctgatggagagcagcatcgcccagagcatccacagaggcttcgagcaggagacctggcagcccgtgaacaacggcagcgccaccagcgaggacctgttctggaagctggacgccctgcagatgttcgtgttcgacctgcactggcccgagcaggagttcgcccaccacctggagcagagactgaagctgatggccagcgacatgctggaggcctgcgtgaagagaaccagaaccgccttcgagctgaagctgcagaaggccagcaagaccaccgacctgagaatccccgccagcgtgtgcaccatgttcaacgtgctggtggacgccaagaagcagagcaccaagctgtgcgccctggacggcggccaggaggtgtgcagaatcttccagcagtaccacagcaagatcgacgacctgatcgacaacagcgtgaaggagatcatcagcctgctggtgagcaagttcgtgagcgtgctggagggcgtgctgagcaagctgagcagatacgacgagggcaccttcttcagcagcatcctgagcttcaccgtgaaggccgccgccaagtacgtggacgtgcccaagcccggcatggacctggccgacacctacatcatgttcgtgagacagaaccaggacatcctgagagagaaggtgaacgaggagatgtacatcgagaagctgttcgaccagtggtacagcagcagcatgaaggtgatctgcgtgtggctgaccgacagactggacctgcagctgcacatctaccagctgaagaccctgatcaagatcgtgaagaagacctacagagacttcagactgcagggcgtgctggagggcaccctgaacagcaagacctacgacaccgtgcacagaagactgaccgtggaggaggccaccgccagcgtgagcgagggcggcggcctgcagggcatcaccatgaaggacagcgacgaggaggaggagggctag

SEQ ID NO: 23650 - DNA, 3768 bp, Artificial Sequence
  derived and/or modified sequence
atgctggaccccagcagcagcgaggaggagagcgacgagggcctggaggaggagagcagagacgtgctggtggccgccggcagcagccagagagccccccccgcccccaccagagagggcagaagagacgcccccggcagagccggcggcggcggcgccgccagaagcgtgagccccagccccagcgtgctgagcgagggcagagacgagccccagagacagctggacgacgagcaggagagaagaatcagactgcagctgtacgtgttcgtggtgagatgcatcgcctaccccttcaacgccaagcagcccaccgacatggccagaagacagcagaagctgaacaagcagcagctgcagctgctgaaggagagattccaggccttcctgaacggcgagacccagatcgtggccgacgaggccttctgcaacgccgtgagaagctactacgaggtgttcctgaagagcgacagagtggccagaatggtgcagagcggcggctgcagcgccaacgacttcagagaggtgttcaagaagaacatcgagaagagagtgagaagcctgcccgagatcgacggcctgagcaaggagaccgtgctgagcagctggatcgccaagtacgacgccatctacagaggcgaggaggacctgtgcaagcagcccaacagaatggccctgagcgccgtgagcgagctgatcctgagcaaggagcagctgtacgagatgttccagcagatcctgggcatcaagaagctggagcaccagctgctgtacaacgcctgccagctggacaacgccgacgagcaggccgcccagatcagaagagagctggacggcagactgcagctggccgacaagatggccaaggagagaaagttccccaagttcatcgccaaggacatggagaacatgtacatcgaggagctgagaagcagcgtgaacctgctgatggccaacctggagagcctgcccgtgagcaagggcggccccgagttcaagctgcagaagctgaagagaagccagaacagcgccttcctggacatcggcgacgagaacgagatccagctgagcaagagcgacgtggtgctgagcttcaccctggagatcgtgatcatggaggtgcagggcctgaagagcgtggcccccaacagaatcgtgtactgcaccatggaggtggagggcgagaagctgcagaccgaccaggccgaggccagcagaccccagtggggcacccagggcgacttcaccaccacccaccccagacccgtggtgaaggtgaagctgttcaccgagagcaccggcgtgctggccctggaggacaaggagctgggcagagtgatcctgtaccccaccagcaacagcagcaagagcgccgagctgcacagaatggtggtgcccaagaacagccaggacagcgacctgaagatcaagctggccgtgagaatggacaagcccgcccacatgaagcacagcggctacctgtacgccctgggccagaaggtgtggaagagatggaagaagagatacttcgtgctggtgcaggtgagccagtacaccttcgccatgtgcagctacagagagaagaagagcgagccccaggagctgatgcagctggagggctacaccgtggactacaccgacccccaccccggcctgcagggcggctgcatgttcttcaacgccgtgaaggagggcgacaccgtgatcttcgccagcgacgacgagcaggacagaatcctgtgggtgcaggccatgtacagagccaccggccagagctacaagcccgtgcccgccatccagacccagaagctgaaccccaagggcggcaccctgcacgccgacgcccagctgtacgccgacagattccagaagcacggcatggacgagttcatcagcgccaacccctgcaagctggaccacgccttcctgttcagaatcctgcagagacagaccctggaccacagactgaacgacagctacagctgcctgggctggttcagccccggccaggtgttcgtgctggacgagtactgcgccagatacggcgtgagaggctgccacagacacctgtgctacctggccgagctgatggagcacagcgagaacggcgccgtgatcgaccccaccctgctgcactacagcttcgccttctgcgccagccacgtgcacggcaacagacccgacggcatcggcaccgtgagcgtggaggagaaggagagattcgaggagatcaaggagagactgagcagcctgctggagaaccagatcagccacttcagatactgcttccccttcggcagacccgagggcgccctgaaggccaccctgagcctgctggagagagtgctgatgaaggacatcgccacccccatccccgccgaggaggtgaagaaggtggtgagaaagtgcctggagaaggccgccctgatcaactacaccagactgaccgagtacgccaagatcgaggagaccatgaaccaggccagccccgccagaaagctggaggagatcctgcacctggccgagctgtgcatcgaggtgctgcagcagaacgaggagcaccacgccgaggccttcgcctggtggcccgacctgctggccgagcacgccgagaagttctgggccctgttcaccgtggacatggacaccgccctggaggcccagccccaggacagctgggacagcttccccctgttccagctgctgaacaacttcctgagaaacgacaccctgctgtgcaacggcaagttccacaagcacctgcaggagatcttcgtgcccctggtggtgagatacgtggacctgatggagagcagcatcgcccagagcatccacagaggcttcgagcaggagacctggcagcccgtgaacaacggcagcgccaccagcgaggacctgttctggaagctggacgccctgcagatgttcgtgttcgacctgcactggcccgagcaggagttcgcccaccacctggagcagagactgaagctgatggccagcgacatgctggaggcctgcgtgaagagaaccagaaccgccttcgagctgaagctgcagaaggccagcaagaccaccgacctgagaatccccgccagcgtgtgcaccatgttcaacgtgctggtggacgccaagaagcagagcaccaagctgtgcgccctggacggcggccaggagttcggcagccagtggcagcagtaccacagcaagatcgacgacctgatcgacaacagcgtgaaggagatcatcagcctgctggtgagcaagttcgtgagcgtgctggagggcgtgctgagcaagctgagcagatacgacgagggcaccttcttcagcagcatcctgagcttcaccgtgaaggccgccgccaagtacgtggacgtgcccaagcccggcatggacctggccgacacctacatcatgttcgtgagacagaaccaggacatcctgagagagaaggtgaacgaggagatgtacatcgagaagctgttcgaccagtggtacagcagcagcatgaaggtgatctgcgtgtggctgaccgacagactggacctgcagctgcacatctaccagctgaagaccctgatcaagatcgtgaagaagacctacagagacttcagactgcagggcgtgctggagggcaccctgaacagcaagacctacgacaccgtgcacagaagactgaccgtggaggaggccaccgccagcgtgagcgagggcggcggcctgcagggcatcaccatgaaggacagcgacgaggaggaggagggctag

SEQ ID NO: 23651 - DNA, 3669 bp, Artificial Sequence
  derived and/or modified sequence
atgctggaccccagcagcagcgaggaggagagcgacgagggcctggaggaggagagcagagacgtgctggtggccgccggcagcagccagagagccccccccgcccccaccagagagggccagctggacgacgagcaggagagaagaatcagactgcagctgtacgtgttcgtggtgagatgcatcgcctaccccttcaacgccaagcagcccaccgacatggccagaagacagcagaagctgaacaagcagcagctgcagctgctgaaggagagattccaggccttcctgaacggcgagacccagatcgtggccgacgaggccttctgcaacgccgtgagaagctactacgaggtgttcctgaagagcgacagagtggccagaatggtgcagagcggcggctgcagcgccaacgacttcagagaggtgttcaagaagaacatcgagaagagagtgagaagcctgcccgagatcgacggcctgagcaaggagaccgtgctgagcagctggatcgccaagtacgacgccatctacagaggcgaggaggacctgtgcaagcagcccaacagaatggccctgagcgccgtgagcgagctgatcctgagcaaggagcagctgtacgagatgttccagcagatcctgggcatcaagaagctggagcaccagctgctgtacaacgcctgccagctggacaacgccgacgagcaggccgcccagatcagaagagagctggacggcagactgcagctggccgacaagatggccaaggagagaaagttccccaagttcatcgccaaggacatggagaacatgtacatcgaggagctgagaagcagcgtgaacctgctgatggccaacctggagagcctgcccgtgagcaagggcggccccgagttcaagctgcagaagctgaagagaagccagaacagcgccttcctggacatcggcgacgagaacgagatccagctgagcaagagcgacgtggtgctgagcttcaccctggagatcgtgatcatggaggtgcagggcctgaagagcgtggcccccaacagaatcgtgtactgcaccatggaggtggagggcgagaagctgcagaccgaccaggccgaggccagcagaccccagtggggcacccagggcgacttcaccaccacccaccccagacccgtggtgaaggtgaagctgttcaccgagagcaccggcgtgctggccctggaggacaaggagctgggcagagtgatcctgtaccccaccagcaacagcagcaagagcgccgagctgcacagaatggtggtgcccaagaacagccaggacagcgacctgaagatcaagctggccgtgagaatggacaagcccgcccacatgaagcacagcggctacctgtacgccctgggccagaaggtgtggaagagatggaagaagagatacttcgtgctggtgcaggtgagccagtacaccttcgccatgtgcagctacagagagaagaagagcgagccccaggagctgatgcagctggagggctacaccgtggactacaccgacccccaccccggcctgcagggcggctgcatgttcttcaacgccgtgaaggagggcgacaccgtgatcttcgccagcgacgacgagcaggacagaatcctgtgggtgcaggccatgtacagagccaccggccagagctacaagcccgtgcccgccatccagacccagaagctgaaccccaagggcggcaccctgcacgccgacgcccagctgtacgccgacagattccagaagcacggcatggacgagttcatcagcgccaacccctgcaagctggaccacgccttcctgttcagaatcctgcagagacagaccctggaccacagactgaacgacagctacagctgcctgggctggttcagccccggccaggtgttcgtgctggacgagtactgcgccagatacggcgtgagaggctgccacagacacctgtgctacctggccgagctgatggagcacagcgagaacggcgccgtgatcgaccccaccctgctgcactacagcttcgccttctgcgccagccacgtgcacggcaacagacccgacggcatcggcaccgtgagcgtggaggagaaggagagattcgaggagatcaaggagagactgagcagcctgctggagaaccagatcagccacttcagatactgcttccccttcggcagacccgagggcgccctgaaggccaccctgagcctgctggagagagtgctgatgaaggacatcgccacccccatccccgccgaggaggtgaagaaggtggtgagaaagtgcctggagaaggccgccctgatcaactacaccagactgaccgagtacgccaagatcgaggagaccatgaaccaggccagccccgccagaaagctggaggagatcctgcacctggccgagctgtgcatcgaggtgctgcagcagaacgaggagcaccacgccgaggccttcgcctggtggcccgacctgctggccgagcacgccgagaagttctgggccctgttcaccgtggacatggacaccgccctggaggcccagccccaggacagctgggacagcttccccctgttccagctgctgaacaacttcctgagaaacgacaccctgctgtgcaacggcaagttccacaagcacctgcaggagatcttcgtgcccctggtggtgagatacgtggacctgatggagagcagcatcgcccagagcatccacagaggcttcgagcaggagacctggcagcccgtgaacaacggcagcgccaccagcgaggacctgttctggaagctggacgccctgcagatgttcgtgttcgacctgcactggcccgagcaggagttcgcccaccacctggagcagagactgaagctgatggccagcgacatgctggaggcctgcgtgaagagaaccagaaccgccttcgagctgaagctgcagaaggccagcaagaccaccgacctgagaatccccgccagcgtgtgcaccatgttcaacgtgctggtggacgccaagaagcagagcaccaagctgtgcgccctggacggcggccaggagttcggcagccagtggcagcagtaccacagcaagatcgacgacctgatcgacaacagcgtgaaggagatcatcagcctgctggtgagcaagttcgtgagcgtgctggagggcgtgctgagcaagctgagcagatacgacgagggcaccttcttcagcagcatcctgagcttcaccgtgaaggccgccgccaagtacgtggacgtgcccaagcccggcatggacctggccgacacctacatcatgttcgtgagacagaaccaggacatcctgagagagaaggtgaacgaggagatgtacatcgagaagctgttcgaccagtggtacagcagcagcatgaaggtgatctgcgtgtggctgaccgacagactggacctgcagctgcacatctaccagctgaagaccctgatcaagatcgtgaagaagacctacagagacttcagactgcagggcgtgctggagggcaccctgaacagcaagacctacgacaccgtgcacagaagactgaccgtggaggaggccaccgccagcgtgagcgagggcggcggcctgcagggcatcaccatgaaggacagcgacgaggaggaggagggctag

SEQ ID NO: 23652 - protein, 342 aa, Artificial Sequence
  derived and/or modified sequence
MAGSGGLGGGAGGGQGAGAGQGAALRASRAPMLLVALVLGAYCLCALPGRCPPAARAPAPAPAPSEPSSSVHRPGAPGLPLASGPGRRRFPQALIVGVKKGGTRALLEFLRLHPDVRALGSEPHFFDRCYERGLAWYRSLMPRTLDGQITMEKTPSYFVTREAPRRIHAMSPDTKLIVVVRNPVTRAISDYAQTLSKTPGLPSFRALAFRHGLGPVDTAWSAVRIGLYAQHLDHWLRYFPLSHFLFVSGERLVSDPAGEVGRVQDFLGLKRVVTDKHFYFNATKGFPCLKKAQGGSRPRCLGKSKGRPHPRVPQALVRRLQEFYRPFNRRFYQMTGQDFGWG

SEQ ID NO: 23653 - protein, 311 aa, Artificial Sequence
  derived and/or modified sequence
MLLVALVLGAYCLCALPGRCPPAARAPAPAPAPSEPSSSVHRPGAPGLPLASGPGRRRFPQALIVGVKKGGTRALLEFLRLHPDVRALGSEPHFFDRCYERGLAWYRSLMPRTLDGQITMEKTPSYFVTREAPRRIHAMSPDTKLIVVVRNPVTRAISDYAQTLSKTPGLPSFRALAFRHGLGPVDTAWSAVRIGLYAQHLDHWLRYFPLSHFLFVSGERLVSDPAGEVGRVQDFLGLKRVVTDKHFYFNATKGFPCLKKAQGGSRPRCLGKSKGRPHPRVPQALVRRLQEFYRPFNRRFYQMTGQDFGWG

SEQ ID NO: 23654 - protein, 381 aa, Artificial Sequence
  derived and/or modified sequence
AAGPPGAEHKPGTHGLSGARAEMRARLLPPLPGLERRDPMAGSGGLGGGAGGGQGAGAGQGAALRASRAPMLLVALVLGAYCLCALPGRCPPAARAPAPAPAPSEPSSSVHRPGAPGLPLASGPGRRRFPQALIVGVKKGGTRALLEFLRLHPDVRALGSEPHFFDRCYERGLAWYRSLMPRTLDGQITMEKTPSYFVTREAPRRIHAMSPDTKLIVVVRNPVTRAISDYAQTLSKTPGLPSFRALAFRHGLGPVDTAWSAVRIGLYAQHLDHWLRYFPLSHFLFVSGERLVSDPAGEVGRVQDFLGLKRVVTDKHFYFNATKGFPCLKKAQGGSRPRCLGKSKGRPHPRVPQALVRRLQEFYRPFNRRFYQMTGQDFGWG

SEQ ID NO: 23655 - DNA, 1029 bp, Artificial Sequence
  derived and/or modified sequence
atggccggcagcggcggcctgggcggcggcgccggcggcggccagggcgccggcgccggccagggcgccgccctgagagccagcagagcccccatgctgctggtggccctggtgctgggcgcctactgcctgtgcgccctgcccggcagatgcccccccgccgccagagcccccgcccccgcccccgcccccagcgagcccagcagcagcgtgcacagacccggcgcccccggcctgcccctggccagcggccccggcagaagaagattcccccaggccctgatcgtgggcgtgaagaagggcggcaccagagccctgctggagttcctgagactgcaccccgacgtgagagccctgggcagcgagccccacttcttcgacagatgctacgagagaggcctggcctggtacagaagcctgatgcccagaaccctggacggccagatcaccatggagaagacccccagctacttcgtgaccagagaggcccccagaagaatccacgccatgagccccgacaccaagctgatcgtggtggtgagaaaccccgtgaccagagccatcagcgactacgcccagaccctgagcaagacccccggcctgcccagcttcagagccctggccttcagacacggcctgggccccgtggacaccgcctggagcgccgtgagaatcggcctgtacgcccagcacctggaccactggctgagatacttccccctgagccacttcctgttcgtgagcggcgagagactggtgagcgaccccgccggcgaggtgggcagagtgcaggacttcctgggcctgaagagagtggtgaccgacaagcacttctacttcaacgccaccaagggcttcccctgcctgaagaaggcccagggcggcagcagacccagatgcctgggcaagagcaagggcagaccccaccccagagtgccccaggccctggtgagaagactgcaggagttctacagacccttcaacagaagattctaccagatgaccggccaggacttcggctggggctag

SEQ ID NO: 23656 - DNA, 936 bp, Artificial Sequence
  derived and/or modified sequence
atgctgctggtggccctggtgctgggcgcctactgcctgtgcgccctgcccggcagatgcccccccgccgccagagcccccgcccccgcccccgcccccagcgagcccagcagcagcgtgcacagacccggcgcccccggcctgcccctggccagcggccccggcagaagaagattcccccaggccctgatcgtgggcgtgaagaagggcggcaccagagccctgctggagttcctgagactgcaccccgacgtgagagccctgggcagcgagccccacttcttcgacagatgctacgagagaggcctggcctggtacagaagcctgatgcccagaaccctggacggccagatcaccatggagaagacccccagctacttcgtgaccagagaggcccccagaagaatccacgccatgagccccgacaccaagctgatcgtggtggtgagaaaccccgtgaccagagccatcagcgactacgcccagaccctgagcaagacccccggcctgcccagcttcagagccctggccttcagacacggcctgggccccgtggacaccgcctggagcgccgtgagaatcggcctgtacgcccagcacctggaccactggctgagatacttccccctgagccacttcctgttcgtgagcggcgagagactggtgagcgaccccgccggcgaggtgggcagagtgcaggacttcctgggcctgaagagagtggtgaccgacaagcacttctacttcaacgccaccaagggcttcccctgcctgaagaaggcccagggcggcagcagacccagatgcctgggcaagagcaagggcagaccccaccccagagtgccccaggccctggtgagaagactgcaggagttctacagacccttcaacagaagattctaccagatgaccggccaggacttcggctggggctag

SEQ ID NO: 23657 - DNA, 1146 bp, Artificial Sequence
  derived and/or modified sequence
gccgccggcccccccggcgccgagcacaagcccggcacccacggcctgagcggcgccagagccgagatgagagccagactgctgccccccctgcccggcctggagagaagagaccccatggccggcagcggcggcctgggcggcggcgccggcggcggccagggcgccggcgccggccagggcgccgccctgagagccagcagagcccccatgctgctggtggccctggtgctgggcgcctactgcctgtgcgccctgcccggcagatgcccccccgccgccagagcccccgcccccgcccccgcccccagcgagcccagcagcagcgtgcacagacccggcgcccccggcctgcccctggccagcggccccggcagaagaagattcccccaggccctgatcgtgggcgtgaagaagggcggcaccagagccctgctggagttcctgagactgcaccccgacgtgagagccctgggcagcgagccccacttcttcgacagatgctacgagagaggcctggcctggtacagaagcctgatgcccagaaccctggacggccagatcaccatggagaagacccccagctacttcgtgaccagagaggcccccagaagaatccacgccatgagccccgacaccaagctgatcgtggtggtgagaaaccccgtgaccagagccatcagcgactacgcccagaccctgagcaagacccccggcctgcccagcttcagagccctggccttcagacacggcctgggccccgtggacaccgcctggagcgccgtgagaatcggcctgtacgcccagcacctggaccactggctgagatacttccccctgagccacttcctgttcgtgagcggcgagagactggtgagcgaccccgccggcgaggtgggcagagtgcaggacttcctgggcctgaagagagtggtgaccgacaagcacttctacttcaacgccaccaagggcttcccctgcctgaagaaggcccagggcggcagcagacccagatgcctgggcaagagcaagggcagaccccaccccagagtgccccaggccctggtgagaagactgcaggagttctacagacccttcaacagaagattctaccagatgaccggccaggacttcggctggggctag

SEQ ID NO: 23658 - DNA, 1029 bp, Artificial Sequence
  derived and/or modified sequence
atggccgggtccggcggcttgggtggcggagccggaggaggtcagggagccggcgcaggacagggcgcagctctgcgcgcaagcagggcaccaatgcttctcgtagccctcgtcctgggagcctattgcttgtgcgccctgcccggcagatgccctcctgctgcacgggccccggctccggcccctgcccccagcgagccttccagctccgttcaccggcctggggccccgggcctgcctctggcatccggacccggaaggagaagattccctcaggcactcattgtcggagtcaagaaggggggcaccagagccctactagagtttctgcgcctgcaccctgatgtaagagccctgggaagcgaaccccatttctttgatcgttgctacgagagaggcctagcctggtacagaagcctaatgcccaggactctggatgggcagatcacgatggaaaagaccccatcatacttcgtcactcgcgaggctccaagacgcatacatgccatgtcacctgatactaaactcatagtcgtcgtgcggaaccccgtcactagagcgatttccgattacgcgcagacgctgagtaaaactccaggcctgccctccttccgggctcttgcttttagacatgggctcggccctgtcgacaccgcctggtccgctgttcgtatcggcctgtatgctcagcatttggatcactggcttcgttacttcccgttgtcacattttctctttgttagtggcgagcgtttggtgtctgaccctgcgggagaggtgggacgcgtacaggatttcctcggtcttaagagggtggtgacagacaagcacttttacttcaacgccaccaagggcttcccttgtctcaaaaaggctcagggtgggagtagaccaaggtgtttggggaagtccaaagggaggccccacccaagggtgcctcaggccctagtcagacggctgcaggagttttaccggccattcaatcggaggttttatcaaatgacaggccaggacttcggttggggttag

SEQ ID NO: 23659 - DNA, 936 bp, Artificial Sequence
  derived and/or modified sequence
atgcttctggttgcactcgttttgggagcttactgcctgtgtgctctgcctgggagatgcccacccgcggcccgcgcgcccgcaccagcgccagccccgagcgagccaagcagctccgtgcaccgacccggtgcgcctgggttgccattagcctccgggcccggcagaaggaggtttcctcaggctttaatcgtaggcgtcaagaagggaggcactcgagcgctcctagagttcctgcggcttcacccagacgtgcgggctctgggctcagagccacacttcttcgataggtgctacgagcgcggactggcttggtatcggagccttatgccccgaactctggatgggcagattaccatggaaaaaactccgtcctatttcgttacaagggaggcccccagacggatacacgccatgtcccctgatacgaagctcattgtggtggtgcggaaccctgtgacccgcgcgatctctgattacgcccagacactgtccaaaaccccagggttaccttcattccgagctctcgcattccgacacgggctggggccagtggatacagcctggtccgccgtccgcattgggctttacgctcaacacttggatcattggctccgttactttcccctgtcccacttcttatttgtgagtggagaacgactggtcagcgaccccgcgggggaggtcgggcgcgtccaggatttcctgggcctcaagcgggtggtgacagacaagcatttttattttaatgctacaaagggcttcccatgcctgaagaaagctcaaggaggaagccgcccaagatgtctgggaaagtccaagggcagacctcaccctagggtaccccaggctcttgtccgccggttgcaggaattctacagaccctttaaccggcgcttctaccagatgacgggccaggatttcggttggggttag

SEQ ID NO: 23660 - DNA, 1146 bp, Artificial Sequence
  derived and/or modified sequence
gccgcaggacccccaggtgctgagcacaaaccaggaacacatgggttgtcaggtgctcgcgctgagatgagagcccggttactgccacctctgccaggtctggagcgtcgggacccaatggcaggcagcggcggacttggtggcggagccggaggcggccagggggccggtgccggacagggcgctgccttacgtgcctcacgggcgcccatgcttctggtggccctggtgctgggcgcatactgcctgtgtgctttacccggaaggtgcccgccggccgccagggctcccgcccctgctccagctccatctgagccctctagcagcgtgcatcgcccgggcgctccggggcttccactcgcaagtggccccggccggaggcgcttcccacaggcactgattgtgggggtgaagaaagggggaactcgagcactgttggagtttttgagactgcaccctgacgtacgggctctcggctccgagccgcattttttcgatcggtgttacgaacggggactggcctggtatagatcactgatgcctaggactctagatggacagatcacgatggaaaagacccccagttatttcgtgaccagggaagcgcctaggaggattcacgccatgtctccggacacaaaactgatcgtagtggtgaggaatcctgtcactagggctatctcggattacgcccagactctctcaaagaccccaggtctaccctctttcagggccctggcgtttcgacatggactggggccagttgacactgcctggtcagccgtcaggatcgggttatacgcgcagcatctggatcattggttgaggtattttcctctttcgcactttctgtttgtttctggagagcggctggtttctgaccccgccggcgaagttggaagagttcaggactttcttggccttaagcgcgtggtgacggataaacacttctattttaacgccaccaagggattcccctgtctgaagaaggcccaaggaggcagtcgccctcgttgtttaggcaagtctaaggggcgcccgcatccgcgtgttccccaggccctggtgcgccgcctccaggagttttatagaccatttaacagaagattctaccagatgaccggacaagactttggctggggctag

SEQ ID NO: 23661 - DNA, 1156 bp, Artificial Sequence
  derived and/or modified sequence
atggcaggtagcggcggcctgggcggcggggccgggggcggccagggcgcaggggccgggcaaggggccgctctgcgggcgtcccgcgcgccgatgctgctcgtggccctggtgctcggcgcctactgcctctgcgccctccccggccgctgcccgccggccgcccgcgcccccgcgccggcccccgcgccctccgagccgtccagctccgtccaccgcccgggagcacccggcctgcctttggccagcggtcccggccgccggcgcttcccgcaagcgctcatcgttggcgtgaagaagggcggcacgcgcgccctgctggagtttctgcggctgcaccccgacgtccgcgcgctgggctctgagccccacttcttcgacaggtgctacgagcgcggcctcgcctggtaccggagtctgatgccccgaaccctggatgggcagatcaccatggagaagacccccagctacttcgtgacgcgagaggccccccgccgcatccacgccatgtccccggacacgaagctgatcgtggtggtgcggaaccccgtgacccgggccatctccgactacgcccagacgctctccaagaccccgggcctgcccagcttccgcgccctggccttccgccacggcctgggccccgtggacacagcctggagcgccgtccgcatcggcctgtacgcccagcacctggaccactggctgcgctacttccccctgtcccacttcctgttcgtcagcggggagcgtctggtcagcgacccggccggagaggtcggccgcgtgcaggacttcctgggcctgaaacgggtcgtcacggacaagcacttctacttcaacgccaccaagggcttcccctgcctcaagaaggcccagggcggcagccgtccccgctgcctgggcaagtccaagggccggccacacccacgcgtgccccaggccctggtccggcgcctgcaggagttctaccggcccttcaaccgcaggttctaccagatgacgggccaggacttcggctggggctgagcggcaccctggggatgctcagcaccttgattgacacccgctcgcctggccagagcgggctgcgtgcacatgctgggcagagaggaatatttaagaaataaagcttggacccagatttttccacaaa

SEQ ID NO: 23662 - DNA, 1063 bp, Artificial Sequence
  derived and/or modified sequence
atgctgctcgtggccctggtgctcggcgcctactgcctctgcgccctccccggccgctgcccgccggccgcccgcgcccccgcgccggcccccgcgccctccgagccgtccagctccgtccaccgcccgggagcacccggcctgcctttggccagcggtcccggccgccggcgcttcccgcaagcgctcatcgttggcgtgaagaagggcggcacgcgcgccctgctggagtttctgcggctgcaccccgacgtccgcgcgctgggctctgagccccacttcttcgacaggtgctacgagcgcggcctcgcctggtaccggagtctgatgccccgaaccctggatgggcagatcaccatggagaagacccccagctacttcgtgacgcgagaggccccccgccgcatccacgccatgtccccggacacgaagctgatcgtggtggtgcggaaccccgtgacccgggccatctccgactacgcccagacgctctccaagaccccgggcctgcccagcttccgcgccctggccttccgccacggcctgggccccgtggacacagcctggagcgccgtccgcatcggcctgtacgcccagcacctggaccactggctgcgctacttccccctgtcccacttcctgttcgtcagcggggagcgtctggtcagcgacccggccggagaggtcggccgcgtgcaggacttcctgggcctgaaacgggtcgtcacggacaagcacttctacttcaacgccaccaagggcttcccctgcctcaagaaggcccagggcggcagccgtccccgctgcctgggcaagtccaagggccggccacacccacgcgtgccccaggccctggtccggcgcctgcaggagttctaccggcccttcaaccgcaggttctaccagatgacgggccaggacttcggctggggctgagcggcaccctggggatgctcagcaccttgattgacacccgctcgcctggccagagcgggctgcgtgcacatgctgggcagagaggaatatttaagaaataaagcttggacccagatttttccacaaa

SEQ ID NO: 23663 - DNA, 1146 bp, Artificial Sequence
  derived and/or modified sequence
gctgcgggaccgccgggcgcagagcacaagccgggcacccacggactgagcggcgcgcgggccgagatgcgcgcccgcctgctgcccccgctcccgggcctggagcggcgcgaccccatggcaggtagcggcggcctgggcggcggggccgggggcggccagggcgcaggggccgggcaaggggccgctctgcgggcgtcccgcgcgccgatgctgctcgtggccctggtgctcggcgcctactgcctctgcgccctccccggccgctgcccgccggccgcccgcgcccccgcgccggcccccgcgccctccgagccgtccagctccgtccaccgcccgggagcacccggcctgcctttggccagcggtcccggccgccggcgcttcccgcaagcgctcatcgttggcgtgaagaagggcggcacgcgcgccctgctggagtttctgcggctgcaccccgacgtccgcgcgctgggctctgagccccacttcttcgacaggtgctacgagcgcggcctcgcctggtaccggagtctgatgccccgaaccctggatgggcagatcaccatggagaagacccccagctacttcgtgacgcgagaggccccccgccgcatccacgccatgtccccggacacgaagctgatcgtggtggtgcggaaccccgtgacccgggccatctccgactacgcccagacgctctccaagaccccgggcctgcccagcttccgcgccctggccttccgccacggcctgggccccgtggacacagcctggagcgccgtccgcatcggcctgtacgcccagcacctggaccactggctgcgctacttccccctgtcccacttcctgttcgtcagcggggagcgtctggtcagcgacccggccggagaggtcggccgcgtgcaggacttcctgggcctgaaacgggtcgtcacggacaagcacttctacttcaacgccaccaagggcttcccctgcctcaagaaggcccagggcggcagccgtccccgctgcctgggcaagtccaagggccggccacacccacgcgtgccccaggccctggtccggcgcctgcaggagttctaccggcccttcaaccgcaggttctaccagatgacgggccaggacttcggctggggctga

SEQ ID NO: 23664 - DNA, 1029 bp, Artificial Sequence
  derived and/or modified sequence
atggccggcagcggcggcctgggcggcggggccggcggcggccagggcgctggggccggccagggcgccgccctgcgggccagccgggcccccatgctgctggtggccctggtgctgggcgcctactgcctgtgtgccctgcccggccgctgccccccagctgcccgggccccagccccagccccagcccccagcgagcccagcagctctgtgcacaggcctggggcccctggcctgcccctggccagcggccctggaagaagacgcttcccccaggccctgattgtgggcgtgaagaagggcggcacccgggccctgctggagttcctgcggctgcacccagatgtgcgggccctgggcagcgagccccacttctttgaccgctgctatgaaagaggcctggcctggtaccgcagcctgatgcccaggaccctggatggccagatcaccatggagaagacccccagctactttgtgacccgggaggccccccggcgcatccacgccatgagcccagacaccaagctgattgtggtggtgagaaatcctgtgacccgggccatcagtgactatgcccagaccctgagcaagaccccaggcctgcccagcttccgggccctggccttcagacatggcctgggccctgtggacacagcctggagcgctgtgagaattggcctgtatgcccagcacctggaccactggctgcgctacttccccctgagccacttcctgtttgtgtctggagagcggctggtgtctgaccctgctggggaggtgggccgggtgcaggacttcctgggcctgaagagggtggtgacagacaagcacttctacttcaatgccaccaagggcttcccctgcctgaagaaggcccagggcggcagccggccccgctgcctgggcaagagcaagggccggccccacccccgggtgccccaggccctggtgcggcggctgcaggagttctaccggcccttcaacagacgcttctaccagatgacaggccaggactttggctggggctag

SEQ ID NO: 23665 - DNA, 936 bp, Artificial Sequence
  derived and/or modified sequence
atgctgctggtggccctggtgctgggcgcctactgcctgtgtgccctgcccggccgctgccccccagctgcccgggccccagccccagccccagcccccagcgagcccagcagctctgtgcacaggcctggggcccctggcctgcccctggccagcggccctggaagaagacgcttcccccaggccctgattgtgggcgtgaagaagggcggcacccgggccctgctggagttcctgcggctgcacccagatgtgcgggccctgggcagcgagccccacttctttgaccgctgctatgagcggggcctggcctggtaccgcagcctgatgcccaggaccctggatggccagatcaccatggagaagacccccagctactttgtgacccgggaggccccccggcgcatccacgccatgagcccagacaccaagctgattgtggtggtgaggaaccctgtgacccgggccatcagtgactatgcccagaccctgagcaagaccccaggcctgcccagcttccgggccctggccttccgccacggcctgggccctgtggacacagcctggagcgctgtgcgcatcggcctgtatgcccagcacctggaccactggctgcgctacttccccctgagccacttcctgtttgtgtctggagagcggctggtgtctgaccctgctggggaggtgggccgggtgcaggacttcctgggcctgaagagggtggtgacagacaagcacttctacttcaatgccaccaagggcttcccctgcctgaagaaggcccagggcggcagccggccccgctgcctgggcaagagcaagggccggccccacccccgggtgccccaggccctggtgcggcggctgcaggagttctaccggcccttcaacagacgcttctaccagatgacaggccaggactttggctggggctag

SEQ ID NO: 23666 - DNA, 1146 bp, Artificial Sequence
  derived and/or modified sequence
gctgctggccccccaggagctgagcacaagccaggcacccacggcctgagcggggcccgggcagagatgagggcccggctgctgccccccctgcccggcctggagcggcgggaccccatggccggcagcggcggcctgggcggcggggccggcggcggccagggcgctggggccggccagggcgccgccctgcgggccagccgggcccccatgctgctggtggccctggtgctgggcgcctactgcctgtgtgccctgcccggccgctgccccccagctgcccgggccccagccccagccccagcccccagcgagcccagcagctctgtgcacaggcctggggcccctggcctgcccctggccagcggccctggaagaagacgcttcccccaggccctgattgtgggcgtgaagaagggcggcacccgggccctgctggagttcctgcggctgcacccagatgtgcgggccctgggcagcgagccccacttctttgaccgctgctatgagcggggcctggcctggtaccgcagcctgatgcccaggaccctggatggccagatcaccatggagaagacccccagctactttgtgacccgggaggccccccggcgcatccacgccatgagcccagacaccaagctgattgtggtggtgaggaaccctgtgacccgggccatcagtgactatgcccagaccctgagcaagaccccaggcctgcccagcttccgggccctggccttccgccacggcctgggccctgtggacacagcctggagcgctgtgcgcatcggcctgtatgcccagcacctggaccactggctgcgctacttccccctgagccacttcctgtttgtgtctggagagcggctggtgtctgaccctgctggggaggtgggccgggtgcaggacttcctgggcctgaagagggtggtgacagacaagcacttctacttcaatgccaccaagggcttcccctgcctgaagaaggcccagggcggcagccggccccgctgcctgggcaagagcaagggccggccccacccccgggtgccccaggccctggtgcggcggctgcaggagttctaccggcccttcaacagacgcttctaccagatgacaggccaggactttggctggggctag

SEQ ID NO: 23667 - DNA, 1029 bp, Artificial Sequence
  derived and/or modified sequence
atggccggcagcggcggcctgggcggcggcgccggcggcggccagggggctggcgcaggccagggcgcagctctgcgcgcatccagggcccctatgctgctggtcgctctggttctgggcgcttactgcttgtgcgcgctgcctgggcggtgtccacctgctgcccgggcacctgcccccgccccggcgccttcagagccaagctcctctgtacacagacccggcgcccctggacttcccttggcttcagggcctgggaggcgacggtttccccaggctttgatagttggggttaagaaagggggtacccgtgctcttctggagtttctgcgactccacccagatgtgcgagccctcggaagtgagccccacttttttgaccgctgctatgaacggggactggcttggtacagatccctgatgcctcgcacacttgatggccagataaccatggagaagacaccaagctactttgtgaccagagaggctccacggcgcatacatgccatgtctccagataccaagctgatcgtggttgtaagaaatcctgttaccagggcaatctctgactatgctcagactctgtctaaaacacctggactgccctcatttagggcgttagccttcagacatgggttggggcctgtggatactgcctggagtgcagtgcggatcggcctttacgcgcaacacttagaccattggctgaggtactttccgctgtcacatttcctgttcgtctcaggagaacgcctggtgagcgatcccgccggcgaggtcgggcgcgtgcaggactttctgggcctgaaacgcgtggtgaccgacaaacatttctacttcaacgccacgaaaggcttcccctgcttaaaaaaggcacaggggggcagcagacccaggtgtcttgggaagagcaaagggcggcctcacccccgagtgccgcaggctttagtgaggaggttgcaggaattctaccggccattcaaccgccgcttctaccagatgacaggtcaggattttggatgggggtag

SEQ ID NO: 23668 - DNA, 936 bp, Artificial Sequence
  derived and/or modified sequence
atgctgctggtggccctggtgctgggcgcctactgcctgtgcgccctccctggacgttgccctccagccgcccgggctcccgcacccgcaccagccccgtcagagccatcaagttcagtgcatcggcctggcgcccccgggctgcctctagcctctggcccagggaggcgcagatttccccaggcgctgatcgtgggcgttaagaagggcgggacaagagctctcttagagtttttaaggcttcacccagacgtcagggccctaggatcagaaccccattttttcgacagatgttatgagcggggactggcttggtatagaagcctaatgccacggacattggatggacaaataacgatggagaagacccccagctacttcgttaccagagaggcaccaaggagaatccacgcaatgtcaccagatacaaaactgatagttgtggtccgtaacccagtaacaagggccatctctgactatgcacagactctgtcaaagacacccgggctccccagtttccgcgcccttgccttccggcacggactgggcccagtggatacagcgtggtcagccgtcagaattggtctctacgcccagcatctcgaccactggctacgctacttcccattgtcacacttcttattcgtgtccggagagagactcgtgtcagaccccgccggggaagttggtcgggtccaggacttcctcgggttaaagcgagtcgtgactgacaagcatttctacttcaacgctaccaaaggttttccgtgtctaaaaaaagcacagggaggatcgcgcccaagatgcctcggcaagtccaagggtcgaccccacccgcgggtgcctcaggctctggtcaggcgtctgcaggagttttacagaccgtttaacaggaggttttatcaaatgacaggccaggattttggttggggctag

SEQ ID NO: 23669 - DNA, 1146 bp, Artificial Sequence
  derived and/or modified sequence
gccgccggcccccccggcgccgagcacaagcccggcacccacggcctgtcgggagctagggctgagatgcgggctaggctgttgcccccccttcctggcctggagcggcgggacccaatggcggggtctggaggattgggaggaggagccgggggcggccaaggcgccggcgccgggcagggggctgcgctacgtgctagccgagcgcccatgttgttagttgctctcgtcttaggcgcatattgcttgtgtgcccttcccgggcggtgtccccctgccgcacgggctccagcacccgcgcccgccccatccgagccttcctcatccgtacaccgaccaggtgccccagggctgcctctcgcgtcaggacccggccggaggaggttcccacaagcgctgatagtgggggtcaagaaaggcggtacgcgggccctgcttgaatttctgcgcctgcatcccgacgttcgcgcgctcgggtcagaacctcattttttcgaccgctgctacgaaagaggcctggcctggtatcgtagtcttatgcccaggacgctggacggccagatcactatggaaaagaccccctcttacttcgtgactagggaggccccaagaagaatccacgccatgagtcctgataccaagctaatcgtggtggtgcgaaaccccgtgacgcgtgcaatctccgactacgcacagactctctccaaaactcccgggttgccttccttccgcgccctagccttcaggcatggcctgggaccggtggatactgcctggagcgctgtgagaatcgggttgtatgcccagcacctcgaccattggctgaggtactttccattgagccacttcctttttgtctcaggcgagcgcctagttagtgatcctgccggcgaggttgggcgagtacaagactttctggggctcaaacgcgtggttaccgacaagcacttttatttcaatgctaccaaggggtttccatgcttgaaaaaagctcagggtggctcgaggcctaggtgcttaggtaagtccaaaggaaggccacatcccagagtgccccaggcgcttgtgcgccgacttcaagaattctacaggcctttcaatcgccggttctatcagatgactggtcaggattttggctggggatag

SEQ ID NO: 23670 - DNA, 1029 bp, Artificial Sequence
  derived and/or modified sequence
atggctgggagcggtggtctgggaggcggagccggtggagggcagggtgcgggagctggacagggagccgcattgcgcgcttctagggcaccaatgttgctcgttgccctcgtactgggggcatactgtctatgcgccttgcccggtagatgccccccagcagcacgggctcctgccccagctccagcgccatctgaacctagttcttccgtgcataggcccggtgctcctggtctgcccctggcaagtgggcctggtcggagaaggtttccccaagccctcatcgtcggagtgaaaaaaggtggcactcgcgcacttctcgaatttttgcgcctgcatcccgacgtaagggctctaggtagtgagccacatttctttgaccgatgttacgagagagggctggcttggtatcgttctctcatgccccgaacgctcgacggccagattaccatggagaagaccccatcttactttgtcaccagggaagccccaaggcggattcacgccatgagccccgatacaaaacttattgtcgtggtgagaaacccggtgactcgcgcaatttccgattacgctcagaccctctcaaagactcccggtcttccatctttccgggctctcgcatttcgtcatgggctgggcccagtggataccgcttggagcgcagtaaggattgggctgtatgctcagcatttggatcactggttacgatactttccgctttcccactttctgttcgtgtccggagagagactggtgagcgatccagcgggagaagtgggccgagttcaagattttctgggcctgaagcgcgtcgtgaccgataaacacttctacttcaacgcgaccaaaggattcccctgcctgaagaaggcacagggaggctcgaggccacgctgcctcggaaaatcgaagggacgacctcacccacgtgtgcctcaagccctggtgcgtagactccaggaattctatcgaccgtttaatcgcaggttttatcagatgaccggtcaggacttcggatgggggtag

SEQ ID NO: 23671 - DNA, 936 bp, Artificial Sequence
  derived and/or modified sequence
atgctcctcgtggccctggtgctcggcgcatattgcctgtgcgcccttcccggacgatgcccccctgccgcaagggcaccagcacccgcaccagccccttctgagccctcatcttccgttcatcgccctggggcaccaggcctgcccctggcttccggtcccggaaggagacgatttcctcaggctcttatagtgggtgtcaagaagggcggtaccagagctctcctggagtttctgcgactccatcctgacgttcgtgccctagggtcggagccccactttttcgaccggtgttacgaaaggggcctcgcttggtatcgttctttgatgccccgaacactcgatggccagattaccatggagaagacaccatcgtactttgtgactcgcgaagccccacgtcgcatacacgccatgagccctgacacaaagctgatcgtggttgtgcgcaaccccgtgacaagagccatcagcgattatgcgcagaccctgtcaaagacaccgggtctgccctcttttcgggctctagctttcaggcatgggctgggaccagtggacacagcttggtccgcagttaggatcggcttgtacgcacagcacttggaccactggttgcgctacttccccctgagccatttcctgttcgtaagcggcgaacgtttggtgtccgatcctgccggagaggtcggtcgggtccaggatttcctcggtttaaagcgagtggtgacagacaagcacttctattttaatgcgaccaaggggttcccatgtctcaaaaaggcccagggaggaagccggcctagatgcctcggaaagtctaaaggcagaccgcatccacgggttccccaggccctagttcgaagactgcaggagttctatcgccctttcaacaggaggttttaccagatgaccggccaggatttcggttggggctag

SEQ ID NO: 23672 - DNA, 1146 bp, Artificial Sequence
  derived and/or modified sequence
gcagccggtccccctggcgcagaacacaagcctggtacccacggtctgtcgggtgcccgagccgaaatgagggctagactgctccctcccctccccggtttagagagacgagatccaatggctggtagtggcggactaggaggcggagctggtgggggtcaaggtgccggtgccggacaaggggctgccttaagagcttcccgagctccaatgctcctggtggccttggtgctgggcgcatactgtctctgtgcgttgcccggtagatgcccaccagccgctagggccccagccccagcccctgcgcctagcgaaccatcttctagtgtacatagaccaggggctcctggcctgccgctcgcctcaggtccgggaaggaggcgcttcccccaggctctaatcgtcggcgttaaaaaggggggtaccagagccctccttgagttcctgagattgcaccctgatgtacgcgctctgggcagcgaacctcacttcttcgacagatgttatgagcggggactggcctggtacaggtccctgatgccaagaacattagatggacagataactatggaaaagactccgagctacttcgtgacccgcgaggccccacgaagaattcatgcaatgtcgcccgacacaaagctgattgttgtagtccgaaacccagtgacccgtgccatttctgactatgctcagacgctatccaagacaccgggattgccatcattccgggctctggcatttaggcacggactgggcccagtagatacggcttggtctgccgtgcgcataggtctgtacgcccagcacctcgaccattggctcagatactttcctctgtcacattttttgttcgtgagcggagagcggctcgtcagcgaccccgctggcgaggtcggacgagtacaagactttctcggcctgaagagggttgtgacagataaacatttttatttcaatgcaaccaagggcttcccctgcctgaagaaagctcagggcggatctcggcctcgctgcctgggtaaaagtaaaggaaggcctcacccacgcgtccctcaggctttagtgagacgcctgcaggagttttacagaccctttaaccgaagattctatcaaatgaccggccaggactttggatggggatag

SEQ ID NO: 23673 - protein, 408 aa, Artificial Sequence
  derived and/or modified sequence
MASKKFAVKCGNFAVLVDLHILPQGSNKDTSWFSEQKKEEVCLLLKETIDSRVQEYLEVRKQHRPSNAEFTRSNPLSLKGYGFQITAYFLKRGIRLRCIRSTQNAELCVFPDRFVVCVSQLAFSRDLLASQNEDLTERVLHGVSDYFAECAESSLPPSAKLRRNALKEIVKRTETKSSVTSKSQTRRDTVETSSDSVIAEIARRRNDGQASSSPPSESMGQAKDSIKAAESHWGLPVQKLEKVNQTQPEDTSGQQKPHPGERLKTGLLSRSPVCSCESASPCPKQSPRVAKTQQKRRNCSSAEDFDHHGRVSLGSDRLVPREIIVEKSKAVRVLPASELSDPGLLLKQDLAKTTSKEELHVLESLSSRHLMKNNPGQAQQTGLATNTERLSTIQNSPTKKRKKYERGH

SEQ ID NO: 23674 - DNA, 1407 bp, Artificial Sequence
  derived and/or modified sequence
gcgaaagtgcttcccttaagcttctgaaggttggctgcagttccggctacctgtgtagtccgagtttccacagccaggtactactccgccagtgaccctggacagtaacaaaacatataaagcccgagcccaaaccccgccaccatcataggtctgtagttactgtggaatcaataagccatggcatctaagaaatttgctgttaaatgtgggaattttgctgtcctcgtggatcttcatatcttgccacaaggttcaaacaaagatacaagctggttttctgaacagaagaaagaggaagtctgtttactgttaaaagaaaccattgattcaagagttcaggagtacttggaagttcgcaaacagcacaggccatcaaatgcagaattcacaagatccaatcccttgtccttaaaaggttatggctttcaaatcacagcctatttcctcaagagagggatacgccttcgctgcatcaggagcacacagaatgctgaactctgtgtattccctgacagatttgtggtttgtgtcagtcagcttgcattcagtcgtgatcttttagcaagtcagaatgaagatttgacagaaagagttctccatggagtgtctgattactttgctgagtgtgcagagagttcacttcctcccagtgcaaagctccggagaaatgctctgaaagaaattgtgaaaagaactgaaacaaaaagcagtgtcacgagcaaatcgcagaccagaagagacactgtggaaacatctagtgactcagtgattgcagagatagcaaggaggaggaatgatggtcaggcttcctccagtcccccatcagaatccatgggacaagcaaaggattccataaaggcagctgagagccactgggggcttcctgttcaaaagctggaaaaagttaatcagacccagccagaagacactagtggccagcaaaaacctcatcctggggagcggttaaagacagggcttctaagcaggagccccgtctgtagctgtgagtcagcatcaccatgtccaaaacaaagtccacgagtggccaaaacccaacagaaacgcaggaactgcagctctgcggaagacttcgaccaccacgggagagtttctcttggaagtgatcgattagtcccgagagaaataatagtggaaaaaagcaaagctgtcagggttttgccagcttcagagttgtcagatccagggttacttttgaaacaagatttggcaaaaaccacgtctaaggaagagttgcatgttttggaaagtctctcctccagacatcttatgaaaaataacccagggcaggcacagcaaaccggcttagccacaaacactgaaagattatctacaattcagaacagcccaaccaagaaaagaaagaaatacgaaagaggccattaa

SEQ ID NO: 23675 - DNA, 1227 bp, Artificial Sequence
  derived and/or modified sequence
atggccagcaagaagttcgccgtgaagtgcggcaacttcgccgtgctggtggacctgcacatcctgccccagggcagcaacaaggacaccagctggttcagcgagcagaagaaggaggaggtgtgcctgctgctgaaggagaccatcgacagcagagtgcaggagtacctggaggtgagaaagcagcacagacccagcaacgccgagttcaccagaagcaaccccctgagcctgaagggctacggcttccagatcaccgcctacttcctgaagagaggcatcagactgagatgcatcagaagcacccagaacgccgagctgtgcgtgttccccgacagattcgtggtgtgcgtgagccagctggccttcagcagagacctgctggccagccagaacgaggacctgaccgagagagtgctgcacggcgtgagcgactacttcgccgagtgcgccgagagcagcctgccccccagcgccaagctgagaagaaacgccctgaaggagatcgtgaagagaaccgagaccaagagcagcgtgaccagcaagagccagaccagaagagacaccgtggagaccagcagcgacagcgtgatcgccgagatcgccagaagaagaaacgacggccaggccagcagcagcccccccagcgagagcatgggccaggccaaggacagcatcaaggccgccgagagccactggggcctgcccgtgcagaagctggagaaggtgaaccagacccagcccgaggacaccagcggccagcagaagccccaccccggcgagagactgaagaccggcctgctgagcagaagccccgtgtgcagctgcgagagcgccagcccctgccccaagcagagccccagagtggccaagacccagcagaagagaagaaactgcagcagcgccgaggacttcgaccaccacggcagagtgagcctgggcagcgacagactggtgcccagagagatcatcgtggagaagagcaaggccgtgagagtgctgcccgccagcgagctgagcgaccccggcctgctgctgaagcaggacctggccaagaccaccagcaaggaggagctgcacgtgctggagagcctgagcagcagacacctgatgaagaacaaccccggccaggcccagcagaccggcctggccaccaacaccgagagactgagcaccatccagaacagccccaccaagaagagaaagaagtacgagagaggccactag

SEQ ID NO: 23676 - DNA, 1227 bp, Artificial Sequence
  derived and/or modified sequence
atggcctcaaagaagttcgccgtgaaatgcggtaactttgccgtgctggtagacttgcacatcctgccccagggctccaacaaagatacctcctggttttccgagcagaagaaagaggaggtctgccttttgctgaaggagactatcgactcccgagttcaggaatatctcgaggtgcgaaaacagcacaggccttccaatgccgaatttacccgttccaatccattgagtctgaaagggtatggatttcagataaccgcttacttcctgaaacggggtatccgcctaagatgcattcggtccacccagaatgcagaactctgtgtgtttcccgatcgattcgtggtctgtgttagtcaattagctttcagccgggatctcctggcctcccagaacgaggatctgaccgaaagggtgctgcacggggtgtctgattactttgcagagtgtgctgagagttcactgcctccaagtgctaaactgcgccgaaacgctcttaaggaaattgtaaaaaggactgaaaccaaatcgagcgtgacatccaaaagccaaactcgtcgggataccgtggagactagctctgactctgtcattgccgagatagcacgccggcggaatgacggacaggccagctcctctccaccctcagagtctatgggccaggctaaagactctatcaaggcagccgaatctcattggggactgccagtgcagaaactggagaaagtgaaccagacccagccggaggacacaagcggtcagcagaagccccacccgggagagcggctgaaaacaggcctgctaagccggtcccctgtgtgtagttgtgagtcagccagtccttgtcctaagcagagccctcgcgtggccaagacccaacaaaagcggcgcaattgctccagtgctgaagactttgaccaccatgggcgggtgagcctcggctctgaccgactagttcctcgcgagattattgtcgaaaagtctaaagctgtcagagtactgcccgcaagtgagctctccgatccgggattgctactgaaacaggacctggctaaaacaacctcaaaggaagagctgcatgttcttgaatcactctcttccaggcatcttatgaagaataatcctgggcaggctcagcagaccggcctggcaaccaatacagaacgactgagtacaattcagaacagccctacgaaaaaacggaagaaatacgaaagaggccattag

SEQ ID NO: 23677 - DNA, 1227 bp, Artificial Sequence
  derived and/or modified sequence
atggccagcaagaagtttgctgtgaagtgtggcaactttgctgtgctggtggacctgcacatcctgccccagggcagcaacaaggacacctcctggttcagcgagcagaagaaggaggaggtgtgcctgctgctgaaggagaccatcgacagccgggtgcaggagtacctggaggtgaggaagcagcaccggcccagcaatgctgagttcaccaggagcaaccccctgagcctgaagggctacggcttccagatcacagcctacttcctgaagaggggcatccggctgcgctgcatccgcagcacccagaatgctgagctgtgtgtgtttcctgacagatttgtggtgtgtgtgtcccagctggccttcagccgggacctgctggccagccagaatgaagacctgacagagcgggtgctgcatggagtgtctgactactttgctgaatgtgccgagagcagcctgccccccagcgccaagctgcggagaaatgccctgaaggagatcgtgaagaggacagagaccaagagctctgtgaccagcaagagccagacccggcgggacacagtggagaccagcagtgacagcgtgattgctgagatcgccaggagaagaaatgatggccaggccagcagcagcccccccagcgagagcatgggccaggccaaggacagcatcaaggctgctgagagccactggggcctgcctgtgcagaagctggagaaggtgaaccagacccagcctgaggacaccagcggccagcagaagccccaccctggagagcggctgaagacaggcctgctgagccgcagccctgtgtgcagctgtgagagcgccagcccctgccccaagcagagcccccgggtggccaagacccagcagaagagaagaaactgcagcagcgcagaagattttgaccaccacggccgggtgtccctgggcagtgaccggctggtgccccgggagatcatcgtggagaagagcaaggctgtgcgggtgctgcctgccagcgagctgagtgaccccggcctgctgctgaagcaggacctggccaagaccaccagcaaggaggagctgcacgtgctggagagcctgagcagccgccacctgatgaagaacaaccctggccaggcccagcagacaggcctggccaccaacacagagcggctgagcaccatccagaacagccccaccaagaagaggaagaagtatgaaagaggccactag

SEQ ID NO: 23678 - DNA, 1227 bp, Artificial Sequence
  derived and/or modified sequence
atggccagcaagaagttcgccgtgaagtgcggcaacttcgccgtgttggtagatctgcacatccttccacagggatcaaacaaagatacgagctggttctctgaacagaaaaaagaagaagtgtgcctacttcttaaggaaaccatcgatagtcgagttcaagagtacctggaggtgcgcaagcagcaccgtccatctaacgctgagttcacacgctcaaaccccttatctctgaaaggctacggcttccaaattacagcttattttttgaagcgtgggattagactaagatgcattcggagcactcagaatgctgagctttgcgtttttcctgatcggtttgttgtctgcgtctcccagttggcattctcaagggatttacttgcttcacaaaacgaggatttgacggagcgggtactgcatggggtgtcggactacttcgcagagtgtgcagagtcaagtctgcccccctctgcaaagctccgccgcaatgccctcaaagaaatcgtcaagaggacagagaccaaatctagcgtaacaagtaagagtcagactcgtcgtgataccgtcgaaactagcagcgatagcgtgatcgctgagattgcacggagaagaaacgatgggcaggcgtcctcttcccccccatctgagtcaatgggccaggccaaggattctatcaaggccgccgagagtcattggggccttcccgtccagaagctggagaaagtgaatcaaacacaacctgaagatacatctggccaacagaagccacacccaggagagcggttgaagacgggtcttttgagcaggagccccgtgtgcagctgcgagtccgcctctccgtgccctaagcagagcccgcgcgttgccaaaactcagcagaaacgcaggaactgcagttctgccgaggactttgatcatcatgggagggtgtcgctcggcagcgatcgattggtgccaagagaaattatcgtcgagaagtccaaagcggtgagggttctccctgcttcagagctcagtgatcccggcctgctgctgaagcaggatctcgctaaaaccacctctaaggaagaattacatgtgttggagagtttgtccagccgccatttaatgaagaacaatccgggacaggctcagcagaccgggctggcaacgaataccgagagattgtccactattcaaaactcccccacaaagaaacggaagaaatacgagaggggccactag

SEQ ID NO: 23679 - DNA, 1227 bp, Artificial Sequence
  derived and/or modified sequence
atggcgagcaagaagttcgccgtcaaatgtggaaactttgcagtcctggtcgatctgcatatcctgcctcagggcagcaataaggatacttcttggttctccgagcagaagaaagaagaggtctgtctgctgctgaaagagacaatcgactctagagtgcaagaataccttgaggtgaggaagcagcaccggccatcgaacgcagaatttactaggagcaatcccctatctctgaaaggctacggattccagatcaccgcatattttctcaagaggggaatccgactgcgctgcatacgcagtactcagaacgccgagctctgtgtattccccgaccggtttgtggtttgcgttagccagttagcctttagtagggacctgctagcttctcaaaatgaagacctgactgaacgcgtgctgcacggggtgtctgactactttgcagagtgcgctgagagctctctgcccccttccgctaagttgcgtagaaacgccctcaaggagattgtgaagagaacagaaactaagagttcagttacttcgaaaagccagaccaggcgagataccgtggagacttcctccgattcagtaatcgctgagatagcaagaaggcgcaacgacggtcaggccagctcttcgcccccatccgagtccatggggcaagccaaagattcgataaaagccgcagagtcacactggggcctaccagtacaaaagctcgaaaaggtcaaccagacccagcccgaagatacgagcggacagcagaagccacatccaggagagagattaaaaactggtctgctttcgcgatcccccgtatgcagttgcgaaagcgctagcccctgccccaaacagagcccccgagtggccaagacccaacagaaaagacgaaattgttctagcgccgaggatttcgatcaccatggcagagtgtctctcggctccgaccgtctcgtgccacgcgagatcattgtggaaaaaagcaaagcggtcagagttctgccagctagcgagctgtctgaccccggtttactcctcaaacaggatctggccaagacaacgagcaaagaggagttgcacgttcttgagtccctctcttcccggcatcttatgaagaataatcccggacaggcacagcagacgggcctcgctactaacacagagagactgagcactattcaaaatagtcccaccaagaaacgcaaaaaatatgagcggggtcactag

SEQ ID NO: 23680 - protein, 99 aa, Artificial Sequence
  derived and/or modified sequence
MEEPTSSTNENKMKSPCESNKRKVDKKKKNLHRASAPEQSLKETEKAKYPTLVFYCRKNKKRNSNQLENNQPTESSTDPIKEKGDLDISAGSPQDGGQN

SEQ ID NO: 23681 - DNA, 300 bp, Artificial Sequence
  derived and/or modified sequence
atggaggagcccaccagcagcaccaacgagaacaagatgaagagcccctgcgagagcaacaagagaaaggtggacaagaagaagaagaacctgcacagagccagcgcccccgagcagagcctgaaggagaccgagaaggccaagtaccccaccctggtgttctactgcagaaagaacaagaagagaaacagcaaccagctggagaacaaccagcccaccgagagcagcaccgaccccatcaaggagaagggcgacctggacatcagcgccggcagcccccaggacggcggccagaactag

SEQ ID NO: 23682 - DNA, 300 bp, Artificial Sequence
  derived and/or modified sequence
atggaagagcctacctcctcaacgaatgaaaacaaaatgaaatccccttgtgagagtaataagagaaaggtcgacaagaagaagaagaacctgcacagagccagcgcccccgaacaaagcttaaaagagactgaaaaggcaaagtacccaaccctcgtattctattgtagaaaaaacaaaaagaggaacagcaatcagctggagaacaaccagcccacggagtcatcgactgaccctatcaaagaaaagggcgacttagacatatccgcaggctccccacaggatggaggccaaaactag

SEQ ID NO: 23683 - DNA, 300 bp, Artificial Sequence
  derived and/or modified sequence
atggaggagcccaccagcagcaccaatgaaaacaagatgaagagcccctgtgagagcaacaagaggaaggtggacaagaagaagaagaacctgcaccgggccagcgcccctgagcagagcctgaaggagacagagaaggccaagtaccccaccctggtgttctactgcaggaagaacaagaagaggaacagcaaccagctggagaacaaccagcccacagagagcagcacagaccccatcaaggagaagggggacctggacatctctgctggcagcccccaggacggcggccagaactag

SEQ ID NO: 23684 - DNA, 300 bp, Artificial Sequence
  derived and/or modified sequence
atggaggagcccaccagcagcaccaacgagaacaagatgaagagcccgtgtgagagcaacaagcgcaaagtcgataaaaagaagaagaacctacaccgggccagtgcccccgaacaatctctcaaagagaccgagaaagcaaagtatcctacactggtattctactgtagaaagaacaaaaaaaggaattccaatcagctggaaaataatcagcctaccgaatcttctaccgaccctatcaaagaaaaaggagatctcgacatctctgcagggtctcctcaggatggagggcagaactag

SEQ ID NO: 23685 - DNA, 300 bp, Artificial Sequence
  derived and/or modified sequence
atggaggaaccaacatcctctacgaacgagaataaaatgaagagcccctgtgagtctaacaagcgtaaagtggacaagaaaaaaaaaaatctgcaccgtgcctcagcgcctgaacagtcccttaaggaaacagaaaaagctaagtatcctaccctggtgttctattgtaggaagaacaagaagcggaactccaatcagctggagaataaccagccgaccgagagtagtactgatcctattaaagaaaaaggagacctagacatctcagccggttcaccccaggacggcggacagaattag

SEQ ID NO: 23686 - DNA, 431 bp, Artificial Sequence
  derived and/or modified sequence
aaagctctgggacagcccactggaaagcttcaatacagctgtggaaatctgcaccctagaagatcctagtacagaaattctacaaccaaccataatcatggaagagccaacttccagcaccaacgagaataaaatgaagagcccctgtgaatctaacaaaagaaaagttgacaagaagaagaagaatctgcacagagcctcagcccctgaacagagtttgaaagagacagaaaaagcaaaatatccaacattagtgttttactgcaggaagaataagaaaagaaattcaaatcaactggagaataaccagcctacagagagctccactgatccaatcaaagagaaaggagacctagacatatctgcaggatctccacaggatggtgggcagaattagtccaaattggacaaatcatcaccactgatggcga

SEQ ID NO: 23687 - protein, 1044 aa, Artificial Sequence
  derived and/or modified sequence
MKGTRAIGSVPERSPAGVDLSLTGLPPPVSRRPGSAATTKPIVRSVSVVTGSEQKRKVLEATGPGGSQAINNLRRSNSTTQVSQPRSGSPRPTEPTDFLMLFEGSPSGKKRPASLSTAPSEKGATWNVLDDQPRGFTLPSNARSSSALDSPAGPRRKECTVALAPNFTANNRSNKGAVGNCVTTMVHNRYTPSERAPPLKSSNQTAPSLNNIIKAATCEGSESSGFGKLPKNVSSATHSARNNTGGSTGLPRRKEVTEEEAERFIHQVNQATVTIQRWYRHQVQRRGAGAARLEHLLQAKREEQRQRSGEGTLLDLHQQKEAARRKAREEKARQARRAAIQELQQKRALRAQKASTAERGPPENPRETRVPGMRQPAQELSPTPGGTAHQALKANNTGGGLPAAGPGDRCLPTSDSSPEPQQPPEDRTQDVLAQDAAGDNLEMMAPSRGSAKSRGPLEELLHTLQLLEKEPDVLPRPRTHHRGRYAWASEEDDASSLTADNLEKFGKLSAFPEPPEDGTLLSEAKLQSIMSFLDEMEKSGQDQLDSQQEGWVPEAGPGPLELGSEVSTSVMRLKLEVEEKKQAMLLLQRALAQQRDLTARRVKETEKALSRQLQRQREHYEATIQRHLAFIDQLIEDKKVLSEKCEAVVAELKQEDQRCTERVAQAQAQHELEIKKLKELMSATEKARREKWISEKTKKIKEVTVRGLEPEIQKLIARHKQEVRRLKSLHEAELLQSDERASQRCLRQAEELREQLEREKEALGQQERERARQRQRAELEELRQQLEESSSALTRALRAEFEKGREEQERRHQMELNTLKQQLELERQAWEAGRTRKEEAWLLNREQELREEIRKGRDKEIELVIHRLEADMALAKEESEKAAESRIKRLRDKYEAELSELEQSERKLQERCSELKGQLGEAEGENLRLQGLVRQKERALEDAQAVNEQLSSERSNLAQVIRQEFEDRLAASEEETRQAKAELATLQARQQLELEEVHRRVKTALARKEEAVSSLRTQHEAAVKRADHLEELLEQHRRPTPSTK

SEQ ID NO: 23688 - DNA, 3135 bp, Artificial Sequence
  derived and/or modified sequence
atgaaaggaacacgagctatagggagtgtacccgaaagaagtccagccggagtggacctgagcctgaccgggctgccccctccggtgagccgccgccctgggagtgcagctacaactaagcccattgtcagatcagtgagcgtagtgaccggatccgagcaaaagcgtaaagtgctggaagctaccggccccggagggtcccaagccatcaacaatttaaggcgatccaactccaccactcaggtctctcagccacggtctggctcgcctcggcccactgagccaaccgatttcctcatgcttttcgaaggatccccttctgggaagaagagaccagccagtttaagcacagcccccagcgagaagggtgcaacttggaacgtgctggatgaccaacctcggggattcactttacccagcaatgctagaagctcatctgccctggactcccccgccggaccgcgtagaaaggagtgcacggtggctctagcacccaacttcaccgccaataacagatctaataaaggggccgtcgggaattgcgtcacgactatggttcataaccggtatactccctctgagagggctcccccactgaagtcgtcgaatcagacagcacccagtttaaataacataattaaggctgccacctgtgagggatctgaatcttccggttttggaaagctgccaaaaaacgtgtcaagtgccacgcatagcgcacgaaacaacaccggcggtagcacaggactacctagacggaaagaggtgaccgaagaggaagccgaacgattcatccatcaagtgaatcaagccaccgtgactattcaaagatggtataggcaccaggtccaacggcgaggcgccggggcagcccggctcgagcacctgctgcaagctaaacgagaagaacagaggcagcgctccggggagggtacgcttctggatctgcaccagcaaaaggaggccgctagacggaaagctcgcgaggaaaaggctcggcaagcgcgccgtgcagcaatccaggaactccagcagaagagagccctgcgggcgcagaaagcttcaacagcagaaagggggcccccagagaatcctagagagacaagggtacccggaatgcgacaacctgctcaggagctttccccgacgcccggaggcacagcccatcaagctctgaaggccaacaatactggcgggggcctaccagccgccggccctggagaccggtgcctccccacctcggacagctcacctgaaccccagcagccccccgaggacagaacccaagatgtcctcgcccaggacgccgcgggtgacaatttggagatgatggctcccagccgagggtcagcgaaaagccgcggacctctggaggagctactccacaccctgcagttgctggagaaggagccagatgtgttgccgcgtcctaggactcaccacaggggacggtacgcctgggctagtgaggaggatgacgcttctagcctcacggctgataacctagagaagtttgggaagttgtctgcattccctgaaccacctgaggatgggactttgctgtcagaagccaagctccagtctatcatgtcctttctagatgagatggagaagtcgggccaggaccagctcgactcacaacaggagggatgggtgccagaggcaggcccagggccgctggagttaggctcagaagtcagcaccagtgtgatgcggctgaaactggaggtggaggagaaaaaacaggcgatgctcttactgcagagagctctagcgcaacagagagacctgactgcaaggcgggtaaaggagaccgagaaagctctgagccgacagctccagaggcagagggagcactatgaggccactattcagcgacatttggcattcatcgaccagctgatcgaagacaaaaaagttctcagcgaaaagtgcgaagcggtggtggccgagttgaaacaggaagatcagaggtgcaccgaacgggtggcccaggctcaggctcagcacgagctggagattaaaaagctcaaggagctgatgagtgcgacagaaaaggcacggcgcgaaaagtggatttccgaaaaaaccaaaaagataaaggaggtcaccgtccgcggactggagccggagatccagaagctgatcgctagacacaagcaagaggtgagaaggctaaaatcattacacgaggcggagctgctccaatccgatgaacgggcgtctcagcggtgccttagacaagccgaagagctcagggagcaactcgaacgggagaaagaagctctgggacagcaggaaagagaacgcgcccggcagcgacaacgagccgaactcgaagagctgcgccagcagcttgaggaaagcagcagtgctctgacacgagccctgcgggccgagttcgagaagggccgcgaggagcaggaaagacgtcaccaaatggagcttaatacacttaagcagcagcttgagttagagagacaagcatgggaggccgggcggaccagaaaggaagaggcctggcttctgaaccgggaacaggaactgagggaagagatacgcaaaggcagagataaggaaatcgaactggttatccatcggctcgaagccgacatggcacttgcaaaggaagagtcagaaaaagcagccgagagcagaattaaaagactgagagataagtatgaggccgaactctcagagctcgaacaatcagagcggaaactccaggaaaggtgctcggagctcaagggacagctgggtgaagcagagggagagaacttgcgtctgcagggtctcgtgcgccagaaggagagagccctggaagacgcccaggctgtgaatgagcaactcagctccgagagaagcaatctggcccaggtgataaggcaggagttcgaagaccggctcgcagcaagtgaagaggagacgcggcaggcgaaagccgaactagccacactgcaagcacggcagcagttggaactcgaggaggttcaccggagagtaaagacagccttggctcgaaaagaagaggccgttagcagcttgaggacacagcatgaagccgcggtgaagagagcagaccatctggaagagctcctggaacaacaccggcgtcctacacctagtacaaagtag

SEQ ID NO: 23689 - DNA, 3135 bp, Artificial Sequence
  derived and/or modified sequence
atgaagggcacccgggccatcggctctgtgcctgagaggagccctgctggggtggacctgagcctgaccggcctgcccccacctgtgtccagaagacctggcagcgctgccaccaccaagcccatcgtgcgctctgtgtctgtggtgacaggcagcgagcagaagaggaaggtgctggaggccaccggccctgggggcagccaggccatcaacaacctgcggcgcagcaacagcaccacccaggtgtcccagcccaggagcggcagcccccggcccacagagcccacagacttcctgatgctgtttgagggcagccccagcggcaagaagaggcctgccagcctgagcacagcccccagcgagaagggggccacctggaatgtgctggatgaccagccccggggcttcaccctgcccagcaatgcccggagcagcagcgccctggacagccctgctggccccaggaggaaggagtgcaccgtggccctggcccccaacttcaccgccaacaacagaagcaacaagggagctgtgggcaactgtgtgaccaccatggtgcacaaccgctacaccccatctgagcgggccccacccctgaagagcagcaaccagacagcccccagcctgaacaacatcatcaaggccgccacctgtgagggcagcgagagcagcggctttgggaagctgcccaagaatgtgtcctctgccacccacagcgccaggaacaacacaggaggcagcacaggcctgcccaggaggaaggaggtgacagaggaggaggccgagcgcttcatccaccaggtgaaccaggccaccgtgaccatccagcgctggtaccgccaccaggtgcagaggagaggagctggggccgcccggctggagcacctgctgcaggccaagcgggaggagcagaggcagaggtctggagagggcaccctgctggacctgcaccagcagaaggaggccgcccggaggaaggcccgggaggagaaggcccggcaggcccggcgggccgccatccaggagctgcagcagaagagggccctgcgggcccagaaggccagcacagctgagcggggccccccagagaacccccgggagaccagggtgcccggcatgaggcagcctgcccaggagctgagccccacccctgggggcacagcccaccaggccctgaaggccaacaacacaggaggcggcctgcctgctgctggccctggggaccgctgcctgcccaccagtgacagcagccctgagccccagcagcccccagaggacaggacccaggatgtgctggcccaggatgctgctggggacaacctggagatgatggcccccagccggggcagcgccaagagccggggccccctggaggagctgctgcacaccctgcagctgctggagaaggagccagatgtgctgccccggcccaggacccaccaccggggccgctatgcctgggcctctgaagaagatgatgccagcagcctgacagctgacaacctggagaagtttgggaagctgagcgccttccctgagcccccagaagatggcaccctgctgtctgaggccaagctgcagagcatcatgtccttcctggatgagatggagaagagcggccaggaccagctggacagccagcaggagggctgggtgcctgaggccggccctggccccctggagctgggcagcgaggtgtccacctctgtgatgaggctgaagctggaggtggaggagaagaagcaggccatgctgctgctgcagagggccctggcccagcagagggacctgacagcccggcgggtgaaggagacagagaaggccctgagccggcagctgcagaggcagcgggagcactatgaggccaccatccagaggcacctggccttcatcgaccagctgattgaggacaagaaggtgctgtctgagaagtgtgaggccgtggtggccgagctgaagcaggaggaccagcgctgcacagagcgggtggcccaggcccaggcccagcacgagctggagatcaagaagctgaaggagctgatgtctgccacagagaaggcccggcgggagaagtggatcagcgagaagaccaagaagatcaaggaggtgacagtgcggggcctggagcctgagatccagaagctgattgcccggcacaagcaggaggtgcggcggctgaagagcctgcacgaggccgagctgctgcagagtgatgagcgggccagccagcgctgcctgcggcaggccgaggagctgcgggagcagctggagcgggagaaggaggccctgggccagcaggagcgggagcgggcccggcagaggcagagagctgagctggaggagctgcggcagcagctggaggagagcagcagcgccctgacccgggccctgcgggcagagtttgagaagggccgggaggagcaggagcggcggcaccagatggagctgaacaccctgaagcagcagctggagctggagcggcaggcctgggaggccggccgcaccaggaaggaggaggcctggctgctgaaccgggagcaggagctgcgggaggagatcaggaagggccgggacaaggagattgagctggtgatccaccggctggaggccgacatggccctggccaaggaggagagcgagaaggctgctgagagccgcatcaagaggctgcgggacaagtatgaggccgagctgtctgagctggagcagagcgagaggaagctgcaggagcgctgcagcgagctgaagggccagctgggggaggccgagggggagaacctgcggctgcagggcctggtgcggcagaaggagcgggccctggaggatgcccaggccgtgaatgagcagctgagcagcgagaggagcaacctggcccaggtgatccggcaggagtttgaggaccggctggccgccagcgaggaggagacccggcaggccaaggccgagctggccaccctgcaggcccggcagcagctggagctggaggaggtgcacagaagagtgaagacagccctggccaggaaggaggaggccgtgagcagcctgcggacccagcatgaagctgctgtgaagagagctgaccacctggaggagctgctggagcagcacagaagacccacccccagcaccaagtag

SEQ ID NO: 23690 - DNA, 3135 bp, Artificial Sequence
  derived and/or modified sequence
atgaagggcacccgggccatcggcagcgtgcccgagcggagccccgctggggtggacctctccctcactggactgccacctccagtgagtcggagacccggatcggctgctaccacgaagcctatcgtgagatctgtgtccgtcgtgaccggctcagagcagaagaggaaagtcctggaagccaccgggcccggaggttcccaagcaataaacaatctccgccgcagcaactccactactcaggtgtctcaaccacgttcagggtcccctcgaccaacagaaccaaccgattttcttatgcttttcgaaggtagcccctccggcaaaaaacggccagcttccctgtcaacagcacccagtgaaaagggcgccacctggaacgtcctagatgatcagccaaggggctttaccctgccctcaaacgcccgatctagctccgcactggactcccccgcggggcctcgccgaaaggaatgtactgttgctctggccccaaattttacagcaaacaatcgctccaataaaggtgccgtgggcaattgcgttaccaccatggtgcacaatcgctacacaccttccgagcgggccccacccctgaagtcttctaatcagactgccccaagcctgaataatatcattaaagccgccacatgcgaaggatccgaaagtagcggcttcggcaaattgcccaagaatgtgtccagcgccacccacagcgcgaggaacaacacgggaggctcaaccgggctgccacgccgcaaagaggtgacagaggaggaggctgagaggtttattcaccaggtgaatcaggctaccgtcaccatccagcggtggtacaggcatcaggtacagcggaggggagcgggggctgcccggctggagcacctgcttcaggcaaaacgtgaagagcaacggcaaaggagcggtgagggcaccctcctcgatcttcaccagcagaaagaggccgcccggcgaaaggcacgcgaggagaaggcaaggcaggctcggcgcgccgccatccaggagttgcagcagaagcgcgcgcttagggctcaaaaggccagcaccgcagagcgcgggccacctgaaaacccgagggaaacaagggtcccaggtatgagacagcccgcccaggaactaagccctacaccaggaggcaccgcacaccaggccttgaaggccaacaacaccgggggcggcctgcccgctgccggcccaggcgataggtgtctacccacttccgactcatctccagagccgcagcaaccgcccgaggatagaacccaggacgtgttagcccaggacgctgccggtgataatctcgagatgatggcaccttccagaggctccgcaaagtcgcgcggacccctggaagaactgctccacaccctgcagctgttggagaaagagcccgatgttctcccaagaccaagaactcatcataggggcagatacgcctgggcatctgaagaagacgacgccagctctctcacggctgataatctagagaagtttgggaagctgtcggcatttccagaaccacccgaggacggaaccttgctgagcgaagctaagctgcagtcaattatgtcctttctggatgagatggaaaaatcgggacaggatcagctggactcccagcaggaaggctgggtccctgaagcggggccggggcccttagaactggggagcgaagttagtacatccgtgatgcgtttgaaactggaggttgaggaaaaaaagcaggctatgctgctactccagagagctctggcgcagcaacgcgatctaaccgctagaagggtgaaggaaactgagaaggcactgtcccgacagctccagcgccagcgcgaacattacgaggccactatccagagacatcttgcctttatcgaccaattgatcgaagacaaaaaggtgctcagtgagaagtgcgaggccgtggtggctgagttgaagcaggaagaccagcggtgtaccgagcgagtcgctcaggcccaggctcagcatgagctggaaatcaaaaaactgaaggaacttatgagtgccactgaaaaggccaggcgggagaaatggatcagtgagaaaaccaaaaaaatcaaggaggttacggtacggggcctcgaacccgaaattcagaagcttatcgctagacacaagcaggaggtgcggagactgaagtccttgcatgaggctgagctcctacagagtgatgagcgggcttcacagcggtgtctgcgccaagccgaggaattacgcgaacagctggaacgcgagaaggaggcactggggcagcaggagagggagcgggccagacaacggcagcgtgctgagctggaggaactgcgtcagcagttggaggaatcatcttcagctctgaccagagctctcagggcagaattcgaaaaaggacgcgaggagcaagagcggagacaccaaatggaactcaacaccttgaaacagcaactggaactagagcgccaagcctgggaggccgggcgtacacgtaaggaggaagcatggctgctgaatagggaacaggaactcagggaggagataaggaagggacgcgataaggagattgagttggtgattcaccgcttggaggccgatatggccctggctaaggaggagagtgagaaggccgctgagtcgcggataaaacgtctgcgagataagtacgaagctgagctttccgaactggagcagagcgaacggaaactacaagagaggtgtagcgagttgaagggacagctcggtgaagccgagggtgaaaaccttcgcttacaaggcctcgtgcgtcaaaaagagagagctttggaagacgcacaagccgtgaatgaacagctctcgtccgagcgctccaatctagctcaagttattagacaggagtttgaggatcgactggccgcctctgaagaagaaactcggcaggcaaaggcagagctggctacattgcaggcgcgtcaacagctcgaactggaggaagtgcatcggcgtgtgaagaccgcattagcgaggaaggaggaggcggtgagttcattgcgtacacagcacgaggcagccgtgaagcgagccgatcacttagaagagctgctagaacagcaccgtagacccacccctagtaccaagtag

SEQ ID NO: 23691 - DNA, 3135 bp, Artificial Sequence
  derived and/or modified sequence
atgaaaggtacaagagccatcggatccgttcccgaacggagccctgcaggcgtggacctgagtctgactggtctgccccctcctgttagccgtcgacccggttccgcagcgacaacgaagccaatcgttcgttccgtgagcgtggtgactggttctgagcagaaaagaaaagttctcgaggccaccgggccaggcggtagccaagccataaacaacctgagaaggtccaatagcacgacccaggtttctcaaccacgatcaggatctcctagacccaccgagccgacggattttctcatgttgtttgaagggtctccctcaggcaaaaaacggcctgccagcctttccacagctcccagcgagaaaggcgcaacctggaatgttttagatgaccagccacggggtttcaccctccctagcaacgccaggtcctcctctgcactagattctccagctggtcccagacgcaaggaatgtaccgtggccctggccccaaacttcaccgctaacaataggtcaaacaaaggagcggtcggcaactgcgtcacaacaatggtccacaatagatatacccccagcgagagggcccctcccctcaaatccagcaatcagaccgccccatcccttaataacattattaaagccgctacctgcgagggatccgagtccagcgggttcgggaagctccctaagaacgtcagctcagccacacattcagctcgtaacaatacaggcggttccactggcctacccagacgcaaggaggtgacagaagaagaagcagagcgttttatccaccaggttaaccaggccactgtgacgattcagcgctggtacagacatcaggtgcagaggagaggggcaggagccgctagactggagcacctcctacaggctaagcgggaagagcagagacagcggtccggggagggcactctgctggatctgcaccaacagaaggaagctgctagaaggaaggcccgtgaagagaaggctcgccaggctaggcgggcagcaatacaggaactgcagcaaaagagggccctaagagcccagaaagcctctaccgcagagagaggccctcctgaaaaccctcgggagacgcgggtgcctgggatgcgtcaacccgctcaagaattgagcccgacacccggagggaccgctcaccaggctctgaaggcgaataataccggcggtggtctgcccgctgcaggtcccggagaccgatgcctcccaacaagcgactcttctccagaaccccagcagccaccagaagaccggacccaggatgttttggcccaggacgctgcaggcgataatctcgagatgatggctccctcacggggttctgcaaagtctagaggcccactggaggaattgctccacacccttcaattactcgaaaaggagccagacgtgctaccaagacctcgcactcatcacagaggacggtacgcttgggccagcgaggaagacgatgcctctagccttacagccgacaacctggagaagttcggcaagctcagcgccttcccagagcctcctgaggatggaactctcctgtctgaagcgaaactccaaagcattatgtcatttctggatgagatggagaaatcaggtcaggatcagttagatagccagcaggaaggctgggtgcccgaggcaggacctggccctctggaactgggaagtgaggtcagcacttccgtgatgcgactgaagctggaggtcgaggaaaagaagcaggctatgctactcctgcagcgagctctggcccagcagcgcgacctcacggcgagaagagtgaaggaaacagaaaaagcacttagtcggcagctccagagacagagggagcactatgaggctactattcagagacatttagctttcatcgatcagttaatcgaggataagaaggtgttgtccgagaagtgcgaagcagtggtggcagagctgaagcaggaggaccagaggtgcacggaaagagtcgcacaagcccaggcccaacacgagctggagatcaagaagttaaaagaattaatgtctgcgactgaaaaggctagacgggagaagtggatcagcgagaagacaaagaagataaaggaagtgacagtaagggggctcgagccagaaatccagaaactgatcgcccgacataaacaagaggtgagaaggctgaaatcactgcatgaggccgagctgctgcagagcgatgaaagagccagtcagaggtgtctgagacaggctgaggagctaagggagcagctagagcgcgaaaaagaggctctgggacagcaagaaagagagcgcgctcggcaacgtcagagggcggaactggaagaactgcgtcagcagctcgaagagagcagttctgccctgacccgggctctgcgggctgaattcgagaaggggcgagaggaacaggagcgcaggcaccaaatggaattaaatacccttaagcagcagctggagttggagcgtcaggcttgggaggccggaaggacccgcaaggaagaggcttggctgcttaaccgggagcaggaattgagggaggagataagaaaaggtcgggataaggagatcgagctggtaatccacaggctggaggcagatatggctctagctaaggaagagagcgaaaaagccgctgagtcccggataaaacgattgcgtgacaagtacgaagcggagctctccgagctggagcaatcagagcgcaagctccaagagagatgttcagagctcaagggacaattgggggaggccgaaggtgagaatctacgcctccagggactggttaggcagaaggaacgcgcactggaggatgctcaggccgtgaatgaacagctctcaagcgaaaggagtaatcttgcccaagtgatcagacaagagtttgaagaccgtctcgcagcttctgaggaagagacacgccaggccaaagctgagttggcaacattacaagcccgacaacaactggaattggaggaagtgcatcggcgagtcaaaactgctcttgcaagaaaagaggaagcggtcagctctttaaggactcagcacgaagctgccgttaaacgtgctgaccatctggaagaactgctggaacagcaccgcagacctaccccatcaaccaaatag

SEQ ID NO: 23692 - DNA, 3511 bp, Artificial Sequence
  derived and/or modified sequence
ctcaccccggccgtccggccgcttcattgtcaccgggcctcggggcagtgttgggggtggcggggcgccaggtcgccgacccgaggtttgggcgcgactggttccgcatcccctccccgccggccgaatctgcaggccccgcgcgccaggcaggcttcgcggctgcgcccccggcccgcgcaggacctgccttgtccaccatgaaaggcacccgggccatcggcagcgtcccggagcgcagcccagcaggtgtggacctgagtctgacaggtctccctccgcctgtgtcccggcgtcctggcagtgccgccaccaccaagcccatcgtccgctctgtctccgtggtcacaggcagcgagcagaagaggaaggtgctggaggccacagggcctgggggctcccaggccatcaacaaccttagaagatccaacagcaccacgcaggtcagccagcctcggagcggctcccccaggccaacggagcccacagacttcctgatgctcttcgagggcagccccagtgggaaaaagaggcctgccagcctgagcacagcccccagcgagaagggagccacctggaacgtcctggatgaccagccccggggcttcaccttgccatccaatgcccggagttccagtgcccttgactcaccagcgggcccgcggaggaaagaatgcaccgtggccctggcccccaacttcactgctaacaacaggagcaacaagggagcagtgggcaactgcgtcaccaccatggtgcacaaccgctacaccccctcggagagggcgcctccgctcaagagctccaaccagactgccccctccctcaacaacatcatcaaggcagccacctgtgagggcagtgagagcagcggctttgggaagctgccgaagaatgtctccagtgccacccactcagcccggaacaatactgggggcagcacgggcttgcccaggcggaaggaggtgacggaggaggaggctgagaggtttatccaccaggtgaaccaggccactgtcaccatccagcgctggtaccggcaccaggtgcagcggcgcggagcaggagctgcccgcctggagcacttgcttcaggccaagcgggaggagcagcggcagcggtcaggcgaggggaccctcttggacctgcaccagcagaaagaggcagccaggaggaaggcccgggaggagaaggcacgccaagccaggcgagcagccattcaggagctgcaacagaaacgagccctgagagcccagaaggcgagcactgccgagcgtgggccacctgagaatcccagggagaccagagtgccaggaatgcggcagcctgctcaggagctgtcccccacaccaggcggcactgcccaccaggccctcaaggccaacaatactggtggtggcctccctgctgcaggccccggagaccgctgcctgcccacctccgactcatccccagaaccacagcagcctccagaggacaggacgcaggacgttcttgcccaggatgcagctggggacaacctggagatgatggccccgagcagggggagcgccaagtccagggggccactggaggagctgctgcacacactgcagctgctggagaaggagccggacgtgctgccccgccccaggacccatcacaggggcagatacgcctgggccagcgaggaggatgacgccagctctctgacagctgacaacttggagaaatttggaaaactcagtgcgttccccgaacctcctgaggatgggacgctgctatcggaggccaagctacaaagcatcatgagcttcttggacgagatggagaagtctgggcaggaccagctggactcccagcaggaggggtgggtgccggaggcggggccggggcccctggagctggggtccgaggtgagcacgtctgtgatgcggctgaagctggaggtggaggagaagaagcaggccatgctgctgctgcagagagcgctggcgcagcagcgagacctcacggcccggcgggtcaaggagacagagaaggcgctgagccggcagctgcagcggcagagggagcactacgaggccaccatccagcggcacttggccttcattgaccagctgattgaggacaagaaggtcctgagtgaaaagtgcgaggctgtggtggccgagctgaagcaggaggaccagagatgcaccgagcgtgtggcccaggcacaggcgcagcacgagctggagattaaaaaactcaaagaattaatgagcgccaccgagaaagcccgccgggagaagtggatcagtgagaaaaccaagaagatcaaggaggtcactgtccgaggtctggagcccgagatccagaagctgattgcaaggcacaagcaggaagtgcggaggctcaagagcctgcacgaggcggagctgctgcagtcggatgagcgggcctcgcagcgctgcctgcgccaggccgaggagctgcgggagcagctggagcgggagaaggaggcgctgggccagcaggagcgcgaacgtgctcggcagcggcagcgggcggagctggaagagctgaggcagcagctggaggagagcagctctgcactgacccgagccctgagggctgagtttgagaagggcagggaggagcaggagcgccggcaccagatggagctgaataccctgaagcagcagctggagctggagaggcaggcgtgggaggccggccgcaccaggaaggaggaggcgtggctgctgaaccgggaacaggagctgagggaagaaatccggaaaggccgggacaaggagattgagctggtcattcaccggctggaggccgacatggcgctggccaaggaggagagtgagaaggctgccgagagccgcatcaagcgcttacgggacaagtacgaggccgagctctccgagctggagcagtcggagcggaagcttcaggagcggtgctcggagctgaagggccagcttggggaggccgagggcgagaatctgcgtctgcagggccttgtgcggcagaaggagcgggcgctggaggatgcgcaggcggtgaacgagcagctttctagcgagcgcagcaacctggcccaggtgatccgccaggagttcgaggaccggctggcagcctctgaggaggagacgcggcaggccaaggccgagctggccacgctgcaggcccgccagcagctggagctggaggaggtgcaccggagggtgaagacagccctcgcgaggaaggaggaggccgtgagcagcctccggacacaacatgaggctgcggtgaagcgggccgaccacctggaggagctgctggagcagcacaggaggcccacgccaagtaccaagtgaccagggatgccgggaacactgtcgaagaacggaaggcagaggacagaggctggacgtgggcccagaggcccacagggacgcccacctgccccccacagaggctggtggttgagatgcccacggctaagcacctgtggctgcattttaacagtaaaggaggccgttgttttcagcgc

SEQ ID NO: 23693 - DNA, 3135 bp, Artificial Sequence
  derived and/or modified sequence
atgaagggcaccagagccatcggcagcgtgcccgagagaagccccgccggcgtggacctgagcctgaccggcctgcccccccccgtgagcagaagacccggcagcgccgccaccaccaagcccatcgtgagaagcgtgagcgtggtgaccggcagcgagcagaagagaaaggtgctggaggccaccggccccggcggcagccaggccatcaacaacctgagaagaagcaacagcaccacccaggtgagccagcccagaagcggcagccccagacccaccgagcccaccgacttcctgatgctgttcgagggcagccccagcggcaagaagagacccgccagcctgagcaccgcccccagcgagaagggcgccacctggaacgtgctggacgaccagcccagaggcttcaccctgcccagcaacgccagaagcagcagcgccctggacagccccgccggccccagaagaaaggagtgcaccgtggccctggcccccaacttcaccgccaacaacagaagcaacaagggcgccgtgggcaactgcgtgaccaccatggtgcacaacagatacacccccagcgagagagccccccccctgaagagcagcaaccagaccgcccccagcctgaacaacatcatcaaggccgccacctgcgagggcagcgagagcagcggcttcggcaagctgcccaagaacgtgagcagcgccacccacagcgccagaaacaacaccggcggcagcaccggcctgcccagaagaaaggaggtgaccgaggaggaggccgagagattcatccaccaggtgaaccaggccaccgtgaccatccagagatggtacagacaccaggtgcagagaagaggcgccggcgccgccagactggagcacctgctgcaggccaagagagaggagcagagacagagaagcggcgagggcaccctgctggacctgcaccagcagaaggaggccgccagaagaaaggccagagaggagaaggccagacaggccagaagagccgccatccaggagctgcagcagaagagagccctgagagcccagaaggccagcaccgccgagagaggcccccccgagaaccccagagagaccagagtgcccggcatgagacagcccgcccaggagctgagccccacccccggcggcaccgcccaccaggccctgaaggccaacaacaccggcggcggcctgcccgccgccggccccggcgacagatgcctgcccaccagcgacagcagccccgagccccagcagccccccgaggacagaacccaggacgtgctggcccaggacgccgccggcgacaacctggagatgatggcccccagcagaggcagcgccaagagcagaggccccctggaggagctgctgcacaccctgcagctgctggagaaggagcccgacgtgctgcccagacccagaacccaccacagaggcagatacgcctgggccagcgaggaggacgacgccagcagcctgaccgccgacaacctggagaagttcggcaagctgagcgccttccccgagccccccgaggacggcaccctgctgagcgaggccaagctgcagagcatcatgagcttcctggacgagatggagaagagcggccaggaccagctggacagccagcaggagggctgggtgcccgaggccggccccggccccctggagctgggcagcgaggtgagcaccagcgtgatgagactgaagctggaggtggaggagaagaagcaggccatgctgctgctgcagagagccctggcccagcagagagacctgaccgccagaagagtgaaggagaccgagaaggccctgagcagacagctgcagagacagagagagcactacgaggccaccatccagagacacctggccttcatcgaccagctgatcgaggacaagaaggtgctgagcgagaagtgcgaggccgtggtggccgagctgaagcaggaggaccagagatgcaccgagagagtggcccaggcccaggcccagcacgagctggagatcaagaagctgaaggagctgatgagcgccaccgagaaggccagaagagagaagtggatcagcgagaagaccaagaagatcaaggaggtgaccgtgagaggcctggagcccgagatccagaagctgatcgccagacacaagcaggaggtgagaagactgaagagcctgcacgaggccgagctgctgcagagcgacgagagagccagccagagatgcctgagacaggccgaggagctgagagagcagctggagagagagaaggaggccctgggccagcaggagagagagagagccagacagagacagagagccgagctggaggagctgagacagcagctggaggagagcagcagcgccctgaccagagccctgagagccgagttcgagaagggcagagaggagcaggagagaagacaccagatggagctgaacaccctgaagcagcagctggagctggagagacaggcctgggaggccggcagaaccagaaaggaggaggcctggctgctgaacagagagcaggagctgagagaggagatcagaaagggcagagacaaggagatcgagctggtgatccacagactggaggccgacatggccctggccaaggaggagagcgagaaggccgccgagagcagaatcaagagactgagagacaagtacgaggccgagctgagcgagctggagcagagcgagagaaagctgcaggagagatgcagcgagctgaagggccagctgggcgaggccgagggcgagaacctgagactgcagggcctggtgagacagaaggagagagccctggaggacgcccaggccgtgaacgagcagctgagcagcgagagaagcaacctggcccaggtgatcagacaggagttcgaggacagactggccgccagcgaggaggagaccagacaggccaaggccgagctggccaccctgcaggccagacagcagctggagctggaggaggtgcacagaagagtgaagaccgccctggccagaaaggaggaggccgtgagcagcctgagaacccagcacgaggccgccgtgaagagagccgaccacctggaggagctgctggagcagcacagaagacccacccccagcaccaagtag

SEQ ID NO: 23694 - protein, 194 aa, Artificial Sequence
  derived and/or modified sequence
MGKRTSLEVSLGELGGEKCRGGRRSFPPLAASRPARPGGWRWARRDLCKTASRAENNSQACRPQRRAGPDALGPGPFGRKRRKSRTAFTAQQVLELERRFVFQKYLAPSERDGLATRLGLANAQVVTWFQNRRAKLKRDVEEMRADVASLRALSPEVLCSLALPEGAPDPGLCLGPAGPDSRPHLSDEEIQVDD

SEQ ID NO: 23695 - DNA, 585 bp, Artificial Sequence
  derived and/or modified sequence
atgggtaagcgcacaagcctggaagtttcgctgggcgaactgggaggtgagaagtgccgtggtggacgccggtctttccccccacttgctgcatcccgccctgcccggccaggaggttggaggtgggctcgtcgcgatctctgcaagaccgcctccagagcagaaaataactctcaggcctgcaggccccaaaggcgagctggccccgacgctctggggcccggccccttcggccgcaagaggcgaaagtcacgcaccgcgtttacagctcaacaggtcctggagctggaaagaaggttcgttttccagaagtatctggcgccctcagagcgtgatggactagcaacccgcctgggtctggcaaatgcgcaggtggttacttggtttcagaataggcgggctaaattaaaacgggacgtcgaagaaatgcgcgccgacgtggcaagcttgagggctctcagccctgaggtcctttgtagtctggccctgcccgaaggcgccccagaccctgggctctgtctggggcccgctggcccagatagcagacctcacctttccgatgaggaaatccaggtggacgattag

SEQ ID NO: 23696 - DNA, 3201 bp, Artificial Sequence
  derived and/or modified sequence
gaaataaaaacttttaaaaagcacctctcttctgccttattcttcctgcctcacactcatgctgtgtcctgccttcttcaaaaatcctctgagtttcattgtgaagaagggcctgtcctctatggccatgggccctcaatgtcttgccaaaggagaagggtagaggatccctatatgtgtgaaaccaggcctcccacaccactctttttggtgatgggaaggtttcctggaggggagctctcagctgtctttgtatgctgcagcatacagtgcgggtgcgggcctcttaggaggtttcctaattcagcggtggtgagaaggctagagttggacagtggctgctgcaggattgaacaagtgtgattttttaaagaaaaatccaaagaattgcattatagttttataacttgggggatggggacaaaaaggagggagaagtctaaaaaacaaatggagtggggccacaggaattgtcagaaatggaggcttaggctgtccatacaggattcagcaagtacttggggactgcgactagaagaagccagggtggggaataagtagctgaggaggagagggagctgatgtggaggagagcaagggcaacttcaaggaacaaaagggaagctgcaaggcaccagctccattaattcagcaaacattccttgtctgtatgccatgccagggtccttgttctatggttctctcagtggggtagctagaaacttgcccaacagacaggaacagacagaagccaaagcaaagaattcctgaaggtagccggcctgctgccaaacctgggacaaactgtatggaggcgcagcgtgtgtagccagaacccgagttaaaacctaggtcccaccctggccggtctgactccacggcttctaggggttggttgtgcgaagctgttgagggctgaaggcgctaaccatcaaagatggaggtcgggtggcagaagatggggtgggaggcagagagtgagtacagcgaaggcggcctcaactggataagaaaactccagacttgcgggaaaggcctgagctcgcattggacgctctggggtgccacagtcggacactgtttccgggagacctccgcctctccgcgcggatgaagaggctgcagacgccgaagaagagctcgagtgcgtggggcactgatggggatcggggtgggcacacagcagacggcctgggtacgcttctttcctgacatggtctccaaggttagcaaagcttccaaacgtttccaggcctccagcctggaatgcctctccccccgctccccgacctcttccaggaacaccccagctcagggctccccactccccttcctgcgaattgaagctctgtgggctttgcggtccgggcgggcgagtacctggcggccggggctgttctccaggagtttctgcgcgaaaagtttcctaggagtgacgggatggcgtgggctcaggggagagtagaaacgctcccgggggctttgcagggaccgagcagctgcgggagctggggagcagtctgactgggactccctggaaggccctgccattggggctgggcggcagctcggcgtcgaaaaagccgggtctgaagattaatgtgccgaggccggagaccctgaggaccaagtcacgggacttgcccttggtgactcacgccttgaggccgagcagcgcggaaggcgctcaggccggatctggggtggggcccagccgagccttggtcttgtctgtcagcagcggcagctgcactgcgtctcccaaggtggctgaagctggccagctgcgggctccgcgccgctcgtcccgggtctatgggtccattccccacgcccacccggaccccggggtcactcgggtctccgtctgtgccagggagggagaatcacgcccagggtcctctctggcttcgcgcgactgagaacgcgcccggacgcggcgcggcgctcctgagtcaaaggagaggtggcggcaggaccaccccagggcgccgtctgcacccccggacgcactcggccgtgctgcgcttccgggacaaggcgtcggttctcgcctgagggccaaaccttgcccctgcccaccttcctcacccccgccatttccaggactcacatccaaaggcgacagcaccaggatttgctcccgcctttggcacagaggaggacgggtccctctctcagcctggccagtctttcccagggcttgatgggaaaaaggacttccctagaagtgagtcttggggagttggggggagaaaagtgtcgaggagggcgtcggagtttcccaccgctggctgcttcccggcccgcacgcccgggagggtggcggtgggcgcgcagagatctttgcaaaacagcgtccagggcggaaaacaactcacaggcctgccgcccccaaaggcgggcaggtccggacgcgctgggccctggtcccttcggccgcaaacggcgcaagtcacgcactgcgttcaccgcgcaacaggtgctggagctggagcggcgcttcgtcttccagaagtacctggcgccgtccgagcgagacgggctagctacgcgactcggcctggccaacgcgcaggtggtcacttggttccagaaccggcgagccaagctcaagcgcgatgtggaggagatgcgcgccgacgtcgcctcgctacgcgcgttgtccccggaagtcctgtgcagcttagcactgcccgaaggcgctccagatcccggcctctgcctcggccctgccggccctgactcccggccccacctgtcagacgaggagatacaggtggacgattgaagacaaagccgccgccaatcctgggctctggggccctggactcctcacctcgcgctctgcctctggccagagttccagggtggaggaaggaggtccacttgggcctcttccggcccacagtccagacgctcacctttcccggtttttttgtaagtttgttttgttgtctgagacagggcctcgctctgtcgcccaggctggagtgccgtggagcgatcaccgctcactgcagtcgcgacctcctgggctcaagcgatcctcctgcctcaacctcccgactagctggcattacaggcgtgcagcaccaccccaggctaatttaaaaaacttttttttttagagaggaggtcccgctatgttgtccaggctactttcccaatatttgagaataaagtcgagactctgccgca

SEQ ID NO: 23697 - DNA, 585 bp, Artificial Sequence
  derived and/or modified sequence
atgggcaagaggaccagcctggaggtgtccctgggggagctgggcggggagaagtgccggggcggcagaagaagcttcccccccctggccgccagcaggcctgcccggcctgggggctggcgctgggcccggcgggacctgtgcaagacagccagcagagctgagaacaacagccaggcctgccggccccagaggagagctggcccagatgccctgggccctggcccctttggaaggaagaggaggaagagcaggacagccttcaccgcccagcaggtgctggagctggagaggagatttgtgttccagaagtacctggcccccagcgagagagatggcctggccacccggctgggcctggccaatgcccaggtggtgacctggttccagaacagaagagccaagctgaagagagatgtggaggagatgagagcagatgtggccagcctgcgggccctgagccctgaggtgctgtgcagcctggccctgcctgagggcgccccagaccccggcctgtgcctgggccctgctggccctgacagccggccccacctgagtgatgaggagatccaggtggatgactag

SEQ ID NO: 23698 - DNA, 585 bp, Artificial Sequence
  derived and/or modified sequence
atgggcaagcggaccagcctggaggtgagcctgggcgagctgggcggcgagaagtgccgcggtggacggagatcgtttccccccctcgccgcttcacgcccagctcgacctggcgggtggcgctgggcccgtagggatctgtgcaaaactgcaagccgggcggaaaacaatagccaggcctgtcggccacaacgccgcgctggacccgatgctctggggccggggccattcggaaggaagaggaggaaatcgcgaacagcattcacagctcagcaagtactggaattggaacggcggttcgtattccaaaagtacctggccccctctgaacgcgacggacttgctactagactcggactcgccaatgcacaggtggtaacatggttccaaaacagaagggcgaagctgaagcgagacgtggaagagatgagggcggatgtcgcctcacttcgtgcgctgtcccctgaagtgctgtgctccctggccttacccgagggagctcccgatcccggtctctgcctaggccccgccgggcctgacagtagacctcacctttcagacgaggagatacaggtggacgactag

SEQ ID NO: 23699 - DNA, 585 bp, Artificial Sequence
  derived and/or modified sequence
atgggaaaaaggacgtcacttgaagtttccttaggggagctcggcggtgagaaatgtcgaggtggccgaaggtccttccctcccttagccgcatctcgacccgcaagaccgggaggctggagatgggcacggcgagacctctgtaagacagcttccagggctgaaaacaatagtcaggcttgtcgtccgcagcgccgagctgggcctgacgccctcggacctggaccctttggacggaagcgtcggaaatctcgaaccgcattcactgcccagcaggtcctcgaactcgaacgacgtttcgtctttcagaaatatcttgctccctccgagagagacggcctcgcaaccagactgggacttgccaacgcccaagtcgttacctggtttcaaaataggcgcgcaaagttaaagagagacgtcgaggagatgcgagcggacgtggctagcctgcgagcactgagccccgaagttctgtgctcattggctttacctgaaggtgcccctgatccgggactctgtcttgggcctgcaggcccagattcaaggccacacctaagcgacgaggaaattcaggtagacgattag

SEQ ID NO: 23700 - DNA, 585 bp, Artificial Sequence
  derived and/or modified sequence
atgggcaagagaaccagcctggaggtgagcctgggcgagctgggcggcgagaagtgcagaggcggcagaagaagcttcccccccctggccgccagcagacccgccagacccggcggctggagatgggccagaagagacctgtgcaagaccgccagcagagccgagaacaacagccaggcctgcagaccccagagaagagccggccccgacgccctgggccccggccccttcggcagaaagagaagaaagagcagaaccgccttcaccgcccagcaggtgctggagctggagagaagattcgtgttccagaagtacctggcccccagcgagagagacggcctggccaccagactgggcctggccaacgcccaggtggtgacctggttccagaacagaagagccaagctgaagagagacgtggaggagatgagagccgacgtggccagcctgagagccctgagccccgaggtgctgtgcagcctggccctgcccgagggcgcccccgaccccggcctgtgcctgggccccgccggccccgacagcagaccccacctgagcgacgaggagatccaggtggacgactag

SEQ ID NO: 23701 - protein, 1039 aa, Artificial Sequence
  derived and/or modified sequence
MQSRLLLLGAPGGHGGPASRRMRLLLRQVVQRRPGGDRQRPEVRLLHAGSGADTGDTVNIGDVSYKLKIPKNPELVPQNYISDSLAQSVVQHLRWIMQKDLLGQDVFLIGPPGPLRRSIAMQYLELTKREVEYIALSRDTTETDLKQRREIRAGTAFYIDQCAVRAATEGRTLILEGLEKAERNVLPVLNNLLENREMQLEDGRFLMSAERYDKLLRDHTKKELDSWKIVRVSENFRVIALGLPVPRYSGNPLDPPLRSRFQARDIYYLPFKDQLKLLYSIGANVSAEKVSQLLSFATTLCSQESSTLGLPDFPLDSLAAAVQILDSFPMMPIKHAIQWLYPYSILLGHEGKMAVEGVLKRFELQDSGSSLLPKEIVKVEKMMENHVSQASVTIRIADKEVTIKVPAGTRLLSQPCASDRFIQTLSHKQLQAEMMQSHMVKDICLIGGKGCGKTVIAKNFADTLGYNIEPIMLYQDMTARDLLQQRYTLPNGDTAWRSSPLVNAALEGKLVLLDGIHRVNAGTLAVLQRLIHDRELSLYDGSRLLREDRYMRLKEELQLSDEQLQKRSIFPIHPSFRIIALAEPPVIGSTAHQWLGPEFLTMFFFHYMKPLVKSEEIQVIKEKVPNVPQEALDKLLSFTHKLRETQDPTAQSLAASLSTRQLLRISRRLSQYPNENLHSAVTKACLSRFLPSLARSALEKNLADATIEINTDDNLEPELKDYKCEVTSGTLRIGAVSAPIYNAHEKMKVPDVLFYDNIQHVIVMEDMLKDFLLGEHLLLVGNQGVGKNKIVDRFLHLLNRPREYIQLHRDTTVQTLTLQPSVKDGLIVYEDSPLVKAVKLGHILVVDEADKAPTNVTCILKTLVENGEMILADGRRIVANSANVNGRENVVVIHPDFRMIVLANRPGFPFLGNDFFGTLGDIFSCHAVDNPKPHSELEMLRQYGPNVPEPILQKLVAAFGELRSLADQGIINYPYSTREVVNIVKHLQKFPTEGLSSVVRNVFDFDSYNNDMREILINTLHKYGIPIGAKPTSVQLAKE

SEQ ID NO: 23702 - protein, 481 aa, Artificial Sequence
  derived and/or modified sequence
MQSRLLLLGAPGGHGGPASRRMRLLLRQVVQRRPGGDRQRPEVRLLHAGSGADTGDTVNIGDVSYKLKIPKNPELVPQNYISDSLAQSVVQHLRWIMQKDLLGQDVFLIGPPGPLRRSIAMQYLELTKREVEYIALSRDTTETDLKQRREIRAGTAFYIDQCAVRAATEGRTLILEGLEKAERNVLPVLNNLLENREMQLEDGRFLMSAERYDKLLRDHTKKELDSWKIVRVSENFRVIALGLPVPRYSGNPLDPPLRSRFQARDIYYLPFKDQLKLLYSIGANVSAEKVSQLLSFATTLCSQESSTLGLPDFPLDSLAAAVQILDSFPMMPIKHAIQWLYPYSILLGHEGKMAVEGVLKRFELQDSGSSLLPKEIVKVEKMMENHVSQASVTIRIADKEVTIKVPAGTRLLSQPCASDRFIQTLSHKQLQAEMMQSHMVKDICLIGGKGCGKTVIAKNFADTLGYNIEPIMLYQHKVPHI

SEQ ID NO: 23703 - DNA, 1513 bp, Artificial Sequence
  derived and/or modified sequence
cacggtgcctgcacgggacgccgctcgatccccgagccccctcgccgtccccgacagcccccccggcgccatgcaatcccggcttctactcctcggggcacccggaggccacggcggcccggcctcgcggcgcatgcggctgctcctgcggcaggtggtgcagcgcaggccgggtggcgacaggcagcggccggaggtcagactgttgcacgccggctcgggggccgacacaggtgatacagttaatattggagatgtatcctacaagttgaaaattcctaagaatccagaacttgtgccacagaactacatttcagactctctggctcaatctgtagttcagcatctaagatggataatgcagaaggatcttttggggcaagatgtttttctaataggacctcctgggcctcttcgacgctctattgctatgcagtacttggagctgaccaaacgggaggtcgaatacattgccctgtcaagggacaccactgaaactgatctcaaacagcgacgagagatccgtgcaggcacagccttttacattgatcagtgtgcagttcgtgcagccacagaaggcagaactctcattttggaaggtttggaaaaggcagagaggaatgttttgcctgttttgaacaacttgctggaaaacagagagatgcagcttgaagatggacgcttcctgatgtctgctgagcgttacgacaaacttctccgagatcataccaaaaaagagttggattcttggaaaattgtccgagttagtgaaaatttccgagtgattgccttgggcttgccagtgccaaggtattctgggaatccattagacccccctcttcgttctcgatttcaagccagggatatttattatttacccttcaaggaccaacttaagttgttatattcaattggagccaatgtttctgctgagaaagtttctcagctcttgtcctttgccacaactctgtgttcccaagaatcttctactcttggacttccagactttcctttagatagtttagcagctgcggttcaaatcttggattcctttcctatgatgccaatcaaacatgcaatccagtggctttatccatatagtattttactaggtcatgaagggaagatggctgtggaaggtgttttaaagcgctttgaacttcaagattcaggaagctctctacttcctaaagagattgtaaaagtagagaagatgatggaaaaccatgtgtcccaagcttctgtgaccatccggattgcagataaagaggtgaccattaaggtgccagccgggaccaggctattaagtcaaccttgtgcgtcagaccgtttcatacagactttgagccataagcagctacaggctgaaatgatgcagtctcacatggttaaagatatatgtttaattggaggaaagggttgtggaaaaacagtgatcgctaagaactttgccgataccttaggatacaacatagaacctattatgctctatcagcataaagtacctcatata

SEQ ID NO: 23704 - DNA, 1446 bp, Artificial Sequence
  derived and/or modified sequence
atgcagtccagattgctcttgctgggcgcacccggtggtcacggcggtcctgcatccaggcggatgcgtctgcttctgaggcaagtcgtgcaacgaaggcccggaggagatcgccagcggcctgaggtccgcttactgcacgctgggagtggggctgataccggcgacacagtaaacattggcgatgtcagctacaagcttaagataccaaagaaccctgaattggtgccacagaactacatctccgattctttagctcagagtgtggtacaacatctcagatggataatgcagaaagacctgctgggccaggacgttttcctgatcggtcctcctggtcctctccgacggagtatcgcaatgcagtacctggagcttacaaagcgcgaagtcgagtatattgccctgagccgcgacacaactgagacagacctgaagcagagaagggagattagggctggaactgccttttatatcgatcagtgcgcggtgagggccgctacagaagggcgaaccctaattctggaagggctcgagaaggccgagcgtaatgtgctgcccgtgctcaacaacctgcttgagaatcgggagatgcagctggaagacgggcgatttttaatgagtgctgagcggtacgataagctgttgagggatcacactaaaaaggagctggacagctggaaaatcgttcgtgtctcagaaaactttcgcgttatcgccctgggcttgcccgtgccccgatacagcggcaacccattagaccccccacttcggagtagattccaagccagggacatctactaccttcccttcaaggaccagctaaaactgctgtactcaatcggcgctaacgtcagcgctgaaaaggtcagccaactcctgtccttcgcgacaacactctgctcacaagagtcatcaactctcggcctcccagacttccccctcgactccctggccgctgctgttcaaatcctagacagtttccctatgatgcccatcaagcacgctatccagtggttgtatccgtattctatactgcttggccacgaaggaaaaatggccgtggaaggtgtactgaaacggtttgagctgcaagattctgggtcttcactcctgccaaaagagattgttaaggttgagaagatgatggaaaatcatgtgtcccaggcgagcgtgaccattagaattgccgataaagaagtaaccattaaagtgccagcaggaactcggctgctgtctcagccttgtgcgtccgaccggttcatccagaccctcagtcataaacagctacaagccgagatgatgcaatcccatatggtgaaagacatttgcctcattggtggaaaagggtgtggcaagactgtgatcgccaagaattttgcggataccctgggatataacatcgaacccatcatgctgtaccagcataaggttccccacatttag

SEQ ID NO: 23705 - DNA, 1446 bp, Artificial Sequence
  derived and/or modified sequence
atgcagtccaggctcctgctgctgggggctccaggtggccacggtgggccagcctctagaaggatgagactactactgagacaggtagttcagcgccggcctggcggcgacaggcagcgtcccgaagtgagactactgcacgccggctccggcgccgatactggagataccgtaaacatcggagatgttagttacaaactgaagattcctaaaaatcctgaacttgtccctcagaattatatttccgactctctggcccaatcagttgtgcagcacttgaggtggatcatgcaaaaagacttattaggccaggatgtgttcctgattggcccccccggtcctcttcgtaggtcgatcgcaatgcaatacttagaactgacaaaacgggaagtggagtacattgccctgtccagagacaccaccgaaaccgatctgaagcagagaagagagatcagggctgggacggcgttctatatagaccagtgcgctgttagggctgctacagagggcaggaccctgatcttggagggcttggagaaggccgaacgcaacgtgctgccagtactcaacaacctcctggagaaccgtgagatgcaactagaagatggcagatttcttatgagcgccgaaagatatgacaagctgttaagggatcataccaagaaggagctcgatagttggaagattgtgagggtatccgagaactttcgcgttattgcgttaggcctgccggtgccccgttactcggggaatcccctggacccccctcttcggtcgaggtttcaggctcgggacatatactatcttcccttcaaagaccagttgaaactgctgtactccattggagccaacgtaagtgccgaaaaagtgtcacaactgttgtcattcgcaaccaccttgtgtagtcaggaaagcagtacattgggtctcccagatttccccctggacagtttagcagccgctgtccagattttggattctttccccatgatgccaataaaacacgctatccagtggttgtatccctactccattctgttaggacacgaagggaaaatggccgtcgaaggagtcttgaaaagattcgaactgcaggactctgggtcttctctccttccaaaggagattgttaaggtggaaaaaatgatggagaaccacgtgtcacaggcctccgtgaccatcaggatcgccgacaaagaggtaacaataaaggtaccagcaggaactcgccttttatctcagccctgtgcgtccgacaggttcatacagactttgagtcacaaacagcttcaagcggagatgatgcagagccacatggtgaaggatatctgtctgattggcggaaagggctgtgggaagacagttatcgctaagaattttgcagataccctgggctacaacatagaaccaatcatgctgtatcaacacaaggtgccccatatctag

SEQ ID NO: 23706 - DNA, 1446 bp, Artificial Sequence
  derived and/or modified sequence
atgcaatctagactgctgcttctcggggcacccggcggacacggcggtcccgcatctagaaggatgaggcttctattacgacaggtggtacagcggcgaccaggcggtgatcggcagagaccagaggtgaggctgcttcatgcggggtctggagccgataccggggacacagttaatattggcgatgtgtcctacaagcttaagatacccaagaaccctgagctcgtcccgcaaaattatatttctgattccctggcccagagcgtcgtacagcatctccgatggataatgcaaaaagacctcctgggacaggatgtgttccttattggcccccctggcccactccgcagatccatcgcaatgcaatatctggagctgactaagcgagaagttgaatacatagcccttagtcgagatacaactgaaactgaccttaagcaacgacgggagatccgcgccggcactgccttctatattgaccaatgcgccgtgagagccgccacggaaggtaggacactgatactggaagggttggagaaggcggaacggaacgtcctccccgtgttgaacaatctgcttgaaaacagagaaatgcagcttgaggatggcaggttcttaatgagcgcagaacgctacgataaattactgcgcgatcacactaaaaaggaacttgacagttggaagatcgttcgggtttctgaaaactttcgggtcattgccttaggactccccgtgcctagatactccggtaaccctctggaccctcctctaaggtcacgctttcaggctcgcgacatctactatttaccattcaaagatcagttaaagttactatactcgatcggagccaatgtttccgccgagaaggtgagtcaattgctgagctttgcaaccactttgtgttcacaagagagttctactctgggtctacccgacttccctcttgactctctggccgccgccgtacagattctagattcatttccaatgatgcctattaagcacgccatccagtggctatacccctactccattctcctggggcatgagggcaagatggctgtggagggcgtactcaaaagatttgaactccaagattccggctccagtttactacccaaggagattgtgaaggtagagaagatgatggagaaccatgtcagccaggcatccgtgaccattcgtattgccgataaggaagttaccattaaagttccagccggcactaggctcctcagccagccctgcgcttcagacagattcattcaaacattgtcccataagcaattacaggccgaaatgatgcagtctcatatggtgaaagacatttgcctgatcggtggcaaagggtgcggaaaaacagtcatcgccaaaaattttgctgacaccctcgggtacaatattgaaccaattatgttgtatcagcacaaagtaccccatatctag

SEQ ID NO: 23707 - DNA, 1446 bp, Artificial Sequence
  derived and/or modified sequence
atgcagagcagactgctgctgctgggcgcccccggcggccacggcggccccgccagcagaagaatgagactgctgctgagacaggtggtgcagagaagacccggcggcgacagacagagacccgaggtgagactgctgcacgccggcagcggcgccgacaccggcgacaccgtgaacatcggcgacgtgagctacaagctgaagatccccaagaaccccgagctggtgccccagaactacatcagcgacagcctggcccagagcgtggtgcagcacctgagatggatcatgcagaaggacctgctgggccaggacgtgttcctgatcggcccccccggccccctgagaagaagcatcgccatgcagtacctggagctgaccaagagagaggtggagtacatcgccctgagcagagacaccaccgagaccgacctgaagcagagaagagagatcagagccggcaccgccttctacatcgaccagtgcgccgtgagagccgccaccgagggcagaaccctgatcctggagggcctggagaaggccgagagaaacgtgctgcccgtgctgaacaacctgctggagaacagagagatgcagctggaggacggcagattcctgatgagcgccgagagatacgacaagctgctgagagaccacaccaagaaggagctggacagctggaagatcgtgagagtgagcgagaacttcagagtgatcgccctgggcctgcccgtgcccagatacagcggcaaccccctggacccccccctgagaagcagattccaggccagagacatctactacctgcccttcaaggaccagctgaagctgctgtacagcatcggcgccaacgtgagcgccgagaaggtgagccagctgctgagcttcgccaccaccctgtgcagccaggagagcagcaccctgggcctgcccgacttccccctggacagcctggccgccgccgtgcagatcctggacagcttccccatgatgcccatcaagcacgccatccagtggctgtacccctacagcatcctgctgggccacgagggcaagatggccgtggagggcgtgctgaagagattcgagctgcaggacagcggcagcagcctgctgcccaaggagatcgtgaaggtggagaagatgatggagaaccacgtgagccaggccagcgtgaccatcagaatcgccgacaaggaggtgaccatcaaggtgcccgccggcaccagactgctgagccagccctgcgccagcgacagattcatccagaccctgagccacaagcagctgcaggccgagatgatgcagagccacatggtgaaggacatctgcctgatcggcggcaagggctgcggcaagaccgtgatcgccaagaacttcgccgacaccctgggctacaacatcgagcccatcatgctgtaccagcacaaggtgccccacatctag

SEQ ID NO: 23708 - DNA, 1446 bp, Artificial Sequence
  derived and/or modified sequence
atgcaaagcaggctgctgctcctgggcgcgccaggaggacatggtggtcctgcttcccgcaggatgcgtttattattgcgccaagtggtgcagcgccggccgggcggcgaccgacagaggccagaagttcgcctcctgcacgccggctcaggtgccgacacaggcgatactgtgaacattggtgatgtgtcttacaaactcaagattcctaaaaaccccgagctcgtgccccaaaactacatttccgactccctggctcagtcagtggttcaacacttgaggtggatcatgcaaaaagacctgctcggacaagacgtgttccttatagggcctccagggccactgcgcagatcaattgcaatgcagtatctggagctcacgaaacgggaggtcgagtatattgccctcagccgcgataccacggagaccgacttgaaacaacgcagagaaattagggccgggactgccttttatatcgatcagtgcgcggttagggctgccaccgagggccggactctcatcctggaggggttggagaaggctgagcgaaatgtcctgccagtcctcaataacctgcttgagaatcgcgagatgcagctggaggatggcagatttctgatgagcgcagagcggtacgacaagctccttagagatcatactaaaaaggagctcgactcatggaagatagtgagagtgtctgaaaattttcgagtgattgccctaggcctacccgtgcctcggtatagcggcaatcccctggacccgcccctccggagtcgctttcaagctcgggatatctactatttgcccttcaaggatcagcttaaactgctgtacagcataggcgcaaatgttagtgcagaaaaggtcagccagttgctgtcatttgcaactactctctgttctcaggagagcagtaccctcggtcttccggacttccctctagactcactcgccgccgcggtgcagattttggactccttcccgatgatgccaataaaacacgccattcagtggttatacccctacagcatactcctgggccatgaaggtaagatggcggtggaaggggttctgaagcgttttgaactgcaggacagcggctcttccctgctgccaaaagagatcgtcaaggtcgagaagatgatggagaatcatgtgtcccaggcctcggtgacgatccgcattgccgataaagaagtgacgatcaaagttcccgccggtaccagactcctgtctcaaccctgcgccagcgacagatttatccagacattgtcgcataaacagctgcaggctgagatgatgcagagtcacatggtgaaggacatttgtctaattgggggcaaggggtgcggtaagaccgtgatagcgaagaactttgcagatacgctcggctacaacatcgaacccattatgttgtatcagcacaaagtgccccacatctag

SEQ ID NO: 23709 - DNA, 1446 bp, Artificial Sequence
  derived and/or modified sequence
atgcagagccggctgctgctgctgggcgcccctgggggccacggcggccctgccagcaggaggatgaggctgctgctgcggcaggtggtgcagaggaggcctggaggagaccggcagaggcctgaggtgcggctgctgcacgccggcagcggggctgacaccggggacacagtgaacattggagatgtgtcctacaagctgaagatccccaagaaccctgagctggtgccccagaactacatcagtgacagcctggcccagagcgtggtgcagcacctgcgctggatcatgcagaaggacctgctgggccaggatgtgttcctgattggccccccaggccccctgcggcgcagcatcgccatgcagtacctggagctgaccaagcgggaggtggagtacatcgccctgagccgggacaccacagaaacagacctgaagcagaggcgggagatccgggccggcacagccttctacatcgaccagtgtgctgtgcgggccgccacagagggccgcaccctcatcctggagggcctggagaaggccgagagaaatgtgctgcctgtgctgaacaacctgctggagaaccgggagatgcagctggaggatggccgcttcctgatgtctgctgagagatatgacaagctgctgcgggaccacaccaagaaggagctggacagctggaagatcgtgcgggtgtctgagaacttccgggtgattgccctgggcctgcctgtgccccgctacagcggcaaccccctggacccccccctgcggagccgcttccaggcccgggacatctactacctgcccttcaaggaccagctgaagctgctgtacagcattggagccaacgtgtctgctgagaaggtgtcccagctgctgagctttgccaccaccctgtgcagccaggagagcagcaccctgggcctgcctgacttccccctggacagcctggccgctgctgtgcagatcctggacagcttccccatgatgcccatcaagcacgccatccagtggctgtacccctacagcatcctgctgggccacgagggcaagatggctgtggagggcgtgctgaagagatttgagctgcaggacagcggcagcagcctgctgcccaaggagatcgtgaaggtggagaagatgatggagaaccacgtgtcccaggcctctgtgaccatcagaattgctgacaaggaggtgaccatcaaggtgcctgctggcacccggctgctgagccagccctgtgccagtgaccgcttcatccagaccctgagccacaagcagctgcaggccgagatgatgcagagccacatggtgaaggacatctgcctgattggaggcaagggctgcggcaagacagtcatcgccaagaactttgctgacaccctgggctacaacatcgagcccatcatgctgtaccagcacaaggtgccccacatctag

SEQ ID NO: 23710 - DNA, 1446 bp, Artificial Sequence
  derived and/or modified sequence
atgcagagccggctgctgctgctgggcgcccccggcggccacggcggccctgcaagccgcagaatgcggctcttactgagacaggtcgttcagaggcgacccggaggcgacagacagaggccagaggtacgcctgctccacgccggatcaggggctgatactggcgacaccgtgaacatcggtgatgtgagctacaaacttaagatcccaaaaaacccagagctggtgccgcagaattatatttccgacagcctggcacaatccgtggtgcagcacctccgctggatcatgcagaaagacctgctcggacaggatgtctttctcattggaccccccggtcctctccgacgcagcatcgctatgcaatacctagagctcactaagcgggaagttgaatatattgctctttcccgtgacaccacggagaccgatctgaaacagcggagagaaatccgggcaggcactgcattctatatcgaccagtgtgccgtgcgggcagctacagaaggacgcactttgatactggagggactggaaaaagctgaaaggaatgtgcttcccgtattgaataatctgctcgaaaacagggagatgcagcttgaagacggtcggttccttatgtcagctgagcgctacgataaactgctgcgggaccataccaagaaggagctcgactcctggaagatcgtgcgtgtctcagagaactttcgtgtcatagcactaggccttcccgtgccccggtatagcggtaatcccctggacccaccattgaggtcccggtttcaggctcgggatatttattacctgcctttcaaagaccagctgaagttactgtactctataggcgctaacgtcagtgcagagaaagtctcacagcttctttccttcgcgaccaccctttgctctcaggagtcttctaccctgggactgcccgacttccctctcgattcgttagcggcagccgtgcaaatcctggacagctttccgatgatgcccatcaaacatgctattcagtggttgtatccatactcaatcctgcttggccatgaggggaagatggcagtggaaggcgtgctcaaacggttcgagttgcaggattccggaagttcacttttgcccaaagagattgtgaaggtggagaaaatgatggagaaccatgtttctcaagcgtccgttactatccgtattgccgacaaagaggtcacaatcaaggtgcccgccggcaccaggctattgtcccagccttgcgcgtcggaccggtttatccagaccttatcccataaacagctgcaggccgagatgatgcagtctcacatggttaaggacatttgtttgatcgggggaaagggctgtggaaagactgtgattgcaaagaatttcgcagataccctcggctacaatattgaacccattatgctgtatcagcacaaggtgccacatatctag

SEQ ID NO: 23711 - RNA, 1446 nt, Artificial Sequence
  derived and/or modified sequence
augcaguccaggcuccugcugcugggggcuccagguggccacggugggccagccucuagaaggaugagacuacuacugagacagguaguucagcgccggccuggcggcgacaggcagcgucccgaagugagacuacugcacgccggcuccggcgccgauacuggagauaccguaaacaucggagauguuaguuacaaacugaagauuccuaaaaauccugaacuugucccucagaauuauauuuccgacucucuggcccaaucaguugugcagcacuugagguggaucaugcaaaaagacuuauuaggccaggauguguuccugauuggcccccccgguccucuucguaggucgaucgcaaugcaauacuuagaacugacaaaacgggaaguggaguacauugcccuguccagagacaccaccgaaaccgaucugaagcagagaagagagaucagggcugggacggcguucuauauagaccagugcgcuguuagggcugcuacagagggcaggacccugaucuuggagggcuuggagaaggccgaacgcaacgugcugccaguacucaacaaccuccuggagaaccgugagaugcaacuagaagauggcagauuucuuaugagcgccgaaagauaugacaagcuguuaagggaucauaccaagaaggagcucgauaguuggaagauugugaggguauccgagaacuuucgcguuauugcguuaggccugccggugccccguuacucggggaauccccuggaccccccucuucggucgagguuucaggcucgggacauauacuaucuucccuucaaagaccaguugaaacugcuguacuccauuggagccaacguaagugccgaaaaagugucacaacuguugucauucgcaaccaccuuguguagucaggaaagcaguacauugggucucccagauuucccccuggacaguuuagcagccgcuguccagauuuuggauucuuuccccaugaugccaauaaaacacgcuauccagugguuguaucccuacuccauucuguuaggacacgaagggaaaauggccgucgaaggagucuugaaaagauucgaacugcaggacucugggucuucucuccuuccaaaggagauuguuaagguggaaaaaaugauggagaaccacgugucacaggccuccgugaccaucaggaucgccgacaaagagguaacaauaaagguaccagcaggaacucgccuuuuaucucagcccugugcguccgacagguucauacagacuuugagucacaaacagcuucaagcggagaugaugcagagccacauggugaaggauaucugucugauuggcggaaagggcugugggaagacaguuaucgcuaagaauuuugcagauacccugggcuacaacauagaaccaaucaugcuguaucaacacaaggugccccauaucuag

SEQ ID NO: 23712 - RNA, 1446 nt, Artificial Sequence
  derived and/or modified sequence
augcaaucuagacugcugcuucucggggcacccggcggacacggcggucccgcaucuagaaggaugaggcuucuauuacgacaggugguacagcggcgaccaggcggugaucggcagagaccagaggugaggcugcuucaugcggggucuggagccgauaccggggacacaguuaauauuggcgauguguccuacaagcuuaagauacccaagaacccugagcucgucccgcaaaauuauauuucugauucccuggcccagagcgucguacagcaucuccgauggauaaugcaaaaagaccuccugggacaggauguguuccuuauuggccccccuggcccacuccgcagauccaucgcaaugcaauaucuggagcugacuaagcgagaaguugaauacauagcccuuagucgagauacaacugaaacugaccuuaagcaacgacgggagauccgcgccggcacugccuucuauauugaccaaugcgccgugagagccgccacggaagguaggacacugauacuggaaggguuggagaaggcggaacggaacguccuccccguguugaacaaucugcuugaaaacagagaaaugcagcuugaggauggcagguucuuaaugagcgcagaacgcuacgauaaauuacugcgcgaucacacuaaaaaggaacuugacaguuggaagaucguucggguuucugaaaacuuucgggucauugccuuaggacuccccgugccuagauacuccgguaacccucuggacccuccucuaaggucacgcuuucaggcucgcgacaucuacuauuuaccauucaaagaucaguuaaaguuacuauacucgaucggagccaauguuuccgccgagaaggugagucaauugcugagcuuugcaaccacuuuguguucacaagagaguucuacucugggucuacccgacuucccucuugacucucuggccgccgccguacagauucuagauucauuuccaaugaugccuauuaagcacgccauccaguggcuauaccccuacuccauucuccuggggcaugagggcaagauggcuguggagggcguacucaaaagauuugaacuccaagauuccggcuccaguuuacuacccaaggagauugugaagguagagaagaugauggagaaccaugucagccaggcauccgugaccauucguauugccgauaaggaaguuaccauuaaaguuccagccggcacuaggcuccucagccagcccugcgcuucagacagauucauucaaacauugucccauaagcaauuacaggccgaaaugaugcagucucauauggugaaagacauuugccugaucgguggcaaagggugcggaaaaacagucaucgccaaaaauuuugcugacacccucggguacaauauugaaccaauuauguuguaucagcacaaaguaccccauaucuag

SEQ ID NO: 23713 - protein, 1428 aa, Artificial Sequence
  derived and/or modified sequence
MENEPDHENVEQSLCAKTSEEELNKSFNLEASLSKFSYIDMDKELEFKNDLIDDKEFDIPQVDTPPTLESILNETDDEDESFILEDPTLLNIDTIDSHSYDTSSVASSDSGDRTNLKRKKKLPDSFSLHGSVMRHSLLKGISAQIVSAADKVDAGLPTAIAVSSLIAVGTSHGLALIFGKYQNQALRLCLGSTSVGGQYGAISALSINNDCSRLLCGFAKGQITMWDLASGKLLRSITDAHPPGTAILHIKFTDDPTLAICNDSGGSVFELTFKRVMGVRTCESRCLFSGSKGEVCCIEPLHSKPELKDHPITQFSLLAMASLTKILVIGLKPSLKVWMTFPYGRMDPSSVPLLAWHFVAVQNYVNPMLAFCRGDVVHFLLVKRDESGAIHVTKQKHLHLYYDLINFTWINSRTVVLLDSVEKLHVIDRQTQEELETVEISEVQLVYNSSHFKSLATGGNVSQALALVGEKACYQSISSYGGQIFYLGTKSVYVMMLRSWRERVDHLLKQDCLTEALALAWSFHEGKAKAVVGLSGDASKRKAIVADRMVEILFHYADRALKKCPDQGKIQVMEQHFQDMVPVIVDYCLLLQRKDLLFSQMYDKLSENSVAKGVFLECLEPYILSDKLVGITPQVMKDLIVHFQDKKLMENVEALIVHMDITSLDIQQVVLMCWENRLYDAMIYVYNRGMNEFISPMEKLFRVIAPPLNAGKTLTDEQVVMGNKLLVYISCCLAGRAYPLGDIPEDLVPLVKNQVFEFLIRLHSAEASPEEEIYPYIRTLLHFDTREFLNVLALTFEDFKNDKQAVEYQQRIVDILLKVMVENSDFTPSQVGCLFTFLARQLAKPDNTLFVNRTLFDQVLEFLCSPDDDSRHSERQQVLLELLQAGGIVQFEESRLIRMAEKAEFYQICEFMYEREHQYDKIIDCYLRDPLREEEVFNYIHNILSIPGHSAEEKQSVWQKAMDHIEELVSLKPCKAAELVATHFSGHIETVIKKLQNQVLLFKFLRSLLDPREGIHVNQELLQISPCITEQFIELLCQFNPTQVIETLQVLECYRLEETIQITQKYQLHEVTAYLLEKKGDIHGAFLIMLERLQSKLQEVTHQGENTKEDPSLKDVEDTMVETIALCQRNSHNLNQQQREALWFPLLEAMMAPQKLSSSAIPHLHSEALKSLTMQVLNSMAAFIALPSILQRILQDPVYGKGKLGEIQGLILGMLDTFNYEQTLLETTTSLLNQDLHWSLCNLRASVTRGLNPKQDYCSICLQQYKRRQEMADEIIVFSCGHLYHSFCLQNKECTVEFEGQTRWTCYKCSSSNKVGKLSENSSEIKKGRITPSQVKMSPSYHQSKGDPTAKKGTSEPVLDPQQIQAFDQLCRLYRGSSRLALLTELSQNRSSESYRPFSGSQSAPAFNSIFQNENFQLQLIPPPVTED

SEQ ID NO: 23714 - protein, 1428 aa, Artificial Sequence
  derived and/or modified sequence
MENEPDHENVEQSLCAKTSEEELNKSFNLEASLSKFSYIDMDKELEFKNDLIDDKEFDIPQVDTPPTLESILNETDDEDESFILEDPTLLNIDTIDSHSYDTSSVASSDSGDRTNLKRKKKLPDSFSLHGSVMRHSLLKGISAQIVSAADKVDAGLPTAIAVSSLIAVGTSHGLALIFGKDQNQALRLCLGSTSVGGQYGAISALSINNDCSRLLCGFAKGQITMWDLASGKLLRSITDAHPPGTAILHIKFTDDPTLAICNDSGGSVFELTFKRVMGVRTCESRCLFSGSKGEVCCIEPLHSKPELKDHPITQFSLLAMASLTKILVIGLKPSLKVWMTFPYGRMDPSSVPLLAWHFVAVQNYVNPMLAFCRGDVVHFLLVKRDESGAIHVTKQKHLHLYYDLINFTWINSRTVVLLDSVEKLHVIDRQTQEELETVEISEVQLVYNSSHFKSLATGGNVSQALALVGEKACYQSISSYGGQIFYLGTKSVYVMMLRSWRERVDHLLKQDCLTEALALAWSFHEGKAKAVVGLSGDASKRKAIVADRMVEILFHYADRALKKCPDQGKIQVMEQHFQDMVPVIVDYCLLLQRKDLLFSQMYDKLSENSVAKGVFLECLEPYILSDKLVGITPQVMKDLIVHFQDKKLMENVEALIVHMDITSLDIQQVVLMCWENRLYDAMIYVYNRGMNEFISPMEKLFRVIAPPLNAGKTLTDEQVVMGNKLLVYISCCLAGRAYPLGDIPEDLVPLVKNQVFEFLIRLHSAEASPEEEIYPYIRTLLHFDTREFLNVLALTFEDFKNDKQAVEYQQRIVDILLKVMVENSDFTPSQVGCLFTFLARQLAKPDNTLFVNRTLFDQVLEFLCSPDDDSRHSERQQVLLELLQAGGIVQFEESRLIRMAEKAEFYQICEFMYEREHQYDKIIDCYLRDPLREEEVFNYIHNILSIPGHSAEEKQSVWQKAMDHIEELVSLKPCKAAELVATHFSGHIETVIKKLQNQVLLFKFLRSLLDPREGIHVNQELLQISPCITEQFIELLCQFNPTQVIETLQVLECYRLEETIQITQKYQLHEVTAYLLEKKGDIHGAFLIMLERLQSKLQEVTHQGENTKEDPSLKDVEDTMVETIALCQRNSHNLNQQQREALWFPLLEAMMAPQKLSSSAIPHLHSEALKSLTMQVLNSMAAFIALPSILQRILQDPVYGKGKLGEIQGLILGMLDTFNYEQTLLETTTSLLNQDLHWSLCNLRASVTRGLNPKQDYCSICLQQYKRRQEMADEIIVFSCGHLYHSFCLQNKECTVEFEGQTRWTCYKCSSSNKVGKLSENSSEIKKGRITPSQVKMSPSYHQSKGDPTAKKGTSEPVLDPQQIQAFDQLCRLYRGSSRLALLTELSQNRSSESYRPFSGSQSAPAFNSIFQNENFQLQLIPPPVTED

SEQ ID NO: 23715 - protein, 140 aa, Artificial Sequence
  derived and/or modified sequence
MENEPDHENVEQSLCAKTSEEELNKSFNLEASLSKFSYIDMDKELEFKNDLIDDKEFDIPQVDTPPTLESILNETDDEDESFILEDPTLLNIDTIDSHSYDTSSVASSDSGDRTNLKRKKKLPDSFSLHGSVMRHSLLKG

SEQ ID NO: 23716 - DNA, 4287 bp, Artificial Sequence
  derived and/or modified sequence
atggagaacgagcccgaccacgagaacgtggagcagagcctgtgcgccaagaccagcgaggaggagctgaacaagagcttcaacctggaggccagcctgagcaagttcagctacatcgacatggacaaggagctggagttcaagaacgacctgatcgacgacaaggagttcgacatcccccaggtggacaccccccccaccctggagagcatcctgaacgagaccgacgacgaggacgagagcttcatcctggaggaccccaccctgctgaacatcgacaccatcgacagccacagctacgacaccagcagcgtggccagcagcgacagcggcgacagaaccaacctgaagagaaagaagaagctgcccgacagcttcagcctgcacggcagcgtgatgagacacagcctgctgaagggcatcagcgcccagatcgtgagcgccgccgacaaggtggacgccggcctgcccaccgccatcgccgtgagcagcctgatcgccgtgggcaccagccacggcctggccctgatcttcggcaagtaccagaaccaggccctgagactgtgcctgggcagcaccagcgtgggcggccagtacggcgccatcagcgccctgagcatcaacaacgactgcagcagactgctgtgcggcttcgccaagggccagatcaccatgtgggacctggccagcggcaagctgctgagaagcatcaccgacgcccacccccccggcaccgccatcctgcacatcaagttcaccgacgaccccaccctggccatctgcaacgacagcggcggcagcgtgttcgagctgaccttcaagagagtgatgggcgtgagaacctgcgagagcagatgcctgttcagcggcagcaagggcgaggtgtgctgcatcgagcccctgcacagcaagcccgagctgaaggaccaccccatcacccagttcagcctgctggccatggccagcctgaccaagatcctggtgatcggcctgaagcccagcctgaaggtgtggatgaccttcccctacggcagaatggaccccagcagcgtgcccctgctggcctggcacttcgtggccgtgcagaactacgtgaaccccatgctggccttctgcagaggcgacgtggtgcacttcctgctggtgaagagagacgagagcggcgccatccacgtgaccaagcagaagcacctgcacctgtactacgacctgatcaacttcacctggatcaacagcagaaccgtggtgctgctggacagcgtggagaagctgcacgtgatcgacagacagacccaggaggagctggagaccgtggagatcagcgaggtgcagctggtgtacaacagcagccacttcaagagcctggccaccggcggcaacgtgagccaggccctggccctggtgggcgagaaggcctgctaccagagcatcagcagctacggcggccagatcttctacctgggcaccaagagcgtgtacgtgatgatgctgagaagctggagagagagagtggaccacctgctgaagcaggactgcctgaccgaggccctggccctggcctggagcttccacgagggcaaggccaaggccgtggtgggcctgagcggcgacgccagcaagagaaaggccatcgtggccgacagaatggtggagatcctgttccactacgccgacagagccctgaagaagtgccccgaccagggcaagatccaggtgatggagcagcacttccaggacatggtgcccgtgatcgtggactactgcctgctgctgcagagaaaggacctgctgttcagccagatgtacgacaagctgagcgagaacagcgtggccaagggcgtgttcctggagtgcctggagccctacatcctgagcgacaagctggtgggcatcaccccccaggtgatgaaggacctgatcgtgcacttccaggacaagaagctgatggagaacgtggaggccctgatcgtgcacatggacatcaccagcctggacatccagcaggtggtgctgatgtgctgggagaacagactgtacgacgccatgatctacgtgtacaacagaggcatgaacgagttcatcagccccatggagaagctgttcagagtgatcgccccccccctgaacgccggcaagaccctgaccgacgagcaggtggtgatgggcaacaagctgctggtgtacatcagctgctgcctggccggcagagcctaccccctgggcgacatccccgaggacctggtgcccctggtgaagaaccaggtgttcgagttcctgatcagactgcacagcgccgaggccagccccgaggaggagatctacccctacatcagaaccctgctgcacttcgacaccagagagttcctgaacgtgctggccctgaccttcgaggacttcaagaacgacaagcaggccgtggagtaccagcagagaatcgtggacatcctgctgaaggtgatggtggagaacagcgacttcacccccagccaggtgggctgcctgttcaccttcctggccagacagctggccaagcccgacaacaccctgttcgtgaacagaaccctgttcgaccaggtgctggagttcctgtgcagccccgacgacgacagcagacacagcgagagacagcaggtgctgctggagctgctgcaggccggcggcatcgtgcagttcgaggagagcagactgatcagaatggccgagaaggccgagttctaccagatctgcgagttcatgtacgagagagagcaccagtacgacaagatcatcgactgctacctgagagaccccctgagagaggaggaggtgttcaactacatccacaacatcctgagcatccccggccacagcgccgaggagaagcagagcgtgtggcagaaggccatggaccacatcgaggagctggtgagcctgaagccctgcaaggccgccgagctggtggccacccacttcagcggccacatcgagaccgtgatcaagaagctgcagaaccaggtgctgctgttcaagttcctgagaagcctgctggaccccagagagggcatccacgtgaaccaggagctgctgcagatcagcccctgcatcaccgagcagttcatcgagctgctgtgccagttcaaccccacccaggtgatcgagaccctgcaggtgctggagtgctacagactggaggagaccatccagatcacccagaagtaccagctgcacgaggtgaccgcctacctgctggagaagaagggcgacatccacggcgccttcctgatcatgctggagagactgcagagcaagctgcaggaggtgacccaccagggcgagaacaccaaggaggaccccagcctgaaggacgtggaggacaccatggtggagaccatcgccctgtgccagagaaacagccacaacctgaaccagcagcagagagaggccctgtggttccccctgctggaggccatgatggccccccagaagctgagcagcagcgccatcccccacctgcacagcgaggccctgaagagcctgaccatgcaggtgctgaacagcatggccgccttcatcgccctgcccagcatcctgcagagaatcctgcaggaccccgtgtacggcaagggcaagctgggcgagatccagggcctgatcctgggcatgctggacaccttcaactacgagcagaccctgctggagaccaccaccagcctgctgaaccaggacctgcactggagcctgtgcaacctgagagccagcgtgaccagaggcctgaaccccaagcaggactactgcagcatctgcctgcagcagtacaagagaagacaggagatggccgacgagatcatcgtgttcagctgcggccacctgtaccacagcttctgcctgcagaacaaggagtgcaccgtggagttcgagggccagaccagatggacctgctacaagtgcagcagcagcaacaaggtgggcaagctgagcgagaacagcagcgagatcaagaagggcagaatcacccccagccaggtgaagatgagccccagctaccaccagagcaagggcgaccccaccgccaagaagggcaccagcgagcccgtgctggacccccagcagatccaggccttcgaccagctgtgcagactgtacagaggcagcagcagactggccctgctgaccgagctgagccagaacagaagcagcgagagctacagacccttcagcggcagccagagcgcccccgccttcaacagcatcttccagaacgagaacttccagctgcagctgatccccccccccgtgaccgaggactag

SEQ ID NO: 23717 - DNA, 4287 bp, Artificial Sequence
  derived and/or modified sequence
atggagaacgagcccgaccacgagaacgtggagcagagcctgtgcgccaagaccagcgaggaggagctgaacaagagcttcaacctggaggccagcctgagcaagttcagctacatcgacatggacaaggagctggagttcaagaacgacctgatcgacgacaaggagttcgacatcccccaggtggacaccccccccaccctggagagcatcctgaacgagaccgacgacgaggacgagagcttcatcctggaggaccccaccctgctgaacatcgacaccatcgacagccacagctacgacaccagcagcgtggccagcagcgacagcggcgacagaaccaacctgaagagaaagaagaagctgcccgacagcttcagcctgcacggcagcgtgatgagacacagcctgctgaagggcatcagcgcccagatcgtgagcgccgccgacaaggtggacgccggcctgcccaccgccatcgccgtgagcagcctgatcgccgtgggcaccagccacggcctggccctgatcttcggcaaggaccagaaccaggccctgagactgtgcctgggcagcaccagcgtgggcggccagtacggcgccatcagcgccctgagcatcaacaacgactgcagcagactgctgtgcggcttcgccaagggccagatcaccatgtgggacctggccagcggcaagctgctgagaagcatcaccgacgcccacccccccggcaccgccatcctgcacatcaagttcaccgacgaccccaccctggccatctgcaacgacagcggcggcagcgtgttcgagctgaccttcaagagagtgatgggcgtgagaacctgcgagagcagatgcctgttcagcggcagcaagggcgaggtgtgctgcatcgagcccctgcacagcaagcccgagctgaaggaccaccccatcacccagttcagcctgctggccatggccagcctgaccaagatcctggtgatcggcctgaagcccagcctgaaggtgtggatgaccttcccctacggcagaatggaccccagcagcgtgcccctgctggcctggcacttcgtggccgtgcagaactacgtgaaccccatgctggccttctgcagaggcgacgtggtgcacttcctgctggtgaagagagacgagagcggcgccatccacgtgaccaagcagaagcacctgcacctgtactacgacctgatcaacttcacctggatcaacagcagaaccgtggtgctgctggacagcgtggagaagctgcacgtgatcgacagacagacccaggaggagctggagaccgtggagatcagcgaggtgcagctggtgtacaacagcagccacttcaagagcctggccaccggcggcaacgtgagccaggccctggccctggtgggcgagaaggcctgctaccagagcatcagcagctacggcggccagatcttctacctgggcaccaagagcgtgtacgtgatgatgctgagaagctggagagagagagtggaccacctgctgaagcaggactgcctgaccgaggccctggccctggcctggagcttccacgagggcaaggccaaggccgtggtgggcctgagcggcgacgccagcaagagaaaggccatcgtggccgacagaatggtggagatcctgttccactacgccgacagagccctgaagaagtgccccgaccagggcaagatccaggtgatggagcagcacttccaggacatggtgcccgtgatcgtggactactgcctgctgctgcagagaaaggacctgctgttcagccagatgtacgacaagctgagcgagaacagcgtggccaagggcgtgttcctggagtgcctggagccctacatcctgagcgacaagctggtgggcatcaccccccaggtgatgaaggacctgatcgtgcacttccaggacaagaagctgatggagaacgtggaggccctgatcgtgcacatggacatcaccagcctggacatccagcaggtggtgctgatgtgctgggagaacagactgtacgacgccatgatctacgtgtacaacagaggcatgaacgagttcatcagccccatggagaagctgttcagagtgatcgccccccccctgaacgccggcaagaccctgaccgacgagcaggtggtgatgggcaacaagctgctggtgtacatcagctgctgcctggccggcagagcctaccccctgggcgacatccccgaggacctggtgcccctggtgaagaaccaggtgttcgagttcctgatcagactgcacagcgccgaggccagccccgaggaggagatctacccctacatcagaaccctgctgcacttcgacaccagagagttcctgaacgtgctggccctgaccttcgaggacttcaagaacgacaagcaggccgtggagtaccagcagagaatcgtggacatcctgctgaaggtgatggtggagaacagcgacttcacccccagccaggtgggctgcctgttcaccttcctggccagacagctggccaagcccgacaacaccctgttcgtgaacagaaccctgttcgaccaggtgctggagttcctgtgcagccccgacgacgacagcagacacagcgagagacagcaggtgctgctggagctgctgcaggccggcggcatcgtgcagttcgaggagagcagactgatcagaatggccgagaaggccgagttctaccagatctgcgagttcatgtacgagagagagcaccagtacgacaagatcatcgactgctacctgagagaccccctgagagaggaggaggtgttcaactacatccacaacatcctgagcatccccggccacagcgccgaggagaagcagagcgtgtggcagaaggccatggaccacatcgaggagctggtgagcctgaagccctgcaaggccgccgagctggtggccacccacttcagcggccacatcgagaccgtgatcaagaagctgcagaaccaggtgctgctgttcaagttcctgagaagcctgctggaccccagagagggcatccacgtgaaccaggagctgctgcagatcagcccctgcatcaccgagcagttcatcgagctgctgtgccagttcaaccccacccaggtgatcgagaccctgcaggtgctggagtgctacagactggaggagaccatccagatcacccagaagtaccagctgcacgaggtgaccgcctacctgctggagaagaagggcgacatccacggcgccttcctgatcatgctggagagactgcagagcaagctgcaggaggtgacccaccagggcgagaacaccaaggaggaccccagcctgaaggacgtggaggacaccatggtggagaccatcgccctgtgccagagaaacagccacaacctgaaccagcagcagagagaggccctgtggttccccctgctggaggccatgatggccccccagaagctgagcagcagcgccatcccccacctgcacagcgaggccctgaagagcctgaccatgcaggtgctgaacagcatggccgccttcatcgccctgcccagcatcctgcagagaatcctgcaggaccccgtgtacggcaagggcaagctgggcgagatccagggcctgatcctgggcatgctggacaccttcaactacgagcagaccctgctggagaccaccaccagcctgctgaaccaggacctgcactggagcctgtgcaacctgagagccagcgtgaccagaggcctgaaccccaagcaggactactgcagcatctgcctgcagcagtacaagagaagacaggagatggccgacgagatcatcgtgttcagctgcggccacctgtaccacagcttctgcctgcagaacaaggagtgcaccgtggagttcgagggccagaccagatggacctgctacaagtgcagcagcagcaacaaggtgggcaagctgagcgagaacagcagcgagatcaagaagggcagaatcacccccagccaggtgaagatgagccccagctaccaccagagcaagggcgaccccaccgccaagaagggcaccagcgagcccgtgctggacccccagcagatccaggccttcgaccagctgtgcagactgtacagaggcagcagcagactggccctgctgaccgagctgagccagaacagaagcagcgagagctacagacccttcagcggcagccagagcgcccccgccttcaacagcatcttccagaacgagaacttccagctgcagctgatccccccccccgtgaccgaggactag

SEQ ID NO: 23718 - DNA, 4287 bp, Artificial Sequence
  derived and/or modified sequence
atggaaaacgaaccagaccacgagaatgtggagcagtccctctgcgccaagactagtgaggaggagcttaataaatcttttaacttggaggcatcactgtctaaattttcttatattgatatggacaaagagttggaattcaagaacgatctcatcgacgacaaagaatttgacattcctcaggtggacacgccacctacactcgagtccattctcaatgaaacagatgatgaggacgaatcttttattctggaagaccccacattactcaacatcgacaccattgacagtcattcgtatgacacttcctctgttgcctcttccgattccggtgacaggaccaacctgaaaaggaaaaagaagttgcccgactccttctctctacatggatcagtcatgagacactcactgttgaaggggatatctgcacagatcgtgtcggctgccgacaaggtcgatgccggtcttccaacagccattgctgtgtctagcctcatcgccgtgggaaccagccacgggctggccctaatattcggaaagtaccagaaccaggccctgagactctgcctcggctcaacaagcgtaggtggccaatatggtgcgatctcagcactctccattaataacgattgtagtcgcctcttatgtggatttgccaagggccagataacaatgtgggatttggcgtccggaaagcttttgcgatccatcacggacgcccatccacccggaaccgcaattctccacataaaatttaccgatgatcctaccttggccatctgtaacgacagcggcggtagcgtattcgagctgacatttaaaagggtgatgggagtgagaacctgtgagtctagatgcttgttcagcgggtcgaaaggcgaggtgtgctgcattgaaccactgcatagtaagcctgaactcaaggatcaccccataacacagttctctcttctggccatggcctccctgaccaaaattcttgtaataggactgaagccaagcctgaaggtctggatgaccttcccttacggccgcatggatcctagttccgtccccctcctagcctggcacttcgtagctgtccagaattatgtgaaccccatgttggccttctgtaggggagatgtcgtgcatttcctactggtgaagcgggacgagtcgggggcaattcacgtgaccaaacagaagcacctacacctttactatgatctgataaatttcacttggataaacagtcggacagtggtgttactggacagcgttgagaaactccatgtgattgaccgacagacccaggaggagctggaaacagtggagatcagcgaagtacagctggtttataactcctcgcactttaagagtttagccaccggcgggaacgtttcccaggctctggccctggtcggtgaaaaagcgtgctatcagtccattagctcatacggcggccaaatcttttacctggggactaagagtgtgtacgtcatgatgctcaggtcgtggcgggagcgagtcgaccatctcctgaagcaagattgtcttacagaggctctggctctagcatggtcttttcatgagggaaaggctaaggccgtcgtgggtttatcgggggatgccagcaaaagaaaagccattgtggccgacaggatggttgaaattctgttccactatgccgatcgagcactgaagaaatgtccggaccagggaaaaatccaggttatggaacagcactttcaggatatggtgcccgtcatcgtagactactgtcttcttctgcagaggaaggatctgctgttttcccaaatgtacgataaactgtcagagaactctgtggcaaagggagtatttcttgaatgcctggaaccttatatcttgtctgataagctggtggggatcacaccccaagtgatgaaagacttgattgtccacttccaagataaaaagctgatggaaaatgtggaagctctcatcgtacacatggacattactagtcttgacatacagcaggtggtgctcatgtgttgggagaataggttatatgacgctatgatttatgtgtacaacaggggtatgaacgagtttatttcccccatggagaagctctttcgagttattgccccgcctctcaatgcggggaaaaccctgactgacgaacaggtggtgatgggaaacaagctcctggtgtatatctcttgctgcctggccggaagagcctaccctttgggcgacatcccggaagacctagtgccactcgtaaaaaaccaggttttcgagttcctgatccgcctgcacagcgccgaggcgtccccagaagaggagatctatccatacatcaggaccctgctgcactttgatacacgggagtttttaaatgtgctggctttgacattcgaggattttaaaaatgacaagcaggcagtggaataccagcagagaatcgtcgacatcctgttgaaggtgatggtggagaattcggatttcacccccagtcaggttggatgcctctttactttcctcgcacggcagctcgctaagccagataacaccttgtttgtgaatcgcactctattcgaccaggtgctcgagtttctgtgttccccggatgatgactcgcgccatagtgagaggcagcaagtgctcctcgaactgcttcaagcaggtgggattgtgcagttcgaagaatcaagattgatacgtatggccgaaaaggcagaattctatcagatttgcgagttcatgtacgagcgcgagcaccaatacgataaaattattgactgctatctgcgggatcctttgagggaggaagaggtctttaattacatacacaatatcctgagcatacctgggcacagtgctgaagagaagcagagcgtttggcagaaggctatggatcacatcgaggaactggttagcttgaaaccctgtaaagccgccgagctggtcgccacacatttttccgggcatatcgagacagttatcaaaaagcttcaaaatcaagtgctcttattcaaatttttacggagcctcctcgaccccagggagggaatacacgtgaatcaggaacttctgcagatctctccgtgtatcaccgagcagttcattgagctcctgtgtcagttcaatccgacgcaggtcatagagaccctgcaagtcctcgagtgttaccgtctggaggaaactattcagattacgcagaagtaccagctccatgaagtgacagcctacttgcttgagaagaaaggagatattcatggagccttcttaattatgctggagagactccagtctaagctgcaggaagtgacacaccagggtgagaacacaaaggaagatccttccctaaaggacgtggaggataccatggtggagaccattgccctgtgtcagagaaactcacacaacctaaatcagcaacaacgggaggcactgtggtttccccttctcgaggcaatgatggcccctcagaagctttcttccagcgcgatcccccaccttcactccgaggctctgaaatcactaactatgcaggtcctcaactccatggccgcatttattgcactaccttccattctgcagcgtattttgcaggatccagtttatgggaaaggtaagttaggggaaatccaaggactgattttgggcatgctggacactttcaattacgagcagacactcttagagacgactaccagtcttttgaaccaggatcttcattggtccctttgcaatctgcgggccagcgttacccgtggactcaaccctaagcaggactactgcagcatctgtctccagcagtacaagcgtagacaggagatggcagacgagatcattgtgttctcctgcggccacttgtatcatagtttctgcctacaaaacaaggaatgtaccgtggagttcgagggacaaaccaggtggacctgctataaatgttcctcttcaaataaggtcggaaagctgtctgagaattcatcagagatcaagaagggtaggattactcccagtcaggtcaagatgtcaccttcctatcaccaatctaagggagacccaacagcaaagaagggtacttctgaaccggtgttggatccacagcagattcaggctttcgaccaattgtgccgcttgtataggggctcttctcgcttggcgctgctgactgagctgtctcaaaacagatcctccgaaagttacagacctttctctggtagccagagcgcccccgcattcaatagcatctttcaaaacgagaatttccagctgcaactaatccctcctcctgtgaccgaagattag

SEQ ID NO: 23719 - DNA, 4287 bp, Artificial Sequence
  derived and/or modified sequence
atggagaacgagccggatcacgagaatgtggaacaatctctgtgcgccaaaaccagtgaagaggaactaaataaatcattcaacctcgaagcatcactcagtaaatttagttatatagacatggacaaagaattagaattcaagaatgatctgatcgacgacaaggagttcgacatcccacaggtggatactccgccgactttagaatctatcctgaacgaaaccgatgatgaggatgagtcttttattcttgaagaccccaccttgcttaacattgacactatagacagtcatagctacgacacctcttccgtcgcctcttctgatagcggcgataggacgaacttaaagaggaagaagaagcttcctgactctttctctctgcacggttctgtgatgaggcacagcctgctgaaaggcatctcagcacaaatagtgtctgccgcagacaaagtggacgcggggctgccaactgcaattgccgtttcgtctctcatcgcagtaggaacaagtcatggcctggcactaatcttcggaaaagaccagaaccaggcgctgaggttgtgtttaggaagcacctccgtaggggggcagtacggagctattagtgccctttctataaataacgattgctctcggctcttatgtgggttcgctaaaggtcagattaccatgtgggacctcgcttccggcaaattactaaggtcgattaccgatgcacatccccccggaaccgccattctgcacatcaagttcactgacgatccgaccttggctatttgcaatgactctggcgggtctgtgttcgagctgacctttaaacgcgttatgggagtacgtacatgtgaaagccgctgtcttttttctggatccaaaggggaagtatgctgcattgagccattgcatagcaagcccgagcttaaggatcatccaatcactcagttcagcttgctggccatggccagcctgaccaagattctggtgattggacttaaaccctccctcaaggtgtggatgacgttcccatacgggagaatggacccaagctctgtgcccctgctcgcttggcatttcgtagccgtccagaattacgtcaatcccatgctggccttttgtagaggggatgtagtgcatttcctgcttgtgaagagagacgaatcaggcgccatacatgttactaaacagaaacatttacacttatactacgatctgatcaattttacctggatcaactcccgaactgttgttcttctcgacagcgttgagaaactgcatgtcatcgatcggcagactcaggaggaactcgaaaccgtggaaattagtgaggttcaacttgtgtataacagcagccacttcaagagtctcgctacggggggcaacgtaagccaggcgttggccctggtcggcgaaaaagcgtgctatcaatctatctcgtcatacgggggccagattttttacctcggcacaaaaagcgtttacgtcatgatgctcagatcatggcgggagagggtggatcacttgctgaaacaggattgcctgacggaagcgttggctttagcatggtcttttcatgagggaaaagccaaagctgtggtaggactaagtggtgacgcatccaagcgaaaggcaatcgtggcggatcgaatggtagaaatcctgtttcactatgccgatagagccctgaaaaagtgccctgaccagggcaagattcaggtgatggagcagcactttcaagacatggtccccgtaattgttgactactgtctgctgctgcagcggaaagatctacttttttcccagatgtatgacaaactaagcgagaacagcgtggctaaaggagttttcctagaatgtctagagccttacattctctcagataagctggtgggaataactccccaggtcatgaaggacctgattgtccactttcaggacaagaaattgatggaaaatgtggaggccctgatcgtgcacatggacatcaccagccttgacatccaacaagttgtgctcatgtgttgggagaacagattgtacgatgccatgatttacgtgtataataggggaatgaacgagttcatctctcccatggaaaagctcttccgggtcattgcgcctcctctgaacgcgggtaagacactgaccgacgaacaagtcgtaatgggcaacaaattgctcgtctacatctcatgctgcctagctggtcgcgcctatccgttgggcgatatcccagaggacttggtgccattagtaaaaaaccaggtgttcgagtttcttattcggctgcattctgctgaggccagccccgaggaggagatatacccttacattcgcacactcctacactttgacaccagggagttccttaatgtcttagcactgacttttgaggattttaaaaatgataaacaggcagtggaataccagcagagaatagtagatattctgctgaaggtgatggtcgaaaatagcgacttcacgccctcccaggtgggctgcctttttacctttcttgctcgccagttggccaagccagacaacacgctcttcgtaaacagaacgttgtttgatcaagtcctggagttcctctgctcccctgatgacgacagtcggcactccgaacgacaacaggtcttgctggagctgctccaagctggcgggattgtgcaattcgaggagagccgcctgattcgcatggctgaaaaggctgagttctatcagatctgtgaattcatgtacgagcgggaacaccagtatgacaagataatcgattgttatctgagggatcctctgcgcgaagaggaggtctttaactacatccataacatactttcaatcccaggtcattcagctgaagagaagcagtctgtttggcagaaggccatggaccatattgaagagttagttagcctaaagccttgtaaagctgcagagttggtcgctacacacttttcgggacatatcgagacggtgatcaagaagctccaaaaccaggttctactgttcaagttcttgagaagcctcctggatccccgggagggtattcacgttaatcaggaactgctccagataagtccctgcatcaccgaacagttcatcgagttgctctgtcagttcaatcctactcaagtaattgagactttgcaagtgctcgagtgctaccgactggaggagacgattcagataactcagaagtaccagctccacgaagttaccgcctatctcctcgaaaagaagggggacattcacggagcgttcctgattatgctggaaaggcttcagagtaaactccaggaggtcacacaccaaggagaaaataccaaggaagacccatccttgaaagatgtggaggataccatggtagaaactatcgcactgtgccagcgcaattcccataatttgaaccaacagcagcgcgaggccttgtggttccctctgcttgaggctatgatggctccccagaagctgagctcttcagcaatcccacacctgcatagcgaagccctgaagagtctgacaatgcaggtgctaaactccatggccgcctttattgcactccccagtatcttgcagagaatcctccaggaccctgtctacggaaagggcaaactaggtgagatacagggactgatcctgggcatgctggatacattcaactatgaacagactctgttggagactaccaccagtctcctgaatcaagacctccactggagcttgtgtaacctacgcgcctccgtcacacgcggactgaatccgaaacaggattattgttccatatgtctacagcaatataagcggcggcaagaaatggcagacgagatcatcgttttttcatgcggtcatctctaccatagtttctgcctgcagaataaagaatgcaccgtagaattcgagggacagacaaggtggacctgttacaaatgttcatcctctaataaggttggaaaactcagcgaaaatagttccgagattaagaagggaaggataacaccatctcaggttaaaatgtccccatcttatcaccagtcaaaaggagatcctacagccaagaaggggacaagcgaacctgtgttggaccctcagcaaatacaggctttcgatcaactttgccggctgtaccgtggtagttccaggctggcgttactgacagagctgagccaaaatcgtagctcagaatcatataggcccttctcagggagccagtctgcaccagcctttaattccatttttcagaatgaaaatttccagctgcagctcatcccaccaccagtgacagaagattag

SEQ ID NO: 23720 - DNA, 4287 bp, Artificial Sequence
  derived and/or modified sequence
atggagaatgaaccagaccatgaaaatgtggagcagagcctgtgtgccaagaccagcgaggaggagctgaacaagagcttcaacctggaggccagcctgagcaagttctcctacatcgacatggacaaggagctggagttcaagaatgacctgattgatgacaaggagtttgacatcccccaggtggacaccccacccaccctggagagcatcctgaatgaaacagatgatgaagatgagagcttcatcctggaggaccccaccctgctgaacatcgacaccatcgacagccacagctatgacaccagctctgtggccagcagtgacagcggggacaggaccaacctgaagaggaagaagaagctgcctgacagcttcagcctgcacggctctgtgatgaggcacagcctgctgaagggcatcagcgcccagatcgtgtctgctgctgacaaggtggatgctggcctgcccacagccatcgctgtgagcagcctgattgctgtgggcaccagccacggcctggccctgatctttgggaagtaccagaaccaggccctgcggctgtgcctgggcagcacctctgtgggcggccagtatggagccatcagcgccctgagcatcaacaatgactgcagccggctgctgtgtggctttgccaagggccagatcaccatgtgggacctggccagcggcaagctgctgcggagcatcacagatgcccaccccccaggcacagccatcctgcacatcaagttcacagatgaccccaccctggccatctgcaatgacagcggcggctctgtgtttgagctgaccttcaagagggtgatgggcgtgaggacctgtgagagccgctgcctcttcagcggcagcaagggggaggtgtgctgcatcgagcccctgcacagcaagccagagctgaaggaccaccccatcacccagttcagcctgctggccatggccagcctgaccaagatcctggtgattggcctgaagcccagcctgaaggtgtggatgaccttcccctacggccgcatggaccccagctctgtgcccctgctggcctggcactttgtggccgtgcagaactacgtgaaccccatgctggccttctgcagaggagatgtggtgcacttcctgctggtgaagagagatgaaagtggggccatccacgtgaccaagcagaagcacctgcacctgtactatgacctgatcaacttcacctggatcaacagcaggacagtggtgctgctggacagcgtggagaagctgcacgtgattgaccggcagacccaggaggagctggagaccgtggagatcagcgaggtgcagctggtgtacaacagcagccacttcaagagcctggccactggaggaaatgtgtcccaggccctggccctggtgggggagaaggcctgctaccagagcatcagcagctatggaggccagatcttctacctgggcaccaagtctgtgtatgtgatgatgctgcgctcctggagggagcgggtggaccacctgctgaagcaggactgcctgacagaggccctggccctggcctggagcttccacgagggcaaggccaaggctgtggtgggcctgtctggagatgccagcaagaggaaggccatcgtggccgacaggatggtggagatcctcttccactatgctgaccgggccctgaagaagtgcccagaccagggcaagatccaggtgatggagcagcacttccaggacatggtgcctgtgattgtggactactgcctgctgctgcagaggaaggacctgctcttcagccagatgtatgacaagctgtctgaaaattctgtggccaagggcgtcttcctggagtgcctggagccctacatcctgagtgacaagctggtgggcatcaccccccaggtgatgaaggacctgattgtgcacttccaggacaagaagctgatggagaatgtggaggccctgattgtgcacatggacatcaccagcctggacatccagcaggtggtgctgatgtgctgggagaaccggctgtatgatgccatgatctacgtgtacaacagaggcatgaatgagttcatcagccccatggagaagctgttccgggtcatcgccccacccctgaatgctgggaagaccctgacagatgagcaggtggtgatgggcaacaagctgctggtgtacatcagctgctgcctggccggccgggcctaccccctgggggacatccctgaggacctggtgcccctggtgaagaaccaggtgtttgagttcctgatccggctgcacagcgctgaggccagccctgaggaggagatctacccctacatccgcaccctgctgcactttgacacccgggagttcctgaatgtgctggccctgacctttgaggacttcaagaatgacaagcaggccgtggagtaccagcagagaattgtggacatcctgctgaaggtgatggtggagaacagcgacttcacccccagccaggtgggctgcctcttcaccttcctggcccggcagctggccaagccagacaacaccctgtttgtgaacagaaccctgtttgaccaggtgctggagttcctgtgcagcccagatgatgacagccgccacagcgagcggcagcaggtgctgctggagctgctgcaggccggcggcatcgtgcagtttgaggagagccgcctcatccgcatggccgagaaggccgagttctaccagatctgtgagttcatgtatgagcgggagcaccagtatgacaagatcatcgactgctacctgcgggaccccctgcgggaggaggaggtgttcaactacatccacaacatcctgagcatccctggccacagcgctgaggagaagcagagcgtgtggcagaaggccatggaccacatcgaggagctggtgtccctgaagccctgcaaggctgctgagctggtggccacccacttcagcggccacatcgagaccgtcatcaagaagctgcagaaccaggtgctgctcttcaagttcctgcggagcctgctggacccccgggagggcatccacgtgaaccaggagctgctgcagatcagcccctgcatcacagagcagttcatcgagctgctgtgccagttcaaccccacccaggtgattgagaccctgcaggtgctggagtgctaccgcctggaggagaccatccagatcacccagaagtaccagctgcacgaggtgacagcctacctgctggagaagaagggggacatccatggagccttcctgatcatgctggagcggctgcagagcaagctgcaggaggtgacccaccagggcgagaacaccaaggaggaccccagcctgaaggatgtggaggacaccatggtggagaccatcgccctgtgccagaggaacagccacaacctgaaccagcagcagcgggaggccctgtggttccccctgctggaggccatgatggccccccagaagctgagcagcagcgccatcccccacctgcacagcgaggccctgaagagcctgaccatgcaggtgctgaacagcatggccgccttcatcgccctgcccagcatcctgcagaggatcctgcaggaccctgtgtatggcaagggcaagctgggggagatccagggcctcatcctgggcatgctggacaccttcaactatgagcagaccctgctggagaccaccaccagcctgctgaaccaggacctgcactggagcctgtgcaacctgcgggcctctgtgacccggggcctgaaccccaagcaggactactgcagcatctgcctgcagcagtacaagaggcggcaggagatggctgatgagatcatcgtgttcagctgtggccacctgtaccacagcttctgcctgcagaacaaggaatgtactgtggagtttgagggccagacccgctggacctgctacaagtgcagcagcagcaacaaggtgggcaagctgtctgagaacagcagcgagatcaagaagggccgcatcacccccagccaggtgaagatgagccccagctaccaccagagcaaaggagaccccacagccaagaagggcaccagcgagcctgtgctggacccccagcagatccaggcctttgaccagctgtgccgcctgtaccggggcagcagccggctggccctgctgacagagctgagccagaacagaagcagcgagagctaccggcccttcagcggcagccagagcgccccagccttcaacagcatcttccagaatgaaaacttccagctgcagctgatccccccacctgtgacagaagattag

SEQ ID NO: 23721 - DNA, 4287 bp, Artificial Sequence
  derived and/or modified sequence
atggagaatgaaccagaccatgaaaatgtggagcagagcctgtgtgccaagaccagcgaggaggagctgaacaagagcttcaacctggaggccagcctgagcaagttctcctacatcgacatggacaaggagctggagttcaagaatgacctgattgatgacaaggagtttgacatcccccaggtggacaccccacccaccctggagagcatcctgaatgaaacagatgatgaagatgagagcttcatcctggaggaccccaccctgctgaacatcgacaccatcgacagccacagctatgacaccagctctgtggccagcagtgacagcggggacaggaccaacctgaagaggaagaagaagctgcctgacagcttcagcctgcacggctctgtgatgaggcacagcctgctgaagggcatcagcgcccagatcgtgtctgctgctgacaaggtggatgctggcctgcccacagccatcgctgtgagcagcctgattgctgtgggcaccagccacggcctggccctgatctttgggaaggaccagaaccaggccctgcggctgtgcctgggcagcacctctgtgggcggccagtatggagccatcagcgccctgagcatcaacaatgactgcagccggctgctgtgtggctttgccaagggccagatcaccatgtgggacctggccagcggcaagctgctgcggagcatcacagatgcccaccccccaggcacagccatcctgcacatcaagttcacagatgaccccaccctggccatctgcaatgacagcggcggctctgtgtttgagctgaccttcaagagggtgatgggcgtgaggacctgtgagagccgctgcctcttcagcggcagcaagggggaggtgtgctgcatcgagcccctgcacagcaagccagagctgaaggaccaccccatcacccagttcagcctgctggccatggccagcctgaccaagatcctggtgattggcctgaagcccagcctgaaggtgtggatgaccttcccctacggccgcatggaccccagctctgtgcccctgctggcctggcactttgtggccgtgcagaactacgtgaaccccatgctggccttctgcagaggagatgtggtgcacttcctgctggtgaagagagatgaaagtggggccatccacgtgaccaagcagaagcacctgcacctgtactatgacctgatcaacttcacctggatcaacagcaggacagtggtgctgctggacagcgtggagaagctgcacgtgattgaccggcagacccaggaggagctggagaccgtggagatcagcgaggtgcagctggtgtacaacagcagccacttcaagagcctggccactggaggaaatgtgtcccaggccctggccctggtgggggagaaggcctgctaccagagcatcagcagctatggaggccagatcttctacctgggcaccaagtctgtgtatgtgatgatgctgcgctcctggagggagcgggtggaccacctgctgaagcaggactgcctgacagaggccctggccctggcctggagcttccacgagggcaaggccaaggctgtggtgggcctgtctggagatgccagcaagaggaaggccatcgtggccgacaggatggtggagatcctcttccactatgctgaccgggccctgaagaagtgcccagaccagggcaagatccaggtgatggagcagcacttccaggacatggtgcctgtgattgtggactactgcctgctgctgcagaggaaggacctgctcttcagccagatgtatgacaagctgtctgaaaattctgtggccaagggcgtcttcctggagtgcctggagccctacatcctgagtgacaagctggtgggcatcaccccccaggtgatgaaggacctgattgtgcacttccaggacaagaagctgatggagaatgtggaggccctgattgtgcacatggacatcaccagcctggacatccagcaggtggtgctgatgtgctgggagaaccggctgtatgatgccatgatctacgtgtacaacagaggcatgaatgagttcatcagccccatggagaagctgttccgggtcatcgccccacccctgaatgctgggaagaccctgacagatgagcaggtggtgatgggcaacaagctgctggtgtacatcagctgctgcctggccggccgggcctaccccctgggggacatccctgaggacctggtgcccctggtgaagaaccaggtgtttgagttcctgatccggctgcacagcgctgaggccagccctgaggaggagatctacccctacatccgcaccctgctgcactttgacacccgggagttcctgaatgtgctggccctgacctttgaggacttcaagaatgacaagcaggccgtggagtaccagcagagaattgtggacatcctgctgaaggtgatggtggagaacagcgacttcacccccagccaggtgggctgcctcttcaccttcctggcccggcagctggccaagccagacaacaccctgtttgtgaacagaaccctgtttgaccaggtgctggagttcctgtgcagcccagatgatgacagccgccacagcgagcggcagcaggtgctgctggagctgctgcaggccggcggcatcgtgcagtttgaggagagccgcctcatccgcatggccgagaaggccgagttctaccagatctgtgagttcatgtatgagcgggagcaccagtatgacaagatcatcgactgctacctgcgggaccccctgcgggaggaggaggtgttcaactacatccacaacatcctgagcatccctggccacagcgctgaggagaagcagagcgtgtggcagaaggccatggaccacatcgaggagctggtgtccctgaagccctgcaaggctgctgagctggtggccacccacttcagcggccacatcgagaccgtcatcaagaagctgcagaaccaggtgctgctcttcaagttcctgcggagcctgctggacccccgggagggcatccacgtgaaccaggagctgctgcagatcagcccctgcatcacagagcagttcatcgagctgctgtgccagttcaaccccacccaggtgattgagaccctgcaggtgctggagtgctaccgcctggaggagaccatccagatcacccagaagtaccagctgcacgaggtgacagcctacctgctggagaagaagggggacatccatggagccttcctgatcatgctggagcggctgcagagcaagctgcaggaggtgacccaccagggcgagaacaccaaggaggaccccagcctgaaggatgtggaggacaccatggtggagaccatcgccctgtgccagaggaacagccacaacctgaaccagcagcagcgggaggccctgtggttccccctgctggaggccatgatggccccccagaagctgagcagcagcgccatcccccacctgcacagcgaggccctgaagagcctgaccatgcaggtgctgaacagcatggccgccttcatcgccctgcccagcatcctgcagaggatcctgcaggaccctgtgtatggcaagggcaagctgggggagatccagggcctcatcctgggcatgctggacaccttcaactatgagcagaccctgctggagaccaccaccagcctgctgaaccaggacctgcactggagcctgtgcaacctgcgggcctctgtgacccggggcctgaaccccaagcaggactactgcagcatctgcctgcagcagtacaagaggcggcaggagatggctgatgagatcatcgtgttcagctgtggccacctgtaccacagcttctgcctgcagaacaaggaatgtactgtggagtttgagggccagacccgctggacctgctacaagtgcagcagcagcaacaaggtgggcaagctgtctgagaacagcagcgagatcaagaagggccgcatcacccccagccaggtgaagatgagccccagctaccaccagagcaaaggagaccccacagccaagaagggcaccagcgagcctgtgctggacccccagcagatccaggcctttgaccagctgtgccgcctgtaccggggcagcagccggctggccctgctgacagagctgagccagaacagaagcagcgagagctaccggcccttcagcggcagccagagcgccccagccttcaacagcatcttccagaatgaaaacttccagctgcagctgatccccccacctgtgacagaagattag

SEQ ID NO: 23722 - DNA, 4287 bp, Artificial Sequence
  derived and/or modified sequence
atggagaacgagcccgaccacgagaacgtggagcagagcctgtgcgctaaaacgtcagaggaagaactgaataaatccttcaatctcgaagcctccctgagcaaattctcctatatagacatggacaaggagctcgaatttaaaaatgatctcatcgacgataaggaatttgacatcccccaggtcgacactccgcccaccctagagagtattctgaacgagactgacgacgaggatgagtctttcatcctggaggacccgacgttactaaacattgacactatagattcgcactcttatgacacctccagcgtggcctcatccgattcaggagacagaactaatctgaaaagaaaaaagaaattgcctgatagcttctctcttcatgggtccgtcatgagacattcactcttgaaggggatctcagcccagattgtttccgccgcagataaggtggacgctggtctaccgaccgcaatcgccgttagttcactcatagccgtaggaacctctcatggccttgccctgatcttcggtaaataccagaatcaggccctgagattgtgtctggggtcgaccagcgtgggcgggcagtacggcgctatctcggccctgtctatcaacaacgactgcagtcgacttctgtgcggtttcgctaagggacagataacaatgtgggatctagcgtcgggcaaactgcttcggtccattacggacgcacacccccctggcaccgcaattttacatataaagttcaccgatgatcccactctcgctatctgcaacgatagcggagggagcgtgtttgagcttaccttcaagcgtgtaatgggcgtgaggacctgcgagtctcgatgtctgttcagcgggtcgaagggggaggtttgctgcattgaaccgctgcactcaaagcccgagttgaaagaccatcctatcactcagtttagtcttctcgccatggccagtcttacaaaaatcctggtgataggactgaagccctcactgaaggtgtggatgacatttccatatggaagaatggatcccagttctgtgccgctcctggcctggcactttgtcgcagtacagaattacgtaaatcccatgctcgccttttgccgcggcgatgtggtacactttctgcttgtgaaaagggatgagagcggcgctatacacgtaaccaagcagaaacaccttcacttgtactatgacctgatcaacttcacatggataaattccagaacagtcgttctccttgactccgtggagaaactccatgtgatagacaggcagacccaggaggaacttgaaaccgttgagatcagcgaagtgcagctcgtctataactcttcccacttcaaaagcttggctaccggaggtaatgtctctcaggccctcgctctagtgggcgagaaggcgtgttaccaatcaatcagcagttatggcggccaaattttctatctggggacaaaaagcgtttacgtgatgatgctgagaagctggcgcgaaagagttgaccatctgctgaagcaggactgcttaacggaggccctggccctcgcctggtccttccacgagggcaaagctaaggccgtggtgggactgagtggcgacgcatcaaaaaggaaagccatcgtcgctgatcgcatggtcgaaattctctttcattacgcggaccgagccctgaagaagtgccccgatcagggaaaaatacaagtgatggaacagcacttccaagatatggtaccagtcattgtggattactgtttgttgttacagagaaaagatctcctcttcagccaaatgtacgacaaactctctgaaaatagcgttgccaagggtgtgtttctggagtgcctggagccttatattctgagcgataaattggttggcataacaccccaggtgatgaaagacttgatcgtgcatttccaggataaaaagctaatggagaatgttgaagcacttattgtccatatggacatcacctccctggacattcagcaggtcgtcctcatgtgttgggagaatcgcctctacgatgccatgatatatgtgtataacaggggaatgaacgagttcatatcaccgatggaaaaattgttccgggtgattgccccccccctgaatgcaggtaagaccctgacggatgagcaagtagtgatgggtaataagctccttgtttatattagctgttgcctggccggccgcgcttatcctctcggcgatattccggaagacctggtccccttggtgaaaaaccaggtgtttgaattcctgattcgcctgcactccgccgaggctagccctgaagaggagatttatccatacatccgcacactcctgcacttcgatacaagagagtttctgaacgtgctagccctgactttcgaagatttcaaaaacgacaagcaggcagtagaataccagcaaaggatcgtggacatcctcctgaaagtgatggtcgagaacagtgatttcaccccgtctcaagtcgggtgcctgttcactttccttgcacgacagttggcaaagcctgacaataccctgtttgtaaatcgcaccctgttcgaccaggtcctcgagtttctctgtagcccagacgacgactctcgacatagcgagagacagcaagttttactggagctgctccaggctggcgggattgtgcagtttgaagaatcccggctgattcggatggcagagaaggcagaattctatcagatttgtgaattcatgtacgagcgtgagcaccagtatgataagatcattgactgttacctgagggatcctctacgggaagaggaggtttttaattatatccataacatccttagcatcccagggcatagtgctgaggagaaacagtccgtctggcagaaggctatggaccacatcgaggaactcgtgagcctgaagccttgtaaagctgcggaactcgttgctactcacttttccggacacattgaaactgtcattaagaagttacaaaaccaggtcttactgtttaagtttttgcgctccctgctcgatccccgagaagggatacacgtgaaccaggagctgctgcagatctccccctgcattactgagcagttcattgagctcctctgccagtttaacccaacacaggtcattgagaccttgcaggtgctagagtgctaccgccttgaggaaacaattcagataacccaaaagtatcaacttcatgaagttaccgcttacctgctggaaaagaaaggagacatccatggcgcctttctgatcatgcttgagcgcttacagagtaagctccaggaggtgacccaccaaggggaaaatacaaaggaagatcctagcctcaaagacgtggaggacacaatggtggagaccatagccttatgccaacggaacagtcacaatcttaatcagcagcagcgcgaggcattatggtttccactgttggaggctatgatggcccctcagaagttaagtagttcagccataccccacctacattctgaagccctaaagtctttgacaatgcaggtcctgaacagcatggcggctttcatcgctctgccttcaattttgcaacgaattctgcaagatccagtttatggcaagggcaagctcggagagatacaaggactgatcctggggatgctggacactttcaattatgaacagaccctcctcgaaactacaacctcactgcttaaccaggatctccactggtcactgtgcaacttgagggcctctgtaactcgtggtcttaatccaaagcaggattattgtagtatctgcctgcagcagtacaagcgacgccaagagatggccgacgagattatagtgttctcatgcgggcatttgtaccattcattttgtctacagaacaaagaatgcacggtagaatttgaaggccagacaaggtggacgtgttacaaatgttcaagctcaaataaggtgggcaaactctccgaaaattcatcagaaattaaaaagggcaggatcacacccagtcaggtcaagatgtccccctcctatcaccaatcaaaaggcgatcccactgccaagaagggcaccagtgaaccagttttggatcctcagcagatccaggctttcgaccagttatgccgcctataccgtggcagcagcaggctggcacttctaaccgagctgagtcagaatagaagctctgagtcctatcggcccttttctggatcccagtccgctccagccttcaactccattttccaaaatgagaatttccagttgcagctcataccgccacctgttaccgaggactag

SEQ ID NO: 23723 - DNA, 4287 bp, Artificial Sequence
  derived and/or modified sequence
atggagaacgagcccgaccacgagaacgtggagcagagcctgtgcgcaaaaacgagcgaggaggagcttaataaaagttttaacctggaggcgtccctgtccaagttttcttatattgatatggataaggaactggagttcaaaaacgacctgatcgatgacaaagaatttgacatccctcaggtagatacaccgcccactctagagtcgatcctgaacgaaaccgatgacgaggacgagagtttcatcctcgaggatcccacccttcttaatatcgataccatcgacagtcactcctacgatacttcttccgtggctagctccgacagtggcgaccgtaccaacctgaaacgcaagaaaaaacttccagacagctttagtctgcacggctcagtgatgagacacagcctcctcaaggggatctccgcccagattgtgtccgcagctgacaaggtggacgccggactccctactgcaatcgctgtttctagcctgatcgctgtgggaaccagtcatggtctggccttaatttttgggaaggatcagaatcaggcgctgaggctgtgcctcggttccacaagtgtgggaggacaatacggcgccattagtgccctttccataaataacgactgcagtcgattgctctgtggatttgccaaaggacagattaccatgtgggacctggcttctggcaaacttctccgctccataactgacgctcaccctccagggacggccatcctgcatattaaattcacggatgacccgacgctcgccatctgtaatgatagcggtggaagcgtgtttgaacttaccttcaaaagggtgatgggcgtgagaacatgtgagtccagatgtctgttctcggggtctaaaggagaagtgtgttgtattgaacccttacattcaaaacctgagctcaaagaccaccctataacccaatttagcctcctggccatggcaagcctgacaaaaatcttagtgatcggcctgaagcctagcctgaaggtttggatgacatttccttacggacgcatggacccaagttccgtgccccttttagcatggcacttcgtggctgtccagaattacgtgaatcctatgctggccttctgccgcggagacgtggtccatttccttttggtcaagagagatgagtctggggcaatccacgtcaccaaacagaagcaccttcatttatactacgacctgatcaactttacgtggataaactcacgcacagtggttttgttagacagtgtggaaaagctccacgtgatcgatagacaaacacaggaggaactggagacagtggagatctccgaagtgcagttagtgtataattcttctcacttcaagtcattggccaccgggggaaatgtatcccaagccctggcccttgtgggggagaaggcctgctaccaaagcatttcctcctacggggggcaaattttctacctggggactaaatctgtatatgttatgatgttaagatcgtggagggagagagtggaccacctgttgaagcaggattgccttacagaggccttagctttggcctggtcattccatgaaggaaaggcgaaagctgtggtcggcttgtccggggacgctagcaagcgtaaagctatcgtggctgaccgtatggttgaaatcctgtttcactatgccgaccgagctctgaagaaatgccccgatcagggtaaaattcaagttatggaacagcacttccaggacatggtgcccgtgatagtggactattgtcttctgcttcagaggaaggacttgctgttctctcagatgtatgataaacttagcgagaactccgtagcaaaaggggtttttctggagtgcctggagccctacattttgagtgacaaactggtaggcattaccccgcaagtgatgaaggatctgatcgtgcacttccaagacaaaaagttgatggagaatgtcgaggccctaattgtgcatatggacatcacaagcctcgacattcagcaggttgtcttaatgtgctgggaaaacaggctctatgatgctatgatatacgtttacaatagaggcatgaatgagttcatcagccctatggagaagctctttagggtgatcgcccctcctctaaatgctggtaaaactctgactgacgagcaagtggtcatgggaaataagctactggtttacatttcatgctgcctggccgggagagcctacccactcggggacatacccgaggatctagtacccttggtgaagaatcaggttttcgagtttctgataagactccattcagctgaggcgagccccgaagaagagatatatccttacatccgtacacttctacactttgacacaagggagtttctgaacgtcctcgctcttacctttgaagacttcaaaaacgacaagcaagccgtggagtatcagcagcgaatcgtggacattctgttgaaggtgatggtggagaatagtgatttcactcccagccaggttggatgcttgttcactttcctggcacgacagctggctaagccagacaatactctttttgttaaccgcaccctgttcgatcaggttctagagtttctgtgctcccccgatgacgacagccggcacagcgagaggcagcaggttctcctggagttgttgcaggctgggggtattgtacagtttgaagagtccagactgatccgaatggccgagaaagctgaattttaccaaatctgcgaattcatgtatgaaagggagcaccagtacgacaagatcattgattgttacctccgagatcctctgcgcgaggaagaggttttcaattatatccacaacatcttgtctatcccaggtcattcagctgaggagaagcagtcagtgtggcagaaagctatggaccacatcgaggagttggtgtcgctaaagccctgtaaagcggcggagctcgtagccacccattttagcggacatattgaaactgtgattaaaaagcttcagaaccaggtgctgttgttcaagttcctccggagcctgctcgatcctagggagggcatccatgtgaatcaggaattgcttcagatcagcccttgtatcactgaacagttcatcgaactgctctgtcagtttaacccgacacaggtgatcgaaacactccaggtgctggagtgttacagactggaggagacaattcagattacccaaaaataccagctccatgaggtcactgcctatctgttggagaagaaaggtgatatccacggtgcctttctgataatgctggagcggctgcagtcaaagctgcaggaagtgactcatcagggagaaaataccaaggaagacccatccttgaaagatgtcgaagatacaatggtggagaccatcgctctgtgccagcggaactcccacaacttgaatcagcaacagagggaggctctgtggtttcccctgttggaggcaatgatggccccgcagaaactgtcctccagtgccatcccacatctgcattctgaagcactgaagtccctgactatgcaggttttgaatagtatggccgcctttattgcactgccgtcaattctgcagagaatcttgcaagaccctgtatacggtaaggggaagttgggagaaatccagggtctgattctgggcatgctcgatacctttaattatgagcagacgttgctggagacgactacgtcattactgaaccaggatctgcactggagcctttgtaatctccgagcatctgtgactaggggcctcaaccctaagcaagactactgtagtatctgtcttcagcaatataaaagacgccaggaaatggcagacgaaataattgtgttctcctgcggacacctttaccactctttttgtttgcagaataaagagtgtactgttgaattcgagggacagacaaggtggacttgttataagtgtagttcctcgaataaagtcggaaaattgtctgagaactcttccgaaatcaaaaagggccggatcactccaagccaggtgaagatgtctcccagctaccaccagtcgaagggggatcctaccgccaagaagggcacgtccgagcccgtgctcgatcctcagcagattcaagctttcgatcaactgtgtcggctgtatcgaggaagttctcgactggcgttgctgacggagttaagtcaaaatcggagctcagaaagctatcgtccattcagcggaagccagtcggcgccagcttttaactctatattccagaacgagaatttccagttgcagctgatccctccaccggtcactgaggattag

SEQ ID NO: 23724 - DNA, 4287 bp, Artificial Sequence
  derived and/or modified sequence
atggaaaatgaacctgaccatgaaaatgtggagcagtcactgtgcgccaaaaccagcgaagaagagctgaacaagtcatttaacttggaggccagcttgagcaagttcagctatattgacatggacaaagaactcgaatttaagaacgatctcatcgacgataaagaattcgacatcccgcaggtggacacgccccctaccctggagagtatattgaatgagactgacgatgaggatgagtccttcattctcgaggatccaaccctgttgaacattgacacaatcgattcccactcgtacgacaccagctccgtggccagttctgactcaggagatcgcacaaatctgaagagaaaaaagaagctcccagacagcttttccttgcacggctctgtgatgaggcactccctgctgaaagggatatcggcacaaattgtttcagcagcggacaaggtagacgcaggattgccaacagccatcgccgtaagctccttgattgcagtcggaacctcccacggactggccctgatatttggaaagtatcagaaccaggcgctccgactgtgtctaggatctacctccgtgggcggacagtatggagcaatcagtgctttgagtatcaacaacgactgctcccgcctgctatgtgggtttgcaaaaggccagatcaccatgtgggacctggcttctggcaagctgctgcgatctattaccgacgctcacccacctgggaccgccatcctccacatcaagttcaccgatgacccgacccttgccatttgtaatgattctggaggatccgtgtttgagctcacctttaagcgggtgatgggtgtgcggacgtgcgagagtaggtgtctcttcagcggatccaagggggaagtgtgttgtattgagcctctgcacagcaagcccgaactgaaagaccaccccattacccagttcagtctcctggccatggcctctctgaccaagatactggtgatagggctcaaaccgtcgcttaaggtctggatgacgtttccctacggacgcatggacccgagctctgtgcctctcttagcctggcacttcgtggctgtccagaactacgtcaatccaatgctcgctttttgccgcggagacgttgtgcactttcttctggtaaagcgggatgagtccggcgctatccacgtgaccaagcagaagcacctccatctgtactatgacttgataaattttacctggatcaattcacgcacagtcgtgctactcgattcagtggaaaagctccacgtcatagatcggcagacccaggaagaactggaaaccgtggagatttctgaggttcaactggtttacaactcctctcattttaagtccctcgcaaccggtgggaacgtgtctcaggcactcgctcttgtcggcgaaaaggcttgttaccagtccatctcttcctatggtgggcaaatcttttacctgggcactaagtccgtgtatgtcatgatgctgaggtcctggcgcgaacgggttgaccatctactaaagcaggattgcctgacagaggctctcgcattagcctggagcttccatgaagggaaggcgaaagcagtagtgggcctctccggagatgccagcaagcgcaaggcaatcgtggctgataggatggtggaaatcttgttccattatgctgatcgcgcactgaagaaatgcccagatcagggcaaaattcaagttatggaacaacacttccaggatatggtgccagtaatagtggattactgtttgctcttacagcgcaaagatctgctttttagtcagatgtacgataagctgtccgagaactcggtagcgaagggggtatttctggaatgtttggagccttatatcctctcggataagctggtgggcatcacaccacaggtgatgaaggacttgatcgtccactttcaggacaaaaagcttatggagaatgtggaagctctgatcgtgcacatggatataacatcactcgacattcagcaggtcgtgcttatgtgctgggagaatcgtctgtacgatgccatgatctacgtgtataaccggggaatgaacgaatttatatccccaatggaaaagctcttccgggtgattgctcctccgctaaatgccggaaagaccctgactgacgaacaggtggtgatgggaaataaacttctcgtatacattagttgctgccttgccggacgggcttacccactcggtgatatccctgaagacctggttccacttgtgaaaaatcaggtttttgaattcctgatccgcctgcattctgcggaggcatccccagaagaggaaatttacccttacatccggacgcttctgcatttcgataccagggagtttctcaacgtcctggccctgactttcgaggattttaaaaacgataaacaggctgtggaataccagcaacgtatcgtcgatattttgctgaaggttatggtagaaaacagcgacttcaccccctcccaggtggggtgcctgttcaccttccttgcccgtcagctcgcaaaaccagacaatactctttttgtcaaccgaaccctcttcgatcaagtactcgagttcttatgtagccccgatgatgacagtcggcattccgaaaggcagcaggttctgttggagttgctgcaggctgggggaatcgttcagttcgaagagtcacgcctgattcgtatggctgagaaagccgagttctatcagatttgcgagtttatgtatgagcgggagcaccaatacgacaagatcatagattgctacctgcgagatccgctgcgagaggaggaagtattcaactacatacacaatattctgtctattcctggacactcagctgaagagaagcaatcagtgtggcagaaggctatggatcacatcgaggagttggtcagcctgaagccttgtaaggcagccgagttggtggcaacccactttagtggtcacatcgagacagtgatcaaaaaattgcaaaatcaggtcctgcttttcaaatttcttagaagccttctggaccccagagagggaattcacgtgaatcaggaactgctgcaaatcagcccctgtataaccgagcagttcatcgaactcctatgtcagtttaacccaacacaagtcatcgagacattacaggtcttagaatgctacagactagaggagacaatacagatcactcagaaataccagctgcatgaggtcacggcctatctcctggaaaaaaaaggtgacattcatggcgctttcctgataatgctggaaaggctacagagtaagctgcaagaggtgacacaccagggtgagaacactaaagaagacccaagccttaaagacgtagaggatacaatggtggaaaccatagctttgtgtcagaggaatagccataacctcaaccagcagcagagagaagcactctggtttcctctgctggaggccatgatggcccctcaaaaactctcttcgagtgctattcctcatctccattccgaggccctcaaaagcctaactatgcaggtcctaaattctatggccgcttttatagccttacctagtatactccaacgaatccttcaggatccagtctatgggaagggtaaactgggcgaaatccagggacttatcctggggatgcttgacacatttaattacgagcaaaccctgttggagacaactacctccctcctgaaccaggacttgcactggtcactttgtaatctgcgggcatcagttacccggggactgaaccccaagcaagactattgctccatctgtctgcaacagtataagagacgacaagaaatggctgatgaaatcattgtgttctcctgtgggcacctttatcactcgttttgtctccagaacaaagaatgtaccgtcgaatttgaaggccagacacggtggacatgttacaagtgttctagcagcaacaaagtcggcaagctaagcgaaaattcatcagagattaaaaaggggaggattactccatctcaggtgaaaatgtcccccagctatcatcagtccaaaggagatccaaccgccaagaaggggaccagcgagcctgtcttggatccgcaacaaatccaggcatttgatcaactctgccgcctgtacaggggaagtagccgactggcccttctcaccgagttgtcgcagaatcggagctcagaatcctatagacctttttctgggtctcagtccgctcccgctttcaactctattttccagaatgaaaatttccagttacagcttatccctcctcctgtaactgaggattag

SEQ ID NO: 23725 - DNA, 4287 bp, Artificial Sequence
  derived and/or modified sequence
atggagaatgaaccagaccacgagaacgtcgagcaatcactgtgtgcaaagactagcgaggaagagctgaataagagctttaatctggaagctagcctgagcaagttctcatacatcgatatggataaggaactggaatttaagaacgatttgatcgatgataaagagtttgatattccgcaggtcgacactcccccaacattggaaagcatcttgaatgagaccgatgatgaggacgagtctttcatcctagaggatccaacattgctgaacatcgacactatcgacagccattcctatgatacatcaagcgtcgcttcctctgacagcggcgatcggactaatttgaaacggaaaaagaagcttcccgactcctttagcctgcacgggtctgtgatgcgccattccctgctcaagggtatttctgcacagattgtctccgccgctgacaaagtcgatgctggccttccgaccgctatcgctgtaagcagcctgatcgccgtgggtacaagccatggccttgcactcattttcggtaaagaccagaatcaagctttgaggttgtgtttaggttccacatccgttggcggtcagtatggcgcaatcagcgcgctctccataaacaacgactgttcaagactgctatgtggtttcgccaaaggccaaatcaccatgtgggatcttgccagcggtaaactgctgaggagcataactgacgctcacccgccaggaacagccatcctccatattaagtttactgatgaccccaccctggctatctgcaatgattctggtgggtctgtgttcgaactaactttcaaacgagttatgggcgttcgcacgtgcgagtctcgctgtctgttttcagggagtaaaggagaagtgtgctgcattgaacctctacatagtaagcccgaacttaaggaccaccccattactcagttttccctgctagccatggctagtctgacaaaaatacttgtgatcggccttaagccttcactgaaggtgtggatgacattcccatacgggaggatggatccaagctctgtgcccctgctcgcatggcactttgtggcagtgcagaattacgtgaatccaatgctagcattctgcaggggcgatgtagtccactttcttctggtcaaacgggatgaaagcggagccatccacgtgacaaagcagaaacacctgcatctatactacgacctgatcaactttacgtggattaattccagaactgtggttcttttagactccgtcgaaaaactccacgtgattgatcggcaaactcaggaagaactggagaccgttgaaatctccgaagtgcaactcgtatataactcttcccactttaagtccctcgcaacagggggtaatgtgtcccaagccctggctcttgtaggagaaaaggcttgctaccagtctatcagttcttacgggggacagatcttctatttgggtaccaagagcgtgtatgtaatgatgcttaggagttggagagagagggtcgatcacctgctaaagcaggattgtttaacagaggctttagccttagcctggagctttcatgaaggtaaagcaaaagccgttgtgggactaagtggtgacgcttcgaagcggaaggccattgtagcagatcgtatggttgaaatactcttccactacgccgacagggccctgaaaaaatgtcccgatcaaggcaaaattcaggtgatggagcaacactttcaggacatggtccccgttattgtggactactgcctgcttctgcaacgtaaagacttactttttagtcagatgtacgacaaactgtccgagaacagcgtcgcaaaaggcgtgttcctagagtgcctcgaaccctacattctgagtgacaaattggtcgggatcacaccacaggttatgaaagatttaatcgtgcacttccaagataagaaactgatggagaatgtcgaagccttaatcgttcacatggatattacaagcttagatatacaacaggttgtactgatgtgctgggaaaaccgcctgtacgacgccatgatttacgtatataaccggggaatgaacgagtttattagccccatggagaaactatttcgcgtgatagcccctcccctaaatgctggcaagacacttacagacgaacaggtggttatgggaaacaagcttctggtgtatatcagctgctgcctggcgggacgggcatatccgctgggagacatcccagaggacctggtccctttggtcaagaatcaggtgtttgagttcctcatcaggctgcactctgcagaggcgagcccggaggaagagatatatccatacattagaacactgttgcactttgacacccgagagtttctgaacgttctggcactcacctttgaggacttcaaaaacgataaacaagctgtggagtaccaacagaggatcgtggatatcctgctcaaggtgatggtcgaaaattcagattttacaccctcacaggtaggctgcttgtttacttttttggcaagacagctggcaaaaccggacaataccctgttcgttaatcgtacgctgtttgaccaggtgctggagttcctgtgctctcccgatgacgactctcgacacagtgagaggcagcaagtcctcctcgaactgttgcaagctggcggaatcgtgcaatttgaagaatcgagactaattcggatggccgaaaaggcagaattttaccagatttgtgaatttatgtatgagcgcgaacatcagtacgacaaaatcatcgattgctacttacgcgacccactgcgtgaagaagaggtgttcaattatatccacaatatcttgtctatccctggccatagcgccgaagaaaaacaaagcgtatggcaaaaggctatggatcacatcgaagagctggtgtccctgaagccttgcaaagccgctgagctagtcgctactcactttagtggacacatagaaacagtcatcaagaaattgcagaatcaggttctcctgttcaaattcctgcgaagcctcctggatcctagagaagggatccacgtcaaccaggagctgctacaaatcagcccatgtataacagagcagttcatagagctactgtgtcaattcaatccaacccaggtcattgagactctccaagtgctggagtgttatcggctcgaagagacaattcagattacacaaaaataccaactgcacgaggtgactgcctacttgctcgagaagaagggagacatccacggagcctttttgataatgttggagcgattacaaagtaagttgcaggaggttacacatcagggcgaaaacaccaaggaagatccgtctcttaaagatgtagaggatacgatggtggagacgatagccctttgccagagaaactcccacaatctgaatcagcaacaaagagaggccctttggttccctctgctggaagctatgatggctccccagaagctgagtagctccgccattccgcatctgcattctgaggcactcaagagccttacaatgcaggtgcttaattccatggccgctttcatcgctctgccatcaattctgcagcgcatcctgcaagaccctgtatacggcaaggggaaactgggagagattcagggcctcattctgggtatgttggatacttttaattatgagcaaactttgttggaaacgacaaccagcctactcaaccaggacttgcattggtcactatgtaacctgagggcctcagttacgagaggactgaacccaaagcaggactactgtagcatttgtctgcagcagtacaagcgcaggcaggaaatggctgacgagatcatcgttttttcttgtgggcatctgtaccatagtttttgtctgcagaacaaagaatgcacggtagagttcgaggggcagacccggtggacctgttacaaatgctcttcctccaacaaagtgggcaagctttcagagaacagttctgagataaaaaaaggcagaatcactccatcccaggtcaagatgtcacctagttaccaccagtcaaagggcgaccctacagccaagaagggtacctctgagcctgttctggatcctcagcagatccaagcctttgaccagctctgtcgtctctatcggggatcatcccgactcgcgttactgaccgaactttcacagaataggagctcagagtcctatcgcccattctccgggtcccagtccgccccagctttcaacagtatctttcagaatgaaaatttccaacttcagctgatcccaccccctgtgactgaagactag

SEQ ID NO: 23726 - DNA, 5047 bp, Artificial Sequence
  derived and/or modified sequence
aggtagtgcgcgtgcgtgaggctagagcagtgggtgcggtcacgtgggccggcggtccacggccggaatggcagcaagctcagagataatcattcaggtcttcgtgagctaaggccaaacaaacaaaaaacacttgctttgatggactgaatactgttattagaagtaaatatggaaaatgaaccagaccatgaaaatgtggaacagagcctctgtgccaagacgagcgaagaagagctgaataagtctttcaatctagaagcttcactttcaaaattctcttacatagatatggacaaggaactggagttcaaaaatgatctgattgatgacaaggagtttgatattcctcaagttgatactcctccaacactggaaagcatactaaatgagactgatgatgaagatgagtcttttattcttgaggatcctacattgttaaacattgatactattgattctcactcctatgatacttcatctgtggcaagctcagatagtggtgacaggaccaacttaaaaaggaagaagaaattacctgattctttttcacttcatggatcagttatgcgccattcacttttgaagggaatttctgcccagatagtgtctgcagctgacaaagtagatgctggcttgcctacagcaattgcagtatccagtctgatagcagtgggtacatctcatggattggctttaatatttggtaaatatcagaatcaagctttgcgactctgtctgggtagcactagtgttggaggtcagtatggcgctatctctgccctcagtatcaacaatgattgctcaagacttctttgtggctttgctaaaggacagatcaccatgtgggatttggccagtggaaaacttctaagatcaataacagatgctcatcctccaggaacagcaatattgcatatcaagtttacagatgatccaactcttgcaatttgcaacgacagcggaggctctgtttttgaattgacatttaagagagtgatgggagtgagaacctgtgaatctagatgtctgttcagtggttccaagggtgaagtctgctgtattgagcctctgcattctaagcctgagttgaaagatcatcccatcacacagttttcattattggccatggcatccttgacaaaaatactggtcattggattgaaaccatccttgaaagtatggatgacttttccctatggccggatggatccttccagtgtgccactgctggcctggcactttgtagcagtacaaaattacgtgaatcccatgcttgccttctgcagaggagatgttgttcattttctattggtaaagagagatgaatctggagcaatacatgttactaagcaaaagcatcttcacctatactatgacctcatcaactttacctggataaattcacgcacagttgtgctcttagacagcgtagagaagttgcatgtgattgatcggcaaacacaagaggaattggagacagtggagatctcagaagttcagctggtctacaatagcagccatttcaaatcactagccactggaggaaatgttagccaggcactggctttggttggagagaaggcttgttatcaatccatcagtagctatggtggtcagatcttttatttggggacaaaatctgtttatgtgatgatgctgaggagctggagagagagagtggatcatctcctgaaacaagattgtcttacagaagcgttggctcttgcgtggtctttccatgaaggaaaagcaaaagcagtagtgggattatcaggggatgccagtaagcgaaaggctattgttgcagaccggatggtagaaatcctattccattatgcagatcgagctctgaaaaagtgcccagaccaaggaaaaatccaagtgatggagcagcattttcaggatatggtgcctgtcatagttgattactgccttctgctgcagcgaaaggatcttttatttagtcagatgtatgataaattaagtgagaattcagtggccaaaggagtatttttggagtgccttgagccatatattttaagtgataaattggtgggaatcacaccccaagtaatgaaagacttgattgttcatttccaagataaaaaattaatggaaaatgtggaagcgctcattgtacatatggatatcaccagcctagatattcagcaggtagttctcatgtgttgggaaaatcgtttatatgatgctatgatctatgtctacaacagaggcatgaatgaatttattagtccaatggagaaacttttcagagtcattgctcctcctctgaatgcaggaaaaacactaacagatgaacaagttgttatgggcaataagctccttgtatatattagctgttgtctagcaggtcgtgcctatccccttggtgacatccctgaagatctggttcccttggttaaaaaccaggtttttgaatttctaattcgcctgcattcagcagaggcttctcctgaggaagaaatctatccttacattcggactttgctacattttgacacaagagaatttctaaatgtattggcactgacttttgaagattttaaaaatgacaagcaagctgtggaatatcaacagcgaattgtggatattttgttgaaagttatggtggagaattcagactttaccccctcacaagtaggatgtctctttaccttccttgctcggcagcttgcaaagcctgacaacaccttgtttgtaaacagaacactttttgatcaggtccttgaattcctttgtagtcctgacgatgactcccgacactctgaaagacagcaggtccttttagaattgctgcaggctggaggcatagttcaatttgaagagagtcgactcatccggatggcagaaaaagctgagttctatcaaatttgtgaatttatgtatgaaagagaacaccaatatgataaaattattgattgctacttacgtgaccctctgcgagaggaagaagtctttaattacattcacaatatcttatccattcccggacacagtgcagaggagaagcagtctgtatggcagaaagcaatggatcatattgaggaactcgtgtccctgaagccttgtaaagctgcggagctggttgccacccacttttctggacatattgaaacggtcattaaaaaacttcagaaccaggttttgcttttcaaatttttgaggagtcttcttgacccaagggaaggtattcatgtaaatcaagaattactgcaaatatctccttgtatcacagagcagttcattgagctgttgtgtcagttcaacccaacccaagttatagagactctgcaagtccttgagtgctaccgtctggaagaaactattcagattactcagaagtatcaacttcatgaagtcaccgcttatctattggaaaagaaaggagatattcatggtgccttcctaataatgttagagagactacaaagcaaacttcaagaggtaacacatcaaggtgaaaataccaaagaggatccctcattgaaggatgttgaagatactatggtggagaccattgctctttgccagagaaattcacataatttgaaccagcagcaacgtgaggcactttggtttccgttattggaggcaatgatggcccctcagaagctgtccagttcagccattcctcatctacactctgaagctctgaagtctttgaccatgcaagttttaaatagcatggcagcatttattgcccttccatcaatcttgcaaagaatcttacaggatccagtttatggaaaaggaaaacttggagaaatccagggacttatcttgggaatgttagatacctttaactatgaacaaaccctgctggaaacaacaaccagccttctaaaccaagatctccattggtcattgtgtaacctgagagcttcggtcaccagaggactgaatcccaaacaagattactgctctatatgtttgcagcagtacaagagacgccaagaaatggctgatgaaataattgtctttagctgtggccatttgtatcactcattctgcctacaaaacaaagaatgcactgtggaatttgagggccaaacaagatggacatgctacaaatgcagttcaagtaacaaagtaggaaaactcagtgaaaattcatctgaaattaaaaagggaaggataaccccatcacaggtaaaaatgtctccatcgtatcatcagtccaaaggggatcccactgctaaaaagggaacctcagaacctgttctggatccacagcaaatccaagcatttgatcagctttgccgtctctaccgaggaagctccaggctggctctcctcacggaactctcccagaatcgcagcagcgagagctataggccattcagtggctcgcagagtgctcctgctttcaacagcatcttccagaatgagaacttccagctgcagctcattcctccacctgtgactgaggattgatgactccatggagcctggcccaggagaaccagagatgatcccgaggcagctggggagaggccccgcctctggtgggcttggcctccaccacctcccacgcttctgagaagaggttccaaattgggcttctgtgcccagagcgtccacagcaccattcccagtgtagactcccagtcttctccacattgctgtcatggcgtcagttcaccagactcattgattttgttttgcttgttaagcaaaggaatgtcacatacctctgtccagctttttaggaaatacatttcgcctattgcgactttttccatttaccctgaagcctagaaagtaggtggaactcacacaaatggcattccagagtctgccatactccgtctcctccagctgctggataatacagaggaacttcaacttctacagggaacagtggttggccaggctgcagtataactgaagcatgccttggagagagcagacactgtgggggccagggccatctccctttaatgtgttcatgttaaaacctatttgagtgtaagacttgccctttctaacaataaatgctccgtgtttaagttctgcaggtctc

SEQ ID NO: 23727 - DNA, 5047 bp, Artificial Sequence
  derived and/or modified sequence
aggtagtgcgcgtgcgtgaggctagagcagtgggtgcggtcacgtgggccggcggtccacggccggaatggcagcaagctcagagataatcattcaggtcttcgtgagctaaggccaaacaaacaaaaaacacttgctttgatggactgaatactgttattagaagtaaatatggaaaatgaaccagaccatgaaaatgtggaacagagcctctgtgccaagacgagcgaagaagagctgaataagtctttcaatctagaagcttcactttcaaaattctcttacatagatatggacaaggaactggagttcaaaaatgatctgattgatgacaaggagtttgatattcctcaagttgatactcctccaacactggaaagcatactaaatgagactgatgatgaagatgagtcttttattcttgaggatcctacattgttaaacattgatactattgattctcactcctatgatacttcatctgtggcaagctcagatagtggtgacaggaccaacttaaaaaggaagaagaaattacctgattctttttcacttcatggatcagttatgcgccattcacttttgaagggaatttctgcccagatagtgtctgcagctgacaaagtagatgctggcttgcctacagcaattgcagtatccagtctgatagcagtgggtacatctcatggattggctttaatatttggaaaagatcagaatcaagctttgcgactctgtctgggtagcactagtgttggaggtcagtatggcgctatctctgccctcagtatcaacaatgattgctcaagacttctttgtggctttgctaaaggacagatcaccatgtgggatttggccagtggaaaacttctaagatcaataacagatgctcatcctccaggaacagcaatattgcatatcaagtttacagatgatccaactcttgcaatttgcaacgacagcggaggctctgtttttgaattgacatttaagagagtgatgggagtgagaacctgtgaatctagatgtctgttcagtggttccaagggtgaagtctgctgtattgagcctctgcattctaagcctgagttgaaagatcatcccatcacacagttttcattattggccatggcatccttgacaaaaatactggtcattggattgaaaccatccttgaaagtatggatgacttttccctatggccggatggatccttccagtgtgccactgctggcctggcactttgtagcagtacaaaattacgtgaatcccatgcttgccttctgcagaggagatgttgttcattttctattggtaaagagagatgaatctggagcaatacatgttactaagcaaaagcatcttcacctatactatgacctcatcaactttacctggataaattcacgcacagttgtgctcttagacagcgtagagaagttgcatgtgattgatcggcaaacacaagaggaattggagacagtggagatctcagaagttcagctggtctacaatagcagccatttcaaatcactagccactggaggaaatgttagccaggcactggctttggttggagagaaggcttgttatcaatccatcagtagctatggtggtcagatcttttatttggggacaaaatctgtttatgtgatgatgctgaggagctggagagagagagtggatcatctcctgaaacaagattgtcttacagaagcgttggctcttgcgtggtctttccatgaaggaaaagcaaaagcagtagtgggattatcaggggatgccagtaagcgaaaggctattgttgcagaccggatggtagaaatcctattccattatgcagatcgagctctgaaaaagtgcccagaccaaggaaaaatccaagtgatggagcagcattttcaggatatggtgcctgtcatagttgattactgccttctgctgcagcgaaaggatcttttatttagtcagatgtatgataaattaagtgagaattcagtggccaaaggagtatttttggagtgccttgagccatatattttaagtgataaattggtgggaatcacaccccaagtaatgaaagacttgattgttcatttccaagataaaaaattaatggaaaatgtggaagcgctcattgtacatatggatatcaccagcctagatattcagcaggtagttctcatgtgttgggaaaatcgtttatatgatgctatgatctatgtctacaacagaggcatgaatgaatttattagtccaatggagaaacttttcagagtcattgctcctcctctgaatgcaggaaaaacactaacagatgaacaagttgttatgggcaataagctccttgtatatattagctgttgtctagcaggtcgtgcctatccccttggtgacatccctgaagatctggttcccttggttaaaaaccaggtttttgaatttctaattcgcctgcattcagcagaggcttctcctgaggaagaaatctatccttacattcggactttgctacattttgacacaagagaatttctaaatgtattggcactgacttttgaagattttaaaaatgacaagcaagctgtggaatatcaacagcgaattgtggatattttgttgaaagttatggtggagaattcagactttaccccctcacaagtaggatgtctctttaccttccttgctcggcagcttgcaaagcctgacaacaccttgtttgtaaacagaacactttttgatcaggtccttgaattcctttgtagtcctgacgatgactcccgacactctgaaagacagcaggtccttttagaattgctgcaggctggaggcatagttcaatttgaagagagtcgactcatccggatggcagaaaaagctgagttctatcaaatttgtgaatttatgtatgaaagagaacaccaatatgataaaattattgattgctacttacgtgaccctctgcgagaggaagaagtctttaattacattcacaatatcttatccattcccggacacagtgcagaggagaagcagtctgtatggcagaaagcaatggatcatattgaggaactcgtgtccctgaagccttgtaaagctgcggagctggttgccacccacttttctggacatattgaaacggtcattaaaaaacttcagaaccaggttttgcttttcaaatttttgaggagtcttcttgacccaagggaaggtattcatgtaaatcaagaattactgcaaatatctccttgtatcacagagcagttcattgagctgttgtgtcagttcaacccaacccaagttatagagactctgcaagtccttgagtgctaccgtctggaagaaactattcagattactcagaagtatcaacttcatgaagtcaccgcttatctattggaaaagaaaggagatattcatggtgccttcctaataatgttagagagactacaaagcaaacttcaagaggtaacacatcaaggtgaaaataccaaagaggatccctcattgaaggatgttgaagatactatggtggagaccattgctctttgccagagaaattcacataatttgaaccagcagcaacgtgaggcactttggtttccgttattggaggcaatgatggcccctcagaagctgtccagttcagccattcctcatctacactctgaagctctgaagtctttgaccatgcaagttttaaatagcatggcagcatttattgcccttccatcaatcttgcaaagaatcttacaggatccagtttatggaaaaggaaaacttggagaaatccagggacttatcttgggaatgttagatacctttaactatgaacaaaccctgctggaaacaacaaccagccttctaaaccaagatctccattggtcattgtgtaacctgagagcttcggtcaccagaggactgaatcccaaacaagattactgctctatatgtttgcagcagtacaagagacgccaagaaatggctgatgaaataattgtctttagctgtggccatttgtatcactcattctgcctacaaaacaaagaatgcactgtggaatttgagggccaaacaagatggacatgctacaaatgcagttcaagtaacaaagtaggaaaactcagtgaaaattcatctgaaattaaaaagggaaggataaccccatcacaggtaaaaatgtctccatcgtatcatcagtccaaaggggatcccactgctaaaaagggaacctcagaacctgttctggatccacagcaaatccaagcatttgatcagctttgccgtctctaccgaggaagctccaggctggctctcctcacggaactctcccagaatcgcagcagcgagagctataggccattcagtggctcgcagagtgctcctgctttcaacagcatcttccagaatgagaacttccagctgcagctcattcctccacctgtgactgaggattgatgactccatggagcctggcccaggagaaccagagatgatcccgaggcagctggggagaggccccgcctctggtgggcttggcctccaccacctcccacgcttctgagaagaggttccaaattgggcttctgtgcccagagcgtccacagcaccattcccagtgtagactcccagtcttctccacattgctgtcatggcgtcagttcaccagactcattgattttgttttgcttgttaagcaaaggaatgtcacatacctctgtccagctttttaggaaatacatttcgcctattgcgactttttccatttaccctgaagcctagaaagtaggtggaactcacacaaatggcattccagagtctgccatactccgtctcctccagctgctggataatacagaggaacttcaacttctacagggaacagtggttggccaggctgcagtataactgaagcatgccttggagagagcagacactgtgggggccagggccatctccctttaatgtgttcatgttaaaacctatttgagtgtaagacttgccctttctaacaataaatgctccgtgtttaagttctgcaggtctc

SEQ ID NO: 23728 - protein, 252 aa, Artificial Sequence
  derived and/or modified sequence
MAATAREDGASGQERGQRGCEHYDRGCLLKAPCCDKLYTCRLCHDNNEDHQLDRFKVKEVQCINCEKIQHAQQTCEECSTLFGEYYCDICHLFDKDKKQYHCENCGICRIGPKEDFFHCLKCNLCLAMNLQGRHKCIENVSRQNCPICLEDIHTSRVVAHVLPCGHLLHRGYRCPLCMHSALDMTRYWRQLDDEVAQTPMPSEYQNMTVDILCNDCNGRSTVQFHILGMKCKICESYNTAQAGGRRISLDQQ

SEQ ID NO: 23729 - DNA, 759 bp, Artificial Sequence
  derived and/or modified sequence
atggccgccaccgccagagaggacggcgccagcggccaggagagaggccagagaggctgcgagcactacgacagaggctgcctgctgaaggccccctgctgcgacaagctgtacacctgcagactgtgccacgacaacaacgaggaccaccagctggacagattcaaggtgaaggaggtgcagtgcatcaactgcgagaagatccagcacgcccagcagacctgcgaggagtgcagcaccctgttcggcgagtactactgcgacatctgccacctgttcgacaaggacaagaagcagtaccactgcgagaactgcggcatctgcagaatcggccccaaggaggacttcttccactgcctgaagtgcaacctgtgcctggccatgaacctgcagggcagacacaagtgcatcgagaacgtgagcagacagaactgccccatctgcctggaggacatccacaccagcagagtggtggcccacgtgctgccctgcggccacctgctgcacagaggctacagatgccccctgtgcatgcacagcgccctggacatgaccagatactggagacagctggacgacgaggtggcccagacccccatgcccagcgagtaccagaacatgaccgtggacatcctgtgcaacgactgcaacggcagaagcaccgtgcagttccacatcctgggcatgaagtgcaagatctgcgagagctacaacaccgcccaggccggcggcagaagaatcagcctggaccagcagtag

SEQ ID NO: 23730 - DNA, 759 bp, Artificial Sequence
  derived and/or modified sequence
atggccgccactgcacgagaagatggggcaagcggtcaggagagggggcaacggggctgcgagcactatgacagagggtgcctgctcaaggctccttgctgtgataagctttatacttgtagattgtgtcacgataacaatgaggatcatcagcttgatcgctttaaagtaaaggaggtccagtgcatcaattgcgaaaagatacaacatgcccagcaaacctgcgaagaatgtagcaccctcttcggcgagtactactgcgacatctgtcacctgtttgataaggataaaaagcagtaccactgcgaaaactgtggaatttgtcgtatcggaccgaaagaagatttcttccactgtttgaagtgcaacttgtgtctagcaatgaatctccagggacggcataagtgcatcgaaaacgtctcgagacagaattgtccaatttgcctggaagatatccacacatctcgagtggtcgcccacgtcttgccttgtggccacctcctccaccggggttacagatgcccactctgtatgcacagcgccctcgatatgactcgctactggcgtcagctcgatgatgaagtggctcagacccccatgcccagtgagtaccaaaatatgacagtggacatactctgtaatgattgcaatggtaggagcactgtgcagttccatatattgggaatgaaatgcaagatctgcgaatcttataataccgctcaagcagggggacgacgaatctccctggatcaacagtag

SEQ ID NO: 23731 - DNA, 759 bp, Artificial Sequence
  derived and/or modified sequence
atggccgccacagccagagaagatggagccagcggccaggagcggggccagaggggctgtgagcactatgaccggggctgcctgctgaaggccccctgctgtgacaagctgtacacctgccgcctgtgccacgacaacaatgaagaccaccagctggaccgcttcaaggtgaaggaggtgcagtgcatcaactgtgagaagatccagcacgcccagcagacctgtgaagaatgttccaccctgtttggagagtactactgtgacatctgccacctgtttgacaaggacaagaagcagtaccactgtgagaactgtggcatctgccgcatcggccccaaggaggacttcttccactgcctgaagtgcaacctgtgcctggccatgaacctgcagggccgccacaagtgcattgaaaatgtgtcccggcagaactgccccatctgcctggaggacatccacaccagccgggtggtggcccacgtgctgccctgtggccacctgctgcaccggggctaccgctgccccctgtgcatgcacagcgccctggacatgacccgctactggaggcagctggatgatgaggtggcccagacccccatgcccagcgagtaccagaacatgacagtggacatcctgtgcaatgactgcaatggccgcagcacagtgcagttccacatcctgggcatgaagtgcaagatctgtgagagctacaacacagcccaggccggcggccgccgcatcagcctggaccagcagtag

SEQ ID NO: 23732 - DNA, 759 bp, Artificial Sequence
  derived and/or modified sequence
atggccgccaccgcccgggaggacggcgccagcggccaggagcggggacagcggggctgtgaacattatgacagaggatgccttctcaaagccccttgttgtgacaaattgtacacatgtaggttgtgccacgataataacgaggaccaccagcttgaccgtttcaaggtgaaggaagtgcaatgcatcaattgcgagaaaattcagcatgcacagcagacttgcgaagagtgttccacgctcttcggcgagtactattgcgacatatgtcacctgtttgacaaggataagaagcagtatcattgcgagaactgcggcatttgccgaataggaccgaaggaggatttcttccattgccttaagtgtaacctctgtttggcaatgaatcttcagggtcgccacaaatgtatcgaaaatgtaagtcggcagaactgccccatctgtctagaagacattcatacttctcgagttgtcgcacatgtattgccatgtggccatctcttgcaccgtgggtaccgttgtccgctctgcatgcatagcgctctggatatgaccagatattggagacagctggatgatgaagtcgcacagacacccatgccgagcgaatatcagaacatgaccgttgacattctgtgtaacgattgtaatggccggagtacagtgcaattccatatactgggcatgaaatgtaagatttgcgaatcctacaacacggcgcaagccggcggaaggaggattagcctggaccagcaatag

SEQ ID NO: 23733 - DNA, 759 bp, Artificial Sequence
  derived and/or modified sequence
atggctgcaacggccagggaagacggggctagtggacaggagagaggacagaggggatgtgagcactacgatagagggtgcctgctcaaagccccatgttgcgacaagctctatacatgtagattatgtcacgataacaacgaggatcaccagctggacagatttaaggtcaaagaagtccaatgcattaattgtgagaaaatccagcacgcccagcagacctgcgaagaatgcagcacactgttcggcgagtattactgcgacatatgtcacttattcgataaggataaaaaacaatatcattgtgaaaattgtggaatctgccgcatcggccctaaggaggacttctttcactgtctgaaatgtaacctctgtctggccatgaatttgcagggtaggcataagtgtatagagaacgtgagtcgacagaattgtccgatttgtttagaggacatccatacaagcagggtggtcgcacacgttctcccctgtgggcacctgctgcatagaggatacaggtgcccgctgtgtatgcacagtgcactcgatatgacacgctattggcgccagctggatgatgaggttgctcaaacacccatgccctccgagtaccagaacatgactgtagacattttatgtaatgactgcaatggacggtccaccgtgcagtttcacattctaggcatgaagtgcaagatctgcgagtcctataacacagctcaggcgggagggcgtaggatatccctggatcaacaatag

SEQ ID NO: 23734 - DNA, 759 bp, Artificial Sequence
  derived and/or modified sequence
atggcggcgacggcccgggaagatggcgccagcggtcaagagcgaggtcagcggggctgcgagcactatgacagaggatgtctcctaaaggcaccttgctgtgacaagctttatacttgccgcttgtgtcatgataacaatgaagatcatcaactagatcgctttaaagtgaaggaagtgcagtgcataaactgtgaaaaaattcaacatgcccaacagacttgtgaagaatgtagcacattgtttggagaatattattgcgatatatgccatttgtttgacaaagataagaagcagtatcactgtgaaaactgtggaatttgtaggattggtccaaaggaagattttttccattgtttgaaatgtaacttatgcctagctatgaatcttcaaggaagacacaagtgtattgaaaatgtgtcccgacagaattgtccaatatgtttggaggacattcacacatcccgtgttgttgctcatgtcttgccatgtggacatcttttacatagaggctacagatgtccattatgtatgcactctgctttagatatgaccaggtattggagacagctggatgatgaagtagcacagactcctatgccatcagaatatcagaacatgactgtggatattctctgcaatgactgtaatggacgatccactgttcagtttcatatattaggcatgaaatgtaagatttgtgaatcctataatactgctcaagctggaggacgtagaatttcactggatcagcaatga

SEQ ID NO: 23735 - protein, 2850 aa, Artificial Sequence
  derived and/or modified sequence
MPKLLQGVITVIDVFYQYATQHGEYDTLNKAELKELLENEFHQILKNPNDPDTVDIILQSLDRDHNKKVDFTEYLLMIFKLVQARNKIIGKDYCQVSGSKLRDDTHQHQEEQEETEKEENKRQESSFSHSSWSAGENDSYSRNVRGSLKPGTESISRRLSFQRDFSGQHNSYSGQSSSYGEQNSDSHQSSGRGQCGSGSGQSPNYGQHGSGSGQSSSNDTHGSGSGQSSGFSQHKSSSGQSSGYSQHGSGSGHSSGYGQHGSRSGQSSRGERHRSSSGSSSSYGQHGSGSRQSLGHGRQGSGSRQSPSHVRHGSGSGHSSSHGQHGSGSSYSYSRGHYESGSGQTSGFGQHESGSGQSSGYSKHGSGSGHSSSQGQHGSTSGQASSSGQHGSSSRQSSSYGQHESASRHSSGRGQHSSGSGQSPGHGQRGSGSGQSPSSGQHGTGFGRSSSSGPYVSGSGYSSGFGHHESSSEHSSGYTQHGSGSGHSSGHGQHGSRSGQSSRGERQGSSAGSSSSYGQHGSGSRQSLGHSRHGSGSGQSPSPSRGRHESGSRQSSSYGPHGYGSGRSSSRGPYESGSGHSSGLGHQESRSGQSSGYGQHGSSSGHSSTHGQHGSTSGQSSSCGQHGATSGQSSSHGQHGSGSSQSSRYGQQGSGSGQSPSRGRHGSDFGHSSSYGQHGSGSGWSSSNGPHGSVSGQSSGFGHKSGSGQSSGYSQHGSGSSHSSGYRKHGSRSGQSSRSEQHGSSSGLSSSYGQHGSGSHQSSGHGRQGSGSGHSPSRVRHGSSSGHSSSHGQHGSGTSCSSSCGHYESGSGQASGFGQHESGSGQGYSQHGSASGHFSSQGRHGSTSGQSSSSGQHDSSSGQSSSYGQHESASHHASGRGRHGSGSGQSPGHGQRGSGSGQSPSYGRHGSGSGRSSSSGRHGSGSGQSSGFGHKSSSGQSSGYTQHGSGSGHSSSYEQHGSRSGQSSRSEQHGSSSGSSSSYGQHGSGSRQSLGHGQHGSGSGQSPSPSRGRHGSGSGQSSSYGPYRSGSGWSSSRGPYESGSGHSSGLGHRESRSGQSSGYGQHGSSSGHSSTHGQHGSTSGQSSSCGQHGASSGQSSSHGQHGSGSSQSSGYGRQGSGSGQSPGHGQRGSGSRQSPSYGRHGSGSGRSSSSGQHGSGLGESSGFGHHESSSGQSSSYSQHGSGSGHSSGYGQHGSRSGQSSRGERHGSSSGSSSHYGQHGSGSRQSSGHGRQGSGSGHSPSRGRHGSGLGHSSSHGQHGSGSGRSSSRGPYESRSGHSSVFGQHESGSGHSSAYSQHGSGSGHFCSQGQHGSTSGQSSTFDQEGSSTGQSSSYGHRGSGSSQSSGYGRHGAGSGQSPSRGRHGSGSGHSSSYGQHGSGSGWSSSSGRHGSGSGQSSGFGHHESSSWQSSGCTQHGSGSGHSSSYEQHGSRSGQSSRGERHGSSSGSSSSYGQHGSGSRQSLGHGQHGSGSGQSPSPSRGRHGSGSGQSSSYSPYGSGSGWSSSRGPYESGSSHSSGLGHRESRSGQSSGYGQHGSSSGHSSTHGQHGSTSGQSSSCGQHGASSGQSSSHGQHGSGSSQSSGYGRQGSGSGQSPGHGQRGSGSRQSPSYGRHGSGSGRSSSSGQHGSGLGESSGFGHHESSSGQSSSYSQHGSGSGHSSGYGQHGSRSGQSSRGERHGSSSRSSSRYGQHGSGSRQSSGHGRQGSGSGQSPSRGRHGSGLGHSSSHGQHGSGSGRSSSRGPYESRSGHSSVFGQHESGSGHSSAYSQHGSGSGHFCSQGQHGSTSGQSSTFDQEGSSTGQSSSHGQHGSGSSQSSSYGQQGSGSGQSPSRGRHGSGSGHSSSYGQHGSGSGWSSSSGRHGSGSGQSSGFGHHESSSWQSSGYTQHGSGSGHSSSYEQHGSRSGQSSRGEQHGSSSGSSSSYGQHGSGSRQSLGHGQHGSGSGQSPSPSRGRHGSGSGQSSSYGPYGSGSGWSSSRGPYESGSGHSSGLGHRESRSGQSSGYGQHGSSSGHSSTHGQHGSASGQSSSCGQHGASSGQSSSHGQHGSGSSQSSGYGRQGSGSGQSPGHGQRGSGSRQSPSYGRHGSGSGRSSSSGQHGPGLGESSGFGHHESSSGQSSSYSQHGSGSGHSSGYGQHGSRSGQSSRGERHGSSSGSSSRYGQHGSGSRQSSGHGRQGSGSGHSPSRGRHGSGSGHSSSHGQHGSGSGRSSSRGPYESRSGHSSVFGQHESGSGHSSAYSQHGSGSGHFCSQGQHGSTSGQSSTFDQEGSSTGQSSSHGQHGSGSSQSSSYGQQGSGSGQSPSRGRHGSGSGHSSSYGQHGSGSGWSSSSGRHGSGSGQSSGFGHHESSSWQSSGYTQHGSGSGHSSSYEQHGSRSGQSSRGERHGSSSGSSSSYGQHGSGSRQSLGHGQHGSGSGQSPSPSRGRHGSGSGQSSSYSPYGSGSGWSSSRGPYESGSGHSSGLGHRESRSGQSSGYGQHGSSSGHSSTHGQHGSTSGQSSSCGQHGASSGQSSSHGQHGSGSSQSSGYGRQGSGSGQSPGHGQRGSGSRQSPSYGRHGSGSGRSSSSGQHGSGLGESSGFGHHESSSGQSSSYSQHGSGSGHSSGYGQHGSRSGQSSRGERHGSSSGSSSHYGQHGSGSRQSSGHGRQGSGSGQSPSRGRHGSGLGHSSSHGQHGSGSGRSSSRGPYESRLGHSSVFGQHESGSGHSSAYSQHGSGSGHFCSQGQHGSTSGQSSTFDQEGSSTGQSSSYGHRGSGSSQSSGYGRHGAGSGQSLSHGRHGSGSGQSSSYGQHGSGSGQSSGYSQHGSGSGQDGYSYCKGGSNHDGGSSGSYFLSFPSSTSPYEYVQEQRCYFYQ

SEQ ID NO: 23736 - DNA, 8553 bp, Artificial Sequence
  derived and/or modified sequence
atgcccaagctgctgcagggcgtgatcaccgtgatcgacgtgttctaccagtacgccacccagcacggcgagtacgacaccctgaacaaggccgagctgaaggagctgctggagaacgagttccaccagatcctgaagaaccccaacgaccccgacaccgtggacatcatcctgcagagcctggacagagaccacaacaagaaggtggacttcaccgagtacctgctgatgatcttcaagctggtgcaggccagaaacaagatcatcggcaaggactactgccaggtgagcggcagcaagctgagagacgacacccaccagcaccaggaggagcaggaggagaccgagaaggaggagaacaagagacaggagagcagcttcagccacagcagctggagcgccggcgagaacgacagctacagcagaaacgtgagaggcagcctgaagcccggcaccgagagcatcagcagaagactgagcttccagagagacttcagcggccagcacaacagctacagcggccagagcagcagctacggcgagcagaacagcgacagccaccagagcagcggcagaggccagtgcggcagcggcagcggccagagccccaactacggccagcacggcagcggcagcggccagagcagcagcaacgacacccacggcagcggcagcggccagagcagcggcttcagccagcacaagagcagcagcggccagagcagcggctacagccagcacggcagcggcagcggccacagcagcggctacggccagcacggcagcagaagcggccagagcagcagaggcgagagacacagaagcagcagcggcagcagcagcagctacggccagcacggcagcggcagcagacagagcctgggccacggcagacagggcagcggcagcagacagagccccagccacgtgagacacggcagcggcagcggccacagcagcagccacggccagcacggcagcggcagcagctacagctacagcagaggccactacgagagcggcagcggccagaccagcggcttcggccagcacgagagcggcagcggccagagcagcggctacagcaagcacggcagcggcagcggccacagcagcagccagggccagcacggcagcaccagcggccaggccagcagcagcggccagcacggcagcagcagcagacagagcagcagctacggccagcacgagagcgccagcagacacagcagcggcagaggccagcacagcagcggcagcggccagagccccggccacggccagagaggcagcggcagcggccagagccccagcagcggccagcacggcaccggcttcggcagaagcagcagcagcggcccctacgtgagcggcagcggctacagcagcggcttcggccaccacgagagcagcagcgagcacagcagcggctacacccagcacggcagcggcagcggccacagcagcggccacggccagcacggcagcagaagcggccagagcagcagaggcgagagacagggcagcagcgccggcagcagcagcagctacggccagcacggcagcggcagcagacagagcctgggccacagcagacacggcagcggcagcggccagagccccagccccagcagaggcagacacgagagcggcagcagacagagcagcagctacggcccccacggctacggcagcggcagaagcagcagcagaggcccctacgagagcggcagcggccacagcagcggcctgggccaccaggagagcagaagcggccagagcagcggctacggccagcacggcagcagcagcggccacagcagcacccacggccagcacggcagcaccagcggccagagcagcagctgcggccagcacggcgccaccagcggccagagcagcagccacggccagcacggcagcggcagcagccagagcagcagatacggccagcagggcagcggcagcggccagagccccagcagaggcagacacggcagcgacttcggccacagcagcagctacggccagcacggcagcggcagcggctggagcagcagcaacggcccccacggcagcgtgagcggccagagcagcggcttcggccacaagagcggcagcggccagagcagcggctacagccagcacggcagcggcagcagccacagcagcggctacagaaagcacggcagcagaagcggccagagcagcagaagcgagcagcacggcagcagcagcggcctgagcagcagctacggccagcacggcagcggcagccaccagagcagcggccacggcagacagggcagcggcagcggccacagccccagcagagtgagacacggcagcagcagcggccacagcagcagccacggccagcacggcagcggcaccagctgcagcagcagctgcggccactacgagagcggcagcggccaggccagcggcttcggccagcacgagagcggcagcggccagggctacagccagcacggcagcgccagcggccacttcagcagccagggcagacacggcagcaccagcggccagagcagcagcagcggccagcacgacagcagcagcggccagagcagcagctacggccagcacgagagcgccagccaccacgccagcggcagaggcagacacggcagcggcagcggccagagccccggccacggccagagaggcagcggcagcggccagagccccagctacggcagacacggcagcggcagcggcagaagcagcagcagcggcagacacggcagcggcagcggccagagcagcggcttcggccacaagagcagcagcggccagagcagcggctacacccagcacggcagcggcagcggccacagcagcagctacgagcagcacggcagcagaagcggccagagcagcagaagcgagcagcacggcagcagcagcggcagcagcagcagctacggccagcacggcagcggcagcagacagagcctgggccacggccagcacggcagcggcagcggccagagccccagccccagcagaggcagacacggcagcggcagcggccagagcagcagctacggcccctacagaagcggcagcggctggagcagcagcagaggcccctacgagagcggcagcggccacagcagcggcctgggccacagagagagcagaagcggccagagcagcggctacggccagcacggcagcagcagcggccacagcagcacccacggccagcacggcagcaccagcggccagagcagcagctgcggccagcacggcgccagcagcggccagagcagcagccacggccagcacggcagcggcagcagccagagcagcggctacggcagacagggcagcggcagcggccagagccccggccacggccagagaggcagcggcagcagacagagccccagctacggcagacacggcagcggcagcggcagaagcagcagcagcggccagcacggcagcggcctgggcgagagcagcggcttcggccaccacgagagcagcagcggccagagcagcagctacagccagcacggcagcggcagcggccacagcagcggctacggccagcacggcagcagaagcggccagagcagcagaggcgagagacacggcagcagcagcggcagcagcagccactacggccagcacggcagcggcagcagacagagcagcggccacggcagacagggcagcggcagcggccacagccccagcagaggcagacacggcagcggcctgggccacagcagcagccacggccagcacggcagcggcagcggcagaagcagcagcagaggcccctacgagagcagaagcggccacagcagcgtgttcggccagcacgagagcggcagcggccacagcagcgcctacagccagcacggcagcggcagcggccacttctgcagccagggccagcacggcagcaccagcggccagagcagcaccttcgaccaggagggcagcagcaccggccagagcagcagctacggccacagaggcagcggcagcagccagagcagcggctacggcagacacggcgccggcagcggccagagccccagcagaggcagacacggcagcggcagcggccacagcagcagctacggccagcacggcagcggcagcggctggagcagcagcagcggcagacacggcagcggcagcggccagagcagcggcttcggccaccacgagagcagcagctggcagagcagcggctgcacccagcacggcagcggcagcggccacagcagcagctacgagcagcacggcagcagaagcggccagagcagcagaggcgagagacacggcagcagcagcggcagcagcagcagctacggccagcacggcagcggcagcagacagagcctgggccacggccagcacggcagcggcagcggccagagccccagccccagcagaggcagacacggcagcggcagcggccagagcagcagctacagcccctacggcagcggcagcggctggagcagcagcagaggcccctacgagagcggcagcagccacagcagcggcctgggccacagagagagcagaagcggccagagcagcggctacggccagcacggcagcagcagcggccacagcagcacccacggccagcacggcagcaccagcggccagagcagcagctgcggccagcacggcgccagcagcggccagagcagcagccacggccagcacggcagcggcagcagccagagcagcggctacggcagacagggcagcggcagcggccagagccccggccacggccagagaggcagcggcagcagacagagccccagctacggcagacacggcagcggcagcggcagaagcagcagcagcggccagcacggcagcggcctgggcgagagcagcggcttcggccaccacgagagcagcagcggccagagcagcagctacagccagcacggcagcggcagcggccacagcagcggctacggccagcacggcagcagaagcggccagagcagcagaggcgagagacacggcagcagcagcagaagcagcagcagatacggccagcacggcagcggcagcagacagagcagcggccacggcagacagggcagcggcagcggccagagccccagcagaggcagacacggcagcggcctgggccacagcagcagccacggccagcacggcagcggcagcggcagaagcagcagcagaggcccctacgagagcagaagcggccacagcagcgtgttcggccagcacgagagcggcagcggccacagcagcgcctacagccagcacggcagcggcagcggccacttctgcagccagggccagcacggcagcaccagcggccagagcagcaccttcgaccaggagggcagcagcaccggccagagcagcagccacggccagcacggcagcggcagcagccagagcagcagctacggccagcagggcagcggcagcggccagagccccagcagaggcagacacggcagcggcagcggccacagcagcagctacggccagcacggcagcggcagcggctggagcagcagcagcggcagacacggcagcggcagcggccagagcagcggcttcggccaccacgagagcagcagctggcagagcagcggctacacccagcacggcagcggcagcggccacagcagcagctacgagcagcacggcagcagaagcggccagagcagcagaggcgagcagcacggcagcagcagcggcagcagcagcagctacggccagcacggcagcggcagcagacagagcctgggccacggccagcacggcagcggcagcggccagagccccagccccagcagaggcagacacggcagcggcagcggccagagcagcagctacggcccctacggcagcggcagcggctggagcagcagcagaggcccctacgagagcggcagcggccacagcagcggcctgggccacagagagagcagaagcggccagagcagcggctacggccagcacggcagcagcagcggccacagcagcacccacggccagcacggcagcgccagcggccagagcagcagctgcggccagcacggcgccagcagcggccagagcagcagccacggccagcacggcagcggcagcagccagagcagcggctacggcagacagggcagcggcagcggccagagccccggccacggccagagaggcagcggcagcagacagagccccagctacggcagacacggcagcggcagcggcagaagcagcagcagcggccagcacggccccggcctgggcgagagcagcggcttcggccaccacgagagcagcagcggccagagcagcagctacagccagcacggcagcggcagcggccacagcagcggctacggccagcacggcagcagaagcggccagagcagcagaggcgagagacacggcagcagcagcggcagcagcagcagatacggccagcacggcagcggcagcagacagagcagcggccacggcagacagggcagcggcagcggccacagccccagcagaggcagacacggcagcggcagcggccacagcagcagccacggccagcacggcagcggcagcggcagaagcagcagcagaggcccctacgagagcagaagcggccacagcagcgtgttcggccagcacgagagcggcagcggccacagcagcgcctacagccagcacggcagcggcagcggccacttctgcagccagggccagcacggcagcaccagcggccagagcagcaccttcgaccaggagggcagcagcaccggccagagcagcagccacggccagcacggcagcggcagcagccagagcagcagctacggccagcagggcagcggcagcggccagagccccagcagaggcagacacggcagcggcagcggccacagcagcagctacggccagcacggcagcggcagcggctggagcagcagcagcggcagacacggcagcggcagcggccagagcagcggcttcggccaccacgagagcagcagctggcagagcagcggctacacccagcacggcagcggcagcggccacagcagcagctacgagcagcacggcagcagaagcggccagagcagcagaggcgagagacacggcagcagcagcggcagcagcagcagctacggccagcacggcagcggcagcagacagagcctgggccacggccagcacggcagcggcagcggccagagccccagccccagcagaggcagacacggcagcggcagcggccagagcagcagctacagcccctacggcagcggcagcggctggagcagcagcagaggcccctacgagagcggcagcggccacagcagcggcctgggccacagagagagcagaagcggccagagcagcggctacggccagcacggcagcagcagcggccacagcagcacccacggccagcacggcagcaccagcggccagagcagcagctgcggccagcacggcgccagcagcggccagagcagcagccacggccagcacggcagcggcagcagccagagcagcggctacggcagacagggcagcggcagcggccagagccccggccacggccagagaggcagcggcagcagacagagccccagctacggcagacacggcagcggcagcggcagaagcagcagcagcggccagcacggcagcggcctgggcgagagcagcggcttcggccaccacgagagcagcagcggccagagcagcagctacagccagcacggcagcggcagcggccacagcagcggctacggccagcacggcagcagaagcggccagagcagcagaggcgagagacacggcagcagcagcggcagcagcagccactacggccagcacggcagcggcagcagacagagcagcggccacggcagacagggcagcggcagcggccagagccccagcagaggcagacacggcagcggcctgggccacagcagcagccacggccagcacggcagcggcagcggcagaagcagcagcagaggcccctacgagagcagactgggccacagcagcgtgttcggccagcacgagagcggcagcggccacagcagcgcctacagccagcacggcagcggcagcggccacttctgcagccagggccagcacggcagcaccagcggccagagcagcaccttcgaccaggagggcagcagcaccggccagagcagcagctacggccacagaggcagcggcagcagccagagcagcggctacggcagacacggcgccggcagcggccagagcctgagccacggcagacacggcagcggcagcggccagagcagcagctacggccagcacggcagcggcagcggccagagcagcggctacagccagcacggcagcggcagcggccaggacggctacagctactgcaagggcggcagcaaccacgacggcggcagcagcggcagctacttcctgagcttccccagcagcaccagcccctacgagtacgtgcaggagcagagatgctacttctaccagtag

SEQ ID NO: 23737 - DNA, 8553 bp, Artificial Sequence
  derived and/or modified sequence
atgcctaaactgcttcagggggtgataacagtgatcgacgttttttaccagtacgccactcaacatggcgagtacgacacactcaacaaggctgaattaaaggagctgcttgaaaatgagtttcaccagattctgaagaacccgaatgatcctgacaccgtcgatataatcctccaatcactcgaccgcgaccacaacaagaaagtagacttcaccgaataccttctcatgatttttaagctggtgcaagcccggaacaagattatagggaaagactactgccaggtgagtggctcgaaactacgtgatgacacacaccagcatcaagaagagcaagaagagaccgaaaaagaggagaataagcgccaagagagctcgttttcccactcgtcctggagcgccggcgaaaatgacagttactcccggaatgtgcgcgggagccttaagcctggaaccgaaagcatttctcgcaggcttagcttccagcgggatttctccggccagcacaatagttacagcggacagagttcctcgtatggtgaacaaaactccgacagtcaccagtccagcgggaggggtcagtgcgggagtggcagtggtcaatcacctaattacggacaacacggctctggctctggacagtcatcctcaaacgatacacatggttcaggcagcggacagagctcaggcttttctcaacacaagtcctcttccggccagagtagcggttactcacagcatgggtctggctcagggcactcttccggatacggtcagcacggttcccgttcaggacagtcttctcgaggcgaacgtcacaggagctcttcgggctcttcatcatcgtacgggcaacacggatccggcagccgccaaagtttgggacatggtcggcagggaagtggcagtcggcaatcgccttcacacgtgcgacatggcagtggcagcggtcatagctctagtcatggccaacatggcagtggctctagctacagttatagccgtggacactacgagtcgggtagtggccaaactagcgggttcggtcagcacgagagcgggtcagggcagtcctcagggtactccaaacatgggtctggatctgggcattcctctagccaggggcaacacgggtcgacgtcaggtcaagcatcctcttctggccagcatggaagctcttcacgtcagagctccagctatggacaacatgagagtgcatcccgccacagctcgggcaggggtcagcatagctccggtagcggtcagtctccgggtcatgggcagcgcggctcgggatctggccagtctccatcttccggccaacacgggaccggtttcgggaggtcctcaagcagtggaccctatgtgtctggaagcggatactcatccggcttcggccatcatgaatcctcatcagagcattccagtggatatactcagcatggctcgggatccggtcactctagcggacacggtcaacacgggtctaggtcaggccagtccagcagaggcgagcgacagggctcctctgcaggatcctcatcctcatacggtcaacacggcagtggctcccgacaaagcctgggccacagtaggcacggatctggcagcggccagtcacctagcccttctagaggccgccacgagagtgggtcccgccaatcctcgtcctatgggccacacggctatggcagcggccgttcatctagccgcggaccctacgagtccggttccggtcacagttcaggattagggcaccaggagtcaaggtccggccagagcagcggatatggacagcatggttcctcgtccggtcactccagcacacacggccagcacggtagtacctctggacagtcctcttcttgcgggcaacatggagcgacctcaggtcagtcttctagtcatgggcagcacgggtcagggtccagtcagagctctaggtatggacaacagggttcgggtagtggccagagccctagcaggggaaggcatggcagcgactttgggcacagttccagttacggtcagcatgggagcggttctggatggtcctccagtaacggccctcacggctctgtatcaggccagtcatcaggcttcggccacaaatccggtagcggccaaagttcggggtacagtcaacacggctccggctcttcacattcttctggctaccgcaaacacggcagtaggtctgggcagtcttccagatcagagcagcatgggtccagttctggcctgagttcctcctacgggcagcatggatccggatcccaccaatcaagtggacacggtcgccagggcagcggtagcgggcattccccctccagggtgagacacggctcctccagcggtcacagctcgagtcatgggcagcatggatcaggaaccagctgctccagttcatgcggccactatgaaagcggcagcggccaggcctccggatttggacagcacgagagtggatccggtcagggttacagccaacatggatccgccagtggtcacttttcaagccagggccgccatgggtccaccagcggccaaagcagctccagcggccaacacgattcaagttctggacagtcttcttcatatggacaacatgagagcgcctctcatcacgcgagtggaagaggtcggcacggtagtgggtctgggcagagtcctggacacggccagcggggtagcgggagcggtcaatccccctcatatggcagacacggaagtggttcaggccggagctcaagtagtggtaggcatgggagtggcagcggtcagagcagtggctttgggcataaatctagctctggacagagctctggttatacccagcacggatcagggtccggccatagttcttcttacgagcaacacggaagtcgctccggccagtcgtctcgcagtgaacagcatggcagcagcagcggcagttccagctcttacggtcagcatggatcgggaagtagacagagtctgggacacggccagcatggaagtggttccggccagtctccttcaccatccaggggccgacacggcagcggctcaggccaatcatctagctacgggccatataggagcgggtccggatggtctagcagcagaggaccctatgagagcgggagcgggcatagtagcggactcggccatcgggagagccgtagtggacaaagttcagggtatgggcagcatggttcttcgtcaggccacagctctacccatggacaacacggctccacatcgggtcaaagttcttcatgtgggcaacatggagcgtccagcggacagtcgtcatcccatgggcagcatgggtctgggtcctcccagtcgagcggttatggtagacaggggagcggaagcggccagagcccaggccatggccagagagggagcgggtctcgtcagtccccaagttacggacggcacgggtccggctcgggacgttcctccagctccgggcaacatggttctggcctcggagagtcctcgggcttcggccatcatgaatcctcctcaggccagagcagttcctattctcagcatgggagcgggagcgggcattcatctggatacggccagcacggttcaaggtcagggcaatcctcccggggtgaacgccacggttccagtagcggttcaagcagccactacggccagcatggttccgggtctaggcagtccagcggacacgggcggcaaggctcaggctccggccattcaccctcaagaggacgacatggtagtgggttgggacacagttcctcacacggccagcatggctcaggatcaggccggagcagctcccggggcccatatgagtctcggtccgggcattcaagcgtctttggccaacacgagtccggaagtggtcacagctctgcttactctcagcacgggagtggcagcgggcatttctgtagtcagggccagcatggcagtacttcaggacagtccagtaccttcgaccaggaaggaagctcaactggacagagctcttcatacgggcatagggggtcagggagctctcagtcatctggatatggtcgacatggtgctggtagcggccaatctccctctaggggacggcacgggagcgggtctgggcactcctcctcgtatggccagcacgggtcgggctccggatggagctcttccagcggtcggcatggatccggaagcgggcagtccagcggctttggacaccacgagtcaagttcttggcagtcctctggttgcactcagcacggtagtggtagcgggcacagctcatcatacgaacaacacggatccaggagcggacagtccagccggggagaaagacacggctcaagcagtggttcctcttcctcttatggccagcacgggtctggctctcgacaatcgctggggcacggccagcacgggagcggttcgggccagagtccttccccaagcagaggccggcacgggtccggctctggccagtccagcagttacagcccttatggcagtggttctggatggagctctagtagaggcccttatgagagtggtagttctcattctagtggtctgggacatagagaaagccggagcggccagtctagcgggtatggccagcacggttcaagctccgggcattcctctacccatggtcagcacggctccacatcggggcagagtagtagttgtgggcagcacggtgccagttccgggcagagctcctctcatgggcaacatggcagcggatccagccagagtagcggctatggtcgtcagggatcggggagcggacaaagccctggccacggtcaacgggggtcaggcagcagacagtcccctagctatgggcggcacggatcgggatcaggccgatcgtccagctctgggcaacatgggtctggcttgggcgaatcctcaggtttcgggcaccatgagtcaagcagtgggcagtctagttcctactcccagcatggatcaggctccgggcactcttccggctacggacagcacggcagtcgcagcggccagtcttcccggggcgagcggcacggctctagctcacggagcagcagtcgttatggccagcatgggagcggttctcggcaaagttcgggacacggaagacaaggatccggtagcggccaatctccatccagagggcgccatggttctgggcttggtcatagcagctcacacggacagcatggttccggcagtggtcggtcttcctccagaggcccatatgaatctcgaagcggacactccagtgtgttcggccaacatgaaagtggtagcgggcactcatctgcttacagccagcatggctcaggatccggccacttttgtagccagggacagcacgggagcacaagtggacagtctagtaccttcgaccaggaaggctcatctacgggccaatcctcgagccacggccagcacggatccggaagtagccagtccagctcatacggccagcagggttctggctccgggcaatctccaagccgggggcggcatggcagcggttctgggcatagctcgtcgtatgggcagcatggctccggttccggatggtccagctcaagcggccggcacggctccgggagtggtcagtcttccggcttcggtcaccacgagtcatcctcatggcagtcatccggatacacacagcatgggtctgggagcggccatagttcaagctatgagcagcacggctcaagatcaggccagtcttcacgcggagagcagcatgggtcttcatcaggctcatcctcttcctatggccagcatggtagcggttcacggcagtccctaggtcacggccagcacggaagcggcagtgggcagagtccttcgccttctaggggcaggcatggttccggtagcgggcagtccagctcttatggcccatacggaagcggttccggctggtcatccagtcgcgggccatacgagagcgggtcaggacatagctcaggattagggcaccgagaatccagatctgggcagagttccggctacgggcaacacgggtcttccagtggccactcgtcaacacatgggcaacatgggagtgcttccggacagtcttcatcttgtggacaacatggggcttcctccggccagagctctagtcacggacaacacggtagcggatcatctcagtctagcggctatggtcgtcagggcagtggaagtggccaatcccctgggcacggacagcgcggctccgggtcccggcagtctcctagctacggccgacatggctctggctctggacggtcaagctctagcgggcagcatggccccgggctgggcgagtcaagtggctttgggcatcacgaatcctctagcggccagtccagtagttacagtcagcacgggtctgggtccggacactcctccgggtacggccagcacggcagtcgatccggtcagtcttcccgtggggagcggcatggctcttccagcgggagttcctctaggtacggacagcacggtagcggcagccgacagagctcaggacatggccgacaggggagtggaagtggacatagtccgtcgcgcggacgacacggaagcggcagcggacacagtagcagtcatgggcagcacggatcaggttcaggacggtccagctcgcgtggcccctacgagtcacgcagtggccacagctccgtcttcgggcaacacgagtccggcagcggccactcctcggcgtatagtcagcatggatccggttcaggccacttttgctctcaggggcagcacggatcgactagtggacagagctcgacctttgaccaagaaggtagctctaccggccagagcagctctcacggccagcacggctctggtagctcacagagctctagttatgggcaacaggggagcggcagtggacagagcccctctagaggtcgtcacggatccgggtctggccactcctctagctatggccagcacggctctggatctggatggtcttcaagtagcggtcgccacgggagcggctccggccagtcttccggcttcggccatcacgaatcctcatcatggcaatcctctggatatacacagcatgggagcggctccggacattcatcctcctacgaacagcacggctcaaggagtggtcagtccagcagaggggagaggcacggctcttcaagcggcagttcctccagttacggacagcacgggagtggttctcgacaatctctcggccatggacagcatggcagtggatctgggcaatcaccttctccctctaggggaaggcatggcagtggctcgggtcagagcagctcttacagcccctacggctcgggtagcggctggtcttcgtcgcggggtccctacgagtctgggtccgggcattcctctggattaggtcaccgcgagtcccgttccggacagagttcaggctacggccagcatggttcgagttctggccactcaagcactcacgggcagcacgggtctacctcagggcagtcctcgtcctgcggtcagcacggggccagctccggccagtcctccagccacggacagcacggcagcggcagcagtcaatcaagcggttacgggagacagggatccgggagtggccaatcacctggtcatggacaacgcggttcaggcagccgccagagtcccagctacggtcggcatggctccgggagcggccggagttcaagctcgggccagcacggcagcggactgggggagtcctctggtttcggacatcacgaatcatctagcggccagtcatctagttactcacagcatggcagtgggagtggacactcctccgggtacggacagcacggctctcgtagcggacagagttcacgaggggagcgtcacggatcatccagcggctcaagtagtcactacggccagcacggttctggatctcgacagtctagcggacacggaagacagggttccggaagcggccagtctccttctcgtggccgacacggctcagggttgggacacagctcatcccacggccagcacgggtctggatccggtcgatccagctccagaggcccatatgagtcaaggctcgggcatagctccgtgtttggacaacacgagtccggttcaggccactcctcggcctacagccagcacggctctggctccggtcacttctgctcacaagggcagcatggcagcacatccggacaaagctccacctttgaccaggagggatcatcgacaggccagtcgtcatcttacggacaccggggcagcgggagttcgcagtcaagcgggtatggacgccatggggcagggagcggccagtccttaagccatggaagacacggatcgggcagtgggcaatcctctagttacggacagcacggaagtggatcagggcaaagctctgggtattcccagcacggctctggatcaggacaggatggttatagctactgcaagggcgggtccaaccacgatggaggttcttccggctcttacttcttgtctttccctagctccactagtccctacgaatatgttcaggagcaacgatgttacttctaccagtag

SEQ ID NO: 23738 - DNA, 9623 bp, Artificial Sequence
  derived and/or modified sequence
accctgaaagctgtttctgtctctaccctacttgttcctctggtgagctaggttactcaaacttgcaaaaaaaaaaatgcctaaactcctacaaggcgtcatcactgtcatcgatgttttctaccaatatgccacccagcatggggagtatgatacgttgaacaaggcagagctgaaagaacttctggaaaatgagtttcatcaaattctgaagaatccaaacgatccagatactgtggatatcatcttgcaaagtctggatcgagaccataacaagaaagtggattttactgagtatcttctgatgatattcaagctggttcaggctcgtaataaaatcattggcaaagattactgccaagtttcagggtcaaagctgagagatgacactcaccagcaccaagaggaacaagaagaaactgaaaaagaggagaacaaacggcaagaatcctcttttagtcattcaagttggagtgcaggagagaatgattcctattccagaaacgtcagaggaagtcttaaacctgggactgaatccatatccagaagactgagttttcaaagagacttttctggccaacataactcctactcaggtcagtcttccagctatggtgagcaaaactccgactcccatcagtcttcaggccgcggccaatgtgggtctgggtcagggcagtctcccaactatggccaacacggctctggctccggacagtcttccagcaatgacacacatgggtctggctcaggccagtcttctggctttagtcaacacaagtctagctcagggcagtcctctggttacagtcagcatggatctggctcaggtcactcctctggctacggacaacacggctctaggtcaggacagtcatctaggggtgaacgacacagatctagctcaggttcgtcttccagctatggtcagcatgggtctggttcccgtcagtctttgggccacggccgacaagggtctggatctcgccagtctcctagccacgtccgacatgggtccggttcggggcactcctccagccacggccaacacgggtctggctcaagttactcttacagccgtggccattatgagtctggctcaggccagacttctggctttgggcaacatgagtctggctcaggacagtcctctggctatagtaagcatggttctggctcaggtcactcctctagccagggacaacatggatctacgtcagggcaggcatcaagctctggccaacatggctccagctcacgtcagtcttccagctatggtcagcatgagtctgcctcccgtcactcttcaggccgcggccaacacagctctggatctggccagtctccaggccacggccagcgtgggtctgggtcagggcagtctcccagctccggccaacatgggactggctttggtcgatcttccagcagtggcccatatgtgtctggttcaggctactcttctggctttggtcaccacgagtctagctcagagcattcctctggttacactcagcatggatctggctcaggtcactcctccggccacggacaacacggctctaggtcaggacagtcatctaggggtgaacgacaaggatctagtgcaggttcatcttccagctatggtcagcatgggtctggctcccgtcaatctttgggacacagccgacatgggtctggatctggccagtctcctagccctagccgtggccgacatgagtctggttccaggcagtcttccagctatggcccacatgggtatggctcagggaggtcttcaagccgtggcccatatgagtctggctccggtcactcttctggcttaggtcaccaagagtctcgctcaggacagtcctctggctacggtcaacacggatctagctcgggtcattcctctacccatgggcaacatggttctacatcaggacagtcatcgagctgtggccaacatggagctacctcaggtcagtcttccagccacggtcagcatggctctggctcaagtcagtcttctcgctatggccaacagggctctggatctggccagtctcctagtcgcggccgacatgggtccgattttgggcactcttccagctacggccaacatgggtctggctccggttggtcttcaagcaatggcccacatgggtctgtctcaggccagtcttccggctttggtcacaagtctggctcagggcagtcctctggttacagtcagcatggatctggctcaagtcactcctccggctacagaaaacacggctctaggtcaggacagtcatctaggagtgaacaacacggatctagctcaggtttgtcttccagctatggtcagcatgggtcgggctcccatcaatcttcgggccacggccgacaagggtctggatctggccactctcctagccgtgtccgacatgggtccagttcagggcactcctccagccacggccaacacgggtctggcacaagttgttcttccagctgtggccattatgagtctggctcaggccaggcttctggttttgggcaacacgagtctggctcaggacagggctatagtcagcatggttctgcctcaggtcacttctctagccagggacgacatggatctacgtcagggcagtcatcaagctccggccaacatgactctagctcaggtcaatcttccagctatggtcagcatgagtctgcctcccatcacgcttcgggccgcggccgacatggctctggatctggccagtctccaggccacggccagcgtgggtctgggtcagggcagtctcccagctatggccgacatgggtctggctccggtcggtcttccagcagtggccgacatgggtctggctcaggccagtcttctggctttggtcacaagtctagctcagggcagtcctctggttacactcagcatggatctggctcaggtcactcctccagctacgaacaacacggctctaggtcaggacagtcatctaggagcgaacaacatggatctagctcaggttcgtcttccagctatggtcagcatgggtctggctcccgtcagtctttgggccacggccaacatgggtctggatctggccagtctcctagccctagccgtggccgacatgggtctggttccgggcagtcttccagctatggcccatataggtctggctcagggtggtcttcaagccgtggcccatatgagtctggctccggtcactcttctggcttaggtcaccgagagtctcgctcaggacagtcctctggctacggtcaacatggatctagctcaggtcattcctctacccatgggcaacacggttctacatcaggacagtcatcgagctgtggccaacatggagctagctcaggtcagtcttccagccacggtcagcatggctctggctcaagtcagtcttctggctatggccgacagggctctggatctggccagtctccaggccacggccagcgtgggtctgggtcaaggcagtctcccagctacggccgacatgggtctggctccggtcggtcttccagcagtggccaacatgggtctggcttaggcgagtcttctggctttggtcaccacgagtctagctcagggcagtcctctagttacagtcagcatgggtctggctcaggtcactcctctggctacggacaacacggctctagatcaggacagtcatctaggggtgaacgacacggatctagctcaggttcgtcttcccactatggtcagcatgggtctggctcccgtcagtcttcgggccacggccgacaagggtctggatctggccattcccctagccgcggccgacatgggtccggtttggggcactcctccagccacggccaacatgggtctggctcaggtcgttcttccagccgtggcccatatgagtctcgctcgggtcactcttctgtctttggtcaacatgagtctggctcaggacattcctctgcttacagtcagcatggtagtggctcagggcacttctgtagccaaggacagcatggttctacatcaggacagtcatcaacctttgaccaggagggatctagcacaggccagtcttccagctatggccaccgtggctctggctccagtcagtcttctggctatggccgacatggggctggatctggccagtctcctagtcgcggccgacatgggtccggttctgggcactcttccagctacggccaacatgggtctggctccggttggtcttccagcagtggccgacatgggtctggctcaggtcagtcttctggatttggtcaccacgagtctagctcatggcagtcctctggttgcactcagcatggatctggctcaggtcactcctccagctacgaacaacacggctctaggtcaggacagtcatctaggggtgaacgacacggatctagctcaggttcatcttccagctatggtcagcatgggtctggctcccgtcagtctttgggccacggccaacatgggtctggatctggccagtctcctagccctagccgtggccgacatgggtctggttctgggcagtcttccagctacagcccatatgggtctggctcagggtggtcttccagccgtggcccatatgagtctggctccagtcactcttctggcttaggtcaccgagagtctcgctcaggacagtcctctggctacggtcaacatggatctagctcaggtcattcctctacccatgggcaacatggttctacatcaggacagtcatcgagctgtggccaacatggagctagctcaggtcagtcttccagccacggtcagcatggctctggctcaagtcagtcttctggctatggccgacagggctctggatctggccagtctccaggccacggccagcgtgggtctgggtcaaggcagtctcccagctacggccgacatgggtctggctccggtcggtcttccagcagtggccaacatgggtctggcttaggcgagtcttctggctttggtcaccacgagtctagctcagggcagtcctctagttacagtcagcatgggtctggctcaggtcactcctctggctacggacaacacggctctagatcaggacagtcatctaggggtgaacgacacggatctagctcacgttcgtcttcccgctatggtcagcatgggtctggctcccgtcagtcttcgggccacggccgacaagggtctggatctggccagtcccctagccgcggccgacatgggtccggtttggggcactcctccagccacggccaacatgggtctggctcaggtcgttcttccagccgtggcccatatgagtctcgctcgggtcactcttctgtctttggtcaacatgagtctggctcaggacattcctctgcttacagtcagcatggtagtggctcagggcacttctgtagccaaggacagcatggttctacatcaggacagtcatcaacctttgaccaggagggatctagcacaggtcagtcttccagccacggtcagcatggctctggctcaagtcagtcttctagctatggccaacagggctctggatctggccagtctcctagtcgcggccgacatgggtccggttccgggcactcttccagctacggccaacatgggtctggctccggttggtcttccagcagtggccgacatgggtctggctcaggtcagtcttctggatttggtcaccatgagtctagctcatggcagtcctctggttacactcagcatggatctggctcaggtcactcctccagctacgaacaacacggctctaggtcaggacagtcatctaggggtgaacaacacggatctagctcaggttcatcttccagctatggtcagcatgggtctggctcccgtcagtctttgggccacggccaacatgggtctggatctggccagtctcctagccctagccgtggccgacatgggtctggttctgggcagtcttccagctacggcccatatgggtctggctcagggtggtcttccagccgtggcccatatgagtctggctccggtcactcttctggcttaggtcaccgagagtctcgctcaggacagtcctctggctacggtcaacatggatctagctcaggtcattcctctacccatgggcaacatggttctgcatcaggacagtcatcgagctgtggccaacatggagctagctcaggtcagtcttccagccacggtcagcatggctctggctcaagtcagtcttctggctatggccgacagggctctggatctggccagtctccaggccacggccagcgtgggtctgggtcaaggcagtctcccagctatggccgacatgggtctggctccggtcggtcttccagcagtggccaacatgggcctggcttaggcgagtcttctggctttggtcaccacgagtctagctcagggcagtcctctagttacagtcagcatgggtctggctcaggtcactcctctggctacggacaacacggctctagatcaggacagtcatctaggggtgaacgacacggatctagctcaggttcgtcttcccgctatggtcagcatgggtctggctcccgtcagtcttcgggccacggccgacaagggtctggatctggccattcccctagccgcggccgacatgggtccggttcggggcactcctccagccacggccaacatgggtctggctcaggtcgttcttccagccgtggcccatatgagtctcgctcgggtcactcttctgtctttggtcaacatgagtctggctcaggacattcctctgcttacagtcagcatggtagtggctcagggcacttctgtagccaaggacagcatggttctacatcaggacagtcatcaacctttgaccaggagggatctagcacaggtcagtcttccagccacggtcagcatggctctggctcaagtcagtcttctagctatggccaacagggctctggatctggccagtctcctagtcgcggccgacatgggtccggttccgggcactcttccagctacggccaacatgggtctggctccggttggtcttccagcagtggccgacatgggtctggctcaggtcagtcttctggatttggtcaccacgagtctagctcatggcagtcctctggttacactcagcatggatctggctcaggtcactcctccagctacgaacaacacggctctaggtcaggacagtcatctaggggtgaacgacacggatctagctcaggttcatcttccagctatggtcagcatgggtctggctcccgtcagtctttgggccacggccaacatgggtctggatctggccagtctcctagccctagccgtggccgacatgggtctggttctgggcagtcttccagctacagcccatatgggtctggctcagggtggtcttccagccgtggcccatatgagtctggctccggtcactcttctggcttaggtcaccgagagtctcgctcaggacagtcctctggctacggtcaacatggatctagctcaggtcattcctctacccatgggcaacatggttctacatcaggacagtcatcgagctgtggccaacatggagctagctcaggtcagtcttccagccacggtcagcatggctctggctcaagtcagtcttctggctatggccgacagggctctggatctggccagtctccaggccacggccagcgtgggtctgggtcaaggcagtctcccagctacggccgacatgggtctggctccggtcggtcttccagcagtggccaacatgggtctggcttaggcgagtcttctggctttggtcaccacgagtctagctcagggcagtcctctagttacagtcagcatgggtctggctcaggtcactcctctggctacggacaacacggctctagatcaggacagtcatctaggggtgaacgacacggatctagctcaggttcgtcttcccactatggtcagcatgggtctggctcccgtcagtcttcgggccacggccgacaagggtctggatctggccagtcccctagccgcggccgacatgggtccggtttggggcactcctccagccacggccaacatgggtctggctcaggtcgttcttccagccgtggcccatatgagtctcgcttgggtcactcttctgtctttggtcaacatgagtctggctcaggacattcctctgcttacagtcagcatggtagtggctcagggcacttctgtagccaaggacagcatggttctacatcaggacagtcatcaacctttgaccaggagggatctagcacaggccagtcttccagctatggccaccgtggctctggctccagtcagtcttctggctatggccgacatggggctggatctggccagtctcttagccacggccgacacgggtctggttcagggcagtcttccagctacggccaacatgggtctggctcaggacagtcctctggttatagtcagcatggaagtggctcagggcaagatgggtattcttattgcaaaggaggaagtaaccatgatgggggaagttctggctcatattttctcagttttcctagtagcacttcaccctatgaatatgtccaagagcagaggtgctacttttatcagtgaataataaacataaatgcaatttactcaagtagcaatttaagaaataggaaagtcatctatgaattcatcatgaaagacaagcaatccatcatgaaattcgttctaaaagtgaatcaatgcatttctgtctctttctttagagcctaaaactgtagcatatatcttgttatggggttccttccaaagactgttaggcatttgtgctactttgttagaaaatactgagtggaataacttgttagaatgagggttaaactttgaggaataatgaaaagcttttaaagagctttgggtttagttggagttgtctttttgagagctcatcattcatttatagatggtgccaaagctaaccttacatttcttagaagcaaaatattacaaatgcattaccagtcctagatacaaagctttgttttacagcaattagtgtaccctaatttttagtgtgccccaagtttggtgtgtcccaatttttggtattgtggcagaaggtgaaggctctgaaagcaaagatgcagcagcggtagtgtctttacttatcaaaaccatcaagtcctttttcttgggtatatatttaatcagtaagttaattagtggcataaaaaagtagcatcagggtcttttcccaagccagtgagcaagagcattatttcataaagaatagggatttatcatttcaggaaaaaaaaaaacattcaaatgtgggctttagcttgttttcagcagaaagatcttgctccctatttctaagaggctgctcaatattgggaaatatattgaggagttattccatggaaatacaatgctttccacctactactgtagttcaataacgtttccacctgaaaaaatatcatccatgcccagatgaaaaggaagagtatctgtcactgctacatagttccttaatttgactgtaacacatttgtttcaagtctttggattcaaacaaccggattgtattaaaattgacaataaataaatgttgatt

SEQ ID NO: 23739 - DNA, 8553 bp, Artificial Sequence
  derived and/or modified sequence
atgcccaagctgctgcagggcgtcatcaccgtgattgatgtgttctaccagtatgccacccagcacggggagtatgacaccctgaacaaggccgagctgaaggagctgctggagaatgagttccaccagatcctgaagaaccccaatgaccctgacacagtggacatcatcctgcagagcctggaccgggaccacaacaagaaggtggacttcacagagtacctgctgatgatcttcaagctggtgcaggccaggaacaagatcatcggcaaggactactgccaggtgtctggcagcaagctgagagatgacacccaccagcaccaggaggagcaggaggagacagagaaggaggagaacaagaggcaggagagcagcttcagccacagctcctggagcgctggggagaatgacagctacagcagaaatgtgcggggcagcctgaagccaggcacagagagcatcagccggcggctgtccttccagagggacttcagcggccagcacaacagctacagcggccagagcagcagctatggagagcagaacagcgacagccaccagagcagcggccggggccagtgtggcagcggcagcggccagagccccaactacggccagcacggcagcggcagcggccagagcagcagcaatgacacccacggcagcggcagcggccagagcagcggcttcagccagcacaagagcagcagcggccagagcagcggctacagccagcacggcagcggcagcggccacagcagcggctacggccagcacggcagccgcagcggccagagcagcagaggagagcggcacaggagcagcagcggcagcagcagcagctatggccagcacggcagcggcagccggcagagcctgggccacggccggcagggcagcggcagccggcagagccccagccacgtgcgccacggcagcggcagcggccacagcagcagccacggccagcacggcagcggcagcagctacagctacagccggggccactatgagagcggcagcggccagaccagcggcttcggccagcatgaaagtggcagcggccagagcagcggctacagcaagcacggcagcggcagcggccacagcagcagccagggccagcacggcagcaccagcggccaggccagcagcagcggccagcacggcagcagcagccggcagagcagcagctatggccagcatgaaagtgccagccgccacagcagcggccggggccagcacagcagcggcagcggccagagccctggccacggccagaggggcagcggcagcggccagagccccagcagcggccagcacggcaccggcttcggccgcagcagcagcagcggcccctacgtgtctggcagcggctacagcagcggcttcggccaccacgagagcagcagcgagcacagcagcggctacacccagcacggcagcggcagcggccacagcagcggccacggccagcacggcagccgcagcggccagagcagcagaggagagcggcagggcagcagcgctggcagcagcagcagctatggccagcacggcagcggcagccggcagagcctgggccacagcagacatggcagcggcagcggccagagccccagccccagccggggcagacatgagagcggcagccggcagagcagcagctatggcccccacggctacggcagcggccgcagcagcagccggggcccctatgagagcggcagcggccacagcagcggcctgggccaccaggagagccgcagcggccagagcagcggctacggccagcacggcagcagcagcggccacagcagcacccacggccagcacggcagcaccagcggccagagcagcagctgtggccagcacggggccaccagcggccagagcagcagccacggccagcacggcagcggcagcagccagagcagccgctatggccagcagggcagcggcagcggccagagccccagccggggcagacatggcagtgactttggccacagcagcagctatggccagcacggcagcggcagcggctggagcagcagcaatggcccccacggctctgtgtctggccagagcagcggcttcggccacaagagcggcagcggccagagcagcggctacagccagcacggcagcggcagcagccacagcagcggctacaggaagcacggcagccgcagcggccagagcagccgctctgagcagcacggcagcagcagcggcctgagcagcagctatggccagcacggcagcggcagccaccagagcagcggccacggccggcagggcagcggcagcggccacagccccagccgggtgagacatggcagcagcagcggccacagcagcagccacggccagcacggcagcggcaccagctgcagcagcagctgtggccactatgaaagtggcagcggccaggccagcggcttcggccagcacgagagcggcagcggccagggctacagccagcacggcagcgccagcggccacttcagcagccagggccgccacggcagcaccagcggccagagcagcagcagcggccagcacgacagcagcagcggccagagcagcagctatggccagcacgagagcgccagccaccacgccagcggccggggcagacatggcagcggcagcggccagagccctggccacggccagaggggcagcggcagcggccagagccccagctatggaagacatggcagcggcagcggccgcagcagcagcagcggccgccacggcagcggcagcggccagagcagcggcttcggccacaagagcagcagcggccagagcagcggctacacccagcacggcagcggcagcggccacagcagcagctatgagcagcacggcagccgcagcggccagagcagccgctctgagcagcacggcagcagcagcggcagcagcagcagctatggccagcacggcagcggcagccggcagagcctgggccacggccagcacggcagcggcagcggccagagccccagccccagccggggccgccacggcagcggcagcggccagagcagcagctatggcccctacagaagtggcagcggctggagcagcagccggggcccctatgagagcggcagcggccacagcagcggcctgggccaccgggagagccgcagcggccagagcagcggctacggccagcacggcagcagcagcggccacagcagcacccacggccagcacggcagcaccagcggccagagcagcagctgtggccagcacggggccagcagcggccagagcagcagccacggccagcacggcagcggcagcagccagagcagcggctacggccggcagggcagcggcagcggccagagccctggccacggccagaggggcagcggcagccggcagagccccagctatggccgccacggcagcggcagcggccgcagcagcagcagcggccagcacggcagcggcctgggggagagcagcggcttcggccaccacgagagcagcagcggccagagcagcagctacagccagcacggcagcggcagcggccacagcagcggctacggccagcacggcagccgcagcggccagagcagcagaggagagagacatggcagcagcagcggcagcagcagccactacggccagcacggcagcggcagccggcagagcagcggccacggccggcagggcagcggcagcggccacagccccagccggggccgccacggcagcggcctgggccacagcagcagccacggccagcacggcagcggcagcggccgcagcagcagccggggcccctatgagagccgcagcggccacagctctgtgtttggccagcatgaaagtggcagcggccacagcagcgcctacagccagcacggcagcggcagcggccacttctgcagccagggccagcacggcagcaccagcggccagagcagcacctttgaccaggagggcagcagcacaggccagagcagcagctatggccaccggggcagcggcagcagccagagcagcggctacggccgccacggggccggcagcggccagagccccagccggggcagacatggcagcggcagcggccacagcagcagctatggccagcacggcagcggcagcggctggagcagcagcagcggcagacatggcagcggcagcggccagagcagcggcttcggccaccacgagagcagctcctggcagagcagcggctgcacccagcacggcagcggcagcggccacagcagcagctatgagcagcacggcagccgcagcggccagagcagcagaggagagagacatggcagcagcagcggcagcagcagcagctatggccagcacggcagcggcagccggcagagcctgggccacggccagcacggcagcggcagcggccagagccccagccccagccggggccgccacggcagcggcagcggccagagcagcagctacagcccctacggcagcggcagcggctggagcagcagccggggcccctatgagagcggcagcagccacagcagcggcctgggccaccgggagagccgcagcggccagagcagcggctacggccagcacggcagcagcagcggccacagcagcacccacggccagcacggcagcaccagcggccagagcagcagctgtggccagcacggggccagcagcggccagagcagcagccacggccagcacggcagcggcagcagccagagcagcggctacggccggcagggcagcggcagcggccagagccctggccacggccagaggggcagcggcagccggcagagccccagctatggccgccacggcagcggcagcggccgcagcagcagcagcggccagcacggcagcggcctgggggagagcagcggcttcggccaccacgagagcagcagcggccagagcagcagctacagccagcacggcagcggcagcggccacagcagcggctacggccagcacggcagccgcagcggccagagcagcagaggagagagacatggcagcagcagccgcagcagcagccgctatggccagcacggcagcggcagccggcagagcagcggccacggccggcagggcagcggcagcggccagagccccagccggggccgccacggcagcggcctgggccacagcagcagccacggccagcacggcagcggcagcggccgcagcagcagccggggcccctatgagagccgcagcggccacagctctgtgtttggccagcatgaaagtggcagcggccacagcagcgcctacagccagcacggcagcggcagcggccacttctgcagccagggccagcacggcagcaccagcggccagagcagcacctttgaccaggagggcagcagcacaggccagagcagcagccacggccagcacggcagcggcagcagccagagcagcagctatggccagcagggcagcggcagcggccagagccccagccggggcagacatggcagcggcagcggccacagcagcagctatggccagcacggcagcggcagcggctggagcagcagcagcggcagacatggcagcggcagcggccagagcagcggcttcggccaccacgagagcagctcctggcagagcagcggctacacccagcacggcagcggcagcggccacagcagcagctatgagcagcacggcagccgcagcggccagagcagcagaggagagcagcacggcagcagcagcggcagcagcagcagctatggccagcacggcagcggcagccggcagagcctgggccacggccagcacggcagcggcagcggccagagccccagccccagccggggccgccacggcagcggcagcggccagagcagcagctatggcccctacggcagcggcagcggctggagcagcagccggggcccctatgagagcggcagcggccacagcagcggcctgggccaccgggagagccgcagcggccagagcagcggctacggccagcacggcagcagcagcggccacagcagcacccacggccagcacggcagcgccagcggccagagcagcagctgtggccagcacggggccagcagcggccagagcagcagccacggccagcacggcagcggcagcagccagagcagcggctacggccggcagggcagcggcagcggccagagccctggccacggccagaggggcagcggcagccggcagagccccagctatggccgccacggcagcggcagcggccgcagcagcagcagcggccagcacggccctggcctgggggagagcagcggcttcggccaccacgagagcagcagcggccagagcagcagctacagccagcacggcagcggcagcggccacagcagcggctacggccagcacggcagccgcagcggccagagcagcagaggagagagacatggcagcagcagcggcagcagcagccgctatggccagcacggcagcggcagccggcagagcagcggccacggccggcagggcagcggcagcggccacagccccagccggggccgccacggcagcggcagcggccacagcagcagccacggccagcacggcagcggcagcggccgcagcagcagccggggcccctatgagagccgcagcggccacagctctgtgtttggccagcatgaaagtggcagcggccacagcagcgcctacagccagcacggcagcggcagcggccacttctgcagccagggccagcacggcagcaccagcggccagagcagcacctttgaccaggagggcagcagcacaggccagagcagcagccacggccagcacggcagcggcagcagccagagcagcagctatggccagcagggcagcggcagcggccagagccccagccggggcagacatggcagcggcagcggccacagcagcagctatggccagcacggcagcggcagcggctggagcagcagcagcggcagacatggcagcggcagcggccagagcagcggcttcggccaccacgagagcagctcctggcagagcagcggctacacccagcacggcagcggcagcggccacagcagcagctatgagcagcacggcagccgcagcggccagagcagcagaggagagagacatggcagcagcagcggcagcagcagcagctatggccagcacggcagcggcagccggcagagcctgggccacggccagcacggcagcggcagcggccagagccccagccccagccggggccgccacggcagcggcagcggccagagcagcagctacagcccctacggcagcggcagcggctggagcagcagccggggcccctatgagagcggcagcggccacagcagcggcctgggccaccgggagagccgcagcggccagagcagcggctacggccagcacggcagcagcagcggccacagcagcacccacggccagcacggcagcaccagcggccagagcagcagctgtggccagcacggggccagcagcggccagagcagcagccacggccagcacggcagcggcagcagccagagcagcggctacggccggcagggcagcggcagcggccagagccctggccacggccagaggggcagcggcagccggcagagccccagctatggccgccacggcagcggcagcggccgcagcagcagcagcggccagcacggcagcggcctgggggagagcagcggcttcggccaccacgagagcagcagcggccagagcagcagctacagccagcacggcagcggcagcggccacagcagcggctacggccagcacggcagccgcagcggccagagcagcagaggagagagacatggcagcagcagcggcagcagcagccactacggccagcacggcagcggcagccggcagagcagcggccacggccggcagggcagcggcagcggccagagccccagccggggccgccacggcagcggcctgggccacagcagcagccacggccagcacggcagcggcagcggccgcagcagcagccggggcccctatgagagccggctgggccacagctctgtgtttggccagcatgaaagtggcagcggccacagcagcgcctacagccagcacggcagcggcagcggccacttctgcagccagggccagcacggcagcaccagcggccagagcagcacctttgaccaggagggcagcagcacaggccagagcagcagctatggccaccggggcagcggcagcagccagagcagcggctacggccgccacggggccggcagcggccagagcctgagccacggcagacatggcagcggcagcggccagagcagcagctatggccagcacggcagcggcagcggccagagcagcggctacagccagcacggcagcggcagcggccaggacggctacagctactgcaagggcggcagcaaccatgatggcggcagcagcggcagctacttcctgtccttccccagcagcaccagcccctatgaatatgtgcaggagcagcgctgctacttctaccagtag

SEQ ID NO: 23740 - DNA, 8553 bp, Artificial Sequence
  derived and/or modified sequence
atgcccaagctgctgcagggcgtgatcaccgtgatcgacgtgttctaccagtacgccacccagcacggcgaatatgatacactcaataaggccgaactgaaggagctgcttgagaacgaatttcaccagatcctaaagaacccaaacgacccagacactgttgatattatcctgcagtccctggatagagatcataacaagaaggttgacttcactgagtaccttctgatgatctttaagctcgtacaggctaggaacaaaataatcggcaaggattattgccaggtttcaggatccaagctccgcgacgatactcatcagcatcaagaagagcaagaagagacagaaaaagaggaaaataagaggcaagaatcctctttcagccatagctcctggtctgctggcgagaatgatagctatagtcggaacgtgagaggcagcctgaaaccggggaccgagtctatttcacggcgcctcagtttccagcgggatttttctggtcagcacaatagctatagtgggcagtcatcttcttacggcgagcagaacagcgattcccaccagtctagcggacggggccagtgcggttccggttccggccagtcgccaaattatgggcagcatggcagcggctctggacagtcctcctctaacgatactcatggcagcggaagtggtcaaagctcggggttctcccagcataagagcagttccggccagtcctccgggtatagtcagcacggcagcggttctggccattcttctggttatggccagcacggctctcgttcggggcaatcatcccgaggagagaggcatcgaagttcttcaggttcgtcctcgtcttatggccaacacggttcagggagccgtcagtctctcgggcatggacgtcaaggtagtggctcgagacagtcaccctctcacgtgcgacatgggagtgggtcgggtcactcatcatcacacggccaacacggttctggttccagctactcatatagccggggacactatgagtctggctccgggcagacatcggggtttggtcagcatgagtctgggtccggacagtcttctggatacagtaagcacggaagcggctctggccacagctccagtcagggtcagcatgggagcactagtggtcaggcgtcttcatccggccagcacgggagctcatctcgccagtcatcctcatacggacagcacgaatctgcatcaagacacagcagcggacgcggccagcatagttctggatcaggtcagtcccctggccacggtcagcgagggtctggctctgggcagtcccctagttctgggcagcatggtacagggtttggacggtccagctcttcagggccttacgtgtctgggagcggctattccagcgggttcgggcatcacgagagtagcagtgaacacagctctgggtacacgcaacatggaagtggatcgggccactcctccgggcatggccagcatggatcgagatccggtcagtcatcccggggagagcggcagggatcctccgccgggtccagctcaagctacggccagcatggatctggtagcaggcagagtctgggccatagcaggcatggtagcggcagtgggcagtcaccctctccttcccggggaagacacgaatccgggagccgacagtcctcgtcctacgggccccacggttacggctccggtagatcctctagcagaggtccttatgagagcgggtccggccatagtagcgggctgggccatcaagagtcaaggagcggccaatcctcgggctacggccagcatgggtcatctagcggccactcaagcactcatgggcagcacggcagtacctccggccagagctcctcctgcggccagcatggtgcgacctccgggcaatctagcagtcacggacaacacgggtccggctcttcgcagtccagtagatacggtcagcaaggctcaggctcaggacaatcaccctctcgtggccggcatgggtccgattttgggcatagctcatcgtatggtcagcacggttccgggtccgggtggtcatcttcgaacggacctcacggctccgtctccggtcagtccagcggttttggccacaaatccggcagcggacagtctagtggatattctcagcacggctccgggtcctctcatagcagtggttacaggaagcacgggtcacgtagtggccagtcctctaggtccgagcagcacggaagcagttctgggttgtcctcatcttacggacagcacggctcaggaagccaccagtcctccggccacggtagacagggatccggatccggtcatagcccgtcacgagttcggcatggttcctcatctggacactcatcctcccatggtcagcacgggagcgggacctcctgttcgtcaagttgtggccactacgagtcagggagtggtcaggcctccgggttcgggcagcacgaatcaggctcagggcagggatatagtcagcatggatccgccagcggtcattttagctctcagggccggcatggatccaccagcgggcagagttcaagctcaggacagcacgatagtagttctggccagtcttcttcgtatggacaacacgaatcggcctcccaccacgcgagcggccggggcaggcatgggtcaggatcggggcagagccctggacacgggcagcgtggcagtgggtctggacagtcgccgagctacggacgccatggcagcgggagcggcaggagctcttcatcaggaagacacggcagtggcagcggacagtcttctggcttcggacataaatcaagctctggacagtcttcgggctacactcagcatggaagcggatcgggtcactcctcctcctatgagcaacacggctctcgtagtggacagtcgtctagaagtgaacagcatggatcttctagtgggtctagctcctcctatgggcagcacggaagtggatcgcggcaatccttgggacacggacagcacgggtccgggagtggccagtcaccctcgccatccagaggacggcacgggagtgggagtgggcagagttcatcctacgggccctaccggtcaggctctggatggtcatcctcacgtggcccatatgagtctggtagcggccattctagtggacttggccaccgcgagagccggtccgggcaaagtagcggctacggtcaacacgggagctcatccggacactcctcaacgcatggccagcatggtagcacctctggccaatcatcctcttgcggtcagcatggcgcctcttcaggacaaagctcatctcatggccagcacgggtctggctctagtcagtcttccggttatggccgacagggctccggctctggacagtcgcccggccatggccagagaggcagcgggagccggcagagcccatcctatggtagacacggctccggctccggtcgatcttcatcatctggccagcacgggagcggacttggtgaatcttctggattcgggcaccacgagagcagcagcgggcagagttcttcttattcccagcacggctctggtagcggacacagcagtgggtacggccagcacggcagtcggtcaggtcaatcctccaggggggaacggcatgggagctcttcagggtcatcctcacactacggacagcatggctccgggagccgacaatccagcgggcacgggagacagggctccgggtcgggccattccccctcccgaggccggcatggatccggccttgggcacagctcctctcatggacagcacggctccgggagcggcagatctagcagccgagggccttacgagagccgttccggacacagttccgtttttggccagcacgaaagcggaagtggccattcgtctgcctactcccagcacggtagcggaagtggccatttttgctcacaaggacagcatggtagcactagtggacagagcagtaccttcgaccaggagggcagctccacaggtcaaagctcctcttacggacaccgagggtctgggtcctctcagagtagcgggtacggccggcacggcgcaggtagtgggcagtccccaagccggggccggcatgggtctggttcaggacatagtagttcctacggacagcacggctcaggctccggctggagctcttctagtggtcgacatggatcaggttctggtcaaagcagtggtttcgggcaccatgagagcagttcctggcagagcagcgggtgtactcagcatggctctggatcaggccacagtagctcctatgagcagcatggctcaagatcgggccagagctcccggggtgagcggcatgggtcgtcctccggcagcagcagctcttacggccagcatggctcgggaagccgtcagtcactgggccatggccagcatgggtccgggtccgggcagagtccatctccgtctagaggccgacacgggagtgggtccggccaaagcagttcctatagcccatatggctctgggtccgggtggtcaagctcaagggggccttacgagagcggctccagtcatagtagcggtctgggacaccgcgagtctcgatcgggacagtctagtggctatggccagcatggctcctcgtctgggcactcatccactcatgggcagcacgggagcaccagcgggcaatcctcctcttgcggccagcatggcgctagtagcgggcaatctagctcacacggccagcacggatctggcagctcccagagctcagggtacgggcgccaaggcagcggctccgggcagtctcctggacatggtcagagaggctctgggagtcggcagtctccctcatacggcagacacggatctggatctggcaggagcagttcatcgggccaacacggcagcgggctgggtgaatccagcggttttggccatcacgagtcaagctccgggcagagcagtagctactctcaacatggcagcgggagcggacatagttccgggtatggccaacacggttcacgtagcggacagtcctctaggggcgaaaggcacggtagctcatcccgctcatcctctaggtatgggcagcatggcagcggttcgcgccagtcctccggacatgggagacagggctctggttccggccagagcccttctcgtggcaggcacgggagcggcctggggcactcgagttcgcacgggcaacacggatcaggcagcggtcgctcttcttcaaggggtccatacgaaagtagaagcggccactcctcagtgttcgggcagcacgagtccggctcaggacattcctcagcatactcccagcacgggagcggaagtggccacttctgtagccagggtcagcacggttctacttcaggacagagctcaaccttcgaccaggagggttcttctacaggccagtcatcttcgcacggccagcacgggtcaggcagcagccagtcctcttcttatggacagcaaggctccggctccggccagtctccctcccgaggtagacacggatccggttccggccacagttccagttatggccaacatggttctggctcaggctggtctagcagcagtggtcgccacggcagtggatccggccagtcaagcggctttggacaccacgagtctagttcctggcagtcttctggatatacacagcacgggagcgggagtgggcactcaagcagctacgagcagcacggttctcggtcaggccagtctagcaggggtgagcagcatggctcttcctctggctcctcgtctagttacggccagcacgggtctgggagtaggcagtccttaggccatggtcagcatggaagtggcagcggacagtctcccagcccctcccgtggaagacatggttctggctcaggccagtcctccagctatgggccttatggctcaggaagcggttggagcagcagccgaggcccatatgaaagtgggagtgggcacagctccggcttgggccatcgggaatctagatcaggccagtcgtccggatacggacagcacggtagctcatcagggcattcctctactcacggccagcacggctcggcttcagggcagagctcgagctgcggacagcatggtgcttcttctggacaaagctcaagccatggccagcacggctcaggctcaagccagagttcgggatacggccgccagggaagcggaagcgggcagagccctggtcacggacagcggggcagcggtagccgccagtctccctcttacggcagacatggttcagggtctggccggtcttctagcagcgggcagcatggcccggggttgggtgagtcttctggattcggacatcacgaatcttccagcggccagagttcgagctattcgcagcacggctctgggtccggacattctagcggctacggacaacatggctctcgttctggccaaagcagccgcggagaacggcacggctccagcagcggctccagcagcagatatgggcagcatggctccggtagccgccagagcagcgggcatgggaggcaaggatcaggaagcgggcactctccatctcgcgggcgccacgggagtggaagcggccattcatcttcccatggacagcacggctcgggcagtggaagatcatcaagccgcggcccctacgagtcgcgctccggacactcgtccgtgtttggtcagcacgagagtgggagcggccactcctcagcctactcacaacatggcagcggtagcggtcacttctgttcacaggggcagcatggctcaacatccggacaatcttccacttttgatcaggagggtagctcaacaggacagtcctcttctcatggccagcacggttctggctcttcccaatcttccagttacggccagcaggggtccggctcaggacagtcacccagtaggggacgccacggatccggatcagggcatagctccagctacgggcagcacggaagcgggtctggatggtcaagctcaagcggccgccacggctcagggtctggtcagtcttccggtttcggacatcacgagtcctcatcttggcagtcttctggctatacacagcatggctctggaagcggacatagctctagctatgaacaacacggcagccgaagcggccagtcctcacggggagaacggcacggtagttccagtggatcatcgtcatcttacgggcagcatggatctgggagtcgtcagtcactgggccatgggcagcacggctctggtagcggccagtctccttcaccctctagagggagacatggatctggaagtggccagtcttcctcatacagtccctatggtagcggtagcgggtggtcctcatcccgtggaccctatgaatcggggtcagggcactctagtggactgggacacagggaatcaagatccgggcagtcctccggatacggtcagcacggatcttcctcggggcacagctctacccatggacaacatggatctacttcaggacagtctagcagctgcggacagcatggcgcctctagcggccagagcagtagccacggccagcatgggtcagggtcaagccaaagctctgggtatggccgccagggatccggatcaggtcagagtcccggacatgggcagcgcggcagcgggagccgacagtcacctagctatggcagacacggttcaggcagcggaaggtcgtcctcctcagggcagcacggctcaggcctcggagagtcttctggcttcggccatcacgagtctagctccggccagtccagcagctattcccaacacgggagcggctctggccatagctcgggttacgggcagcacggctcaaggtcaggtcaaagctccagaggggagcgccacggcagcagtagcggtagtagttcccactatggtcagcacggttcagggtcccgtcaatcctcaggccacggacgacaggggtctggctccgggcagagcccctcgcgcgggcgacacggatccggattgggacatagctctagccacggccagcatggctccggctctggaagatctagttcaaggggaccttacgagtccaggctgggccactcatctgtatttggtcagcatgaatcggggagtggccacagcagtgcttactcgcagcacggaagcggctccggtcatttttgttcgcaaggtcaacatggcagcacctctggtcaaagctctaccttcgatcaagaggggtcatccacaggccaaagctcctcatacggtcacagaggctctggctcctcccaaagttcagggtatgggaggcatggcgctggcagtggccagtccctcagccatggccgccacgggagcggatccggtcagtccagcagctacggccagcatggctctgggagcggccagtcctccggttattcccaacacggtagtggaagtggacaagacggctactcctattgtaaggggggtagcaaccacgatgggggttccagtggttcttacttcttgagcttcccatcatcgacctcaccatacgaatacgtgcaggaacagagatgttacttttaccagtag

SEQ ID NO: 23741 - DNA, 8552 bp, Artificial Sequence
  derived and/or modified sequence
atgcctaaactgctgcaaggggtgatcacagtaatcgatgtcttctaccaatatgcaacccagcatggtgagtatgatacgctgaataaagccgagctgaaggagctgctcgagaacgagtttcatcagattctgaagaaccctaacgatccagacactgtggatataatcctgcaaagtttagatagggatcataacaaaaaagttgacttcaccgaatacctcctgatgattttcaagcttgttcaagcaagaaataagataatcggcaaggactactgtcaggtgtctggcagtaagctcagagacgacactcaccaacatcaggaggagcaggaagagaccgagaaggaggaaaataagaggcaggagagtagcttttcccactcttcctggagtgctggagagaatgactcctatagcaggaacgtgcgcggatcgttgaagcctgggaccgagagcatctccaggcggctatcctttcagcgggatttcagcggccagcataacagctatagtgggcagagctctagttacggggaacagaacagcgattctcatcaaagtagcggtcgtgggcagtgcgggagtggcagtgggcagtctcctaactacggtcaacatggctctggctccggtcagtcatccagtaatgacacacacggcagcggatcaggccaatccagcgggttctcacaacataagagttccagcgggcagtcctccggatatagtcagcacggcagcggcagcggacactcttctggatacggtcagcatggatcacgctccggccagtcgtctagaggggagcgccaccgcagctctagcgggtctagctcctcatacggacagcacgggagcggctctaggcaatcattaggacacggcagacaagggtcagggtcccggcaatcgcccagccacgttcgccacggatctgggtccggacactccagctcccacggacagcatgggagtggctcctcatactcctatagccggggacactatgagtctggtagcggacagacgagtgggttcggacagcatgagagcggcagcgggcagtcttcgggatattcaaagcacggatctggcagcggtcactcatcttcccagggccagcatggctcaacctctgggcaagcgagtagttccggccagcacggtagcagcagtagacagagttcgtcatacggccaacacgaaagcgcttcaaggcactcttcaggcagaggacaacacagttcaggcagcgggcagagccctgggcacggtcaacgtggctccggcagcggacagtctccatctagtggccagcatggtacaggtttcgggaggtcaagctcctcaggaccatatgtgagcggctcgggttactcatctgggttcgggcaccacgaaagttctagtgagcattcatccgggtacactcagcatggctcagggtccggacacagctcaggccatggacagcacgggtcacgctcaggacagtcctcacgcggagagcgtcagggatcttctgctggctcttcctcctcctatggccaacatggctccggatctcgccagtccttaggtcactccaggcatgggagcggctcaggacagtcccccagtcctagtcggggacgtcatgagtccggatccaggcaatcctccagctacggcccacatggctatgggagcggacgaagttcttcacggggtccttacgagagcggcagcggacattcgtctggtttggggcatcaggaaagcaggtccggtcaatcttcaggatatggccagcatggttcttcttccggtcactcttctacacacggccagcacggcagcacatcagggcagtcctccagctgtggacagcacggcgctacatcgggccagtcatcctcccacggacaacacggaagcggaagctcacaaagcagtagatatggccagcagggctctgggagcggtcagagtccatcacgcggacgtcacggcagtgatttcggccattctagctcttacgggcagcacggctcaggatccggctggtctagcagcaatggaccacatggatctgtgagcgggcaatctagcggattcgggcacaagagtggctccggacagagtagcggctatagtcagcacggcagcgggtcttcacacagttccggctatagaaagcacggtagcaggtccggtcaatcctcaagaagcgagcagcacggatcctcttccgggcttagctctagctacgggcagcacgggagtggatcccaccagagctcaggacacggcagacagggatccgggtccggtcacagtccatctcgggtgaggcacggctcttcatccggccactcttccagccatggacaacacggcagcggcacaagctgcagtagctcctgtggtcactatgaaagcgggagcggccaggcttccggctttggtcagcatgagagcgggtccggccagggttatagccagcacggatccgcgtccggtcacttctccagccagggccgacatggctccacctccggccagagcagctcgtctggtcagcacgattcatccagcggtcaatcctcgtcgtatggccagcacgagtcagcatcacaccacgcatctgggaggggccgacacgggagcggttccggccaatcacctgggcacggccaacgtggctcgggaagcggacagagcccttcttacgggcgacacggcagtggctcagggaggagcagctcaagcggcagacatgggtccggctctggtcagtcaagcggcttcgggcacaagagctccagtggccagtcgtcggggtacacccaacacggttccgggtcggggcactcttcttcttatgaacagcatggcagcagatctggacagagtagcaggtcagaacagcatggatcctcctccgggtcctctagttcctatggacaacacggtagtggctcgagacaatctctcgggcacggccagcatggaagtgggtccggacagagcccctctccgagccggggaagacacggaagtgggtccggccaatcaagctcctacgggccataccggagcggctccggctggtcgagctctcggggaccgtatgagagtggaagcggccattcttccggacttggtcatcgcgaaagtaggagtggtcagtcgagcggatatggccagcacgggtccagcagcggccactctagcacccatggccagcacgggtcaactagtgggcagtcttcaagctgcggacaacacggagcctcatccgggcagtcaagcagccacggccagcacggctctggatcatcccagtcctctggatacggcaggcagggttctggctcagggcagagccccggacacgggcagagaggctctggctctagacagagtccatcttacgggcgacacggcagtggcagcggtcgcagcagcagtagcggccagcacggatctggcctcggcgaaagctccggctttggacaccacgaaagctcctccggtcagtcatcctcctacagtcagcatgggtctggcagcggtcacagttccggatacgggcagcacggttcacggtccggtcagtcaagcaggggggaaagacacggtagttcttcgggcagctccagtcactacggtcagcatggatccggttcccggcagagctcgggccatggcagacaaggcagtgggagcggacattccccgtcaaggggcaggcacggtagtgggttaggccactcttcctcacatggccaacacggctcaggatctggaagaagtagtagccgcggtccatatgaatcgcgttctgggcattcgtccgtgtttggccagcacgaatccggctccggacacagctcagcttactcccagcacgggagcgggtcgggccatttctgcagtcaaggccaacatggatcaacaagcgggcagtcttcaactttcgatcaggaaggcagtagcactggtcagagctcgtcctacggacaccgagggagcggctctagccagagctctggatatggacgccatggcgcaggttctggacagagcccaagccgcggtcgccacggttccggctccggtcatagctcatcctacggccagcacggaagtggtagcggctggtcttcctcgagcggcagacacggaagtggttcgggccagtcgtccgggtttgggcaccacgagtctagttcatggcagtcgtcaggttgcacgcaacacgggtccggctctggccattcaagttcatacgagcagcatggctcccgttccggccaaagctctaggggtgagaggcacgggtcatcaagcggcagttcttcaagctacggccagcatggctcaggctcccggcaaagtttgggacacggccagcatggtagcggctcgggtcagtcaccttcaccatctcgcggtaggcatggaagcgggtctggccaatcaagtagttacagcccttatggatccggctcaggctggagcagttcccggggaccctacgagtccggcagttcgcacagtagcggcctgggtcacagggagagccgttctggacaaagctctggttacggccaacatggatcaagctccggtcactcatcaacccacggacaacatggctctacctctggacaaagtagctcttgcggacagcatggcgcttcaagtgggcaaagttcgagccacggacagcatgggtccgggtcatctcagtcaagcggttacggcaggcaaggcagcggcagcggccagtcccctggacatggacagcggggatccgggagtcgccagagtccttcctatggaaggcacggttcaggttcaggacggtctagcagcagtggccagcacggatctggactgggggagtcctccgggttcgggcatcatgagagtagtagcggccaatcaagctcgtatagccagcatggcagtgggagcggacacagctccgggtatggccagcacggctcccgctccggacagtcgagtaggggtgagcgccacgggtcatcttcacggtcatccagcagatacggacagcatggctcaggtagccggcagtccagcggacacgggcgtcagggtagtggctctgggcaatcgccttcccgtggacgacacggatccggcctggggcactcatcctcccacggacaacacgggtctgggtccggtagatcttcttcgagaggcccatatgagagcagatctggacactcctcggtgtttgggcagcacgagtccggatcaggacactcatcagcatactcacagcacggttctgggagcggccacttctgttcccagggtcagcacggcagtaccagcggccagtcttcaacatttgaccaggaaggatcctccaccggtcagagctcatctcacggacaacacgggtcgggtagctcccaaagctctagttatgggcaacagggttctgggagcggccaaagtccttcaaggggccgtcacggcagcggctccggacactccagctcatacggtcagcacgggagtggctccggctggtcttcatccagtggtcggcacggatctggatccggacaatccagcggcttcggtcatcatgagtcaagttcctggcagagctccgggtacactcaacatgggtccgggtctggacattcctcttcctatgagcaacatggctctcggtcggggcaaagttcccgtggggagcagcacggatcctccagtggcagtagcagctcgtacgggcagcacggatccgggagtaggcagtctctcggacacggacaacatggttcagggagcggacagtccccaagtccttcccgtgggcgacacgggtcaggttctgggcagagcagcagttacggcccttatggctctggaagtggttggtcaagtagcagaggaccttacgagagcgggagcggacattcttctggacttggccaccgggagtcaagaagcggacagtccagtgggtacggtcagcacggatcctccagcggccatagctctacacacggacagcacggatccgctagcggtcagagttctagttgcgggcagcatggagcatcctctggccagtcatcgtcccacggacagcacgggagtggctccagtcaatcctccggttatggcagacagggaagcggctctggacagtcccccggtcacggccagcgagggtctggcagccgtcagtcgccaagctacgggagacatggcagcggcagcgggagaagctcctcatctggccagcacggcccaggcctgggcgaaagtagcggatttggccaccacgaaagctcttcaggtcaatcatcttcatactcccagcacggcagcggcagcggccacagttccggatacggacaacatgggtcccggagtggccagagttcacgaggcgaaagacatggcagctccagcggaagcagcagtaggtacggccagcacggctccggcagcagacagagttctgggcacggacggcagggatctggatcgggccattcaccctctcgcggaagacatgggagcggcagtggccactcgagcagccatggccaacacggcagtgggagcgggagatctagtagccggggaccgtacgaatcccgtagtggtcattccagcgtgtttggccagcatgaatcaggaagtggccattcttcggcttattcgcaacatggcagtggcagcgggcatttctgtagtcagggccaacatgggtctacctcaggacaatcttccactttcgatcaggaagggtctagtactggtcagtcatcatctcatggccaacacggttctggctcatcccagagctctagctatgggcagcagggctcgggctcggggcagtctccctcacgaggccgtcatggaagcgggagtggccattccagctcctacgggcagcatggatcgggctcgggctggagttcttcaagtggccgtcacggatcgggcagcggccagtcaagcggatttggacatcacgagtcatcatcctggcagtccagtgggtacacccagcatggcagcgggagcggacattcaagcagctatgaacagcacggaagtaggtctgggcagtcaagtagaggggagcggcacgggtcttcctccggctccagtagctcctacggccagcatggatccggaagccgccagtctctgggtcacggacaacatggctctgggagcggacagagcccgtcgccatctcgcggtagacacggctccggatccggtcaatcgagctcatattctccgtacggcagcggaagtgggtggtccagctctcgagggccatatgaaagcggctcaggtcacagtagcgggcttgggcatagggagtcaaggtcaggccagagttcgggttacggacaacacggttccagctccgggcattcttcaacccacggacagcatgggagcacttccggccagagctcgagctgcgggcagcatggggcaagcagcggccagagcagctctcacggccaacatggttcgggctctagccagtcaagtggctatggtaggcaggggtccggctcaggccaatctcctggccatggtcagcggggatcaggaagccgacagtctccctcatacggaagacacggctcgggatccggaagatcttcatccagcggccagcacggttctggacttggcgagtcctcaggcttcggtcaccacgagtcatccagtggacagagttccagctattcacagcatggttccggttcaggtcatagctctggatacggtcagcacggttcaaggtcaggtcagagtagcagaggagagagacacggatcttcctctggatcctctagccattacggacaacatggctcggggagcaggcaatcctcagggcacggacggcaagggtcagggtcagggcagagcccctcacgagggcgtcacggctctggcttgggtcacagcagttcgcacggccagcacggctcgggctcgggaaggtcttcttctcggggaccctatgaaagccggctaggtcatagcagtgtcttcggccagcatgagagcgggagtgggcactcttccgcctacagccagcacgggagcggttctggccatttttgtagtcaaggccagcatgggtccacttctggtcaaagctcaacatttgatcaggagggatctagtaccggacagtcatctagctatgggcacaggggctcaggttcttcccaatcctccggctatggacgtcatggggctgggagcggccagtctctctcacacggcaggcatggatccggctccggccagagcagcagttacggacagcacggcagtggctctggccagtcctcagggtattcacaacatggctccggtagcggccaggacggatatagctattgtaagggtggcagcaatcatgacgggggatcctccggctcgtattttctgtcatttccttcctcaacttctccttacgagtacgtccaagaacagaggtgctacttctaccagta

SEQ ID NO: 23742 - DNA, 570 bp, Artificial Sequence
  derived and/or modified sequence
atgtgcgcaaagcggttgagagggccttttcggatcttcctgcctctccgcaagtactcatttttcccctcacaggtggcccagccatttgccagcgccgcggttgcccaggcactgctctcctcccctggtactaatttgcagcagaccctggtaggaggattgagactccggcatggatcagtcgggggagctcagtgggtggtcaaagctgcatgtccatgggagccccaagatgtggcatgttgtggaggctttacagtgactgctcgcatcgcagcatgtgtcctcctatgtctttgcgagcatatgtacacaccatctgcccacgctagaatgacatttgggaccgagcatctactgctctggccagctcagagaagggcagacccacggaccgcggcccctataaggctgcaccagggtcagctcgatccttcacgtgaccccgagaatctgagagcctgggccgtgggctcctgcagggctggagtggaactccacggaagtccagttcacctccatatgagagccggtcagcacataagcatgttcgctggagtcgcatag

SEQ ID NO: 23743 - DNA, 609 bp, Artificial Sequence
  derived and/or modified sequence
atgaggacctccatgtctgaggccgccacccgctggagctgccagggcagctgccagaagacctgcttcagccgggtgcggccctggaggcggcgctgcagctgtggggacagcagcagcagaagaagaagaagctgctgcaccggcagcctgggccccatgccccggctgcccagcctgtggcccctgagcctgcccctgcggagcctgagcagcccccaccgggtgcagggcctgggccccccccggcggctgaagagccagctgctgccccgcttcttctggaggcggcagcaggagcccctgagcagcttccctggaagaaatgaaggaggcagcgagatggagatcctgggcgtgtgccctgtgtcccctggggccctgagctacatggagagccccaccggcttctggaggccccgggaggccagcagcctggagctggccaagggcatcagcaagagaagacacttcctgcctgccccagccctgtgccccaaccccaggagcagcgaggccttccctggccagagcgtgagccgctggccctttgacatcaaggagacagcccctggccccagcctgagcgccctgctgcccacctgctag

SEQ ID NO: 23744 - protein, 207 aa, Artificial Sequence
  derived and/or modified sequence
MENRALDPGTRDSYGATSHLPNKGALAKVKNNFKDLMSKLTEGQYVLCRWTDGLYYLGKIKRVSSSKQSCLVTFEDNSKYWVLWKDIQHAGVPGEEPKCNICLGKTSGPLNEILICGKCGLGYHQQCHIPIAGSADQPLLTPWFCRRCIFALAVRVSLPSSPVPASPASSSGADQRLPSQSLSSKQKGHTWALETDSASATVLGQDL

SEQ ID NO: 23745 - protein, 107 aa, Artificial Sequence
  derived and/or modified sequence
MENRALDPGTRDSYGATSHLPNKGALAKVKNNFKDLMSKLTEGQYVLCRWTDGLYYLGKIKRVSSSKQSCLVTFEDNSKYWVLWKDIQHAGVPGEEPKCNICLGKTS

SEQ ID NO: 23746 - DNA, 624 bp, Artificial Sequence
  derived and/or modified sequence
atggagaaccgcgcattagatcctggaacccgcgactcttacggggcaacttcccatctaccaaataagggagcactagccaaagtgaagaacaattttaaggacttgatgagtaagctgacagagggtcaatacgtgttgtgcagatggacggacggactgtactatttaggaaaaattaaacgggtctcctcttccaaacaaagttgtttagtgacctttgaggataacagcaaatattgggtcttgtggaaggatatccagcatgcaggcgtgcccggggaagaacctaaatgtaacatctgtcttggtaagacgagcgggcctcttaacgagatcctcatatgcggtaagtgcggcctggggtaccatcagcaatgccatatacccattgcgggaagcgctgatcagcccttattaacaccctggttctgccgtcgctgcatctttgcactagcagtgagagttagtctgcctagtagccccgtccccgcaagtcctgccagctcgtccggagcagaccagcgcctcccaagccaaagcctgtcttccaagcagaaggggcacacatgggctctcgagacagacagcgccagcgccacggtgttgggacaggatctttag

SEQ ID NO: 23747 - DNA, 501 bp, Artificial Sequence
  derived and/or modified sequence
atggaaaatagagcccttgatcccggcacacgcgattcttatggcgcaactagccaccttcctaacaaaggagcacttgcaaaggttaaaaataatttcaaggacctgatgtccaagctcaccgaaggtcagtatgtgctgtgcaggtggaccgatgggctctattatcttggtaagattaagagggtctcctctagcaaacagagttgcctcgttacctttgaagataatagtaaatactgggtactgtggaaagacatccagcacgctggtgtccccggtgaggagcctaagtgtaacatttgtctggggaaaacgtcaggacccttaaacgaaatcctcatctgcggaaaatgcggtctcggctatcatcagcaatgccacattcccatcgccggcagcgctgatcagcccctgctgacaccctggttttgtcggcgttgtatctttgccctcgctgtcagaaaaggcggcgccttgaagaaaggcgcaattgcgtag

SEQ ID NO: 23748 - DNA, 624 bp, Artificial Sequence
  derived and/or modified sequence
atggagaacagagccctggaccccggcacccgggacagctatggagccaccagccacctgcccaacaagggggccctggccaaggtgaagaacaacttcaaggacctgatgagcaagctgacagagggccagtatgtgctgtgccgctggacagatggcctgtactacctgggcaagatcaagagggtgagcagcagcaagcagagctgcctggtgacctttgaggacaacagcaagtactgggtgctgtggaaggacatccagcacgccggcgtgcctggagaggagcccaagtgcaacatctgcctgggcaagaccagcggccccctgaatgagatcctgatctgtgggaaatgtggcctgggctaccaccagcagtgccacatccccatcgccggcagcgctgaccagcccctgctgaccccctggttctgccgccgctgcatctttgccctggccgtgcgggtgtccctgcccagcagccctgtgcctgccagccctgccagcagcagtggagctgaccagaggctgcccagccagagcctgagcagcaagcagaagggccacacctgggccctggagacagattctgccagcgccaccgtgctgggccaggacctgtag

SEQ ID NO: 23749 - DNA, 501 bp, Artificial Sequence
  derived and/or modified sequence
atggagaacagagccctggaccccggcacccgggacagctatggagccaccagccacctgcccaacaagggggccctggccaaggtgaagaacaacttcaaggacctgatgagcaagctgacagagggccagtatgtgctgtgccgctggacagatggcctgtactacctgggcaagatcaagagggtgagcagcagcaagcagagctgcctggtgacctttgaggacaacagcaagtactgggtgctgtggaaggacatccagcacgccggcgtgcctggagaggagcccaagtgcaacatctgcctgggcaagaccagcggccccctgaatgagatcctgatctgtgggaaatgtggcctgggctaccaccagcagtgccacatccccatcgccggcagcgctgaccagcccctgctgaccccctggttctgccgccgctgcatctttgccctggccgtgaggaagggcggggccctgaagaagggggccatcgcctag

SEQ ID NO: 23750 - DNA, 624 bp, Artificial Sequence
  derived and/or modified sequence
atggagaaccgggccctggaccccggcacccgggacagctacggcgcgacttctcacctacctaataaaggcgcgctggcgaaggtgaagaataattttaaggaccttatgagcaagttaacagagggtcaatacgttctgtgtagatggacagatggtctttattatctcggtaagattaagcgagtaagtagtagcaaacaatcttgcctggtcaccttcgaagataattcgaagtactgggtactttggaaggacattcaacacgctggcgtgccaggtgaagaacccaaatgtaacatctgcctgggaaaaacatctggccccttgaacgaaattctcatctgcgggaagtgcggcctgggctaccaccagcagtgccatatacctatcgctggttctgctgaccagccactgctgactccctggttctgccggcgctgtattttcgcactggctgtgcgtgtttctctgcctagttcccctgtgcccgcctcccccgcctcaagctctggcgccgatcagagactgccatctcaatctctatcaagcaaacagaagggccatacctgggccctggagaccgactcagcatctgccacggtcctaggccaggacctgtag

SEQ ID NO: 23751 - DNA, 501 bp, Artificial Sequence
  derived and/or modified sequence
atggagaaccgggccctggaccccggcacccgggacagctacggcgccaccagccatctgccgaacaaaggggccctcgccaaggtcaagaataattttaaggatttgatgagtaagttgactgaaggccagtacgtgctctgtcggtggacggatggattgtattacctcggaaagatcaagcgtgtctcttcttctaagcaatcatgcctcgtgacctttgaggacaatagtaagtactgggtgctctggaaagacatccagcatgccggcgtcccgggggaagagcccaagtgcaatatttgtctggggaagaccagtggcccactgaatgaaattctgatatgtggcaaatgtgggctcggctaccatcagcaatgtcatattcccatcgccggaagcgctgaccagcctctgcttactccgtggttctgccgaagatgtatatttgccctagccgttcggaagggcggggcactaaagaagggtgcaatcgcctag

SEQ ID NO: 23752 - DNA, 836 bp, Artificial Sequence
  derived and/or modified sequence
actcggccgggcagccgcgggccgagcgcagccgcctccgccaccgatgcgcctggtggccagactccaagtgggaccggcggacacgcagcctcgcgtgtcaggggaagctgatggagaatcgagctctggatccagggactcgggactcctatggtgccaccagccacctccccaacaagggggccctggcgaaggtcaagaacaacttcaaagacttgatgtccaaactgacggagggccagtatgtgctgtgccggtggacagatggcctgtactacctcgggaagatcaagagggtcagcagctctaagcaaagctgcctcgtgactttcgaagataattccaaatactgggtcctatggaaggacatacagcatgccggtgttccaggagaggagcccaagtgcaacatctgcctagggaagacatcagggccgctgaatgagatcctcatctgcgggaagtgtggcctgggttaccaccagcagtgccacatccccatagcgggcagtgctgaccagcccctgctcacaccttggttctgccgacgctgcatcttcgcactggctgtgcgggtgagccttccatcctccccagtccctgcctctcctgcctcctccagtggggcagaccagagactcccatcacagagtctgagctccaagcagaagggccacacctgggctttggagacagatagcgcctctgccactgtccttggccaggatttgtagactccctgagcctcagtttcctcaactgtaaagtggagatgggtttggtgtcgggaataacgggaccaataaatgatgctttactattaaaaaagaaaa

SEQ ID NO: 23753 - DNA, 624 bp, Artificial Sequence
  derived and/or modified sequence
atggagaatcgagccctggatccgggtactcgcgacagctacggggctacctcccacttaccaaataagggagccctcgcaaaagtgaagaacaatttcaaagatcttatgagcaagttgaccgaaggacagtatgtcttgtgtcgctggaccgatgggctctactatttagggaagatcaagcgggttagctctagtaagcagtcctgcttggttacctttgaggacaactctaagtactgggtactttggaaggatatccaacatgccggagtgcctggggaggaacccaaatgtaacatctgcctagggaagacctctggacccctcaacgaaatcctaatatgcgggaagtgtgggctggggtatcaccaacagtgtcatattccgatcgctggctctgcggaccagcctctactgacgccttggttctgcaggcgatgtatctttgccctcgctgttcgcgtgagcttaccgagcagccccgtccctgcttctcctgcttcatcttctggtgccgaccagagacttccttcccaatccctgagctctaaacagaaggggcatacctgggccctcgagaccgacagcgctagcgctacagtcctagggcaagatctctag

SEQ ID NO: 23754 - DNA, 501 bp, Artificial Sequence
  derived and/or modified sequence
atggagaacagggccctggatcccggaactagggactcttatggcgctaccagtcatctgccaaataaaggagcactcgccaaagtgaaaaacaattttaaggacctcatgagtaaattgacagaagggcaatacgttctgtgtcgctggacagacggtctttactacctgggtaagattaaacgcgtgagcagtagtaagcagtcctgcctggtcacgtttgaggataactctaagtactgggtcctatggaaagacatccagcacgcaggtgtgcctggcgaggagcctaagtgcaacatctgcctggggaagacttcaggccctctcaacgagatcctcatttgtggcaaatgcggactggggtaccaccagcagtgtcacattcctatagcagggtccgccgatcagcccctcctaaccccctggttttgccggcgatgcatctttgcccttgctgtacgtaagggcggtgccctaaagaaaggggcaatcgcttag

SEQ ID NO: 23755 - DNA, 624 bp, Artificial Sequence
  derived and/or modified sequence
atggagaacagagccctggaccccggcaccagagacagctacggcgccaccagccacctgcccaacaagggcgccctggccaaggtgaagaacaacttcaaggacctgatgagcaagctgaccgagggccagtacgtgctgtgcagatggaccgacggcctgtactacctgggcaagatcaagagagtgagcagcagcaagcagagctgcctggtgaccttcgaggacaacagcaagtactgggtgctgtggaaggacatccagcacgccggcgtgcccggcgaggagcccaagtgcaacatctgcctgggcaagaccagcggccccctgaacgagatcctgatctgcggcaagtgcggcctgggctaccaccagcagtgccacatccccatcgccggcagcgccgaccagcccctgctgaccccctggttctgcagaagatgcatcttcgccctggccgtgagagtgagcctgcccagcagccccgtgcccgccagccccgccagcagcagcggcgccgaccagagactgcccagccagagcctgagcagcaagcagaagggccacacctgggccctggagaccgacagcgccagcgccaccgtgctgggccaggacctgtag

SEQ ID NO: 23756 - DNA, 501 bp, Artificial Sequence
  derived and/or modified sequence
atggagaacagagccctggaccccggcaccagagacagctacggcgccaccagccacctgcccaacaagggcgccctggccaaggtgaagaacaacttcaaggacctgatgagcaagctgaccgagggccagtacgtgctgtgcagatggaccgacggcctgtactacctgggcaagatcaagagagtgagcagcagcaagcagagctgcctggtgaccttcgaggacaacagcaagtactgggtgctgtggaaggacatccagcacgccggcgtgcccggcgaggagcccaagtgcaacatctgcctgggcaagaccagcggccccctgaacgagatcctgatctgcggcaagtgcggcctgggctaccaccagcagtgccacatccccatcgccggcagcgccgaccagcccctgctgaccccctggttctgcagaagatgcatcttcgccctggccgtgagaaagggcggcgccctgaagaagggcgccatcgcctag

SEQ ID NO: 23757 - protein, 346 aa, Artificial Sequence
  derived and/or modified sequence
MDSLAAPQDRLVEQLLSPRTQAQRRLKDIDKQYVGFATLPNQVHRKSVKKGFDFTLMVAGESGLGKSTLVHSLFLTDLYKDRKLLSAEERISQTVEILKHTVDIEEKGVKLKLTIVDTPGFGDAVNNTECWKPITDYVDQQFEQYFRDESGLNRKNIQDNRVHCCLYFISPFGHGLRPVDVGFMKALHEKVNIVPLIAKADCLVPSEIRKLKERIREEIDKFGIHVYQFPECDSDEDEDFKQQDRELKESAPFAVIGSNTVVEAKGQRVRGRLYPWGIVEGALRLREAAQHAHPHAYARPQGRDVRRALRELPRALHPADDQQTDPGQPHGEPHPDPAAAHPGRRD

SEQ ID NO: 23758 - DNA, 1041 bp, Artificial Sequence
  derived and/or modified sequence
atggactctcttgccgctcctcaggataggctcgtggaacagttgttatcaccaagaacacaggcccagcggcggctgaaggatatcgacaagcaatacgtcggcttcgctacacttcccaaccaggtccatcggaagtccgttaaaaaaggatttgattttacacttatggtggctggcgaatctgggctgggcaagtcgaccctcgtgcatagcctgttcctgactgacctttataaggaccggaagctgctgtctgccgaagagaggatatctcagacagttgagatcctgaagcacactgtcgatattgaagaaaaaggggtcaagctgaaattaactattgtggatactccgggctttggcgatgcagtgaataacacagaatgttggaaaccaatcacagactacgtcgaccaacagttcgaacagtatttccgagacgaaagtgggctgaaccgcaagaatattcaggacaatcgggttcattgctgcctgtacttcatttccccttttggccacgggttgcggccagtggacgtggggttcatgaaagccctgcacgagaaagtgaacatcgtccccctcatcgcgaaggccgactgtttggtcccgagcgaaattaggaagctgaaggaaaggatacgggaagaaatagacaaatttggaatccacgtgtaccagttccccgaatgtgatagtgatgaagatgaagactttaaacagcaggatcgcgagctgaaggaatcagctcctttcgcagtcattgggagtaacactgtggtcgaggctaagggccagcgcgtgagaggcaggttatatccctgggggatcgtggaaggagctcttcggctgcgcgaggctgcccagcacgctcacccacacgcgtacgctcggccccagggtcgggacgtgaggagggctctgcgggaactcccccgcgcactacacccagccgatgatcagcagactgacccgggacagccccacggcgagccccaccctgaccctgccgctgcccaccctgggcggcgggactag

SEQ ID NO: 23759 - DNA, 450 bp, Artificial Sequence
  derived and/or modified sequence
ctgcccaaccaggtacaccgcaagtcagtgaagaaaggttttgactttaccctcatggtcgctggcgaaagcggattgggaaaaagcacactcgtgcactctctgtttctgacagatctgtacaaggacaggaagcttttgagcgcggaagaaaggattagccaaactgttgaaatcttaaaacacactgtggacatcgaagagaagggcgtgaagctaaagctgactattgtggatacccctggcttcggggatgccgtaaacaacactgaatgttggaagcccatcacagactacgtggaccaacagttcgagcagtacttccgagatgagtcgggcctgaatagaaaaaatatacaagacaatcgcgtccattgctgcttatatttcatcagtccattcggccacggattgcggcctgtggacggattccacgagggaatagcgtag

SEQ ID NO: 23760 - DNA, 1041 bp, Artificial Sequence
  derived and/or modified sequence
atggacagcctggccgccccccaggaccggctggtggagcagctgctgagccccaggacccaggcccagaggcggctgaaggacatcgacaagcagtatgtgggctttgccaccctgcccaaccaggtgcacaggaagtctgtgaagaagggctttgacttcaccctgatggtggccggggagagcggcctgggcaagagcaccctggtgcacagcctcttcctgacagacctgtacaaggacaggaagctgctgtctgctgaggagcgcatcagccagacagtggagatcctgaagcacacagtggacatcgaggagaagggcgtgaagctgaagctgaccatcgtggacaccccaggctttggagatgctgtgaacaacacagagtgctggaagcccatcacagattatgtggaccagcagtttgagcagtacttcagagatgagagcggcctgaacaggaagaacatccaggacaacagagtgcactgctgcctgtacttcatcagccccttcggccacggcctgcggcctgtggatgtgggcttcatgaaggccctgcacgagaaggtgaacatcgtgcccctgattgccaaggctgactgcctggtgcccagcgagatcaggaagctgaaggagcgcatccgggaggagattgacaagtttggcatccacgtgtaccagttcccagaatgtgacagtgatgaagatgaggacttcaagcagcaggaccgggagctgaaggagagcgccccctttgctgtgattggcagcaacacagtggtggaggccaagggccagagggtgcggggccgcctgtacccctggggcatcgtggagggcgccctgcggctgcgggaggccgcccagcacgcccacccccacgcctatgcccggccccagggcagagatgtgcggcgggccctgcgggagctgccccgggccctgcacccagcagatgaccagcagacagaccccggccagccccacggggagccccacccagaccctgctgctgcccaccctggccggcgggactag

SEQ ID NO: 23761 - DNA, 450 bp, Artificial Sequence
  derived and/or modified sequence
ctgcccaaccaggtgcacaggaagtctgtgaagaagggctttgacttcaccctgatggtggccggggagagcggcctgggcaagagcaccctggtgcacagcctcttcctgacagacctgtacaaggacaggaagctgctgtctgctgaggagcgcatcagccagacagtggagatcctgaagcacacagtggacatcgaggagaagggcgtgaagctgaagctgaccatcgtggacaccccaggctttggagatgctgtgaacaacacagagtgctggaagcccatcacagattatgtggaccagcagtttgagcagtacttcagagatgagagcggcctgaacaggaagaacatccaggacaacagagtgcactgctgcctgtacttcatcagccccttcggccacggcctgcggcctgtggatggcttccacgagggcatcgcctag

SEQ ID NO: 23762 - DNA, 1041 bp, Artificial Sequence
  derived and/or modified sequence
atggacagcctggccgccccccaggaccggctggtggagcagctgcttagccctcgcacccaggctcaacgccgactcaaagatattgacaaacagtatgttggattcgcaaccctgccaaatcaggtccatcgcaaaagcgtgaaaaaaggatttgattttaccctaatggtggctggcgagtccggattgggaaaatccactttagtccacagcctcttcttaaccgacctttacaaagatagaaagctgctctccgcagaagagcggataagtcagacggtcgaaatactgaagcatacagtagacattgaagagaagggcgtgaagttgaagctgaccattgtcgatacgcccgggtttggagacgccgtaaacaacaccgagtgctggaagcccattacagactacgtggaccaacagttcgaacagtactttagagatgaaagtggccttaatcgaaagaatatccaggacaacagagtgcattgttgtttatattttattagtccctttgggcatggcctgaggccagtggatgttgggttcatgaaggccctccatgagaaagtgaatatagtaccacttatcgccaaagccgattgccttgttccatccgagatcaggaagctcaaggagcgaattcgtgaggaaatcgataagtttggcatacatgtataccaatttcctgaatgtgattctgatgaggacgaggattttaaacaacaagacagagagctaaaagagtcggctcctttcgctgttattggctctaatacagtcgtggaggcaaagggccagagagtgcgcgggcgcctctacccctgggggattgtagaaggggcgcttcgcctgcgtgaagccgcccagcacgctcatccacacgcatatgcccgtccccaggggcgcgacgttcgcagagctcttcgggaattacctagggccctccaccccgccgatgaccagcagacagatccgggccaaccccatggggagccccatccagatccagcagccgcccaccctggacgcagagactag

SEQ ID NO: 23763 - DNA, 450 bp, Artificial Sequence
  derived and/or modified sequence
ctgcccaaccaggtgcaccggaagagcgtgaagaagggcttcgacttcaccctgatggtagctggcgagtccggactggggaaatccaccttagtacatagcctctttttaaccgatctgtataaggaccgcaagttactgagcgctgaggaaagaatcagtcagacggtcgagatcttaaagcacaccgtcgacatcgaggagaagggcgtgaagttgaagctgactatagtggacacccccggattcggcgacgccgtgaacaacactgagtgctggaagcccatcactgactacgtggaccagcaatttgagcagtacttccgtgatgaatctggccttaatagaaaaaacatccaagataaccgagtccattgttgcctttatttcatcagcccatttgggcatggactgagaccagtggatgggtttcacgagggaatagcttag

SEQ ID NO: 23764 - DNA, 1041 bp, Artificial Sequence
  derived and/or modified sequence
atggacagcctggcggctccccaggatagacttgtggaacaactcctatccccgaggactcaggcacaacgcaggctaaaggatatcgataaacagtatgtgggcttcgccaccctgcctaatcaggtgcaccggaagtcagtgaaaaagggttttgatttcacactgatggtagctggagaaagcggcctgggcaagtccacgttggtgcactctctttttctgaccgatctatataaagataggaaactcttatccgctgaggagcgcatcagccaaacagtcgaaattctgaaacacacagtggatatcgaagagaaaggggtcaaactgaaactcaccatcgtcgatacccctggcttcggagatgctgttaataataccgaatgctggaagccaatcaccgactacgtggatcagcagtttgagcagtatttcagagatgagagtgggttgaatagaaagaacattcaagataaccgtgtgcattgctgcttgtactttatttcaccgtttgggcacggcttgagaccagtggacgttggatttatgaaagctctgcatgagaaggtgaacattgtgcccctcatagccaaggctgactgtctggtcccaagcgagattaggaaattgaaagaaagaattcgtgaggaaatcgataaattcggaatccatgtgtatcagtttccagaatgtgacagcgatgaggatgaggactttaagcagcaggatcgggagcttaaagagagcgccccttttgccgtgattggcagcaataccgttgttgaagccaaaggacagagggtgagagggcgtctatatccctggggaatcgtggagggcgcactgagactgagagaagccgctcagcatgctcacccccacgcatatgctagacctcagggcagagatgtgagaagagctctgagggaactaccgagggcactccaccctgccgacgaccaacagacggaccctggccagccccacggcgagcctcatcccgacccggcagcagctcatccaggaagacgggactag

SEQ ID NO: 23765 - DNA, 450 bp, Artificial Sequence
  derived and/or modified sequence
cttcctaaccaggtccatcgcaaatcagtgaagaaaggttttgattttactctgatggtggctggggagtctggcctggggaaaagcactctagtgcatagcctgttccttaccgatttatacaaggatagaaagctgcttagcgccgaagaacggatatcacaaacggtagaaattttaaagcatactgttgacatagaggagaagggcgtgaagttgaagctcaccatagtggataccccaggttttggagacgccgtcaataacaccgaatgctggaagccaattacagactatgttgaccagcaattcgagcagtatttcagagatgagagcgggttaaaccgcaagaatatacaagacaatagagtgcactgctgcctgtattttatatccccattcggtcacggactgagacctgtggatggctttcacgaaggcattgcttag

SEQ ID NO: 23766 - DNA, 2241 bp, Artificial Sequence
  derived and/or modified sequence
tggctcgggtgcgggagcggggcctgcccggactgcgacgccgccacagcttggggccagttcgcccagtcagggggatggctcggtcggcctcgggggtcgacgatcccccgggtaggcgacgtgccctgtccaggcctcacttcccgcgtccgcaaaacggggtggacaacgcagcctaaggcagagccgcgccaaggtccctcgctgtcgccgggctctggcggcctgaccgggcctggggtccgagcgtgcccccgggcctgggggggtcgccgcgatggactcgctggcagcgccccaggaccgcctggtggagcagctgctgtcgccgcggacccaggcccagaggcggctcaaggacattgacaagcagtacgtgggcttcgccacactgcccaaccaggtgcaccgcaagtcggtgaagaaaggctttgacttcacactcatggtggctggtgagtcaggcctggggaagtccacactggtccacagcctcttcctgacagacttgtacaaggaccggaagctgctcagtgctgaggagcgcatcagccagacggtagagattctaaaacacacggtggacattgaggagaagggagtcaagctgaagctcaccatcgtggacacgccgggattcggggacgctgtcaacaacaccgagtgctggaagcccatcaccgactatgtggaccagcagtttgagcagtacttccgtgatgagagcggcctcaaccgaaagaacatccaagacaaccgagtgcactgctgcctatacttcatctcccccttcgggcatgggctgcggccagtggatgtgggtttcatgaaggcattgcatgagaaggtcaacatcgtgcctctcatcgccaaagctgactgtcttgtccccagtgagatccggaagctgaaggagcggatccgggaggagattgacaagtttgggatccatgtataccagttccctgagtgtgactcggacgaggatgaggacttcaagcagcaggaccgggaactgaaggagagcgcgcccttcgccgttataggcagcaacacggtggtggaggccaaggggcagcgggtccggggccgactgtacccctgggggatcgtggagggcgcattgcgacttcgtgaagctgcgcaacatgctcatccgcacgcatatgcacgacctcaaggacgtgacgtgcgacgtgcactacgagaactaccgcgcgcactgcatccagcagatgaccagcaaactgacccaggacagccgcatggagagccccatcccgatcctgccgctgcccaccccggacgccgagactgagaagcttatcaggatgaaggatgaggaactgaggcgcatgcaggagatgctgcagaggatgaagcagcagatgcaggaccagtgacgctcgccgcggacacaccgtccgtctccgggacgccctcgcacccctggacaccagaccggactgttcccgacccggagacgcggggccacagcccccagctgaccctaatttattctcagcaccaccccctcccaggtcattgtgtctgtttccgaggggcctggaccgtagcccccgcccagctggccctctctgaccttgggggatcaggagcgaagttgggcgggacttcagagatccgcctcccttgcccttcccccgcccccggacggtcacagcacccaaaccgcaggccctgctctggcaggcaggcaaagctaggcagaagaggattcccaggatcctgggtctgttccctgccccagtgctgcagaacggacttgggagccctcctttgcctgctcccgcgggtcacccagcgagtgctgagaccccattttctgtcgaggcgggccgagtcttcccttatccccagacgcctagcgggcagggttgggctgaatcaaatgggagccctccagacataaggaggccagaggctgcaaggagcggggtcgtgaccgcttacaccccttctccacagcccggcccgacctggagggcccccggggcactgggcggtgagccacctcctggcaactctcggtgccgtcccctgccctcgctcgaggcctcttctccccagcaccgctgtggtgtgccgggatcctgagcctaggcctcccgatgttcccacccgcatgatcccttcccgccacacgatgctccgttttcttccgttgtgaatgccgcgtcctgtcctggtgacaggagaacaatgttggtgaacgtc

SEQ ID NO: 23767 - DNA, 1041 bp, Artificial Sequence
  derived and/or modified sequence
atggacagcctggccgccccccaggacagactggtggagcagctgctgagccccagaacccaggcccagagaagactgaaggacatcgacaagcagtacgtgggcttcgccaccctgcccaaccaggtgcacagaaagagcgtgaagaagggcttcgacttcaccctgatggtggccggcgagagcggcctgggcaagagcaccctggtgcacagcctgttcctgaccgacctgtacaaggacagaaagctgctgagcgccgaggagagaatcagccagaccgtggagatcctgaagcacaccgtggacatcgaggagaagggcgtgaagctgaagctgaccatcgtggacacccccggcttcggcgacgccgtgaacaacaccgagtgctggaagcccatcaccgactacgtggaccagcagttcgagcagtacttcagagacgagagcggcctgaacagaaagaacatccaggacaacagagtgcactgctgcctgtacttcatcagccccttcggccacggcctgagacccgtggacgtgggcttcatgaaggccctgcacgagaaggtgaacatcgtgcccctgatcgccaaggccgactgcctggtgcccagcgagatcagaaagctgaaggagagaatcagagaggagatcgacaagttcggcatccacgtgtaccagttccccgagtgcgacagcgacgaggacgaggacttcaagcagcaggacagagagctgaaggagagcgcccccttcgccgtgatcggcagcaacaccgtggtggaggccaagggccagagagtgagaggcagactgtacccctggggcatcgtggagggcgccctgagactgagagaggccgcccagcacgcccacccccacgcctacgccagaccccagggcagagacgtgagaagagccctgagagagctgcccagagccctgcaccccgccgacgaccagcagaccgaccccggccagccccacggcgagccccaccccgaccccgccgccgcccaccccggcagaagagactag

SEQ ID NO: 23768 - DNA, 450 bp, Artificial Sequence
  derived and/or modified sequence
ctgcccaaccaggtgcacagaaagagcgtgaagaagggcttcgacttcaccctgatggtggccggcgagagcggcctgggcaagagcaccctggtgcacagcctgttcctgaccgacctgtacaaggacagaaagctgctgagcgccgaggagagaatcagccagaccgtggagatcctgaagcacaccgtggacatcgaggagaagggcgtgaagctgaagctgaccatcgtggacacccccggcttcggcgacgccgtgaacaacaccgagtgctggaagcccatcaccgactacgtggaccagcagttcgagcagtacttcagagacgagagcggcctgaacagaaagaacatccaggacaacagagtgcactgctgcctgtacttcatcagccccttcggccacggcctgagacccgtggacggcttccacgagggcatcgcctag

SEQ ID NO: 23769 - protein, 4303 aa, Artificial Sequence
  derived and/or modified sequence
MPPAAPARLALALGLGLWLGALAGGPGRGCGPCEPPCLCGPAPGAACRVNCSGRGLRTLGPALRIPADATALDVSHNLLRALDVGLLANLSALAELDISNNKISTLEEGIFANLFNLSEINLSGNPFECDCGLAWLPRWAEEQQVRVVQPEAATCAGPGSLAGQPLLGIPLLDSGCGEEYVACLPDNSSGTVAAVSFSAAHEGLLQPEACSAFCFSTGQGLAALSEQGWCLCGAAQPSSASFACLSLCSGPPPPPAPTCRGPTLLQHVFPASPGATLVGPHGPLASGQLAAFHIAAPLPVTATRWDFGDGSAEVDAAGPAASHRYVLPGRYHVTAVLALGAGSALLGTDVQVEAAPAALELVCPSSVQSDESLDLSIQNRGGSGLEAAYSIVALGEEPARAVHPLCPSDTEIFPGNGHCYRLVVEKAAWLQAQEQCQAWAGAALAMVDSPAVQRFLVSRVTRSLDVWIGFSTVQGVEVGPAPQGEAFSLESCQNWLPGEPHPATAEHCVRLGPTGWCNTDLCSAPHSYVCELQPGGPVQDAENLLVGAPSGDLQGPLTPLAQQDGLSAPHEPVEVMVFPGLRLSREAFLTTAEFGTQELRRPAQLRLQVYRLLSTAGTPENGSEPESRSPDNRTQLAPACMPGGRWCPGANICLPLDASCHPQACANGCTSGPGLPGAPYALWREFLFSVPAGPPAQYSVTLHGQDVLMLPGDLVGLQHDAGPGALLHCSPAPGHPGPRAPYLSANASSWLPHLPAQLEGTWACPACALRLLAATEQLTVLLGLRPNPGLRLPGRYEVRAEVGNGVSRHNLSCSFDVVSPVAGLRVIYPAPRDGRLYVPTNGSALVLQVDSGANATATARWPGGSVSARFENVCPALVATFVPGCPWETNDTLFSVVALPWLSEGEHVVDVVVENSASRANLSLRVTAEEPICGLRATPSPEARVLQGVLVRYSPVVEAGSDMVFRWTINDKQSLTFQNVVFNVIYQSAAVFKLSLTASNHVSNVTVNYNVTVERMNRMQGLQVSTVPAVLSPNATLALTAGVLVDSAVEVAFLWTFGDGEQALHQFQPPYNESFPVPDPSVAQVLVEHNVMHTYAAPGEYLLTVLASNAFENLTQQVPVSVRASLPSVAVGVSDGVLVAGRPVTFYPHPLPSPGGVLYTWDFGDGSPVLTQSQPAANHTYASRGTYHVRLEVNNTVSGAAAQADVRVFEELRGLSVDMSLAVEQGAPVVVSAAVQTGDNITWTFDMGDGTVLSGPEATVEHVYLRAQNCTVTVGAASPAGHLARSLHVLVFVLEVLRVEPAACIPTQPDARLTAYVTGNPAHYLFDWTFGDGSSNTTVRGCPTVTHNFTRSGTFPLALVLSSRVNRAHYFTSICVEPEVGNVTLQPERQFVQLGDEAWLVACAWPPFPYRYTWDFGTEEAAPTRARGPEVTFIYRDPGSYLVTVTASNNISAANDSALVEVQEPVLVTSIKVNGSLGLELQQPYLFSAVGRGRPASYLWDLGDGGWLEGPEVTHAYNSTGDFTVRVAGWNEVSRSEAWLNVTVKRRVRGLVVNASRTVVPLNGSVSFSTSLEAGSDVRYSWVLCDRCTPIPGGPTISYTFRSVGTFNIIVTAENEVGSAQDSIFVYVLQLIEGLQVVGGGRYFPTNHTVQLQAVVRDGTNVSYSWTAWRDRGPALAGSGKGFSLTVLEAGTYHVQLRATNMLGSAWADCTMDFVEPVGWLMVAASPNPAAVNTSVTLSAELAGGSGVVYTWSLEEGLSWETSEPFTTHSFPTPGLHLVTMTAGNPLGSANATVEVDVQVPVSGLSIRASEPGGSFVAAGSSVPFWGQLATGTNVSWCWAVPGGSSKRGPHVTMVFPDAGTFSIRLNASNAVSWVSATYNLTAEEPIVGLVLWASSKVVAPGQLVHFQILLAAGSAVTFRLQVGGANPEVLPGPRFSHSFPRVGDHVVSVRGKNHVSWAQAQVRIVVLEAVSGLQVPNCCEPGIATGTERNFTARVQRGSRVAYAWYFSLQKVQGDSLVILSGRDVTYTPVAAGLLEIQVRAFNALGSENRTLVLEVQDAVQYVALQSGPCFTNRSAQFEAATSPSPRRVAYHWDFGDGSPGQDTDEPRAEHSYLRPGDYRVQVNASNLVSFFVAQATVTVQVLACREPEVDVVLPLQVLMRRSQRNYLEAHVDLRDCVTYQTEYRWEVYRTASCQRPGRPARVALPGVDVSRPRLVLPRLALPVGHYCFVFVVSFGDTPLTQSIQANVTVAPERLVPIIEGGSYRVWSDTRDLVLDGSESYDPNLEDGDQTPLSFHWACVASTQREAGGCALNFGPRGSSTVTIPRERLAAGVEYTFSLTVWKAGRKEEATNQTVLIRSGRVPIVSLECVSCKAQAVYEVSRSSYVYLEGRCLNCSSGSKRGRWAARTFSNKTLVLDETTTSTGSAGMRLVLRRGVLRDGEGYTFTLTVLGRSGEEEGCASIRLSPNRPPLGGSCRLFPLGAVHALTTKVHFECTGWHDAEDAGAPLVYALLLRRCRQGHCEEFCVYKGSLSSYGAVLPPGFRPHFEVGLAVVVQDQLGAAVVALNRSLAITLPEPNGSATGLTVWLHGLTASVLPGLLRQADPQHVIEYSLALVTVLNEYERALDVAAEPKHERQHRAQIRKNITETLVSLRVHTVDDIQQIAAALAQCMGPSRELVCRSCLKQTLHKLEAMMLILQAETTAGTVTPTAIGDSILNITGDLIHLASSDVRAPQPSELGAESPSRMVASQAYNLTSALMRILMRSRVLNEEPLTLAGEEIVAQGKRSDPRSLLCYGGAPGPGCHFSIPEAFSGALANLSDVVQLIFLVDSNPFPFGYISNYTVSTKVASMAFQTQAGAQIPIERLASERAITVKVPNNSDWAARGHRSSANSANSVVVQPQASVGAVVTLDSSNPAAGLHLQLNYTLLDGHYLSEEPEPYLAVYLHSEPRPNEHNCSASRRIRPESLQGADHRPYTFFISPGSRDPAGSYHLNLSSHFRWSALQVSVGLYTSLCQYFSEEDMVWRTEGLLPLEETSPRQAVCLTRHLTAFGASLFVPPSHVRFVFPEPTADVNYIVMLTCAVCLVTYMVMAAILHKLDQLDASRGRAIPFCGQRGRFKYEILVKTGWGRGSGTTAHVGIMLYGVDSRSGHRHLDGDRAFHRNSLDIFRIATPHSLGSVWKIRVWHDNKGLSPAWFLQHVIVRDLQTARSAFFLVNDWLSVETEANGGLVEKEVLAASDAALLRFRRLLVAELQRGFFDKHIWLSIWDRPPRSRFTRIQRATCCVLLICLFLGANAVWYGAVGDSAYSTGHVSRLSPLSVDTVAVGLVSSVVVYPVYLAILFLFRMSRSKVAGSPSPTPAGQQVLDIDSCLDSSVLDSSFLTFSGLHAEQAFVGQMKSDLFLDDSKSLVCWPSGEGTLSWPDLLSDPSIVGSNLRQLARGQAGHGLGPEEDGFSLASPYSPAKSFSASDEDLIQQVLAEGVSSPAPTQDTHMETDLLSSLSSTPGEKTETLALQRLGELGPPSPGLNWEQPQAARLSRTGLVEGLRKRLLPAWCASLAHGLSLLLVAVAVAVSGWVGASFPPGVSVAWLLSSSASFLASFLGWEPLKVLLEALYFSLVAKRLHPDEDDTLVESPAVTPVSARVPRVRPPHGFALFLAKEEARKVKRLHGMLRSLLVYMLFLLVTLLASYGDASCHGHAYRLQSAIKQELHSRAFLAITRSEELWPWMAHVLLPYVHGNQSSPELGPPRLRQVRLQEALYPDPPGPRVHTCSAAGGFSTSDYDVGWESPHNGSGTWAYSAPDLLGAWSWGSCAVYDSGGYVQELGLSLEESRDRLRFLQLHNWLDNRSRAVFLELTRYSPAVGLHAAVTLRLEFPAAGRALAALSVRPFALRRLSAGLSLPLLTSVCLLLFAVHFAVAEARTWHREGRWRVLRLGAWARWLLVALTAATALVRLAQLGAADRQWTRFVRGRPRRFTSFDQVAQLSSAARGLAASLLFLLLVKAAQQLRFVRQWSVFGKTLCRALPELLGVTLGLVVLGVAYAQLAILLVSSCVDSLWSVAQALLVLCPGTGLSTLCPAESWHLSPLLCVGLWALRLWGALRLGAVILRWRYHALRGELYRPAWEPQDYEMVELFLRRLRLWMGLSKVKEFRHKVRFEGMEPLPSRSSRGSKVSPDVPPPSAGSDASHPSTSSSQLDGLSVSLGRLGTRCEPEPSRLQAVFEALLTQFDRLNQATEDVYQLEQQLHSLQGRRSSRAPAGSSRGPSPGLRPALPSRLARASRGVDLATGPSRTPLRAKNKVHPSST

SEQ ID NO: 23770 - DNA, 12912 bp, Artificial Sequence
  derived and/or modified sequence
atgcctcctgcagcgcccgcacgcctcgctctggcactcggactaggactgtggctcggggccctagcaggagggcctggtagagggtgcggtccctgcgagccgccatgcctctgtgggccagcgccaggagcagcctgtagagtgaattgctcaggccggggtctgcgcacactcggtccagctctgcgtattcctgccgatgctacagccctggatgtttcacacaacctcctaagggcccttgacgtgggtttgctggcaaacctctcagcactggccgaactggatattagcaataataaaatctccaccctagaagaaggtattttcgcaaatctatttaacctgtccgaaattaaccttagcggcaatcccttcgaatgtgactgcggcctggcttggctgccccggtgggccgaagagcaacaggtgagagtggtgcagcccgaggccgccacatgtgctggacctgggagtctcgctggtcagcccctgctggggatccctctcttagacagtggttgtggtgaggaatatgtagcttgtttacccgataattcttcgggtactgtggccgctgtgtcttttagtgcagcacatgagggtcttctgcagcctgaggcctgctctgccttctgtttttctactggtcaggggctcgccgccctgagcgaacagggttggtgcctgtgcggcgccgctcagccaagctccgctagctttgcatgcctgagcttgtgctcagggcctccacccccgccggcgcctacttgccgagggcccacactgctccagcatgtctttcccgcctcacctggagccactcttgtgggcccccacgggccgttggcttccgggcagcttgccgcgttccatattgcagctccactgccagtgacagccacgcgatgggatttcggcgatggaagtgccgaagtggacgctgcagggcccgcagcctcgcatcggtacgtcttgcctgggcgttaccatgttacagcagtgctcgccttaggagctgggagtgctctgctaggcaccgatgtacaggtcgaggcagcccccgcggcccttgagcttgtttgtccaagctctgtgcaatctgatgagtcactggacctgtccattcaaaatcgtgggggatctggccttgaggccgcctatagcatcgtggctcttggagaggaacccgcgcgggcagtccatccactgtgtccctctgatacggaaatcttccccggcaatggtcattgctacaggctagtcgttgaaaaggctgcctggctgcaggcccaggagcagtgccaggcctgggccggtgctgccctcgcaatggtcgacagtccggccgtccagcggttcctcgtttctagagtgacccggtcgctggatgtgtggatcggcttctccacagtacagggcgtcgaagtcggccctgcccctcaaggagaagcattctctcttgaatcttgtcagaactggctgcctggcgaaccacatcctgctacagccgagcactgcgttagactgggtcctacaggatggtgcaacacagatctctgctccgccccgcactcttacgtttgtgaactgcagccaggcggccccgtgcaggacgctgagaatctcctggtgggagctccctctggagaccttcaaggaccactgacgcctctcgctcagcaggacggattgagtgccccacacgaacccgtggaggtgatggttttcccaggcctgagactctctcgggaggcattcctgacgactgccgagttcggcacacaggaactccggcgacctgcacagctgaggctacaggtttatcggctgctgtcaaccgctggtacaccggaaaacgggtctgagcctgagtccaggagccccgacaaccggactcagctggcacccgcctgcatgcctggcggccggtggtgtccgggagcgaatatttgtctgcccttggatgcgtcttgccaccctcaggcctgcgccaacggctgtacttctggtccaggtctgcctggcgcaccctatgccctgtggcgagaattcttgttttccgttcccgccggcccacccgcgcaatatagcgtgaccttacacggccaggacgtgctgatgctacccggtgacctggtcggtcttcagcacgatgccggtcccggggctctgcttcattgttccccagccccaggacatccaggtccccgggccccttatctgtcagcaaatgcaagctcctggctgccccatttgccagcccaactcgaaggtacttgggcttgcccggcatgcgctttgcgccttctggccgcaacagagcagctcaccgtcctcctggggcttcggcccaaccctgggctgagacttcccggccggtatgaggtcagggccgaggtgggcaatggtgtttcccgccacaacctatcctgttcattcgacgtggtgagtcccgtggccggcctgcgggtgatctatcccgcacccagggacggacggttgtacgtgcccacaaatgggtccgctcttgtgctgcaggtcgacagcggcgccaatgccacagccaccgctcgttggccaggcggttccgtgtccgctcgatttgagaacgtctgcccagcacttgtggcaacatttgtccccgggtgcccatgggaaactaatgataccctattcagtgtggttgccctgccctggttgtctgagggagaacatgtcgttgatgtcgtcgtagaaaattcagcctctagggctaatctctcactgagggtcaccgccgaggagccaatttgtggactgcgggcgaccccatctcccgaggccagagtgttgcagggcgtgctcgttagatattctcccgtggtagaagcaggatctgacatggtgttccgatggaccattaacgacaaacagtccttaacgtttcaaaatgtggtgttcaatgtgatttatcagagcgccgccgtctttaaattgtctctcactgccagcaaccatgtgtccaatgtgaccgtgaactacaatgttaccgtggagagaatgaatcggatgcagggactgcaggtgtctaccgtgcctgctgtattgtcgcccaacgcaacattggctctaacagccggagtgctggtggattcagccgtggaagtggccttcctgtggacctttggggatggagagcaggctctgcatcagtttcaaccgccgtataacgaatcattccctgtccccgacccgtcagttgcccaggttcttgtcgagcacaatgtgatgcatacttacgctgcccctggagaatatctcctgacagttctcgctagcaatgcttttgaaaatctcactcagcaggtacctgtgtctgtgcgagcaagcctcccctctgtcgcagttggcgtgtctgatggcgtgctcgtggctggacgccccgtgacgttctatcctcatcccctgcccagcccagggggcgtcctatacacctgggattttggggacggtagtcctgtgctgacccagagtcaacccgctgcaaaccatacatatgccagcagaggaacctaccatgtgcgactagaggtgaacaacaccgtgtctggcgccgcggcccaggccgatgtgcgcgtgtttgaagagctgcgcggtctatccgtcgatatgagcctggctgttgagcagggcgctcctgtggtggtaagtgccgccgtgcaaaccggggataatattacctggacattcgacatgggagacggtactgttctgagcgggccagaagccaccgtcgagcacgtttacctgcgggcacaaaactgtactgtgacggtcggggcggcatcccccgccggccatttggccaggagcctccacgtactggtgtttgtcctggaagtcctgagggtggaaccagctgcctgcatccccactcaacccgatgctcgtctcacagcctatgtcactggtaacccagcacactatctctttgattggacttttggcgatggatcctcgaatacgacagtaagaggatgtccaacagtcacgcataattttacacgatctggaaccttcccactggcactggtgctcagctctagggtgaaccgcgctcattacttcaccagtatctgcgtggaacccgaggtgggcaacgtcacactccagcctgagaggcagtttgtccagctgggggatgaagcatggctggtggcctgtgcttggcccccctttccataccgatacacctgggacttcgggacagaggaggccgcacccacacgcgcacgtggccccgaggttaccttcatttatagggaccctgggagctacctggtaacggtcaccgccagtaataatatctctgccgccaatgattctgccctagtcgaggttcaggaacctgtcctcgtcacttccatcaaggtgaatggctctttggggttggaacttcaacagccatatctgttttcagctgtcggacggggcaggcccgcatcttatctttgggatctgggagatggaggttggctcgaagggcctgaagtcacacacgcctataatagtactggagattttacagtcagggttgccggctggaacgaggtctctcgcagcgaagcctggctcaacgtgacagtaaaaagacgagtgcgcggcctggtggtaaacgccagcaggacagtggtcccactgaatgggagcgtttctttctcgacaagcctcgaggctggctctgacgtgcggtattcttgggttctttgcgaccgttgtacccctatcccaggtgggcccaccatttcctatacctttagatccgttgggacctttaacatcatagtgacagctgaaaacgaagtgggctcggcccaagattcgattttcgtttatgtgttacagctcatcgaaggcctacaggtggtggggggcgggcggtattttccgacgaaccacacagtgcagctgcaggccgtcgtaagagacgggacgaacgtttcttatagctggaccgcatggcgggatcgtggccccgcgttagccgggagtggcaaaggattctctctgacggtactggaggccgggacctaccatgtccagcttagggccacaaacatgttaggtagcgcttgggctgattgtaccatggactttgtcgagcccgtggggtggctgatggttgccgcgagtcccaacccagctgcagtaaatacatccgtcacgctctccgccgaactggccggaggctccggggtcgtttatacctggtctctggaggaaggcctctcttgggagacaagcgaaccgttcaccacgcactcctttccaacccccgggctccaccttgtcaccatgaccgccggcaatccccttggttccgccaacgctaccgtggaggtggatgtccaagtgcccgtgtccgggctgtccatcagagctagcgagcctgggggctcctttgtagccgcaggatcatctgtcccgttttggggacagctggccacgggtacaaatgtttcttggtgctgggcggttcccggcgggagcagcaaaagggggccccatgttacaatggtgttccccgacgccggtaccttcagcattcgtctgaacgccagcaacgcggttagctgggtgtccgcgacttataacctgactgctgaagaacccatcgtaggacttgtgctctgggcctcttccaaggtggttgcccctgggcagctggtccattttcagattctcttggccgccggctctgccgtgaccttccgcttacaggttggtggcgccaacccggaggtgcttccaggtccccggttcagccacagctttcctcgggtaggggatcacgtggtgagcgtgcgcgggaaaaaccatgttagttgggcccaggcccaggtgcgcatagtggtgcttgaggctgtgtctggtctccaagtgccaaattgttgtgaacctgggatcgcaaccgggaccgaaaggaatttcacagctagggtccagcgcggatcacgggtggcttacgcatggtacttttccctccaaaaagtccagggggatagcctggtaattctctccgggagagacgtgacatatacaccagtggcagctggattgcttgagattcaagtacgggccttcaacgcactgggatcagaaaatagaacgcttgttctggaggtacaggatgcagtgcagtatgtcgctttgcagtctggaccctgcttcacaaacagaagcgcccagttcgaagccgcaacatctccgtcaccgcgtagagtggcttaccactgggacttcggggatggttctcctgggcaggacacagatgaaccaagggcagaacatagctacttaaggccaggcgattaccgagtccaggttaacgcatcaaatcttgtgtccttttttgttgcccaggctactgtcacggtgcaggtgttggcttgtagggagcctgaggtagatgtcgtcctgcccctgcaggtgctaatgagacgtagccagcggaattatttagaggcccacgtggatctgcgcgactgtgttacttatcagacagagtatagatgggaagtatataggacggcgagctgtcagaggcctggacggcctgcccgggtggcactgcccggcgtcgacgtttcacgaccccgcctggttctacctcgactggcgttacctgttgggcactactgttttgtgtttgtggtcagctttggtgatacgcccctgacccaaagcatccaagctaatgtgaccgtggcaccagaaagactggtcccaataattgaggggggttcttacagggtctggagcgacacccgggatctagtccttgacgggtctgagtcttacgatccaaatctggaggacggcgaccaaacccctctctctttccactgggcttgtgtggctagcacccaacgggaggcagggggatgtgctttgaactttgggcctcgaggatcttccacagtcacaatcccccgcgagcgtctcgcggcaggagtcgagtacactttttctttaaccgtgtggaaggccggccgtaaggaagaggcgaccaatcaaacagttctgatccgttcagggcgggtgccaatcgtctcattggaatgtgtctcgtgtaaggcacaagctgtctacgaagtgagtcgaagcagttatgtgtatctggagggccgttgccttaattgctccagtgggagcaaacgcggtagatgggccgccaggacattttcgaacaagacactggtgctcgacgaaaccaccacttcaacagggtctgcaggaatgcgcttggttctgagaagaggggtcctgcgagatggcgaaggttacacctttacactgacagtgctggggcggtccggcgaagaggaggggtgcgcgagcatacgcctctcaccaaacagacctccactcggaggaagctgcagactgtttcccctgggcgccgtacatgcactgacgacaaaggttcactttgaatgcacagggtggcacgacgctgaagatgcaggtgcccccctggtctacgctctgcttctgcgccggtgccggcagggacattgtgaggagttttgtgtgtacaagggatctctgtccagttacggggccgttctaccacccgggttccgtccccattttgaggttggcctcgcagtggtcgtccaggaccagctcggtgctgcagtggtggcacttaaccgaagtctggccataaccctaccggaaccgaatggttccgccaccggattgacagtatggctccacggcctgacggccagcgtgctgcccggactgctgcgacaggcagatccccagcatgtcatcgagtactcgctcgccctcgtgaccgttctaaatgagtacgaaagagctctggatgtcgcagctgaacctaagcacgaaagacaacaccgcgcccagattagaaagaatataaccgagactctcgtcagccttagagttcatactgtcgatgatatccagcagatcgctgccgccttggcacagtgcatgggaccgagtcgggaactggtatgtcggagctgcctgaaacagaccctgcacaagctggaagccatgatgctgatactgcaagcggagacaaccgccgggacggtaactccaaccgccattggcgattcaatcttgaacataactggagatcttatccacctggcctcatccgacgtccgggctccacaaccttcagaactgggagcagagtccccatcacgcatggttgcatcccaagcttacaatctcactagtgctctcatgcggattctgatgagatcaagggtgctcaatgaggagccattaacccttgcgggagaggagatagtggcgcaggggaaacggagcgacccccgttcactgttgtgctacggtggtgccccaggacctggctgtcacttcagcataccggaggctttctccggcgccctagccaacctgtcagatgtggttcaactcatctttcttgtggattccaacccctttccatttggctacatttccaattataccgtatctaccaaagtggcctccatggctttccagacccaggcgggagcccagatccccattgagcgcctcgcttctgaaagggccattactgtgaaggtgcccaataactcggattgggcagctaggggccatcggtctagcgctaactctgcaaactcagtggtggtgcagcctcaggctagtgtaggagccgtggtgaccctggattcatcaaatccagcggccgggttacaccttcaactgaactatacactgctagacggccactatcttagcgaagaacccgaaccatacttggcagtttacctgcacagcgaacctaggccaaatgaacataactgctccgcctccaggcggatccggcccgagtcattgcaaggtgccgaccatcggccttataccttctttatatcgcctggctcaagagatcctgcaggatcctatcaccttaacctaagctctcattttagatggtccgctttgcaagtgtctgtggggctctacacctccctgtgccagtacttcagcgaggaggatatggtctggagaacagagggactcctgcctctagaggagacatctcctcgacaagccgtctgccttacaaggcatctaaccgccttcggcgctagtctgttcgtgcctccgtctcacgtcaggtttgtgtttccagagccgaccgccgacgttaactacattgttatgttgacgtgcgcagtgtgcttggtgacatacatggtcatggccgctatcttgcataagctcgaccagctggatgcatcacgcggccgggccatcccattttgtggacagcgaggacgctttaagtacgagattttggtaaaaaccgggtggggacggggttctgggaccaccgcccacgtcggcataatgttatatggcgttgattcacggtccggacacaggcatcttgatggcgaccgcgcattccatcggaacagcctggacatttttcgcatcgctaccccgcacagcctaggatctgtttggaagattagagtgtggcatgataataagggactcagccctgcatggttccttcagcatgttattgtgcgagaccttcagactgccagatccgctttcttcctcgttaatgactggctatcagtggagaccgaagcgaatggcgggttggttgagaaagaggtactcgccgcaagtgacgcagcacttctgagattccggcgattgctggtcgctgaacttcagcgtggtttctttgacaagcatatctggctcagtatctgggatcgtccgccaagatctagattcaccaggattcagcgcgcgacctgttgcgtgctgctgatatgtcttttcctgggtgctaacgcagtgtggtacggcgctgttggtgattctgcttacagtaccggacacgttagtcggctgtctccgctgtctgtggatacagttgctgtgggcctcgtgtcgagcgttgtggtgtatcccgtctatctggccatcctctttttgttcagaatgagcaggtcgaaagtcgccggatcgccaagtcctactcctgccgggcaacaagttttagacattgatagttgcctcgatagtagcgttcttgatagttctttcctgaccttttcgggcctacatgccgaacaggccttcgtgggtcagatgaagtcagaccttttcctggacgattccaaatctctcgtctgttggcccagcggcgaaggtaccctctcctggccagatctcctgtctgatccatcaattgttggaagcaaccttcggcagctggcccggggccaggctggtcacggactgggcccagaggaagatgggttcagtctcgcctccccctattcccctgctaagtccttttctgccagtgatgaggacttgatccagcaagttttggctgagggtgtatcaagccctgcccctacccaggacacgcatatggaaactgatcttctgtctagtttgagcagtacgcccggggagaaaacagaaaccctggccctgcagcggctcggggaactgggccctccaagcccaggccttaattgggaacagccccaggcagctaggctgtcgagaaccggcctagtggagggacttcggaaacgcctgttgcctgcttggtgcgcttctcttgcacatggcctgtcccttcttttagttgccgtggctgtggcagtcagcggctgggttggagctagcttcccacctggcgtgtcagtggcctggttgttgtctagttccgcttcatttctggcatctttccttggatgggaacctctgaaagtgctactggaagccctgtacttcagtctcgtcgctaagaggcttcatcccgatgaggatgatacactggtggagtcgcctgctgtcaccccagtctcggcacgagtccctcgtgtgaggcctccacacggattcgcattgttcctggccaaagaagaagcccgaaaggtcaagcgactgcatggcatgcttcgtagtctgctagtttacatgctgtttctgttagtgacactgttggccagctacggggacgcttcatgccacggccatgcctatcggttacaatccgccatcaagcaagaactgcattctagggcttttctggcgattacccgcagtgaagagttatggccgtggatggcccacgtgttacttccctatgtacacggaaaccagagctcccccgagcttgggcctcccagactgagacaagtccggcttcaggaggcactgtatcccgaccctcctggaccgagagtgcatacgtgcagcgccgcaggtggcttctcgacatctgattatgacgttggctgggagtcgccacataacgggagtggcacctgggcctactctgctccagacctgcttggggcgtggagctggggatcgtgtgccgtgtatgacagcggaggatatgtacaggaactgggtctgagcttggaggagtcacgcgatcgcttacgcttcctgcagctgcacaattggctcgataacaggagtagagcggtgtttctcgagctgacccggtattccccagctgtgggactgcatgctgcagtgacactccgccttgaattccccgcagccggccgggcgttagctgctttgtctgtgcgccccttcgcacttcggaggcttagcgccgggctgagtttacctctccttacatcagtatgcctgttactctttgccgtacactttgccgtcgccgaggcccggacatggcaccgggagggtcgatggcgagttctacgcttaggtgcttgggctcggtggctgttggtggctctcactgcagcaactgcgctggtgaggctggcgcagctgggcgccgccgatcgacagtggacccgctttgtcaggggtaggccccgtaggttcacctcttttgatcaggtggcacagctgtcctctgccgcacggggactggctgcttcacttttgttcctgctgctcgtgaaggctgctcaacaactgcggtttgtgcgacagtggagcgtgttcggtaaaacgctgtgcagggctttgccagagctactgggcgtgacgctgggactggttgtgctgggcgtggcctacgctcagctggccatcttgcttgtgagctcttgtgtagactctctgtggtcagtggcccaggcgctgctggttctctgccctggtactgggctatcaaccctatgcccagccgagagctggcatctctccccacttctctgcgtgggcctctgggccctgcgcctatggggggccctccgcctgggggcagtgatactgaggtggaggtaccacgccttgaggggagagctgtatcgtccagcatgggaacctcaagactacgagatggtggaactgtttctgagacggctgcggttgtggatggggctcagcaaggtaaaggaatttcgccataaagttagattcgaaggaatggagccactacccagtcgctccagtcgcggctctaaggtgagtcccgatgtcccgcctccttctgccggctcagatgcatctcatccgagcacttcttcatctcaactcgatggactgtccgtgtcccttggacggctaggaaccaggtgcgagccagagccttcacgcctacaagctgtttttgaggccctcctgacccagtttgacagactgaatcaggcaaccgaagacgtgtatcagttggagcaacagttacacagcctgcaggggcgaagaagttccagagccccggcaggaagctcaaggggccctagcccaggcctccgccccgctctgccatcccgactggccagagcctctcgcggtgtggacttagctacaggtcctagccgcacaccccttcgggccaaaaataaagtccatcctagtagcacatag

SEQ ID NO: 23771 - DNA, 12912 bp, Artificial Sequence
  derived and/or modified sequence
atgcccccagctgccccagcccggctggccctggccctgggcctgggcctgtggctgggcgccctggccggcggccctggccggggctgcggcccctgtgagcccccctgcctgtgtggccctgcccctggagctgcctgccgggtgaactgcagcggccggggcctgcggaccctgggccctgccctgcgcatcccagcagatgccacagccctggatgtgagccacaacctgctgcgggccctggatgtgggcctgctggccaacctgagcgccctggccgagctggacatcagcaacaacaagatcagcaccctggaggagggcatctttgccaacctcttcaacctgtctgagatcaacctgagcggcaacccctttgaatgtgactgtggcctggcctggctgccccgctgggccgaggagcagcaggtgcgggtggtgcagcctgaggccgccacctgtgccggccctggcagcctggccggccagcccctgctgggcatccccctgctggacagcggctgtggggaggagtatgtggcctgcctgcctgacaacagcagcggcaccgtggccgctgtgtccttctctgctgcccacgagggcctgctgcagcctgaggcctgcagcgccttctgcttcagcacaggccagggcctggccgccctgtctgagcagggctggtgcctgtgtggggccgcccagcccagcagcgccagctttgcctgcctgagcctgtgcagcggccccccacctcctccagcccccacctgccggggccccaccctgctgcagcacgtgtttcctgccagccctggggccaccctggtgggcccccacggccccctggccagcggccagctggccgccttccacatcgccgcccccctgcctgtgacagccacccgctgggactttggagatggcagcgctgaggtggatgctgctggccctgctgccagccacagatatgtgctgcccggccgctaccacgtgacagctgtgctggccctgggcgccggcagcgccctgctgggcacagatgtgcaggtggaggccgccccagctgccctggagctggtgtgccccagctctgtgcagagtgatgagagcctggacctgagcatccagaacagaggaggcagcggcctggaggccgcctacagcatcgtggccctgggggaggagcccgcccgggctgtgcaccccctgtgccccagcgacacagagatcttccctggaaatggccactgctaccgcctggtggtggagaaggccgcctggctgcaggcccaggagcagtgccaggcctgggccggggccgccctggccatggtggacagccctgctgtgcagcgcttcctggtgtcccgggtgaccaggagcctggatgtgtggattggcttcagcacagtgcagggcgtggaggtgggccctgccccccagggcgaggccttcagcctggagagctgccagaactggctgcctggagagccccacccagccacagctgagcactgtgtgcggctgggccccaccggctggtgcaacacagacctgtgcagcgccccccacagctatgtgtgtgagctgcagcccggcggccctgtgcaggatgctgagaacctgctggtgggcgcccccagcggggacctgcagggccccctgacccccctggcccagcaggacggcctgagcgcccctcatgagcctgtggaggtgatggtgtttcctggcctgcggctgagccgggaggccttcctgaccacagctgagtttggcacccaggagctgcggcggcctgcccagctgcggctgcaggtgtaccgcctgctgagcacagctggcaccccagaaaatggaagtgagcctgagagccgcagcccagacaacagaacccagctggccccagcctgcatgcctgggggccgctggtgccctggggccaacatctgcctgcccctggatgccagctgccacccccaggcctgtgccaacggctgcaccagcggccctggcctgcccggggccccctatgccctgtggagggagttcctgttctctgtgcctgctggccccccagcccagtacagcgtgaccctgcacggccaggatgtgctgatgctgcccggggacctggtgggcctgcagcatgatgctggccctggggccctgctgcactgcagccctgcccctggccaccctggcccccgggccccctacctgagcgccaatgccagctcctggctgccccacctgcctgcccagctggagggcacctgggcctgcccagcctgtgccctgcggctgctggccgccacagagcagctgactgtgctgctgggcctgcggcccaaccctggcctgcggctgcccggccgctatgaggtgcgggcagaggtgggcaatggagtgagccgccacaacctgagctgcagctttgatgtggtgtcccctgtggccggcctgcgggtcatctacccagcccccagagatggccgcctgtatgtgcccaccaatggaagtgccctggtgctgcaggtggacagcggggccaatgccacagccacagcccgctggccaggcggctctgtgtctgccaggtttgaaaatgtgtgcccagccctggtggccacctttgtgcccggctgcccctgggagaccaatgacaccctcttctctgtggtggccctgccctggctgtctgagggggagcacgtggtggatgtggtggtggagaacagcgccagccgggccaacctgagcctgcgggtgacagctgaggagcccatctgtggcctgcgggccacccccagccctgaggcccgggtgctgcagggcgtgctggtgcgctacagccctgtggtggaggccggcagtgacatggtgttccgctggaccatcaatgacaagcagagcctgaccttccagaatgtggtgttcaacgtcatctaccagagcgctgctgtgttcaagctgagcctgacagccagcaaccacgtgtccaatgtgacagtgaactacaacgtgacagtggagaggatgaacaggatgcagggcctgcaggtgtccacagtgcctgctgtgctgagccccaatgccaccctggccctgacagctggggtgctggtggacagcgctgtggaggtggccttcctgtggacctttggagatggagagcaggccctgcaccagttccagcccccctacaatgaaagcttccctgtgcctgaccccagcgtggcccaggtgctggtggagcacaacgtgatgcacacctacgccgcccctggagagtacctgctgactgtgctggccagcaatgcctttgagaacctgacccagcaggtgcctgtgtctgtgcgggccagcctgcccagcgtggccgtgggcgtgtctgatggagtgctggtggccggccggcctgtgaccttctacccccaccccctgcccagccctgggggcgtgctgtacacctgggactttggagatggcagccctgtgctgacccagagccagcctgctgccaaccacacctacgccagccggggcacctaccacgtgcggctggaggtgaacaacacagtgtctggagctgctgcccaggctgatgtgcgggtgtttgaggagctgcggggcctgtctgtggacatgagcctggccgtggagcagggcgcccctgtggtggtgtctgctgctgtgcagacaggagacaacatcacctggacctttgacatgggagatggcaccgtgctgagcggccctgaggccaccgtggagcacgtgtacctgcgggcccagaactgcaccgtgacagtgggcgccgccagccctgctggccacctggcccggagcctgcacgtgctggtgtttgtgctggaggtgctgcgggtggagcctgctgcctgcatccccacccagccagatgcccggctgacagcctacgtgacaggcaacccagcccactacctgtttgactggacctttggagatggcagcagcaacaccaccgtgcggggctgccccaccgtgacccacaacttcaccaggagcggcaccttccccctggccctggtgctgagcagccgggtgaacagagcccactacttcaccagcatctgtgtggagcctgaggtgggcaatgtgaccctgcagcctgagcggcagtttgtgcagctgggagatgaggcctggctggtggcctgtgcctggccacccttcccctaccgctacacctgggactttggaacagaggaggccgcccccacccgggcccggggccctgaggtgaccttcatctacagagaccccggcagctacctggtgacagtgacagccagcaacaacatctctgctgccaatgattctgccctggtggaggtgcaggagcctgtgctggtgaccagcatcaaggtgaatggcagcctgggcctggagctgcagcagccctacctgttctctgctgtgggccggggccgcccagccagctacctgtgggacctgggagatggcggctggctggagggccctgaggtgacccacgcctacaacagcactggagacttcaccgtgcgggtggccggctggaatgaggtgagccgctctgaggcctggctgaatgtgacagtgaagagaagagtgcggggcctggtggtgaatgccagcaggacagtggtgcccctgaatggatctgtgtccttcagcaccagcctggaggccggcagtgatgtgcgctacagctgggtgctgtgtgaccgctgcacccccatccctgggggccccaccatctcctacaccttccgctctgtgggcaccttcaacatcatcgtgacagcagaaaatgaggtgggcagcgcccaggacagcatctttgtgtatgtgctgcagctgattgagggcctgcaggtggtgggcggcggccgctacttccccaccaaccacacagtgcagctgcaggccgtggtgagagatggcaccaacgtgtcctacagctggacagcctggagggaccggggccctgccctggccggcagcggcaagggcttcagcctgactgtgctggaggccggcacctaccacgtgcagctgcgggccaccaacatgctgggcagcgcctgggccgactgcaccatggactttgtggagcctgtgggctggctgatggtggccgccagccccaacccagctgctgtgaacacctctgtgaccctgtctgctgagctggccggcggcagcggcgtggtgtacacctggagcctggaggagggcctgtcctgggagaccagcgagcccttcaccacccacagcttccccaccccaggcctgcacctggtgaccatgacagctggcaaccccctgggcagcgccaatgccaccgtggaggtggatgtgcaggtgcctgtgtctggcctgagcatccgggccagcgagcccggcggcagctttgtggccgccggcagctctgtgcccttctggggccagctggccaccggcaccaacgtgtcctggtgctgggccgtgcctgggggcagcagcaagaggggcccccacgtgaccatggtgtttcctgatgctggcaccttcagcatccggctgaatgccagcaatgctgtgtcctgggtgtctgccacctacaacctgacagctgaggagcccatcgtgggcctggtgctgtgggccagcagcaaggtggtggcccctggccagctggtgcacttccagatcctgctggccgccggcagcgctgtgaccttccggctgcaggtgggcggggccaaccctgaggtgctgcccggcccccgcttcagccacagcttcccccgggtgggggaccacgtggtgtctgtgcggggcaagaaccacgtgtcctgggcccaggcccaggtgagaattgtggtgctggaggccgtgtctggcctgcaggtgcccaactgctgtgagcccggcatcgccaccggcacagagaggaacttcaccgcccgggtgcagaggggcagccgggtggcctatgcctggtacttcagcctgcagaaggtgcagggcgacagcctggtgatcctgagcggcagagatgtgacctacacccctgtggccgccggcctgctggagatccaggtgcgggccttcaatgccctgggctctgaaaatagaaccctggtgctggaggtgcaggatgctgtgcagtatgtggccctgcagagcggcccctgcttcaccaacagaagtgcccagtttgaagctgccaccagccccagcccccggcgggtggcctaccactgggactttggagatggcagccctggccaggacacagatgagcccagggctgagcacagctacctgcggcctggggactacagagtgcaggtgaatgccagcaacctggtgtccttctttgtggcccaggccaccgtgacagtgcaggtgctggcctgccgggagcctgaggtggatgtggtgctgcccctgcaggtgctgatgaggaggagccagaggaactacctggaggcccacgtggacctgcgggactgtgtgacctaccagacagagtaccgctgggaggtgtacagaacagccagctgccagaggcctggccgcccagcccgggtggccctgcccggggtggatgtgtcccggccccggctggtgctgccccggctggccctgcctgtgggccactactgctttgtgtttgtggtgtcctttggagacacccccctgacccagagcatccaggccaacgtgacagtggcccctgagcggctggtgcccatcatcgagggcggcagctacagagtgtggagcgacacccgggacctggtgctggatggcagcgagagctatgaccccaacctggaggatggagaccagacccccctgtccttccactgggcctgtgtggccagcacccagcgggaggccggcggctgtgccctgaactttggcccccggggcagcagcacagtgaccatcccccgggagcggctggccgccggcgtggagtacaccttcagcctgactgtgtggaaggccggcaggaaggaggaggccaccaaccagacagtgctgatccgcagcggccgggtgcccatcgtgtccctggagtgtgtgtcctgcaaggcccaggccgtgtatgaggtgagccgcagcagctatgtgtacctggagggccgctgcctgaactgcagcagcggcagcaagaggggccgctgggccgcccggaccttcagcaacaagaccctggtgctggatgagaccaccaccagcacaggcagcgctggcatgaggctggtgctgcggcggggcgtgctgagagatggagagggctacaccttcaccctgactgtgctgggccgcagcggggaggaggagggctgtgccagcatccggctgagccccaaccggccccccctgggcggcagctgccgcctcttccccctgggcgctgtgcacgccctgaccaccaaggtgcactttgagtgcaccggctggcatgatgctgaagatgctggggcccccctggtgtatgccctgctgctgcggcgctgccggcagggccactgtgaggagttctgtgtgtacaagggcagcctgagcagctatggagctgtgctgcccccaggcttccggccccactttgaggtgggcctggccgtggtggtgcaggaccagctgggcgctgctgtggtggccctgaacagaagcctggccatcaccctgcctgagcccaacggcagcgccaccggcctgactgtgtggctgcacggcctgacagcctctgtgctgcccggcctgctgcggcaggccgacccccagcacgtgattgagtacagcctggccctggtgacagtgctgaatgaatatgaaagagccctggatgtggccgctgagcccaagcatgagcggcagcaccgggcccagatcaggaagaacatcacagagaccctggtgtccctgcgggtgcacacagtggatgacatccagcagattgctgctgccctggcccagtgcatgggccccagccgggagctggtgtgccgcagctgcctgaagcagaccctgcacaagctggaggccatgatgctgatcctgcaggccgagaccacagctggcaccgtgacccccacagccatcggggacagcatcctgaacatcaccggggacctgatccacctggccagcagtgatgtgcgggccccccagcccagcgagctgggcgctgagagccccagcaggatggtggccagccaggcctacaacctgaccagcgccctgatgaggatcctgatgaggagccgggtgctgaatgaggagcccctgaccctggccggggaggagatcgtggcccagggcaagagaagtgaccccaggagcctgctgtgctacggcggggcccctggccctggctgccacttcagcatccctgaggccttcagcggggccctggccaacctgagtgatgtggtgcagctgatcttcctggtggacagcaaccccttccccttcggctacatcagcaactacacagtgtccaccaaggtggcctccatggccttccagacccaggccggggcccagatccccatcgagcggctggccagcgagcgggccatcaccgtgaaggtgcccaacaacagcgactgggccgcccggggccacaggagcagcgccaacagcgccaacagcgtggtggtgcagccccaggcctctgtgggcgctgtggtgaccctggacagcagcaacccagctgctggcctgcacctgcagctgaactacaccctgctggatggccactacctgtctgaggagcctgagccctacctggccgtgtacctgcacagcgagccccggcccaatgagcacaactgcagcgccagccgccgcatccggcctgagagcctgcagggcgctgaccaccggccctacaccttcttcatcagccctggcagccgggaccctgctggcagctaccacctgaacctgagcagccacttccgctggagcgccctgcaggtgtctgtgggcctgtacaccagcctgtgccagtacttcagcgaggaggacatggtgtggaggacagagggcctgctgcccctggaggagaccagcccccggcaggccgtgtgcctgaccaggcacctgacagcctttggagccagcctgtttgtgccccccagccacgtgcgctttgtgtttcctgagcccacagcagatgtgaactacatcgtgatgctgacctgtgctgtgtgcctggtgacctacatggtgatggccgccatcctgcacaagctggaccagctggatgccagccggggccgggccatccccttctgtggccagaggggccgcttcaagtatgagatcctggtgaagacaggctggggccggggcagcggcaccacagcccacgtgggcatcatgctgtatggagtggacagccgcagcggccaccgccacctggatggagaccgggccttccacaggaacagcctggacatcttccgcatcgccaccccccacagcctgggctctgtgtggaagatccgggtgtggcatgacaacaagggcctgagccctgcctggttcctgcagcacgtgattgtgcgggacctgcagacagcccggagcgccttcttcctggtgaatgactggctgtctgtggagacagaggccaacggcggcctggtggagaaggaggtgctggccgccagtgatgctgccctgctgcgcttccggcggctgctggtggccgagctgcagaggggcttctttgacaagcacatctggctgagcatctgggaccggccccccaggagccgcttcacccgcatccagagggccacctgctgcgtgctgctgatctgcctcttcctgggcgccaatgctgtgtggtatggagctgtgggggacagcgcctacagcactggacatgtgtcccggctgagccccctgtctgtggacacagtggccgtgggcctggtgtcctctgtggtggtgtaccctgtgtacctggccatcctcttcctgttcaggatgagccgcagcaaggtggccggcagccccagccccaccccagctggccagcaggtgctggacatcgacagctgcctggacagctctgtgctggacagcagcttcctgaccttcagcggcctgcacgccgagcaggcctttgtgggccagatgaagagtgacctcttcctggatgacagcaagagcctggtgtgctggcccagcggggagggcaccctgtcctggccagacctgctgagtgaccccagcatcgtgggcagcaacctgcggcagctggcccggggccaggccggccacggcctgggccctgaggaggatggcttcagcctggccagcccctacagccctgccaagagcttcagcgccagtgatgaggacctgatccagcaggtgctggccgagggcgtgagcagccctgcccccacccaggacacccacatggagacagacctgctgagcagcctgagcagcaccccaggagagaagacagagaccctggccctgcagaggctgggggagctgggcccccccagccctggcctgaactgggagcagccccaggccgcccggctgagcaggacaggcctggtggagggcctgaggaagaggctgctgcctgcctggtgtgccagcctggcccacggcctgagcctgctgctggtggccgtggccgtggccgtgtctggctgggtgggcgccagcttccccccaggagtgtctgtggcctggctgctgagcagcagcgccagcttcctggccagcttcctgggctgggagcccctgaaggtgctgctggaggccctgtacttcagcctggtggccaagaggctgcacccagatgaagatgacaccctggtggagagccctgctgtgacccctgtgtctgcccgggtgccccgggtgcggcccccccacggctttgccctcttcctggccaaggaggaggccaggaaggtgaagaggctgcacggcatgctgcggagcctgctggtgtacatgctgttcctgctggtgaccctgctggccagctatggagatgccagctgccacggccacgcctaccgcctgcagagcgccatcaagcaggagctgcacagccgggccttcctggccatcaccaggtctgaggagctgtggccctggatggcccacgtgctgctgccctacgtgcacggcaaccagagcagccctgagctgggccccccccggctgcggcaggtgcggctgcaggaggccctgtacccagaccccccaggcccccgggtgcacacctgcagcgctgctgggggcttcagcaccagtgactatgatgtgggctgggagagcccccacaacggcagcggcacctgggcctacagcgccccagacctgctgggcgcctggagctggggcagctgtgctgtgtatgacagcggcggctacgtgcaggagctgggcctgagcctggaggagagccgggaccggctgcgcttcctgcagctgcacaactggctggacaacagaagcagagctgtgttcctggagctgacccgctacagccctgctgtgggcctgcatgctgctgtgaccctgcggctggagttccctgctgctggccgggccctggccgccctgtctgtgcggccctttgccctgcggcggctgtctgctggcctgagcctgcccctgctgacctctgtgtgcctgctgctgtttgctgtgcactttgctgtggccgaggcccggacctggcaccgggagggccgctggagggtgctgcggctgggcgcctgggcccgctggctgctggtggccctgacagctgccacagccctggtgcggctggcccagctgggcgctgctgaccggcagtggaccaggtttgtgcggggccggccccggcgcttcaccagctttgaccaggtggcccagctgagcagcgctgcccggggcctggccgccagcctgctcttcctgctgctggtgaaggccgcccagcagctgcgctttgtgcggcagtggagcgtgtttgggaagaccctgtgccgggccctgcctgagctgctgggcgtgaccctgggcctggtggtgctgggcgtggcctatgcccagctggccatcctgctggtgagcagctgtgtggacagcctgtggagcgtggcccaggccctgctggtgctgtgccccggcaccggcctgagcaccctgtgcccagctgagagctggcacctgagccccctgctgtgtgtgggcctgtgggccctgcggctgtggggcgccctgcggctgggcgctgtgatcctgcgctggagataccacgccctgcggggggagctgtacagacctgcctgggagccccaggactatgagatggtggagctgttcctgcggcggctgcggctgtggatgggcctgagcaaggtgaaggagttccgccacaaggtgcgctttgagggcatggagcccctgcccagccgcagcagccggggcagcaaggtgtccccagatgtgcccccaccttctgctggcagtgatgccagccaccccagcaccagcagcagccagctggatggcctgtctgtgtccctgggccgcctgggcacccgctgtgagcctgagcccagccggctgcaggccgtgtttgaggccctgctgacccagtttgaccggctgaaccaggccacagaagatgtgtaccagctggagcagcagctgcacagcctgcagggcagaagaagcagccgggccccagctggcagcagccggggccccagccctggcctgcggcctgccctgcccagccggctggcccgggccagccggggcgtggacctggccaccggccccagcaggacccccctgcgggccaagaacaaggtgcaccccagcagcacctag

SEQ ID NO: 23772 - DNA, 12912 bp, Artificial Sequence
  derived and/or modified sequence
atgccccccgccgcccccgcccggctggccctggccctgggcctggggctctggctaggcgcattggctggcgggcctggcaggggatgcggcccttgtgagcccccatgcttatgtggaccagctcctggcgccgcctgtcgagtcaactgttctggacgaggtctccgcactttagggcccgctctccgtatccccgcggacgccactgctctcgatgtgtctcacaacttactgagagccctggacgtcggcctgctagcgaacctaagcgctctggctgagctggacattagtaacaacaaaatttctacacttgaggaggggatattcgccaacctgttcaacctctctgagattaacctgagcggcaatcccttcgagtgtgactgcggactggcttggttgccccgctgggcggaagagcagcaggtaagagtggtgcagccggaagctgccacctgcgcaggccccggtagcctggccggacagcccctgctgggcatccccctgctcgattcgggctgcggtgaagaatacgttgcttgcctgcccgataactcctctgggactgtggcagccgttagttttagcgctgcgcacgaaggattactccagccagaggcctgctctgctttctgcttctcaactggacagggtctcgctgctctgtctgagcagggatggtgtctttgcggggccgcacagccgtctagtgcctcttttgcctgcctgtccctttgctcaggcccaccacctcctccagcccccacatgtcgcggccccacacttctgcagcatgtgtttcccgcgtccccaggagcgaccctggttggccctcacggccctctcgcttctggtcagctggccgcttttcacatcgctgcaccactgcctgtgaccgccacgcgatgggacttcggtgatggaagtgcagaagtggacgccgcagggcctgccgcatcccataggtatgtgctgcccggtcggtaccacgtgacggcagtcttggccctgggagcgggatccgccttgctgggcaccgacgtgcaggtggaggccgctccagccgccttggagctggtttgtcccagctccgtgcaaagcgatgaatccctggacctctccatccagaacagaggaggaagcgggctggaggcagcatacagcattgttgctctcggtgaagagcccgctagggcagtgcaccccctgtgcccttccgacacagagatctttccaggtaatggccattgttaccggctggtggttgagaaagcagcttggctgcaggcccaagagcagtgccaggcgtgggccggcgctgccttggccatggtggacagccccgccgtacagcgctttctggtgtctcgggtaacaaggagtcttgacgtgtggataggattctcaacggtgcagggtgttgaggtggggcccgccccccagggcgaggccttcagcttggaatcttgtcaaaactggctaccgggcgagccccatcctgctaccgccgagcactgtgtgcggctcgggccaactggctggtgcaatactgacttgtgttccgctccccacagttatgtgtgtgaactccagcccggagggcccgtgcaagacgctgaaaatttgctcgtaggggctccgtccggtgacctccaagggcccctgacacccttggcacagcaggatggcctgagtgctccacacgagccagtcgaggtcatggtttttccaggccttcgactttcccgtgaggccttcttgactactgcagagtttgggacacaagaactgagacgccccgcccagctgagactccaggtctatagattattaagtactgctggcactcccgaaaatggctccgaacccgagtctaggtctcccgataaccgtacacaactggcccccgcctgcatgcctggtgggaggtggtgcccgggcgccaacatatgccttcctttagacgcgagctgtcatccacaggcctgtgccaatggatgcacttctggacccggcctgcccggagcaccttatgcactgtggagagagtttctgttttcggtacccgccggacctcccgcccagtattccgtaactctccacgggcaggatgtgctcatgctgcccggcgacctggtcggcctgcagcatgacgcgggtcctggggccttattgcactgttcaccagcacccggccatcccggaccacgagctccttacctgagtgccaatgcaagctcctggctgccccacctacctgcccaactagaaggaacatgggcttgccccgcttgtgccttgcggcttctggccgccacggaacagttgacagtgcttctgggccttcgccctaaccccggactgaggctgcccggacgctatgaggtgagggccgaagtgggcaatggagtgagtcggcacaacctgtcatgctcctttgacgtggtgtcacctgtagccggtctgcgggtgatttaccccgccccccgtgacggccgcctctacgtgcctactaacggcagcgcgctcgtcctgcaggtggactctggagccaacgcaactgccaccgcacgctggccgggggggtccgtctccgccagattcgaaaatgtgtgtcctgcactggtggctacattcgtaccaggctgcccatgggaaaccaacgacacgcttttttcagttgttgctctcccgtggctcagtgagggcgaacatgtggtggatgtggtggtggagaattcggcctctcgagctaatctcagcctgagagtaacggcagaggagcccatctgtggcttacgcgctacaccaagccctgaggccagagtattacagggggtgttggtgcggtattctcccgtcgtggaagcgggatctgacatggtgtttaggtggaccattaatgataaacaatcacttacctttcagaatgtggtgtttaacgtgatctaccagtccgccgctgttttcaagctctccctcactgcctcgaaccacgtgagtaatgtgaccgttaactataatgtgacagtggaacggatgaaccgcatgcagggccttcaggttagcacggttccggccgtgctgagcccaaacgccacgctcgctctgaccgcaggcgttttagttgactctgccgtggaggtcgcttttctgtggacctttggggacggagagcaggccctgcaccagttccagcctccttacaatgagagctttcctgtgcctgacccctctgtggcacaggttcttgttgaacacaatgtgatgcacacttacgctgcccctggagaatacttgctcacagtccttgccagcaacgcctttgagaatttgacgcagcaggtcccggtgtctgtgagggcatcccttcccagtgtggcagttggtgtgagcgacggtgtcttggtcgctggccgacccgttaccttctacccccatccattgccttcaccgggaggcgttctgtacacatgggactttggtgatgggtctcctgtgctcacgcagtcccagcccgcagcgaaccacacctacgcttccagaggcacctatcacgtgcggttagaggtgaacaatacagtatctggcgcagccgcccaggcagatgtgagagtctttgaggaattaagaggtctgtccgtcgacatgtccttagctgtcgaacagggcgcccccgtggtggtaagcgctgccgtgcaaacaggggataatattacctggacattcgacatgggagacggcacagtactgagcggccctgaggctactgtggaacatgtgtacttgagggcacagaactgtactgtgacagtgggagctgcctcccctgctgggcaccttgctcggagtctgcatgtgctggtgtttgttcttgaggtgcttagggtcgagccagccgcatgtatcccgactcagcctgatgcacggttaactgcctatgttactggtaatcctgcccactacctgttcgactggacttttggcgacggatcgtccaatacaacagtgagagggtgcccaacagtcacccacaacttcacccgaagcggcacttttccgctcgctttggtgctgagctccagggtcaacagggctcattacttcacatctatctgcgtggagcccgaagtggggaacgttaccttgcaacccgagcggcaatttgttcagctcggagatgaggcttggctggtggcctgcgcatggccccccttcccctaccgctacacatgggacttcggcaccgaagaagctgcacccactagagctcgagggccagaggtgaccttcatctacagagacccagggagctatttggtgactgtcaccgccagtaacaatatctcagccgcgaacgactccgccttagtggaagtgcaggagcccgtccttgtgacatccatcaaggtgaatggctcactgggcttagagcttcagcagccttatctcttcagcgctgttgggaggggccggcccgcctcttacttgtgggatctcggagatggagggtggctcgaaggtcccgaagtgacacatgcatataattccactggcgatttcactgtgcgggtggctggatggaatgaggtgagccgctcagaagcatggctgaacgttaccgtaaagcgcagagttaggggattggtggtgaacgcatcccggactgttgttccactgaacggatcggtgtcattctctaccagtttggaagcgggtagcgacgtacgctatagctgggtgctctgtgataggtgcacacctatccccggaggccccacaatttcatacacctttaggagcgtcgggacgttcaacatcatcgtcacagccgagaacgaggtcggcagtgctcaagactccattttcgtgtacgtactacagctgatcgagggactgcaggtggtgggaggcggccggtactttccgacaaatcataccgtccagctgcaggcagtcgtgagggatggaactaatgtcagttatagttggaccgcttggagagaccgaggccctgccttggccggaagcggaaagggattttcactcacagtcctcgaagccgggacctatcacgtccaactgagagctaccaacatgctggggtcagcatgggctgattgcactatggatttcgtcgagcccgttgggtggctaatggtggctgccagtcccaatcccgccgctgtgaatacctccgtaacactgtccgccgagctggctggaggtagcggcgtggtctatacctggagtttggaggaaggcttgtcttgggagacaagcgagccgttcaccacacattcttttcccactcccgggcttcatctggtgacgatgaccgcggggaacccgctgggctctgctaatgctacggtcgaagtcgatgtgcaggtccctgtgagtggactgtccatcagggcttcagagccaggcggttcgttcgtagccgccggatcctctgtgccgttctggggtcagcttgcaacggggacaaatgtgtcctggtgttgggcagtgcccggcggatccagcaaaagaggcccccacgtcaccatggtgttccccgacgccgggactttttctatcaggctgaatgcttctaatgctgttagctgggtgagcgccacttacaatctgaccgctgaagaacctatcgtcggcttggtgctgtgggcctcgtccaaggtcgtggctcctgggcagctcgtgcactttcagatcttacttgccgcagggtccgctgttacctttcgactgcaggtaggcggagctaacccggaagtgcttccagggccgaggttcagtcattctttcccacgtgttggcgaccacgtggtctccgtgcgggggaagaaccacgtctcttgggctcaggctcaagtgaggattgtggttctcgaggcagtgagcggccttcaggtgcctaattgttgtgaacctggcattgcgacaggcaccgagagaaacttcactgctcgcgtccagcgcggttcacgcgttgcgtatgcctggtacttctctctgcagaaggttcagggcgattctctcgtgatcttgtctggccgcgacgtaacttacactccagtggcagctggactgttagaaatccaagttcgcgcattcaatgcactaggcagcgagaatagaaccctggtcctcgaagtgcaggacgcagtccagtacgttgccctgcagtctgggccgtgtttcacaaataggagtgcccaatttgaagccgccacaagtccctctccaagaagagtggcataccattgggatttcggagacggtagtcctggtcaggataccgacgagccacgcgcggagcactcatacctgagacctggggattatcgggttcaagtcaacgcgagcaatcttgtgagcttcttcgtggcccaggctactgtgacggtccaagttctggcttgccgggagcccgaggtggacgtggtgttaccactccaggtcctgatgagacgctctcagcgaaactacttggaagcccatgttgacttgcgggattgcgtgacttaccagaccgagtacaggtgggaggtatacaggacggccagttgtcagcgacctgggcgtccagctcgtgttgccctcccaggtgtggatgtgtccagacccagactggtcctgcctcggctagccctgcctgtcgggcactactgttttgtttttgtggtatcgttcggagacacccccctcacccagtcaatccaggccaacgtgaccgtggccccagaacgtctagtgccaatcattgagggaggtagctatagggtctggtcagatactcgcgacctggtcttagatggcagtgagtcttacgaccccaacctcgaagacggcgaccagacaccactgtccttccactgggcttgtgtggcatccactcagagggaagccggaggctgcgccctgaacttcgggcctagagggtcatcaacagtgaccatcccacgggaaagattagccgctggagtcgagtacaccttctccttaaccgtgtggaaagccggcaggaaggaggaagccaccaatcagaccgtgttgattcgctccgggcgtgtccccatcgtctcacttgagtgcgtctcctgtaaggcccaggcggtttatgaagtgtcacgctcgagttatgtgtatctcgagggtaggtgtctcaattgttcctctggtagtaagcgagggcggtgggccgcccggaccttttcaaataagacattggtgttggacgagacaaccacatccacaggctctgcaggtatgcgactggtcctgaggagaggagtgctgcgagacggcgaagggtacacattcacactgacggttcttgggaggagcggcgaggaggagggatgcgcatccatccgtttgagccctaaccggcctcctttggggggctcatgtcgcctctttccactgggcgccgtgcacgcgctgacaactaaagtgcactttgagtgcactggctggcatgacgccgaggacgcgggtgccccacttgtatacgccctcttactgcgacggtgtagacaaggccactgcgaggagttctgcgtctataaagggtctctgtcatcttatggagctgttcttccacctgggttcaggcctcacttcgaggtcggcttagccgttgtggtccaggaccagctgggcgcagccgtcgtggccctgaataggtctttggcaatcaccctgccagaacctaatggctctgcaactggcctgactgtgtggctgcacggtttgaccgccagcgtgctgccaggcttacttcgtcaggcggaccctcagcatgttatagaatattcactggccctggtaaccgtcctcaacgaatacgaaagagcactcgacgtagccgccgaacccaagcatgagcgccagcatagagctcagatacggaaaaatatcacagagacattggtgtcactgcgcgtgcacactgtcgacgatattcagcagattgcagctgctttagctcagtgcatgggcccgagccgcgaactggtgtgtcggtcttgtctgaagcagaccttgcacaaacttgaagctatgatgctgattctgcaggcagagacgaccgctgggactgtcacacccaccgctattggagatagtattctcaacattaccggcgatctgattcacctcgcaagcagtgatgtacgggctccccaacccagcgagctgggagctgaatccccatccaggatggtggctagccaagcatacaatctgacttcggcactcatgcggatcctaatgagaagcagagtgctcaacgaagaacccctcactttagctggtgaggagattgtggcgcagggcaagaggtctgacccccggtctctgttatgctatggtggggcacccgggcccgggtgtcatttttccattcccgaggcgttcagtggggccctggcgaatctttctgacgttgtgcagctcatctttctggttgatagcaacccgtttccttttggatatatctcgaactatacggtcagtaccaaggttgcatccatggcatttcagacacaggccggcgcccaaatccccatcgaacggcttgcctcagagagggcaatcaccgtcaaggtccccaacaattccgactgggctgctcgcggacaccggtccagcgctaatagcgcaaacagcgtggtcgtccagccgcaagcatctgtgggtgccgtggtgacgctcgacagttctaatcccgccgcaggtctgcacctccaactgaactacaccctcctggacggccactacctttctgaggagcccgagccctatctggctgtctacctccattctgagccaagacctaatgagcacaattgctctgcctcccgacggatccggcctgaaagcctgcaaggagctgaccatcggccatatactttctttatatccccagggagcagggatccagccgggtcctatcacctgaatctgtcctcccactttcggtggtctgctttgcaggtgtcggttggactgtatacgtccctctgccagtacttctccgaggaggacatggtatggaggacggagggcctgctgcctctcgaggaaactagcccacgtcaggcagtgtgtctgacaaggcatctgacggcctttggcgcgagtttattcgtacccccctcccatgtccggtttgtgttccctgagcctacggccgacgtgaactacatagtgatgctcacatgcgcagtctgcctggtgacctatatggtgatggcagccatcctgcacaaactggaccaactggacgccagtaggggtcgcgcaattccattttgcggtcagcgcggcaggttcaaatatgagattctggtgaagactgggtggggtcgcggatctggaaccaccgctcacgtgggtataatgctgtatggcgtcgattctaggtctgggcatcggcatctggatggagatcgtgccttccataggaattccttggatattttccgcatagccactccccacagtctggggagcgtgtggaaaattagggtgtggcacgacaataaaggtctaagtcccgcgtggttcctgcagcacgtaatcgtgagagatcttcagacagcccgctctgcctttttccttgtgaatgactggctcagtgtggagaccgaagctaacggaggtctggttgaaaaggaagttcttgccgcctcagatgctgcattgctccgtttccgacggcttcttgttgctgaactgcagaggggattcttcgacaaacacatctggctcagcatttgggaccggccccctcgctccaggtttacccgaattcagagagccacgtgctgtgtcttattaatctgtctgttcctgggtgctaatgctgtgtggtatggtgctgttggcgattccgcttactcaactggccatgtgtctcggttgtcccccctgagcgtggacaccgtggcggtgggcttggtctctagtgtggtcgtgtaccccgtgtatctggccatcctttttttgttccgcatgtctcgttccaaggtcgctggaagcccatcccccacgcccgcaggacagcaggtcctggacattgacagctgcctagatagctcagtcctggactctagctttctaactttcagcggactgcatgccgagcaggccttcgtaggtcagatgaagtccgatctgtttcttgacgattctaaatccctggtgtgttggccctccggggaagggacgctttcgtggcctgatcttctgtctgatccctctatcgtcggctccaacctgagacaattggcccgtggtcaggccggtcacgggctgggacccgaagaagatgggttttctctagcatccccctatagccctgccaagtctttctccgcctctgacgaggatttaatccaacaggttctggccgagggggtttcctcccccgccccgacccaagacacgcatatggagactgatctcttgagcagcctgtcctcgactcctggtgagaagaccgaaacactggccttgcaacgcctaggtgagctcggcccaccatcccccggactgaactgggagcagccccaggctgcccgcctttcccgcacgggccttgtggagggattaaggaaacgccttctccccgcctggtgcgcctctctggcgcatgggttgtctctgctgctggtggctgtggctgttgcagttagtgggtgggttggtgccagcttccctccaggcgtatctgttgcatggcttttgtccagctcagcctcttttctcgcttcctttctaggctgggagcccctgaaggttcttctcgaggccctgtattttagcttggtggcaaaaaggctgcatccagatgaggatgatactctcgtggaatcccctgccgttaccccagtaagtgctcgcgtcccccgggtgcgtccaccacacgggttcgctttgttcctggccaaggaagaggctcgaaaagtgaaacggctacacgggatgctgcggtccttgctggtatatatgctgttcctgctggtaacattacttgcgtcctatggtgacgccagttgccatggccacgcatatcggctgcagtccgccatcaagcaagaattacactcacgagcatttctggcgataactcgttcagaggaactgtggccatggatggcacatgtcctactcccatacgtgcatgggaatcagtcgagccctgagttgggtcctcctaggctgagacaggtcagactgcaggaggcgttgtatccagatccgcccggccctcgggtccatacctgctccgccgcaggggggttcagtacgagtgactatgatgtgggatgggaaagcccccataacggaagtggcacatgggcgtactccgcacctgacttgttgggtgcttggtcttggggctcctgcgctgtgtacgactcaggcggctacgtgcaggaactcgggctgtctttagaggagtctagggataggcttagattcttacagctccacaactggctcgacaacagaagcagagccgtgtttttggaactgacccgctacagccccgccgtaggcttacatgccgcagtgaccttgaggctagaatttcctgccgctgggagagcgctggccgcactttcagtgcgcccgttcgccctgagacggctctccgcaggtttgtcgcttcccctactcacatctgtttgcttactgctcttcgctgtgcattttgccgtggcagaggcgaggacttggcatagagagggccgttggagggtgctgcgtttaggcgcctgggcgcggtggctcctagtggccttaaccgctgctacggcgctggttcgcttagcccagttgggagcagccgaccgtcagtggacaaggttcgtccgtggtcggcctcgacgatttacatcttttgaccaggtagcgcagctgagctcagccgccagaggactcgcggcaagcctgctttttcttttgctggttaaggccgcccagcagctgcggttcgtgcgtcagtggtccgtgtttggcaaaactctctgtcgtgcactccccgagctcttgggggttactctagggttggtggtgctgggagtagcttatgcgcagctcgccattctattagtgagttcgtgcgtggacagcctttggagtgttgcacaggctctactcgtcctgtgccccggcacaggccttagcactctgtgccccgctgagagctggcacttgtccccactgctgtgtgtgggattgtgggcactcagattatggggagccttgagactcggtgccgtgattctcagatggcggtatcacgctctgaggggagagctgtatcgcccagcatgggaacctcaggactacgagatggttgagttgttccttcgacgtctcaggttgtggatgggattgtcaaaggtgaaggagttcaggcataaggtcagatttgaggggatggagcctctgccgagcagaagttccagggggtccaaagtgagtcccgatgttcccccacccagcgccggaagcgatgccagtcatccttcaacgtcgtctagtcaactggacggcctgagtgtgtctctgggcaggttaggtaccaggtgtgagccagagccctctcgactgcaagccgtatttgaggctctcctgacacagtttgatcgcctgaatcaagccaccgaggacgtgtaccagctcgaacagcaacttcacagcctgcagggcagacggtcatcaagagcccccgccggctcatcccgtgggcccagccctgggctaagacccgccttgcctagccgcctggcccgcgcaagccgcggagtagacttggccaccggaccaagccgcacaccactgcgtgcaaagaacaaagtccatccttcaagcacgtag

SEQ ID NO: 23773 - DNA, 14138 bp, Artificial Sequence
  derived and/or modified sequence
gcactgcagcgccagcgtccgagcgggcggccgagctcccggagcggcctggccccgagccccgagcgggcgtcgctcagcagcaggtcgcggccgcagccccatccagccccgcgcccgccatgccgtccgcgggccccgcctgagctgcggcctccgcgcgcgggcgggcctggggacggcggggccatgcgcgcgctgccctaacgatgccgcccgccgcgcccgcccgcctggcgctggccctgggcctgggcctgtggctcggggcgctggcggggggccccgggcgcggctgcgggccctgcgagcccccctgcctctgcggcccagcgcccggcgccgcctgccgcgtcaactgctcgggccgcgggctgcggacgctcggtcccgcgctgcgcatccccgcggacgccacagcgctagacgtctcccacaacctgctccgggcgctggacgttgggctcctggcgaacctctcggcgctggcagagctggatataagcaacaacaagatttctacgttagaagaaggaatatttgctaatttatttaatttaagtgaaataaacctgagtgggaacccgtttgagtgtgactgtggcctggcgtggctgccgcgatgggcggaggagcagcaggtgcgggtggtgcagcccgaggcagccacgtgtgctgggcctggctccctggctggccagcctctgcttggcatccccttgctggacagtggctgtggtgaggagtatgtcgcctgcctccctgacaacagctcaggcaccgtggcagcagtgtccttttcagctgcccacgaaggcctgcttcagccagaggcctgcagcgccttctgcttctccaccggccagggcctcgcagccctctcggagcagggctggtgcctgtgtggggcggcccagccctccagtgcctcctttgcctgcctgtccctctgctccggccccccgccacctcctgcccccacctgtaggggccccaccctcctccagcacgtcttccctgcctccccaggggccaccctggtggggccccacggacctctggcctctggccagctagcagccttccacatcgctgccccgctccctgtcactgccacacgctgggacttcggagacggctccgccgaggtggatgccgctgggccggctgcctcgcatcgctatgtgctgcctgggcgctatcacgtgacggccgtgctggccctgggggccggctcagccctgctggggacagacgtgcaggtggaagcggcacctgccgccctggagctcgtgtgcccgtcctcggtgcagagtgacgagagcctcgacctcagcatccagaaccgcggtggttcaggcctggaggccgcctacagcatcgtggccctgggcgaggagccggcccgagcggtgcacccgctctgcccctcggacacggagatcttccctggcaacgggcactgctaccgcctggtggtggagaaggcggcctggctgcaggcgcaggagcagtgtcaggcctgggccggggccgccctggcaatggtggacagtcccgccgtgcagcgcttcctggtctcccgggtcaccaggagcctagacgtgtggatcggcttctcgactgtgcagggggtggaggtgggcccagcgccgcagggcgaggccttcagcctggagagctgccagaactggctgcccggggagccacacccagccacagccgagcactgcgtccggctcgggcccaccgggtggtgtaacaccgacctgtgctcagcgccgcacagctacgtctgcgagctgcagcccggaggcccagtgcaggatgccgagaacctcctcgtgggagcgcccagtggggacctgcagggacccctgacgcctctggcacagcaggacggcctctcagccccgcacgagcccgtggaggtcatggtattcccgggcctgcgtctgagccgtgaagccttcctcaccacggccgaatttgggacccaggagctccggcggcccgcccagctgcggctgcaggtgtaccggctcctcagcacagcagggaccccggagaacggcagcgagcctgagagcaggtccccggacaacaggacccagctggcccccgcgtgcatgccagggggacgctggtgccctggagccaacatctgcttgccgctggacgcctcctgccacccccaggcctgcgccaatggctgcacgtcagggccagggctacccggggccccctatgcgctatggagagagttcctcttctccgttcccgcggggccccccgcgcagtactcggtcaccctccacggccaggatgtcctcatgctccctggtgacctcgttggcttgcagcacgacgctggccctggcgccctcctgcactgctcgccggctcccggccaccctggtccccgggccccgtacctctccgccaacgcctcgtcatggctgccccacttgccagcccagctggagggcacttgggcctgccctgcctgtgccctgcggctgcttgcagccacggaacagctcaccgtgctgctgggcttgaggcccaaccctggactgcggctgcctgggcgctatgaggtccgggcagaggtgggcaatggcgtgtccaggcacaacctctcctgcagctttgacgtggtctccccagtggctgggctgcgggtcatctaccctgccccccgcgacggccgcctctacgtgcccaccaacggctcagccttggtgctccaggtggactctggtgccaacgccacggccacggctcgctggcctgggggcagtgtcagcgcccgctttgagaatgtctgccctgccctggtggccaccttcgtgcccggctgcccctgggagaccaacgataccctgttctcagtggtagcactgccgtggctcagtgagggggagcacgtggtggacgtggtggtggaaaacagcgccagccgggccaacctcagcctgcgggtgacggcggaggagcccatctgtggcctccgcgccacgcccagccccgaggcccgtgtactgcagggagtcctagtgaggtacagccccgtggtggaggccggctcggacatggtcttccggtggaccatcaacgacaagcagtccctgaccttccagaacgtggtcttcaatgtcatttatcagagcgcggcggtcttcaagctctcactgacggcctccaaccacgtgagcaacgtcaccgtgaactacaacgtaaccgtggagcggatgaacaggatgcagggtctgcaggtctccacagtgccggccgtgctgtcccccaatgccacgctagcactgacggcgggcgtgctggtggactcggccgtggaggtggccttcctgtggacctttggggatggggagcaggccctccaccagttccagcctccgtacaacgagtccttcccggttccagacccctcggtggcccaggtgctggtggagcacaatgtcatgcacacctacgctgccccaggtgagtacctcctgaccgtgctggcatctaatgccttcgagaacctgacgcagcaggtgcctgtgagcgtgcgcgcctccctgccctccgtggctgtgggtgtgagtgacggcgtcctggtggccggccggcccgtcaccttctacccgcacccgctgccctcgcctgggggtgttctttacacgtgggacttcggggacggctcccctgtcctgacccagagccagccggctgccaaccacacctatgcctcgaggggcacctaccacgtgcgcctggaggtcaacaacacggtgagcggtgcggcggcccaggcggatgtgcgcgtctttgaggagctccgcggactcagcgtggacatgagcctggccgtggagcagggcgcccccgtggtggtcagcgccgcggtgcagacgggcgacaacatcacgtggaccttcgacatgggggacggcaccgtgctgtcgggcccggaggcaacagtggagcatgtgtacctgcgggcacagaactgcacagtgaccgtgggtgcggccagccccgccggccacctggcccggagcctgcacgtgctggtcttcgtcctggaggtgctgcgcgttgaacccgccgcctgcatccccacgcagcctgacgcgcggctcacggcctacgtcaccgggaacccggcccactacctcttcgactggaccttcggggatggctcctccaacacgaccgtgcgggggtgcccgacggtgacacacaacttcacgcggagcggcacgttccccctggcgctggtgctgtccagccgcgtgaacagggcgcattacttcaccagcatctgcgtggagccagaggtgggcaacgtcaccctgcagccagagaggcagtttgtgcagctcggggacgaggcctggctggtggcatgtgcctggcccccgttcccctaccgctacacctgggactttggcaccgaggaagccgcccccacccgtgccaggggccctgaggtgacgttcatctaccgagacccaggctcctatcttgtgacagtcaccgcgtccaacaacatctctgctgccaatgactcagccctggtggaggtgcaggagcccgtgctggtcaccagcatcaaggtcaatggctcccttgggctggagctgcagcagccgtacctgttctctgctgtgggccgtgggcgccccgccagctacctgtgggatctgggggacggtgggtggctcgagggtccggaggtcacccacgcttacaacagcacaggtgacttcaccgttagggtggccggctggaatgaggtgagccgcagcgaggcctggctcaatgtgacggtgaagcggcgcgtgcgggggctcgtcgtcaatgcaagccgcacggtggtgcccctgaatgggagcgtgagcttcagcacgtcgctggaggccggcagtgatgtgcgctattcctgggtgctctgtgaccgctgcacgcccatccctgggggtcctaccatctcttacaccttccgctccgtgggcaccttcaatatcatcgtcacggctgagaacgaggtgggctccgcccaggacagcatcttcgtctatgtcctgcagctcatagaggggctgcaggtggtgggcggtggccgctacttccccaccaaccacacggtacagctgcaggccgtggttagggatggcaccaacgtctcctacagctggactgcctggagggacaggggcccggccctggccggcagcggcaaaggcttctcgctcaccgtgctcgaggccggcacctaccatgtgcagctgcgggccaccaacatgctgggcagcgcctgggccgactgcaccatggacttcgtggagcctgtggggtggctgatggtggccgcctccccgaacccagctgccgtcaacacaagcgtcaccctcagtgccgagctggctggtggcagtggtgtcgtatacacttggtccttggaggaggggctgagctgggagacctccgagccatttaccacccatagcttccccacacccggcctgcacttggtcaccatgacggcagggaacccgctgggctcagccaacgccaccgtggaagtggatgtgcaggtgcctgtgagtggcctcagcatcagggccagcgagcccggaggcagcttcgtggcggccgggtcctctgtgcccttttgggggcagctggccacgggcaccaatgtgagctggtgctgggctgtgcccggcggcagcagcaagcgtggccctcatgtcaccatggtcttcccggatgctggcaccttctccatccggctcaatgcctccaacgcagtcagctgggtctcagccacgtacaacctcacggcggaggagcccatcgtgggcctggtgctgtgggccagcagcaaggtggtggcgcccgggcagctggtccattttcagatcctgctggctgccggctcagctgtcaccttccgcctgcaggtcggcggggccaaccccgaggtgctccccgggccccgtttctcccacagcttcccccgcgtcggagaccacgtggtgagcgtgcggggcaaaaaccacgtgagctgggcccaggcgcaggtgcgcatcgtggtgctggaggccgtgagtgggctgcaggtgcccaactgctgcgagcctggcatcgccacgggcactgagaggaacttcacagcccgcgtgcagcgcggctctcgggtcgcctacgcctggtacttctcgctgcagaaggtccagggcgactcgctggtcatcctgtcgggccgcgacgtcacctacacgcccgtggccgcggggctgttggagatccaggtgcgcgccttcaacgccctgggcagtgagaaccgcacgctggtgctggaggttcaggacgccgtccagtatgtggccctgcagagcggcccctgcttcaccaaccgctcggcgcagtttgaggccgccaccagccccagcccccggcgtgtggcctaccactgggactttggggatgggtcgccagggcaggacacagatgagcccagggccgagcactcctacctgaggcctggggactaccgcgtgcaggtgaacgcctccaacctggtgagcttcttcgtggcgcaggccacggtgaccgtccaggtgctggcctgccgggagccggaggtggacgtggtcctgcccctgcaggtgctgatgcggcgatcacagcgcaactacttggaggcccacgttgacctgcgcgactgcgtcacctaccagactgagtaccgctgggaggtgtatcgcaccgccagctgccagcggccggggcgcccagcgcgtgtggccctgcccggcgtggacgtgagccggcctcggctggtgctgccgcggctggcgctgcctgtggggcactactgctttgtgtttgtcgtgtcatttggggacacgccactgacacagagcatccaggccaatgtgacggtggcccccgagcgcctggtgcccatcattgagggtggctcataccgcgtgtggtcagacacacgggacctggtgctggatgggagcgagtcctacgaccccaacctggaggacggcgaccagacgccgctcagtttccactgggcctgtgtggcttcgacacagagggaggctggcgggtgtgcgctgaactttgggccccgcgggagcagcacggtcaccattccacgggagcggctggcggctggcgtggagtacaccttcagcctgaccgtgtggaaggccggccgcaaggaggaggccaccaaccagacggtgctgatccggagtggccgggtgcccattgtgtccttggagtgtgtgtcctgcaaggcacaggccgtgtacgaagtgagccgcagctcctacgtgtacttggagggccgctgcctcaattgcagcagcggctccaagcgagggcggtgggctgcacgtacgttcagcaacaagacgctggtgctggatgagaccaccacatccacgggcagtgcaggcatgcgactggtgctgcggcggggcgtgctgcgggacggcgagggatacaccttcacgctcacggtgctgggccgctctggcgaggaggagggctgcgcctccatccgcctgtcccccaaccgcccgccgctggggggctcttgccgcctcttcccactgggcgctgtgcacgccctcaccaccaaggtgcacttcgaatgcacgggctggcatgacgcggaggatgctggcgccccgctggtgtacgccctgctgctgcggcgctgtcgccagggccactgcgaggagttctgtgtctacaagggcagcctctccagctacggagccgtgctgcccccgggtttcaggccacacttcgaggtgggcctggccgtggtggtgcaggaccagctgggagccgctgtggtcgccctcaacaggtctttggccatcaccctcccagagcccaacggcagcgcaacggggctcacagtctggctgcacgggctcaccgctagtgtgctcccagggctgctgcggcaggccgatccccagcacgtcatcgagtactcgttggccctggtcaccgtgctgaacgagtacgagcgggccctggacgtggcggcagagcccaagcacgagcggcagcaccgagcccagatacgcaagaacatcacggagactctggtgtccctgagggtccacactgtggatgacatccagcagatcgctgctgcgctggcccagtgcatggggcccagcagggagctcgtatgccgctcgtgcctgaagcagacgctgcacaagctggaggccatgatgctcatcctgcaggcagagaccaccgcgggcaccgtgacgcccaccgccatcggagacagcatcctcaacatcacaggagacctcatccacctggccagctcggacgtgcgggcaccacagccctcagagctgggagccgagtcaccatctcggatggtggcgtcccaggcctacaacctgacctctgccctcatgcgcatcctcatgcgctcccgcgtgctcaacgaggagcccctgacgctggcgggcgaggagatcgtggcccagggcaagcgctcggacccgcggagcctgctgtgctatggcggcgccccagggcctggctgccacttctccatccccgaggctttcagcggggccctggccaacctcagtgacgtggtgcagctcatctttctggtggactccaatccctttccctttggctatatcagcaactacaccgtctccaccaaggtggcctcgatggcattccagacacaggccggcgcccagatccccatcgagcggctggcctcagagcgcgccatcaccgtgaaggtgcccaacaactcggactgggctgcccggggccaccgcagctccgccaactccgccaactccgttgtggtccagccccaggcctccgtcggtgctgtggtcaccctggacagcagcaaccctgcggccgggctgcatctgcagctcaactatacgctgctggacggccactacctgtctgaggaacctgagccctacctggcagtctacctacactcggagccccggcccaatgagcacaactgctcggctagcaggaggatccgcccagagtcactccagggtgctgaccaccggccctacaccttcttcatttccccggggagcagagacccagcggggagttaccatctgaacctctccagccacttccgctggtcggcgctgcaggtgtccgtgggcctgtacacgtccctgtgccagtacttcagcgaggaggacatggtgtggcggacagaggggctgctgcccctggaggagacctcgccccgccaggccgtctgcctcacccgccacctcaccgccttcggcgccagcctcttcgtgcccccaagccatgtccgctttgtgtttcctgagccgacagcggatgtaaactacatcgtcatgctgacatgtgctgtgtgcctggtgacctacatggtcatggccgccatcctgcacaagctggaccagttggatgccagccggggccgcgccatccctttctgtgggcagcggggccgcttcaagtacgagatcctcgtcaagacaggctggggccggggctcaggtaccacggcccacgtgggcatcatgctgtatggggtggacagccggagcggccaccggcacctggacggcgacagagccttccaccgcaacagcctggacatcttccggatcgccaccccgcacagcctgggtagcgtgtggaagatccgagtgtggcacgacaacaaagggctcagccctgcctggttcctgcagcacgtcatcgtcagggacctgcagacggcacgcagcgccttcttcctggtcaatgactggctttcggtggagacggaggccaacgggggcctggtggagaaggaggtgctggccgcgagcgacgcagcccttttgcgcttccggcgcctgctggtggctgagctgcagcgtggcttctttgacaagcacatctggctctccatatgggaccggccgcctcgtagccgtttcactcgcatccagagggccacctgctgcgttctcctcatctgcctcttcctgggcgccaacgccgtgtggtacggggctgttggcgactctgcctacagcacggggcatgtgtccaggctgagcccgctgagcgtcgacacagtcgctgttggcctggtgtccagcgtggttgtctatcccgtctacctggccatcctttttctcttccggatgtcccggagcaaggtggctgggagcccgagccccacacctgccgggcagcaggtgctggacatcgacagctgcctggactcgtccgtgctggacagctccttcctcacgttctcaggcctccacgctgagcaggcctttgttggacagatgaagagtgacttgtttctggatgattctaagagtctggtgtgctggccctccggcgagggaacgctcagttggccggacctgctcagtgacccgtccattgtgggtagcaatctgcggcagctggcacggggccaggcgggccatgggctgggcccagaggaggacggcttctccctggccagcccctactcgcctgccaaatccttctcagcatcagatgaagacctgatccagcaggtccttgccgagggggtcagcagcccagcccctacccaagacacccacatggaaacggacctgctcagcagcctgtccagcactcctggggagaagacagagacgctggcgctgcagaggctgggggagctggggccacccagcccaggcctgaactgggaacagccccaggcagcgaggctgtccaggacaggactggtggagggtctgcggaagcgcctgctgccggcctggtgtgcctccctggcccacgggctcagcctgctcctggtggctgtggctgtggctgtctcagggtgggtgggtgcgagcttccccccgggcgtgagtgttgcgtggctcctgtccagcagcgccagcttcctggcctcattcctcggctgggagccactgaaggtcttgctggaagccctgtacttctcactggtggccaagcggctgcacccggatgaagatgacaccctggtagagagcccggctgtgacgcctgtgagcgcacgtgtgccccgcgtacggccaccccacggctttgcactcttcctggccaaggaagaagcccgcaaggtcaagaggctacatggcatgctgcggagcctcctggtgtacatgctttttctgctggtgaccctgctggccagctatggggatgcctcatgccatgggcacgcctaccgtctgcaaagcgccatcaagcaggagctgcacagccgggccttcctggccatcacgcggtctgaggagctctggccatggatggcccacgtgctgctgccctacgtccacgggaaccagtccagcccagagctggggcccccacggctgcggcaggtgcggctgcaggaagcactctacccagaccctcccggccccagggtccacacgtgctcggccgcaggaggcttcagcaccagcgattacgacgttggctgggagagtcctcacaatggctcggggacgtgggcctattcagcgccggatctgctgggggcatggtcctggggctcctgtgccgtgtatgacagcgggggctacgtgcaggagctgggcctgagcctggaggagagccgcgaccggctgcgcttcctgcagctgcacaactggctggacaacaggagccgcgctgtgttcctggagctcacgcgctacagcccggccgtggggctgcacgccgccgtcacgctgcgcctcgagttcccggcggccggccgcgccctggccgccctcagcgtccgcccctttgcgctgcgccgcctcagcgcgggcctctcgctgcctctgctcacctcggtgtgcctgctgctgttcgccgtgcacttcgccgtggccgaggcccgtacttggcacagggaagggcgctggcgcgtgctgcggctcggagcctgggcgcggtggctgctggtggcgctgacggcggccacggcactggtacgcctcgcccagctgggtgccgctgaccgccagtggacccgtttcgtgcgcggccgcccgcgccgcttcactagcttcgaccaggtggcgcagctgagctccgcagcccgtggcctggcggcctcgctgctcttcctgcttttggtcaaggctgcccagcagctacgcttcgtgcgccagtggtccgtctttggcaagacattatgccgagctctgccagagctcctgggggtcaccttgggcctggtggtgctcggggtagcctacgcccagctggccatcctgctcgtgtcttcctgtgtggactccctctggagcgtggcccaggccctgttggtgctgtgccctgggactgggctctctaccctgtgtcctgccgagtcctggcacctgtcacccctgctgtgtgtggggctctgggcactgcggctgtggggcgccctacggctgggggctgttattctccgctggcgctaccacgccttgcgtggagagctgtaccggccggcctgggagccccaggactacgagatggtggagttgttcctgcgcaggctgcgcctctggatgggcctcagcaaggtcaaggagttccgccacaaagtccgctttgaagggatggagccgctgccctctcgctcctccaggggctccaaggtatccccggatgtgcccccacccagcgctggctccgatgcctcgcacccctccacctcctccagccagctggatgggctgagcgtgagcctgggccggctggggacaaggtgtgagcctgagccctcccgcctccaagccgtgttcgaggccctgctcacccagtttgaccgactcaaccaggccacagaggacgtctaccagctggagcagcagctgcacagcctgcaaggccgcaggagcagccgggcgcccgccggatcttcccgtggcccatccccgggcctgcggccagcactgcccagccgccttgcccgggccagtcggggtgtggacctggccactggccccagcaggacaccccttcgggccaagaacaaggtccaccccagcagcacttagtcctccttcctggcgggggtgggccgtggagtcggagtggacaccgctcagtattactttctgccgctgtcaaggccgagggccaggcagaatggctgcacgtaggttccccagagagcaggcaggggcatctgtctgtctgtgggcttcagcactttaaagaggctgtgtggccaaccaggacccagggtcccctccccagctcccttgggaaggacacagcagtattggacggtttctagcctctgagatgctaatttatttccccgagtcctcaggtacagcgggctgtgcccggccccaccccctgggcagatgtcccccactgctaaggctgctggcttcagggagggttagcctgcaccgccgccaccctgcccctaagttattacctctccagttcctaccgtactccctgcaccgtctcactgtgtgtctcgtgtcagtaatttatatggtgttaaaatgtgtatatttttgtatgtcactattttcactagggctgaggggcctgcgcccagagctggcctcccccaacacctgctgcgcttggtaggtgtggtggcgttatggcagcccggctgctgcttggatgcgagcttggccttgggccggtgctgggggcacagctgtctgccaggcactctcatcaccccagaggccttgtcatcctcccttgccccaggccaggtagcaagagagcagcgcccaggcctgctggcatcaggtctgggcaagtagcaggactaggcatgtcagaggaccccagggtggttagaggaaaagactcctcctgggggctggctcccagggtggaggaaggtgactgtgtgtgtgtgtgtgtgcgcgcgcgcacgcgcgagtgtgctgtatggcccaggcagcctcaaggccctcggagctggctgtgcctgcttctgtgtaccacttctgtgggcatggccgcttctagagcctcgacacccccccaacccccgcaccaagcagacaaagtcaataaaagagctgtctgactgc

SEQ ID NO: 23774 - DNA, 12912 bp, Artificial Sequence
  derived and/or modified sequence
atgccaccggctgcacctgcgaggctcgcccttgccctaggcctaggcttgtggttaggcgctttggccggaggccctggaaggggatgtggcccttgcgagcctccttgcctgtgcggcccagccccaggcgctgcctgtcgtgtcaactgcagtggaagaggcctgagaacactggggcctgctcttcgcattcctgccgacgctactgcactcgacgtgtcacacaacttgcttagagccctcgatgtaggattactggcgaacttgtcggctctggctgaactggatatttctaacaataaaatcagtacactggaggagggaatcttcgccaatctgtttaatctttcagaaataaacctctcaggaaatccttttgaatgcgattgcgggctggcttggctgccacgctgggctgaggagcagcaagtacgagtggtccagcccgaggccgctacctgcgccggacccggtagtttggccggacagccgcttttgggaatccccttactcgattccgggtgcggcgaggagtacgtcgcctgtctgccggacaacagttcaggcacagttgccgcagtgagcttctcggcggctcacgaagggctgctccagcccgaggcttgctctgcattttgtttcagtactggccaggggctggcggctctctccgagcagggctggtgcctgtgtggcgcagcacagccttcctccgcttctttcgcctgtctctcactgtgttcaggcccaccaccgccacctgcccctacatgtagaggacctactctcctccagcacgtgttcccagccagcccaggggctaccctggttgggcctcatggcccactggcctccgggcaactggctgcctttcacattgcagcccctctgcccgtcaccgccactcgctgggattttggcgatggatctgctgaggtggacgcggcagggcctgccgcttctcatcgctacgtgctgcctgggagatatcatgtaacggcagtgttggctctaggcgcagggtctgcgctgcttggcaccgatgtccaggtcgaggcggctccagcagcactggaactggtttgtccatccagcgttcagtccgacgagtcattagacctttccatccagaacagaggcggatctgggctagaagcagcttacagtatcgtggccctgggcgaagagcctgctagggctgtgcaccccctatgcccctccgacactgagatctttcccggaaatggccattgttaccggcttgtagtggagaaagccgcatggctccaggcccaggagcaatgtcaggcctgggccggagctgctctagctatggtggatagcccagctgtgcagcgcttccttgtttcacgtgttaccagatcattagatgtgtggattgggttctccactgtccagggggtagaggtgggccctgctccgcagggagaggcattttctctcgagagctgccagaattggctgccgggagagcctcacccagcgacggcggaacactgcgtgagactgggcccaacaggatggtgtaacaccgacttgtgctcagcaccacattcctatgtgtgcgaactgcagccagggggtcccgttcaggatgcggagaacttgctggtaggagccccaagcggagacctgcaggggccactcactcctctagcccaacaggacggactgtctgcacctcatgaacccgtggaagttatggtattccccggactcagactcagccgtgaggcatttctcacgaccgcggaatttggcacacaggagcttagacgacctgcgcagttgaggctccaagtgtatcgtttactgagtaccgcaggcacccccgagaatgggtcagagcccgagtcgcggagcccagataatcgcacacaactcgcccctgcttgcatgcctggcggacgatggtgcccaggcgcaaatatctgcttgcctctagatgccagctgccatccccaggcttgcgctaatggctgtacatcagggcctggactgccaggagccccatacgctctgtggcgggagtttctgttctcagtgcccgctgggcctccagcccaatattcagtgactcttcacggtcaggatgtactaatgcttcctggggacctggtaggactccagcacgacgctggccctggcgctctgcttcactgttcccctgccccaggccatcctggtccacgcgctccctatctgtctgcgaacgcctcatcatggctgccccacctccccgcacagcttgaagggacttgggcctgtccggcatgtgcccttcggctcctcgctgccactgaacagttgacggtgctgctcggactgcggccaaaccctggactgcgactacccggacgctatgaagtccgagccgaagtcgggaacggggtctcccgtcataacctgtcttgtagcttcgatgtggtttctccagttgctggcctacgggtcatataccccgctcctcgcgacggaagattatacgtgcccaccaatgggtccgccctggtgttgcaggtggactctggagccaacgcaacggcgacagcccgatggcctggaggctcggtctctgccagattcgagaacgtctgtcctgcccttgtcgcaacttttgtccctgggtgcccgtgggagaccaacgacacactgttcagtgttgtggccctcccgtggctaagcgagggcgagcatgtggttgacgtggtggtggagaacagcgcaagtagggctaacctgtctctcagagtcactgctgaggagccaatctgtggattgagagcgaccccctccccagaggcacgagtgcttcagggcgtgttggttaggtatagccctgttgtggaagccggatcagatatggtgttccggtggacaatcaacgacaaacaatccctgacatttcagaatgtagtgtttaatgtcatttaccagtcagctgcagttttcaagctgtctttaacagctagcaaccatgtgagtaatgtcacagtgaactacaatgtgaccgtagaacgtatgaataggatgcagggcttgcaggtgagtactgtgccagcagtcttgagtccaaatgccactctggccctgacagcgggtgtgctggtggactctgccgtggaggtcgccttcctatggacgttcggtgatggcgagcaagcccttcaccaatttcagcctccatacaacgaatctttcccagtccctgatccctccgtagctcaagtcctagtggaacacaacgtcatgcatacgtatgccgcaccgggagaatatctattgacagtgctcgccagtaacgcctttgaaaatctgacccagcaggtgcctgtctccgtccgcgcatccttgccaagtgttgccgtcggcgtaagtgatggagtactagtcgcaggccgtccagtaactttttacccacatccgctgccctctcccggaggagtgctttatacatgggacttcggtgacggctctcctgtcctgacacagagccagcctgctgctaatcatacgtatgcgtccaggggaacgtaccatgtccggttggaagtgaacaataccgtgtctggtgctgcggcacaggctgatgtacgggttttcgaggaattgagaggcctgagcgtcgacatgtccctggcagtcgaacaaggagcgcctgtggtcgttagcgccgctgtccagaccggagacaacatcacttggacattcgacatgggcgatgggactgttttatccggtccagaggcaaccgtcgagcacgtctatctccgtgcccagaactgtactgtgacagtgggcgcagcgtcccctgcgggtcatctcgcgaggtctttgcatgtgcttgtattcgttcttgaagtattgcgcgtggaacccgctgcttgcattcccacacagccggacgcaagactaaccgcttatgtcacaggaaaccccgcacattatctgtttgactggactttcggagacggttctagtaacacaaccgtgcgtgggtgccccactgtgacccacaatttcacccgctccgggaccttcccactcgctttggtcctgtctagccgagtgaaccgtgcccactattttacctcaatctgcgtggagcctgaagtgggcaatgtcactctccagcccgaaagacaattcgtgcagctgggcgacgaagcttggctggtcgcctgcgcctggccaccattcccatatagatatacctgggatttcgggacagaggaggctgctccgactcgtgcgaggggtcctgaggtcactttcatctacagggaccccggatcgtacctcgtgaccgtcaccgcatctaataacattagcgccgcaaacgatagcgccctcgtcgaggtccaggaaccggttctcgtgacctctataaaagtcaacggctcccttggtttggagctgcagcagccttatcttttttcagcagtcggcaggggtcggcctgcctcctatctctgggacctcggcgatggaggctggttggagggaccagaggtgacccatgcctataattccactggtgacttcaccgtgagggtggctggatggaatgaggtaagtaggagcgaagcctggctgaacgtcacagtaaaaagaagagttcgcggtctggtggtgaatgccagccgaactgtggtgcctctgaacgggagcgtctcattcagtacctctctcgaggccggttctgatgtgcgatattcctgggtgctgtgtgacaggtgcacacccatccccggtggaccaactatttcttacacttttcggagtgtcggtacatttaatatcatcgtgactgccgagaatgaggtgggaagcgcacaagactccatatttgtctacgtacttcagctgatagaggggcttcaggtggtgggcggtggaagatactttcccacgaaccatacggtccagcttcaggcggtcgtccgcgatggaacaaacgtgtcttattcgtggaccgcttggcgagaccggggacctgctctggctggctcaggcaagggattcagtctgaccgtgttggaggctggcacctatcatgtgcagctcagagccacaaacatgctcggcagtgcttgggccgactgtactatggactttgtggagcctgtggggtggctcatggttgctgcctcacctaatccagccgcagtgaatacatctgttacgttaagtgccgaactggcgggaggctctggtgtcgtgtacacgtggagccttgaagagggtctgtcatgggaaaccagcgagcccttcacaacacatagctttcctactccaggactacacttggtcactatgacagctggcaatccacttggaagcgctaacgccaccgtcgaggtggatgtgcaggttcccgtctccgggctttctatcagggcctcggagcctgggggaagcttcgtggctgccggttcatctgtaccattctggggtcaactcgctacggggaccaacgtctcttggtgctgggctgtgccaggcggttcaagtaagcggggtccgcatgtgacgatggtgttcccagatgcgggtaccttcagtattagactgaacgccagcaacgcagtgtcatgggttagtgctacttataatctgactgctgaagagcccattgtagggctggtgctatgggcttcttctaaggtcgttgctcctggccaactcgtccacttccagattctgcttgcagcaggatccgcggtgacattcagactccaggtgggcggtgccaaccccgaagtgctgcctgggccaaggttctcccactcattcccccgtgtgggtgatcacgtggtgtccgtccgcggaaagaatcacgtgtcctgggcccaggctcaggtgcggattgtcgtgttggaagctgtttctggtcttcaggtccctaactgctgtgagcccggaattgccacggggactgagcggaatttcacggcacgagtacaaagggggtcccgtgttgcctatgcgtggtacttctctcttcagaaagtgcaaggtgactccctagtcatcctgtcaggtagagacgtgacatataccccggtcgccgctgggctgctggagattcaagtccgcgcttttaatgcgctggggtctgagaatcgaacgctcgtgcttgaagtccaggacgcagtgcagtatgtggcactacagtccggaccctgtttcacgaatagatccgcacagttcgaagcagccactagcccatccccacggagagtcgcctatcactgggacttcggcgatgggtccccaggccaggacacggatgaacccagggccgagcacagttacctccgcccaggcgattatagggtgcaggtgaacgcttcgaacctggtgtcttttttcgtggcgcaagcgacggtgactgtgcaggttttagcttgcagagaacccgaggtggatgttgtcctccccctccaggtgttgatgagaagatcacagcggaattatcttgaggcacacgtggatctcagggattgtgtgacttaccagaccgagtaccggtgggaggtctacaggacggcttcctgccagcgccctggacgaccagccagggtcgctttgcctggggtggatgtctcaagacctagattagtcttgcccagattggcccttccggtgggccattactgcttcgtatttgttgtgtccttcggagatacaccgctaacacagtctattcaagccaacgtgactgtggctcccgaacgcctggttcctattatagaagggggtagctatagagtatggagcgatacacgcgacctggtgttagacggatccgagagctatgaccccaatcttgaggacggtgaccagaccccccttagctttcattgggcttgtgtggccagcacccagagagaggcaggtggatgcgccctgaacttcggacccagaggcagtagcacggtcactattcctcgcgagagactggcagccggtgtggagtacacattttcactcacagtgtggaaggccggaaggaaagaggaagctacaaaccagaccgttctcattcgatctggtagggtgcctatcgtgagtctggaatgcgtgtcatgtaaagctcaggccgtctatgaagtcagcagatcttcatatgtgtatcttgaaggtcggtgcctgaattgctctagtggcagcaagcgaggcaggtgggctgcaagaacattctcaaacaagacactggtccttgacgaaaccacgacatccacaggtagcgccggtatgcgcttagtgttgcgcagaggagtgttgcgtgatggtgaaggctacacgttcaccctgaccgtgctgggccgttccggcgaagaggagggctgcgcttccatcagattaagcccaaatcgcccacccctcgggggatcttgcagactttttcccctcggcgcagttcatgctctgaccacaaaagtgcactttgaatgtacgggatggcatgatgccgaagatgctggggcacctttggtctatgctctgttgcttcggaggtgtagacagggccactgcgaggagttctgtgtgtataaaggatcacttagttcatacggagcggtgcttcctccaggcttccgccctcattttgaagtggggctggccgtggtggtgcaggaccaactaggcgcagcagttgtggcactgaaccgcagcttagccatcactctcccggaacccaatgggtcagccacggggttaacggtgtggctgcatgggctcacagcgtctgttctccctggactgctgcggcaggccgacccccagcacgttattgagtactctctcgctttggtgaccgtcctcaacgagtatgagcgcgcactggacgtcgccgcagagcctaagcatgaacgccagcatagggcacagatacgcaagaatatcacagagacactggtgtctctccgggtacacaccgtggatgatatccagcaaattgccgcagctctggcacaatgcatgggtcccagcagagaattagtgtgtaggtcttgcttgaagcagactttacacaagcttgaggccatgatgttgatactgcaggccgaaactaccgctgggaccgtgacacctaccgctatcggcgactccattttgaatatcaccggtgatctaattcacttagcctcttccgatgtacgggcacctcaaccatctgagctgggcgcagagagcccgtctcgcatggtggcctcccaggcatacaacctgacctccgctctgatgcgcatcttgatgagaagcagagtgctcaacgaagaaccgctgaccctggcaggggaggaaattgttgcccagggtaagaggtccgatccgagaagcctactgtgttacggtggcgctcctggccctggctgtcattttagcatacccgaggcctttagtggggctcttgccaatctgtctgacgttgttcagctaattttcctagtggatagtaacccctttcctttcggatacataagtaattacacagtgtctactaaagtcgcttccatggccttccaaacacaggctggggctcagattcctatcgaaaggctggcttctgagagagctattacagtgaaggttcccaataacagcgactgggccgcacgcggacacagatcatctgcaaacagcgctaacagcgtcgtggtgcagccccaggcatccgtgggagccgttgtaacacttgattcatcaaatcctgctgctggcctgcacctccaattgaattacaccttgcttgacggtcattatctctcggaggaacccgaaccctacctggcagtttacctgcatagcgagccaagacccaacgagcacaattgttccgcaagcaggcgcatcaggccggagtccttgcagggcgcagatcatcggccatataccttctttataagtcccggatcccgggatcccgctggctcctatcacttaaacctgtccagtcactttagatggtctgctcttcaggtgagcgtcggactgtacacctcgctgtgtcagtatttttctgaagaggacatggtctggcgcacagagggtcttttgcccctggaagagacatcccccagacaggcagtgtgtctgactcgccatctgaccgctttcggcgctagcctgttcgtgccaccttctcatgtgcgcttcgtcttccccgagcccaccgccgacgttaactatatcgtgatgctcacctgtgctgtctgcctggttacctacatggtgatggcggcaatactgcataagctggaccagctcgacgcttcaaggggacgggctatccccttctgtggccagcgagggcgatttaagtacgagattcttgtgaaaacaggctgggggcgaggatccggtacaaccgcacacgtgggtattatgctgtacggagttgatagccgtagtggtcatcggcatttagatggggaccgcgctttccaccggaatagcctcgatatcttcaggattgctactcctcactccctgggttccgtttggaagatccgcgtctggcatgacaacaaggggctgagcccagcatggttcctgcagcacgttatcgtcagggacttacaaactgcccgaagcgcctttttcttggtgaatgactggctttctgtcgagacagaagccaacggcggactggtggaaaaggaggtgttggccgcaagtgatgccgcactcctccgcttccgccgtttgctcgtggccgaactgcagcggggattttttgataaacacatctggctctccatctgggaccgcccacccaggagccgattcacccggatacagagagccacatgctgcgtgcttctgatctgtctgtttctgggagccaacgcggtatggtacggcgctgtaggcgactctgcgtacagcacaggccatgtttcacggctatcccctctaagcgtggatactgttgccgttggcctggtgagctctgtggtggtttacccggtgtaccttgctatcctgttcctattcagaatgtcaaggtctaaagtagcagggtccccgtcgcccacgcccgcagggcaacaggtcctggacatcgacagctgtttggattcctccgttctggacagtagttttcttacattctccgggctgcatgccgaacaggccttcgttggccagatgaaatcagatttattcttggatgattctaagagccttgtgtgctggcccagtggggaaggcacactcagctggcccgacctcttgtcagatccctccatcgtgggtagcaatcttcgccagctggctaggggccaagcaggtcatggtttgggtccagaggaggacggtttttctttggcaagcccgtatagccccgctaagtctttctccgcctctgacgaagatcttatccaacaggtgctcgccgagggggtgtcaagccccgcacctacacaggatactcatatggaaaccgacctgctttcatcgttgtcctctacacccggagaaaagaccgagacgctggccctccagcggctaggcgagttaggtccccctagtcccggtttgaactgggagcagccccaggcggcaaggctatcccgcactggcttggttgaggggctacggaaacggctgttacccgcatggtgtgcttccttagcacatggcttaagtttgctgctagtggccgttgcagtagccgtgagcggctgggttggggcaagcttccctccgggagtaagcgtagcttggctgctgagctccagtgcttccttcctcgccagcttcctaggatgggagcccctgaaagtactgctggaagcactttactttagcctcgtggctaagcggctgcaccccgatgaagatgataccctggtcgaaagtccggctgtaacacctgtaagcgctcgagtgcccagagttcgacctccacatggcttcgccctttttctggctaaagaggaggctcgtaaagtgaagcggttacatgggatgctgcgatcacttctggtgtatatgttgttcctgctggtcacattgttagcctcctacggagatgctagttgtcatgggcacgcgtataggttgcaatcagccatcaaacaggaactgcattcacgagccttcctggctataactcgatctgaagaactgtggccatggatggcccacgtcctgctgccctatgtgcatgggaaccagagttcccctgagcttgggcctccccgacttcgacaggtaaggctgcaggaggctttgtatcctgacccaccagggcctagagtccacacctgtagcgctgctggaggattctccacaagtgactacgacgtggggtgggagagcccacataatggttccggcacttgggcttacagcgccccagatctgctgggcgcatggtcctggggtagttgcgctgtgtacgactccggtggatacgttcaagaactggggctcagcctcgaagaaagcagagacagactgcgtttcctccaactgcataactggctcgataatagatccagagccgtgttcctcgagctgactcgatactccccggctgtcggtcttcatgcggcagtgactctccgcctcgaatttccagccgctgggagggcactggctgccctttccgtccgccctttcgctctgcggaggctgagtgcaggcctgtccctgcctctgttgacttctgtctgtctgcttctgtttgctgttcactttgcagtggctgaggccagaacttggcaccgtgaagggcgatggcgagtgctcaggctcggtgcctgggccaggtggctactggtcgcacttaccgcggctaccgcccttgtacgtcttgcacagctcggtgctgctgaccgccaatggactcgcttcgtgcggggtcgccctcggcgatttacatcctttgaccaggttgctcaactctcttcagcggctagaggcttggcggcaagcctgctgtttcttctgttagtcaaggccgctcaacaactgcgattcgtgcggcaatggtctgtgtttggtaagacgctatgcagggctctccccgaattgctgggcgttaccctagggctggtggtgcttggcgtcgcatacgcccaactcgctatcttactcgtgtcttcctgcgtagattctctctggtcggttgcccaggctctattggtgctgtgtcccggaacaggtctgagcaccctttgtccggctgagtcatggcatcttagccctctcctttgcgtgggtctatgggcgttaagactgtggggcgcactgaggctgggcgcagtgatactgaggtggcgttatcatgctctcaggggtgagctgtaccgaccagcgtgggagccccaggattacgagatggttgagctatttctgagacgtctgcgcctatggatgggcctaagcaaagttaaagaattccggcacaaggtaaggttcgaaggaatggagcctttgccgtctaggtcctcccgcggatcaaaagtgtcaccagatgtgccacctccctctgctggcagcgatgcaagtcatccaagcacatcttcctcccagctagacggactgtcggtctctctcggcaggttaggtacccgctgcgagcctgaaccctcacgcttgcaggccgtgtttgaggccctcttgactcagttcgaccggctgaaccaggctacagaggatgtgtaccagttggaacagcagctccactcactccaagggagaagaagcagccgagctcctgccggtagctctcggggaccgtcaccagggttacggccagctttgccctctagactggctagggcctcccggggagttgacttagccaccgggccatcaagaaccccccttagagccaagaataaagtgcatccttctagtacctat

SEQ ID NO: 23775 - DNA, 12912 bp, Artificial Sequence
  derived and/or modified sequence
atgccccccgccgcccccgccagactggccctggccctgggcctgggcctgtggctgggcgccctggccggcggccccggcagaggctgcggcccctgcgagcccccctgcctgtgcggccccgcccccggcgccgcctgcagagtgaactgcagcggcagaggcctgagaaccctgggccccgccctgagaatccccgccgacgccaccgccctggacgtgagccacaacctgctgagagccctggacgtgggcctgctggccaacctgagcgccctggccgagctggacatcagcaacaacaagatcagcaccctggaggagggcatcttcgccaacctgttcaacctgagcgagatcaacctgagcggcaaccccttcgagtgcgactgcggcctggcctggctgcccagatgggccgaggagcagcaggtgagagtggtgcagcccgaggccgccacctgcgccggccccggcagcctggccggccagcccctgctgggcatccccctgctggacagcggctgcggcgaggagtacgtggcctgcctgcccgacaacagcagcggcaccgtggccgccgtgagcttcagcgccgcccacgagggcctgctgcagcccgaggcctgcagcgccttctgcttcagcaccggccagggcctggccgccctgagcgagcagggctggtgcctgtgcggcgccgcccagcccagcagcgccagcttcgcctgcctgagcctgtgcagcggccccccccccccccccgcccccacctgcagaggccccaccctgctgcagcacgtgttccccgccagccccggcgccaccctggtgggcccccacggccccctggccagcggccagctggccgccttccacatcgccgcccccctgcccgtgaccgccaccagatgggacttcggcgacggcagcgccgaggtggacgccgccggccccgccgccagccacagatacgtgctgcccggcagataccacgtgaccgccgtgctggccctgggcgccggcagcgccctgctgggcaccgacgtgcaggtggaggccgcccccgccgccctggagctggtgtgccccagcagcgtgcagagcgacgagagcctggacctgagcatccagaacagaggcggcagcggcctggaggccgcctacagcatcgtggccctgggcgaggagcccgccagagccgtgcaccccctgtgccccagcgacaccgagatcttccccggcaacggccactgctacagactggtggtggagaaggccgcctggctgcaggcccaggagcagtgccaggcctgggccggcgccgccctggccatggtggacagccccgccgtgcagagattcctggtgagcagagtgaccagaagcctggacgtgtggatcggcttcagcaccgtgcagggcgtggaggtgggccccgccccccagggcgaggccttcagcctggagagctgccagaactggctgcccggcgagccccaccccgccaccgccgagcactgcgtgagactgggccccaccggctggtgcaacaccgacctgtgcagcgccccccacagctacgtgtgcgagctgcagcccggcggccccgtgcaggacgccgagaacctgctggtgggcgcccccagcggcgacctgcagggccccctgacccccctggcccagcaggacggcctgagcgccccccacgagcccgtggaggtgatggtgttccccggcctgagactgagcagagaggccttcctgaccaccgccgagttcggcacccaggagctgagaagacccgcccagctgagactgcaggtgtacagactgctgagcaccgccggcacccccgagaacggcagcgagcccgagagcagaagccccgacaacagaacccagctggcccccgcctgcatgcccggcggcagatggtgccccggcgccaacatctgcctgcccctggacgccagctgccacccccaggcctgcgccaacggctgcaccagcggccccggcctgcccggcgccccctacgccctgtggagagagttcctgttcagcgtgcccgccggcccccccgcccagtacagcgtgaccctgcacggccaggacgtgctgatgctgcccggcgacctggtgggcctgcagcacgacgccggccccggcgccctgctgcactgcagccccgcccccggccaccccggccccagagccccctacctgagcgccaacgccagcagctggctgccccacctgcccgcccagctggagggcacctgggcctgccccgcctgcgccctgagactgctggccgccaccgagcagctgaccgtgctgctgggcctgagacccaaccccggcctgagactgcccggcagatacgaggtgagagccgaggtgggcaacggcgtgagcagacacaacctgagctgcagcttcgacgtggtgagccccgtggccggcctgagagtgatctaccccgcccccagagacggcagactgtacgtgcccaccaacggcagcgccctggtgctgcaggtggacagcggcgccaacgccaccgccaccgccagatggcccggcggcagcgtgagcgccagattcgagaacgtgtgccccgccctggtggccaccttcgtgcccggctgcccctgggagaccaacgacaccctgttcagcgtggtggccctgccctggctgagcgagggcgagcacgtggtggacgtggtggtggagaacagcgccagcagagccaacctgagcctgagagtgaccgccgaggagcccatctgcggcctgagagccacccccagccccgaggccagagtgctgcagggcgtgctggtgagatacagccccgtggtggaggccggcagcgacatggtgttcagatggaccatcaacgacaagcagagcctgaccttccagaacgtggtgttcaacgtgatctaccagagcgccgccgtgttcaagctgagcctgaccgccagcaaccacgtgagcaacgtgaccgtgaactacaacgtgaccgtggagagaatgaacagaatgcagggcctgcaggtgagcaccgtgcccgccgtgctgagccccaacgccaccctggccctgaccgccggcgtgctggtggacagcgccgtggaggtggccttcctgtggaccttcggcgacggcgagcaggccctgcaccagttccagcccccctacaacgagagcttccccgtgcccgaccccagcgtggcccaggtgctggtggagcacaacgtgatgcacacctacgccgcccccggcgagtacctgctgaccgtgctggccagcaacgccttcgagaacctgacccagcaggtgcccgtgagcgtgagagccagcctgcccagcgtggccgtgggcgtgagcgacggcgtgctggtggccggcagacccgtgaccttctacccccaccccctgcccagccccggcggcgtgctgtacacctgggacttcggcgacggcagccccgtgctgacccagagccagcccgccgccaaccacacctacgccagcagaggcacctaccacgtgagactggaggtgaacaacaccgtgagcggcgccgccgcccaggccgacgtgagagtgttcgaggagctgagaggcctgagcgtggacatgagcctggccgtggagcagggcgcccccgtggtggtgagcgccgccgtgcagaccggcgacaacatcacctggaccttcgacatgggcgacggcaccgtgctgagcggccccgaggccaccgtggagcacgtgtacctgagagcccagaactgcaccgtgaccgtgggcgccgccagccccgccggccacctggccagaagcctgcacgtgctggtgttcgtgctggaggtgctgagagtggagcccgccgcctgcatccccacccagcccgacgccagactgaccgcctacgtgaccggcaaccccgcccactacctgttcgactggaccttcggcgacggcagcagcaacaccaccgtgagaggctgccccaccgtgacccacaacttcaccagaagcggcaccttccccctggccctggtgctgagcagcagagtgaacagagcccactacttcaccagcatctgcgtggagcccgaggtgggcaacgtgaccctgcagcccgagagacagttcgtgcagctgggcgacgaggcctggctggtggcctgcgcctggccccccttcccctacagatacacctgggacttcggcaccgaggaggccgcccccaccagagccagaggccccgaggtgaccttcatctacagagaccccggcagctacctggtgaccgtgaccgccagcaacaacatcagcgccgccaacgacagcgccctggtggaggtgcaggagcccgtgctggtgaccagcatcaaggtgaacggcagcctgggcctggagctgcagcagccctacctgttcagcgccgtgggcagaggcagacccgccagctacctgtgggacctgggcgacggcggctggctggagggccccgaggtgacccacgcctacaacagcaccggcgacttcaccgtgagagtggccggctggaacgaggtgagcagaagcgaggcctggctgaacgtgaccgtgaagagaagagtgagaggcctggtggtgaacgccagcagaaccgtggtgcccctgaacggcagcgtgagcttcagcaccagcctggaggccggcagcgacgtgagatacagctgggtgctgtgcgacagatgcacccccatccccggcggccccaccatcagctacaccttcagaagcgtgggcaccttcaacatcatcgtgaccgccgagaacgaggtgggcagcgcccaggacagcatcttcgtgtacgtgctgcagctgatcgagggcctgcaggtggtgggcggcggcagatacttccccaccaaccacaccgtgcagctgcaggccgtggtgagagacggcaccaacgtgagctacagctggaccgcctggagagacagaggccccgccctggccggcagcggcaagggcttcagcctgaccgtgctggaggccggcacctaccacgtgcagctgagagccaccaacatgctgggcagcgcctgggccgactgcaccatggacttcgtggagcccgtgggctggctgatggtggccgccagccccaaccccgccgccgtgaacaccagcgtgaccctgagcgccgagctggccggcggcagcggcgtggtgtacacctggagcctggaggagggcctgagctgggagaccagcgagcccttcaccacccacagcttccccacccccggcctgcacctggtgaccatgaccgccggcaaccccctgggcagcgccaacgccaccgtggaggtggacgtgcaggtgcccgtgagcggcctgagcatcagagccagcgagcccggcggcagcttcgtggccgccggcagcagcgtgcccttctggggccagctggccaccggcaccaacgtgagctggtgctgggccgtgcccggcggcagcagcaagagaggcccccacgtgaccatggtgttccccgacgccggcaccttcagcatcagactgaacgccagcaacgccgtgagctgggtgagcgccacctacaacctgaccgccgaggagcccatcgtgggcctggtgctgtgggccagcagcaaggtggtggcccccggccagctggtgcacttccagatcctgctggccgccggcagcgccgtgaccttcagactgcaggtgggcggcgccaaccccgaggtgctgcccggccccagattcagccacagcttccccagagtgggcgaccacgtggtgagcgtgagaggcaagaaccacgtgagctgggcccaggcccaggtgagaatcgtggtgctggaggccgtgagcggcctgcaggtgcccaactgctgcgagcccggcatcgccaccggcaccgagagaaacttcaccgccagagtgcagagaggcagcagagtggcctacgcctggtacttcagcctgcagaaggtgcagggcgacagcctggtgatcctgagcggcagagacgtgacctacacccccgtggccgccggcctgctggagatccaggtgagagccttcaacgccctgggcagcgagaacagaaccctggtgctggaggtgcaggacgccgtgcagtacgtggccctgcagagcggcccctgcttcaccaacagaagcgcccagttcgaggccgccaccagccccagccccagaagagtggcctaccactgggacttcggcgacggcagccccggccaggacaccgacgagcccagagccgagcacagctacctgagacccggcgactacagagtgcaggtgaacgccagcaacctggtgagcttcttcgtggcccaggccaccgtgaccgtgcaggtgctggcctgcagagagcccgaggtggacgtggtgctgcccctgcaggtgctgatgagaagaagccagagaaactacctggaggcccacgtggacctgagagactgcgtgacctaccagaccgagtacagatgggaggtgtacagaaccgccagctgccagagacccggcagacccgccagagtggccctgcccggcgtggacgtgagcagacccagactggtgctgcccagactggccctgcccgtgggccactactgcttcgtgttcgtggtgagcttcggcgacacccccctgacccagagcatccaggccaacgtgaccgtggcccccgagagactggtgcccatcatcgagggcggcagctacagagtgtggagcgacaccagagacctggtgctggacggcagcgagagctacgaccccaacctggaggacggcgaccagacccccctgagcttccactgggcctgcgtggccagcacccagagagaggccggcggctgcgccctgaacttcggccccagaggcagcagcaccgtgaccatccccagagagagactggccgccggcgtggagtacaccttcagcctgaccgtgtggaaggccggcagaaaggaggaggccaccaaccagaccgtgctgatcagaagcggcagagtgcccatcgtgagcctggagtgcgtgagctgcaaggcccaggccgtgtacgaggtgagcagaagcagctacgtgtacctggagggcagatgcctgaactgcagcagcggcagcaagagaggcagatgggccgccagaaccttcagcaacaagaccctggtgctggacgagaccaccaccagcaccggcagcgccggcatgagactggtgctgagaagaggcgtgctgagagacggcgagggctacaccttcaccctgaccgtgctgggcagaagcggcgaggaggagggctgcgccagcatcagactgagccccaacagaccccccctgggcggcagctgcagactgttccccctgggcgccgtgcacgccctgaccaccaaggtgcacttcgagtgcaccggctggcacgacgccgaggacgccggcgcccccctggtgtacgccctgctgctgagaagatgcagacagggccactgcgaggagttctgcgtgtacaagggcagcctgagcagctacggcgccgtgctgccccccggcttcagaccccacttcgaggtgggcctggccgtggtggtgcaggaccagctgggcgccgccgtggtggccctgaacagaagcctggccatcaccctgcccgagcccaacggcagcgccaccggcctgaccgtgtggctgcacggcctgaccgccagcgtgctgcccggcctgctgagacaggccgacccccagcacgtgatcgagtacagcctggccctggtgaccgtgctgaacgagtacgagagagccctggacgtggccgccgagcccaagcacgagagacagcacagagcccagatcagaaagaacatcaccgagaccctggtgagcctgagagtgcacaccgtggacgacatccagcagatcgccgccgccctggcccagtgcatgggccccagcagagagctggtgtgcagaagctgcctgaagcagaccctgcacaagctggaggccatgatgctgatcctgcaggccgagaccaccgccggcaccgtgacccccaccgccatcggcgacagcatcctgaacatcaccggcgacctgatccacctggccagcagcgacgtgagagccccccagcccagcgagctgggcgccgagagccccagcagaatggtggccagccaggcctacaacctgaccagcgccctgatgagaatcctgatgagaagcagagtgctgaacgaggagcccctgaccctggccggcgaggagatcgtggcccagggcaagagaagcgaccccagaagcctgctgtgctacggcggcgcccccggccccggctgccacttcagcatccccgaggccttcagcggcgccctggccaacctgagcgacgtggtgcagctgatcttcctggtggacagcaaccccttccccttcggctacatcagcaactacaccgtgagcaccaaggtggccagcatggccttccagacccaggccggcgcccagatccccatcgagagactggccagcgagagagccatcaccgtgaaggtgcccaacaacagcgactgggccgccagaggccacagaagcagcgccaacagcgccaacagcgtggtggtgcagccccaggccagcgtgggcgccgtggtgaccctggacagcagcaaccccgccgccggcctgcacctgcagctgaactacaccctgctggacggccactacctgagcgaggagcccgagccctacctggccgtgtacctgcacagcgagcccagacccaacgagcacaactgcagcgccagcagaagaatcagacccgagagcctgcagggcgccgaccacagaccctacaccttcttcatcagccccggcagcagagaccccgccggcagctaccacctgaacctgagcagccacttcagatggagcgccctgcaggtgagcgtgggcctgtacaccagcctgtgccagtacttcagcgaggaggacatggtgtggagaaccgagggcctgctgcccctggaggagaccagccccagacaggccgtgtgcctgaccagacacctgaccgccttcggcgccagcctgttcgtgccccccagccacgtgagattcgtgttccccgagcccaccgccgacgtgaactacatcgtgatgctgacctgcgccgtgtgcctggtgacctacatggtgatggccgccatcctgcacaagctggaccagctggacgccagcagaggcagagccatccccttctgcggccagagaggcagattcaagtacgagatcctggtgaagaccggctggggcagaggcagcggcaccaccgcccacgtgggcatcatgctgtacggcgtggacagcagaagcggccacagacacctggacggcgacagagccttccacagaaacagcctggacatcttcagaatcgccaccccccacagcctgggcagcgtgtggaagatcagagtgtggcacgacaacaagggcctgagccccgcctggttcctgcagcacgtgatcgtgagagacctgcagaccgccagaagcgccttcttcctggtgaacgactggctgagcgtggagaccgaggccaacggcggcctggtggagaaggaggtgctggccgccagcgacgccgccctgctgagattcagaagactgctggtggccgagctgcagagaggcttcttcgacaagcacatctggctgagcatctgggacagaccccccagaagcagattcaccagaatccagagagccacctgctgcgtgctgctgatctgcctgttcctgggcgccaacgccgtgtggtacggcgccgtgggcgacagcgcctacagcaccggccacgtgagcagactgagccccctgagcgtggacaccgtggccgtgggcctggtgagcagcgtggtggtgtaccccgtgtacctggccatcctgttcctgttcagaatgagcagaagcaaggtggccggcagccccagccccacccccgccggccagcaggtgctggacatcgacagctgcctggacagcagcgtgctggacagcagcttcctgaccttcagcggcctgcacgccgagcaggccttcgtgggccagatgaagagcgacctgttcctggacgacagcaagagcctggtgtgctggcccagcggcgagggcaccctgagctggcccgacctgctgagcgaccccagcatcgtgggcagcaacctgagacagctggccagaggccaggccggccacggcctgggccccgaggaggacggcttcagcctggccagcccctacagccccgccaagagcttcagcgccagcgacgaggacctgatccagcaggtgctggccgagggcgtgagcagccccgcccccacccaggacacccacatggagaccgacctgctgagcagcctgagcagcacccccggcgagaagaccgagaccctggccctgcagagactgggcgagctgggcccccccagccccggcctgaactgggagcagccccaggccgccagactgagcagaaccggcctggtggagggcctgagaaagagactgctgcccgcctggtgcgccagcctggcccacggcctgagcctgctgctggtggccgtggccgtggccgtgagcggctgggtgggcgccagcttcccccccggcgtgagcgtggcctggctgctgagcagcagcgccagcttcctggccagcttcctgggctgggagcccctgaaggtgctgctggaggccctgtacttcagcctggtggccaagagactgcaccccgacgaggacgacaccctggtggagagccccgccgtgacccccgtgagcgccagagtgcccagagtgagacccccccacggcttcgccctgttcctggccaaggaggaggccagaaaggtgaagagactgcacggcatgctgagaagcctgctggtgtacatgctgttcctgctggtgaccctgctggccagctacggcgacgccagctgccacggccacgcctacagactgcagagcgccatcaagcaggagctgcacagcagagccttcctggccatcaccagaagcgaggagctgtggccctggatggcccacgtgctgctgccctacgtgcacggcaaccagagcagccccgagctgggcccccccagactgagacaggtgagactgcaggaggccctgtaccccgacccccccggccccagagtgcacacctgcagcgccgccggcggcttcagcaccagcgactacgacgtgggctgggagagcccccacaacggcagcggcacctgggcctacagcgcccccgacctgctgggcgcctggagctggggcagctgcgccgtgtacgacagcggcggctacgtgcaggagctgggcctgagcctggaggagagcagagacagactgagattcctgcagctgcacaactggctggacaacagaagcagagccgtgttcctggagctgaccagatacagccccgccgtgggcctgcacgccgccgtgaccctgagactggagttccccgccgccggcagagccctggccgccctgagcgtgagacccttcgccctgagaagactgagcgccggcctgagcctgcccctgctgaccagcgtgtgcctgctgctgttcgccgtgcacttcgccgtggccgaggccagaacctggcacagagagggcagatggagagtgctgagactgggcgcctgggccagatggctgctggtggccctgaccgccgccaccgccctggtgagactggcccagctgggcgccgccgacagacagtggaccagattcgtgagaggcagacccagaagattcaccagcttcgaccaggtggcccagctgagcagcgccgccagaggcctggccgccagcctgctgttcctgctgctggtgaaggccgcccagcagctgagattcgtgagacagtggagcgtgttcggcaagaccctgtgcagagccctgcccgagctgctgggcgtgaccctgggcctggtggtgctgggcgtggcctacgcccagctggccatcctgctggtgagcagctgcgtggacagcctgtggagcgtggcccaggccctgctggtgctgtgccccggcaccggcctgagcaccctgtgccccgccgagagctggcacctgagccccctgctgtgcgtgggcctgtgggccctgagactgtggggcgccctgagactgggcgccgtgatcctgagatggagataccacgccctgagaggcgagctgtacagacccgcctgggagccccaggactacgagatggtggagctgttcctgagaagactgagactgtggatgggcctgagcaaggtgaaggagttcagacacaaggtgagattcgagggcatggagcccctgcccagcagaagcagcagaggcagcaaggtgagccccgacgtgcccccccccagcgccggcagcgacgccagccaccccagcaccagcagcagccagctggacggcctgagcgtgagcctgggcagactgggcaccagatgcgagcccgagcccagcagactgcaggccgtgttcgaggccctgctgacccagttcgacagactgaaccaggccaccgaggacgtgtaccagctggagcagcagctgcacagcctgcagggcagaagaagcagcagagcccccgccggcagcagcagaggccccagccccggcctgagacccgccctgcccagcagactggccagagccagcagaggcgtggacctggccaccggccccagcagaacccccctgagagccaagaacaaggtgcaccccagcagcacctag

SEQ ID NO: 23776 - protein, 1177 aa, Artificial Sequence
  derived and/or modified sequence
MDVYPPRRQGLPRARSPGGSSRGSPSVSCSRLRQVQSILTQSSKSRPDGILCILGIDSRYNEGCRELANYLLFGLYNQNTSDFEKTGFSEEVLDDVIILIKSDSVHLYCNPVNFRYLLPYVAHWRNLHFHCMTENEYEDEEAAEEFKITSFVDMVRDCSRIGIPYSSQGHLQIFDMFVVEKWPIVQAFALEGIGGDGFFTMKYELQDVSLNLWNVYSKMDPMSLESLLSDDLVAFEHQWTSFFANFDTEIPFLLELSESQAGEPFRSYFSHGMISSHITENSPNRQPFVLFGNHSTRENLNAGNFNFPSEGHLVRSTGPGGSFAKHMVAQCVSPKGPLACSRTYFFGATHVPYLGGDSKLPKKTEQIRLLSQIYAAVIEAVLAGIACYAKTSSLTKAKEVAEQTLGSGLDSFELIPFKAALRSKMTFHIHAVNNQGRIVPLDSEDSLSFVKTACMAVYDIPDLLGGNGCLGSVVFSESFLTSQILVKEKDGTVTTETSSVVLTAAVPRFCSWLVEDNEVKLSEKTQQAVRGDESFLGTYLTGGEGAYLYSSNLQSWPEEGNVHFFSSGLLFSHCRHRSIIISKDHMNSISFYDGDSTSTVAALLIDFKSSLLPHLPVHFHGSSNFLMIALFPKSKIYQAFYSEVFSLWKQQDNSGISLKVIQEDGLSVEQKRLHSSAQKLFSALSQPAGEKRSSLKLLSAKLPELDWFLQHFAISSISQEPVMRTHLPVLLQQAEINTTHRIESDKVIISIVTGLPGCHASELCAFLVTLHKECGRWMVYRQIMDSSECFHAAHFQRYLSSALEAQQNRSARQSAYIRKKTRLLVVLQGYTDVIDVVQALQTHPDSNVKASFTIGAITACVEPMSCYMEHRFLFPKCLDQCSQGLVSNVVFTSHTTEQRHPLLVQLQSLIRAANPAAAFILAENGIVTRNEDIELILSENSFSSPEMLRSRYLMYPGWYEGKLNAGSVYPLMVQICVWFGRPLEKTRFVAKCKAIQSSIKPSPFSGNIYHILGKVKFSDSERTMEVCYNTLANSLSIMPVLEGPTPPPDSKSVSQDSSGQQECYLVFIGCSLKEDSIKDWLRQSAKQKPQRKALKTRGMLTQQEIRSIHVKRHLEPLPAGYFYNGTQFVNFFGDKTDFHPLMDQFMNDYVEEANREIEKYNQELEQQEYHDLFELKP

SEQ ID NO: 23777 - DNA, 3534 bp, Artificial Sequence
  derived and/or modified sequence
atggacgtataccctcctagaaggcaggggcttcctcgggcccgctcccctggcgggtcctcaaggggatccccatctgtttcctgtagcaggctgaggcaggtacagtccattctgacgcaatccagcaaaagtagacctgatggcatcctgtgcattctcggaatcgattccaggtataacgagggatgtcgagagctggctaattatctgctgttcggtctttacaatcagaacacaagtgacttcgagaagactggcttctccgaagaagtgttggatgacgtcattattttgattaagtctgattctgttcatttatactgtaatcctgtcaatttccggtatctgctgccatatgtcgcccactggaggaaccttcacttccattgtatgacagaaaatgaatatgaggacgaagaagccgccgaagagtttaagatcactagcttcgtcgatatggtgcgcgactgctcccgtattggcatcccatacagtagccagggccacctgcaaatctttgatatgtttgttgtggagaaatggcccattgtgcaggcgtttgcccttgagggtatcggcggggacgggtttttcacaatgaaatatgaactgcaggacgtgtcccttaatctttggaacgtgtattccaagatggatcctatgtccctggaatccctactctccgacgatctggtggcttttgaacatcagtggacctctttttttgctaattttgacacggaaatcccctttctgctggagctttccgaatcccaggctggcgagccatttcggtcttacttctcacatggtatgatcagtagtcacattacggaaaattcacccaataggcagccctttgtgttattcggtaatcactccacgcgggaaaacctgaatgcaggcaactttaatttcccttcagaaggccatctggttcgaagcactggcccgggcgggtcttttgctaagcatatggtggctcagtgcgtctctccgaaagggccacttgcttgtagccgcacgtacttttttggggcgacccacgtgccctacctagggggggattcaaaactgcccaagaagacagagcagatcaggctactttctcagatttatgccgctgttattgaagccgtcctcgcaggtattgcctgctacgcaaaaacgtctagcctgacaaaagccaaggaggtcgccgaacagaccctgggatctgggttggacagctttgagttaatcccctttaaagctgcactaaggtcaaagatgacatttcatatccatgccgttaataatcaggggcgaattgtcccactggattccgaggactctctcagcttcgtgaaaaccgcctgtatggctgtctatgacattcccgatctactgggaggaaatgggtgtctcggttcagttgtatttagcgagtccttcctaacctcacagatcctggtcaaggaaaaagacggcacagtcacaacagaaacctcttcagtagtgttaacagccgccgttccgcgattctgtagctggctggtggaggacaatgaagtaaaactgagcgaaaagactcagcaggcagttcgcggcgatgagagctttctgggaacgtacttaaccggaggcgagggggcctacctgtattcatcgaaccttcagagttggccggaagaaggaaacgtccacttttttagctctggtctgctgtttagccattgcagacaccgctccataattataagcaaagaccacatgaatagcatcagcttctatgatggagatagcacttcaactgtggctgctctgctcattgattttaaatcttctctgttgcctcacctgcctgtgcattttcatggctcttcaaatttcctgatgatcgcactgtttcccaaatcaaagatctaccaggccttttactccgaggtgttctcactctggaaacagcaagacaacagtggcatttctctgaaggtcattcaggaggatggccttagcgtggagcaaaagcgacttcactcctcagcacagaaactgttctccgctctctctcaacctgctggcgagaaacggtcctctttaaagcttctaagtgctaaactgccggaactggattggttcctgcagcactttgcaatctcaagtatctcgcaggagcccgtaatgcggactcatctccccgttttactgcagcaagccgagattaataccacacacaggatagagtccgacaaagtcataatttctattgtgacagggcttcccggctgccacgccagcgagctctgtgcctttttggtgacattacacaaagagtgcgggaggtggatggtctaccggcagataatggatagctccgaatgttttcatgctgctcactttcagcgctacctgagtagtgctctcgaggcccaacagaataggtccgctcgccagtctgcatacattagaaagaaaacacgcctgctggtcgtgctgcagggatatacagatgtcattgacgtcgtccaggcgctgcaaactcaccccgacagcaatgtcaaggcgtcttttaccattggcgctattaccgcctgtgtggagcctatgtcatgttatatggaacatagatttctttttcccaagtgccttgatcagtgtagccagggtctggttagcaacgtggtgtttacttcacacaccacggagcagcgccatcctctgctcgtacagctgcagagcttaataagagccgccaaccccgctgcagcctttatcttggcggaaaacgggattgtgaccagaaatgaggatatcgaactgatcctgagcgaaaacagttttagctccccagagatgctcaggagccgatacttaatgtaccctgggtggtacgagggaaagttaaacgccggctccgtctaccccctgatggtgcagatctgtgtttggtttggcaggcctcttgagaagacacgcttcgtggccaagtgtaaagcaatccagagctccatcaagccaagtccttttagcgggaatatttaccacatcctgggcaaggtcaaattttcagacagtgagcgcactatggaggtgtgttacaacaccctggcaaactctctgagtatcatgcccgtcctggaagggccaactccgcctcctgactctaaatccgtctctcaagatagttccggacagcaggaatgctatctggtgtttatcggctgttcattaaaggaggactcaataaaggattggctgaggcaaagcgccaagcagaagccccagcggaaggcccttaagactaggggaatgctgacacagcaggaaatccggtctatccacgtaaaaaggcacctcgaaccgctgccagctggctacttctataacgggacacagttcgtgaactttttcggcgataagacagacttccaccctctgatggaccagttcatgaatgattacgttgaggaagccaatagggaaattgagaaatacaatcaggaacttgagcagcaggagtatcacgacctctttgaattaaagccttag

SEQ ID NO: 23778 - DNA, 3534 bp, Artificial Sequence
  derived and/or modified sequence
atggatgtgtacccaccccggcggcagggcctgccccgggcccggagccctgggggcagcagccggggcagccccagcgtgtcctgcagccggctgcggcaggtgcagagcatcctgacccagagcagcaagagcaggccagatggcatcctgtgcatcctgggcatcgacagccgctacaatgaaggctgccgggagctggccaactacctgctgtttggcctgtacaaccagaacaccagtgactttgagaagacaggcttcagcgaggaggtgctggatgatgtgatcatcctgatcaagagtgacagcgtgcacctgtactgcaaccctgtgaacttccgctacctgctgccctacgtggcccactggaggaacctgcacttccactgcatgacagaaaatgaatatgaagatgaggaggccgctgaggagttcaagatcaccagctttgtggacatggtgcgggactgcagcagaattggcatcccctacagcagccagggccacctgcagatctttgacatgtttgtggtggagaagtggcccatcgtgcaggcctttgccctggagggcattggaggagatggcttcttcaccatgaagtatgagctgcaggatgtgtccctgaacctgtggaatgtgtacagcaagatggaccccatgagcctggagagcctgctgagtgatgacctggtggcctttgagcaccagtggaccagcttctttgccaactttgacacagagatccccttcctgctggagctgtctgagagccaggccggggagcccttccgcagctacttcagccacggcatgatcagcagccacatcacagagaacagccccaaccggcagccctttgtgctgtttggaaaccacagcacccgggagaacctgaatgccggcaacttcaacttccccagcgagggccacctggtgcgcagcactggacctgggggcagctttgccaagcacatggtggcccagtgtgtgagccccaagggccccctggcctgcagcaggacctacttcttcggggccacccacgtgccctacctgggcggggacagcaagctgcccaagaagacagagcagatccggctgctgagccagatctatgctgctgtgattgaggccgtgctggccggcatcgcctgctacgccaagaccagcagcctgaccaaggccaaggaggtggccgagcagaccctgggcagcggcctggacagctttgagctgatccccttcaaggccgccctgcggagcaagatgaccttccacatccatgctgtgaacaaccagggccgcatcgtgcccctggacagcgaggacagcctgagctttgtgaagacagcctgcatggctgtgtatgacatcccagacctgctgggcggcaatggctgcctgggctctgtggtgttcagcgagagcttcctgaccagccagatcctggtgaaggagaaggatggcaccgtgaccacagagaccagctctgtggtgctgacagctgctgtgccccgcttctgctcctggctggtggaggacaatgaggtgaagctgtctgagaagacccagcaggccgtgagaggagatgagagcttcctgggcacctacctgactggaggagagggcgcctacctgtacagcagcaacctgcagagctggccagaggagggcaatgtgcacttcttcagcagcggcctgctcttcagccactgccgccacaggagcatcatcatcagcaaggaccacatgaacagcatctccttctatgatggagacagcaccagcacagtggccgccctgctgattgacttcaagagcagcctgctgccccacctgcctgtgcacttccacggcagcagcaacttcctgatgattgccctcttccccaagagcaagatctaccaggccttctacagcgaggtgttcagcctgtggaagcagcaggacaacagcggcatcagcctgaaggtgatccaggaggatggcctgtctgtggagcagaagaggctgcacagcagcgcccagaagctgttcagcgccctgagccagcctgctggggagaagaggagcagcctgaagctgctgagcgccaagctgcctgagctggactggttcctgcagcactttgccatcagcagcatcagccaggagcctgtgatgaggacccacctgcctgtgctgctgcagcaggccgagatcaacaccacccaccgcatcgagagtgacaaggtgatcatcagcatcgtgacaggcctgcccggctgccacgccagcgagctgtgtgccttcctggtgaccctgcacaaggaatgtggccgctggatggtgtaccggcagatcatggacagcagcgagtgcttccacgccgcccacttccagcgctacctgagcagcgccctggaggcccagcagaacagaagtgcccggcagagcgcctacatcaggaagaagacccggctgctggtggtgctgcagggctacacagatgtgattgatgtggtgcaggccctgcagacccacccagacagcaatgtgaaggccagcttcaccatcggggccatcacagcctgtgtggagcccatgagctgctacatggagcaccgcttcctgttccccaagtgcctggaccagtgcagccagggcctggtgtccaatgtggtgttcaccagccacaccacagagcagaggcaccccctgctggtgcagctgcagagcctcatccgggccgccaacccagctgctgccttcatcctggctgaaaatggcatcgtgaccagaaatgaagatattgagctgatcctgtctgaaaattccttcagcagccctgagatgctgcggagccgctacctgatgtacccaggctggtatgagggcaagctgaatgccggctctgtgtaccccctgatggtgcagatctgtgtgtggtttggccggcccctggagaagaccaggtttgtggccaagtgcaaggccatccagagcagcatcaagcccagccccttcagcggcaacatctaccacatcctgggcaaggtgaagttcagtgacagcgagaggaccatggaggtgtgctacaacaccctggccaacagcctgagcatcatgcctgtgctggagggccccaccccacctccagacagcaagtctgtgtcccaggacagcagcggccagcaggagtgctacctggtgttcatcggctgcagcctgaaggaggacagcatcaaggactggctgcggcagagcgccaagcagaagccccagaggaaggccctgaagacccggggcatgctgacccagcaggagatccgcagcatccacgtgaagaggcacctggagcccctgcctgctggctacttctacaacggcacccagtttgtgaacttcttcggggacaagacagacttccaccccctgatggaccagttcatgaatgactatgtggaggaggccaaccgggagattgagaagtacaaccaggagctggagcagcaggagtaccatgacctgtttgagctgaagccctag

SEQ ID NO: 23779 - DNA, 3534 bp, Artificial Sequence
  derived and/or modified sequence
atggacgtgtaccccccccggcggcagggcctgccccgggcccggtcacctgggggaagttcacggggctctccttcggtttcatgctccaggctgcggcaggtgcagtcgatattgacccagagcagcaagtcgagacctgatggcattctgtgtatcctcgggattgacagccgctataacgaagggtgccgggaattggcaaattacctcttgtttggactttacaatcaaaatactagtgacttcgaaaaaacaggattctccgaagaggtcctggacgatgtaataattctgatcaaaagcgactccgtacacctgtactgcaaccccgtgaacttcaggtacctcctcccttatgtggctcactggagaaatctacattttcactgcatgacagaaaacgagtatgaggacgaggaagcagcagaagaatttaagataacaagctttgtggatatggtgagggactgcagcaggattggaatcccctattctagccaaggtcatctgcagatctttgatatgtttgttgtcgagaaatggccaattgtgcaggccttcgcactggaaggaattggaggagatggcttcttcactatgaagtacgaattgcaagacgtgagcctcaatctgtggaatgtgtacagcaagatggatcctatgtccctagagtccctgctcagcgatgatctcgttgcattcgaacatcagtggacatccttttttgccaactttgacactgaaattccattcttactggaacttagtgagagtcaggcaggcgaacccttcaggagttactttagccacgggatgatttcaagccatattactgagaacagccccaaccgccaaccttttgttctgtttggcaatcacagcacccgggaaaatcttaatgctggcaacttcaattttcctagtgaagggcacctcgtccgcagtactggacctggtggtagcttcgctaagcacatggtcgcccagtgtgtcagcccgaaaggccctctcgcttgtagccgtacctactttttcggcgccacccacgtaccttatttggggggcgatagtaaactgccaaagaagacagaacagatccgtcttctgtcacagatttacgcagcggtgatcgaggcagtgctggccgggatcgcctgttacgccaaaacctcttccttgactaaggccaaggaggtcgctgaacagacgctgggatcaggcctggactcctttgaattaattccttttaaggcagccctgcgaagcaaaatgacgttccatattcatgctgtaaataaccaaggaagaatagtcccactggattcggaagatagtttatcctttgttaagaccgcctgtatggctgtgtatgatatcccagacctgctaggcgggaacggttgcctcggatctgtggtgttttccgagtcattcctcacctcccagatcctggtaaaagaaaaggatggaacggtaacaacggagacctcatcagttgtgctaacggcagcggtcccacggttttgttcttggttagtagaggacaatgaggtcaagttatcagaaaagactcagcaagccgttcggggtgacgaaagctttctgggaacctatctgactggaggcgaaggagcgtatctgtactctagcaatctgcagtcctggccggaggaagggaacgttcattttttcagctccggcttgctgtttagtcattgccgacaccgctcaattatcatttcaaaggaccacatgaattctatatctttttatgacggtgattccacatctaccgtggctgctcttctgattgattttaaatcatcactgcttcctcatcttcctgtgcactttcacggatcctctaacttcctgatgatcgctttgtttccaaaatctaaaatataccaggctttctacagcgaggttttctctttgtggaaacagcaggataacagcggaatcagtctcaaagtgattcaagaggatgggttgtctgtggagcagaaacgcctccatagctcggcccagaaattgtttagcgccctgagccagccggccggcgagaaacgttcttccctgaaactactgagcgccaagctgcccgagctggactggtttctgcagcacttcgctataagctcaatttctcaggagcctgttatgcgaacacatctgcccgttttgctacagcaggccgagattaacaccactcatcgaattgagtcggataaagtgattatctctatcgtgaccggcctccccggctgtcatgccagtgaactgtgcgcattccttgttactttgcacaaagaatgtggcagatggatggtgtacaggcagatcatggacagttccgaatgctttcacgctgcccacttccagagatacctctcttcagcgctcgaagcgcagcagaaccggtctgcacggcagtcagcttatatccgtaagaagacaagacttctcgtcgtgcttcagggctacaccgatgtcatagatgtggtgcaggcccttcagacccacccagatagcaatgtgaaggcctccttcaccattggcgcgattacagcttgtgttgagccaatgtcctgctacatggagcacaggtttctcttccccaaatgcctggaccagtgtagccagggactcgtctccaacgtggtatttacctcacacactacggaacagcggcaccctcttctagtgcagctgcagtccctcatccgcgccgcaaatcccgcagcggcctttatactggccgagaacggcatagttactcggaacgaagatatcgaactcatcctctccgagaattctttcagctccccagagatgctcaggtctcgctacctgatgtaccctggctggtatgagggcaagctgaatgccggcagcgtgtatcccctgatggtccaaatttgtgtgtggtttggacggcccctggagaagacacgatttgtcgcaaaatgtaaggcaatccaaagttcgatcaaaccctcaccattttccgggaatatttatcatatcttgggaaaggtaaaattttccgattcagaacgcactatggaggtatgctataacaccctggcgaactcgctgagtattatgcccgtgctggagggccctacgccaccaccagacagcaagagtgtctcccaggattctagcggtcagcaggaatgttacctggttttcatcggctgcagcctgaaggaagattccatcaaagactggctgcggcagagcgctaaacagaaacctcaacgcaaggctttaaagactagaggaatgctgacgcaacaggaaattcgctccatacacgtgaagcggcacttagaaccactccctgcaggttacttttacaacggcacccaatttgtgaatttttttggcgacaaaaccgacttccacccgttaatggaccaattcatgaacgattacgtcgaggaagcaaatagagaaatcgagaagtataatcaggaattggagcaacaggagtaccatgacctttttgagttaaagccctag

SEQ ID NO: 23780 - DNA, 3534 bp, Artificial Sequence
  derived and/or modified sequence
atggacgtttaccctccacgaagacaagggctgccacgcgctcgatctcccggaggttctagtaggggtagtccaagcgtctcgtgtagccggcttaggcaagtccagtctatacttactcagtcctcaaagtctcgtcccgatgggattctgtgcatcttgggaattgatagcaggtacaatgagggctgtcgtgaactggcaaattacctgttgttcggcttatataaccagaacacatccgactttgagaaaaccggcttttctgaggaagttctggacgatgtgattattctgataaaatcggacagtgtacatctatactgcaaccctgtgaactttcggtatcttttgccctatgtggcccattggaggaacttacactttcactgtatgaccgagaatgaatacgaggatgaggaggcggcagaagaattcaaaatcaccagtttcgtggacatggttcgggactgctccaggatcggaatcccatatagttctcaaggccacctgcagatcttcgacatgttcgtggtggagaagtggcccattgtacaggctttcgccctggaagggattggaggtgatggattctttaccatgaagtacgagctgcaagatgtgagccttaatctgtggaatgtgtactctaaaatggacccaatgtcactggaaagcttgttgagtgatgatcttgtggccttcgagcaccagtggacatccttcttcgctaattttgacaccgagattccgttcctgctggaacttagcgaaagccaggccggagaacctttcaggagttacttttcccacggcatgatctcatctcacataacagagaattcaccaaatcggcaaccttttgtacttttcggtaaccactctacgagagagaacctgaacgcaggcaatttcaattttccttccgaaggccatttagtgagaagcactggcccaggtgggtcattcgcaaagcacatggtcgctcagtgcgtatctcctaaagggccactggcatgctctagaacctactttttcggggctacccacgtgccatacctaggaggtgactcaaagttgcctaaaaagaccgaacagataaggttgctaagtcagatatacgccgctgtcatcgaagccgtgcttgctggcatcgcctgctacgcaaagacctcaagtcttacaaaggcgaaggaagttgccgagcagaccctgggctctggcctggattcatttgagctgatcccatttaaggctgcactgcgcagtaagatgacatttcatattcacgccgtcaacaaccagggcaggatagttccccttgacagtgaagatagtttatccttcgttaaaacagcttgcatggccgtgtacgacattcctgatttactcggcggaaacggctgcctcggcagcgtggtatttagcgaaagcttcctcacttctcaaatcctggtgaaagaaaaagatgggaccgtaactaccgagacgtcaagtgtggttctgaccgccgcagtgcccagattctgcagctggcttgtcgaagataatgaagtaaagctgagcgagaaaactcagcaggccgtcaggggtgatgaatccttcctgggaacctatctgactgggggagagggggcatacctgtacagctctaatctccagtcctggccagaggaaggaaacgtccacttttttagcagtgggctgctattttcccactgcaggcacagaagcataataatttcaaaagatcatatgaattccatatcattctacgacggcgacagtactagcactgtcgctgcgctcttgattgactttaagtcctccctgctaccccatctgcctgtgcattttcatggctcctctaactttctgatgattgcccttttcccaaaaagcaagatctaccaggccttctactctgaagtgttttccctctggaagcagcaggataatagtgggatctcacttaaagtgatccaagaagatgggctgtctgttgagcagaagcgcctgcatagcagtgcccagaaactgttttccgccctgtcccaacccgctggggagaaacgatcctctctgaagttgctgtcggccaagctgcctgaattagattggttccttcaacacttcgcaatctcaagtattagtcaggaacccgtcatgcggacgcatttaccagtgctgctgcagcaggcagagatcaacacaacgcacagaattgaaagcgataaggtgattattagcatcgttaccggcttgcctgggtgccacgcctccgagctttgtgctttcctcgtgacgctccacaaagagtgcggccgttggatggtctacagacagattatggactcatctgagtgcttccatgcagcccactttcagaggtatcttagcagcgcgctggaggctcagcagaatcgatctgccagacagagcgcctacattagaaagaagaccagattattggttgtgctacaggggtatacagatgttatcgatgtcgttcaagctctacaaacccatccagattccaacgtgaaggcttcttttacgatcggcgcaattaccgcttgcgtggagccaatgtcctgctatatggaacataggttcctgtttcctaagtgcctggaccagtgtagccagggcctagtgtccaatgtggttttcacaagccacactaccgaacagaggcacccactcttggttcagctgcagagcctgatccgtgccgcaaaccccgctgccgcatttatcctggccgaaaatggaattgtgacccggaacgaggacattgagttgatcctgtctgagaatagcttctccagccccgaaatgctgcgtagcaggtacctaatgtaccctggttggtatgaaggtaagttgaatgccggtagtgtctatcctcttatggtgcaaatttgcgtatggtttgggaggcctctggaaaaaacccggttcgtcgccaagtgcaaggctatacagtcttcaattaaaccatcgcctttctccggtaatatttaccacatactgggtaaggttaagtttagcgactctgaacgaacaatggaggtgtgttacaacactctggctaactcactgagcatcatgccggtgcttgagggtccaaccccccctcccgacagcaagagcgtctcccaggactctagcggccagcaggagtgttatctggtctttatcggttgctcactgaaggaggatagtataaaagattggctgagacagtctgccaaacagaagcctcagcgaaaggctcttaaaacgagagggatgcttacccagcaggagataaggtccatccacgtcaaacggcacctcgagccgcttcctgcgggatatttctacaacggaacccaatttgtaaacttctttggggacaagacggatttccacccactgatggaccagtttatgaacgattatgtggaggaggctaacagagagatcgaaaagtacaatcaggagttagagcaacaggaataccatgacttattcgaactgaagccatag

SEQ ID NO: 23781 - DNA, 6869 bp, Artificial Sequence
  derived and/or modified sequence
gccgccctgcgggcaactgagaccctcgcagctgcaccgtcctcctccgccgccagtcgtccgccgccatggacgtgtaccccccgcgccggcaggggctgccccgcgctcggtcccctggcggctccagccgcgggtcaccctccgtcagctgcagtcgacttcggcaggttcagagcatcctgacccagagcagcaagtctcggccggatgggatcctctgcatcctaggaatcgatagcaggtacaatgaaggctgcagagagctggcaaattatcttctatttggtttgtacaatcagaataccagtgattttgagaaaacgggattttctgaagaagtactagatgatgtaattatattgattaaatcggatagcgtccatctgtactgtaatcctgtaaactttcgctatctcttaccttatgtggcacattggagaaatctgcatttccactgcatgaccgaaaatgagtatgaagatgaagaagccgcagaagaatttaaaattaccagctttgtggacatggttcgagactgtagtagaattggcattccttacagctcccaaggtcacttgcagatatttgatatgtttgtggtggagaaatggccaattgtacaggcctttgcacttgagggcattggaggggatggattttttaccatgaaatatgagttgcaggatgtgagtttgaatctatggaatgtctacagcaagatggatcctatgtctctggagagtttgctttcagatgatttggtggcttttgaacatcagtggactagcttcttcgctaattttgacacagaaattcctttcctgctagaactttcagaatctcaggcgggtgagccattcagaagttatttcagtcatggaatgatctctagccatataactgaaaacagccctaaccggcagccatttgttctctttggtaatcactccacacgagaaaacctgaatgctggcaactttaacttcccttctgaaggacatctggtacgaagcactggtcccggcgggagctttgccaagcacatggtagcccagtgtgtctcaccaaagggacctcttgcttgttcgagaacatacttttttggagctactcatgttccttacttgggtggtgacagcaagctgcccaagaaaactgaacaaattaggctattgtcccagatatatgctgctgttattgaggctgttttggctggcattgcatgttatgctaaaacttccagtctaacaaaggccaaggaggtagcagagcaaactctgggatctgggttagattcctttgagttgattccgtttaaggcagccctgcgctccaagatgacttttcatatacatgctgtgaataatcagggaagaattgtaccgctggacagtgaagatagcttatcctttgtgaagacggcttgtatggccgtctatgacattcctgacttactgggaggcaatggttgtttaggatctgtggttttctctgaatcatttttgacttctcagatcttagttaaagaaaaggatggcactgttaccacagaaaccagctccgtagtcctgactgctgctgtacccagattctgctcctggctggtggaagataatgaagtaaaattgtctgagaaaacccagcaagcagtgaggggggatgagtctttcctgggcacttatctaacaggaggagaaggagcatatctttattccagcaatctacagtcctggcctgaggaagggaatgttcatttcttctctagtggccttctgttttctcactgtcgtcatagaagtatcatcatttccaaggatcacatgaattccatttccttctatgatggggattccaccagtactgttgctgctcttctcatagacttcaaaagctcattgcttcctcacctcccagttcatttccatggatcaagcaattttctgatgattgcccttttccccaaatcgaagatataccaagcattttactcagaggtcttctccctctggaaacagcaggataactcagggatctctttaaaagtgatccaggaagatggattatctgtggaacaaaagagattgcactccagtgcacagaagctcttcagtgccctgagccagcctgctggggagaaacggagttccctaaagttactctcagccaaactcccagagctggactggtttctccagcatttcgccatcagcagcattagccaggagcctgtgatgcggacccatcttcctgtgctgctgcagcaagctgaaatcaacactactcacagaatagaaagtgacaaggtaattatcagcattgtaaccggcctcccaggctgtcacgctagcgagctctgtgcttttctggtcactctgcataaggaatgtggcagatggatggtgtatcgccaaatcatggacagctctgaatgttttcatgctgcacacttccagagatacctttccagtgccctagaggcccagcagaaccgctctgcgcgccagtcagcctacatccgcaagaagaccagactgctggtggtgttacaaggctacacagatgttattgatgttgtccaggccctgcagacccacccagactcaaatgtcaaggcctccttcaccattggtgccatcacagcatgtgtggagcccatgagctgctacatggagcacagatttctctttcctaaatgtcttgaccagtgttcacaaggcctggtgagtaacgtggtattcaccagtcacaccacggagcagcggcaccctctccttgttcagctgcagagcctcatcagggctgccaatcctgctgcagccttcattcttgcagaaaatgggattgtcaccaggaatgaagacattgagctgattctctcagaaaacagtttttcaagtcctgagatgctacgatctcgatatttaatgtatcctggctggtatgaaggtaaattgaatgctggatcagtctatcccctaatggttcagatctgcgtatggtttggccgtcccttggagaagactcgctttgtggccaaatgtaaagcaattcagtcctccatcaagccaagtcccttctccggaaacatctaccacatcctgggcaaagtgaagttttcagactctgagaggaccatggaggtctgctacaacacactggccaactccttgagcatcatgccagttttggaaggacccacaccaccaccagactccaaaagcgtatctcaagacagcagcgggcagcaggagtgctaccttgtgttcatcggctgctccctgaaggaagacagcatcaaggactggctgcggcagtcagctaagcagaagcctcagaggaaagccctgaagaccagggggatgctgacgcaacaggagatcaggagcatccacgtaaaacgccacttggaacccctacctgcaggctacttttataatggcacccaatttgttaacttctttggtgacaaaactgattttcacccactcatggaccagttcatgaatgactacgtggaagaagccaaccgggaaattgagaagtataaccaggagctggaacagcaggagtatcatgacctctttgagctgaagccctagaggaaggctgggcccgtacgtcctgcagaatgtccaccttggagatggacgaacgggtgtcttaacctcagctctgctggaggcctctcccttaaggggctgtctttgttctccttggcctgtgtgggctggcttgagtgcatgttgtctttattccctgtatagcgctgaagagcatcacctgcaccattgattttgggggtcgggggaatactcaaggatgagcagatggggcctgcccgtctacgtgtgcaactggcagtccaggagctctgggtttctgataacaggatctcctttgggctcttgaggttggggagaagcattaggattacacagaggagctactgggacttagaaggaaccctggctgcctgaactgtggccgtgtctgggaggcgaggccacgacaggcctcaagcctcagatgctgctccacgagagccatcttccccagtggagtgcctgcctcccctgctaggcccgtttccctgaaggagctggccgtactggccgtgggcccagtcctgggaggagcagcacagccttgcccaggcccagtccacagagccagcagcttgggttgagatgaatgatgtgttcacaaatgaggggatttcccttctggactaaactgaaggagaggcttgttgctttccagaggtgtgtggctcttaagttgacatcagcttttccccttgtgggtggttctttagctctcctgtcacaccattcgggtgtcctaatgtagggacaagagcaagcctgctgctcaggccccctggcgaggcttcacctcactgtggaagggggcgtcctgcagctggttagtcttaggcctggtggctgatcacttgtggggtcagtctccagcacccagcgctcccacaagccttgccaaggaaggcctgcttttcagccacaaacttcaggaaactcatccccccgctccccaaagtgttgttgctggccctgggcttgtgtggctcctgaggattgggaatttcaaataattgcaatacctgagttagaattccttctaatggcatcgttttaagctggaccataaagcagaggggaattacaagtgtgtcccatgcctgaccttcataattggtgtgggggacaggggagtcacagccactgatatttaggtgatgtctcttaggacttcagtgcctcagctgcctgaactgtaaatgttttctgaatttcacatatttttttttgcatgccttaggaagaagcacataggtaaaaccagcagtttccagtaatatagggggtttttgagcaaggcccctggagcagcggagagacaagatggagcacatgtagtctgtgtgcctggtcacacagaggcctgcatgcaagtagcaaagcagctctcaagggcttgtcagtaaaatatattagaaaaaaaaaaaaaacaatttgaagccaaatgaacaaaactccagataccattgataagaaattttgcatcaagaagggcttctgaaaagacccacgtgctccagtcccagctccaaaagccactgatgacaagggccccactgtggaacctaagtctgggagccccctgacttctggctggccagaggctgcggtccgtcaagggcttgcctcgcttcagaatcagtaacatagatcttaagtgcaattgattaataagcagtgagttactgtagcttcctttagctctaccgaactctttttaaaaactcaaacttgagcagccttagaaaaggggttggggggtgggaaccacaggccatttctctaagtgggctgctgtgaagttttaaatgaaagctctagctttaggagcttgagccatttcctgactgcactggcctggcagtctggctgctgcagaagagtttttaaagaggggtcggagcccgcccgtgagagcgggtcttctcaccatgtggggctgtactacgtggtggtctttgtttctcttcacagaaatgctctctcaccaacttgccccactgtcccaactcctctcctcttagagaaaaaactgtgattacctcaacttgaatatgaaactgtgattgaaaaaagtcaaaacgtgaagaagcatcaaagccaaaaaggcaaaactggctgaggcctctgttgatgctcctcagcctactcgggaacgtgaaggggcagctggcgaaagggcattcctggggccacttgctctgccccactgataaggcacacccgcggtgcactgtgagctctttgaggactgaggccaggggatgcctcctggaacctgccaggcctctctgttctgtgaaggtcagtatccacttgattcctccaggcggcgctccaggtgggaggagcagggtcttctgctgtttccaaaggaatggccatgacactgcttttgaccttagaagtggatccagggacccagcaaagagcgggggtgggttcccagggacaggcagtcctcccggggcttacatgctttttgctaactttcctattagcagcttcagtttatatcacccagagtgcgtgggataatgttgaagtcgctgaagttacgggttattttatgtttttacatgggatttttctgtttttgattggaagaaggagacagaaattggaggaaatgggattattatcctagggaagggccgttggcaaggagttgagccggcccctctgagccctgggggctatctgacctgaagcctggacactgggcccttcaggtcgcaagaaaaagttccctcctaaattctattaggattttggagaatttttgcacagtaagaagctctgggttgctccttgggcttctcaaaagggaaaagttcaattcaaagattgtaaactacgaagtattccagccgtgttgctgatctagttggatagttgtacctcaaaaaagtaggtgagaactggcttcctcattgtcccaggatgtcaaatactaatgacataagagctcacttacgtgccaaaattcacttttatactagtttttcagtgctttaatatttgtaacttaaattttaaaactcgtatttacaaacactactgtaacttcagtgaaactgaattgtgcgattgaagctttttgcttatcatagtatttattacactacttaattcagtaaatatataaaagtagccttcaatttatttttatattattttacatgtttttacctgcagttgtgtatgtgaatttaccttggtaatcgagatgtcatgctaaggaccaataaactatcactgaacaag

SEQ ID NO: 23782 - DNA, 3534 bp, Artificial Sequence
  derived and/or modified sequence
atggacgtgtacccccccagaagacagggcctgcccagagccagaagccccggcggcagcagcagaggcagccccagcgtgagctgcagcagactgagacaggtgcagagcatcctgacccagagcagcaagagcagacccgacggcatcctgtgcatcctgggcatcgacagcagatacaacgagggctgcagagagctggccaactacctgctgttcggcctgtacaaccagaacaccagcgacttcgagaagaccggcttcagcgaggaggtgctggacgacgtgatcatcctgatcaagagcgacagcgtgcacctgtactgcaaccccgtgaacttcagatacctgctgccctacgtggcccactggagaaacctgcacttccactgcatgaccgagaacgagtacgaggacgaggaggccgccgaggagttcaagatcaccagcttcgtggacatggtgagagactgcagcagaatcggcatcccctacagcagccagggccacctgcagatcttcgacatgttcgtggtggagaagtggcccatcgtgcaggccttcgccctggagggcatcggcggcgacggcttcttcaccatgaagtacgagctgcaggacgtgagcctgaacctgtggaacgtgtacagcaagatggaccccatgagcctggagagcctgctgagcgacgacctggtggccttcgagcaccagtggaccagcttcttcgccaacttcgacaccgagatccccttcctgctggagctgagcgagagccaggccggcgagcccttcagaagctacttcagccacggcatgatcagcagccacatcaccgagaacagccccaacagacagcccttcgtgctgttcggcaaccacagcaccagagagaacctgaacgccggcaacttcaacttccccagcgagggccacctggtgagaagcaccggccccggcggcagcttcgccaagcacatggtggcccagtgcgtgagccccaagggccccctggcctgcagcagaacctacttcttcggcgccacccacgtgccctacctgggcggcgacagcaagctgcccaagaagaccgagcagatcagactgctgagccagatctacgccgccgtgatcgaggccgtgctggccggcatcgcctgctacgccaagaccagcagcctgaccaaggccaaggaggtggccgagcagaccctgggcagcggcctggacagcttcgagctgatccccttcaaggccgccctgagaagcaagatgaccttccacatccacgccgtgaacaaccagggcagaatcgtgcccctggacagcgaggacagcctgagcttcgtgaagaccgcctgcatggccgtgtacgacatccccgacctgctgggcggcaacggctgcctgggcagcgtggtgttcagcgagagcttcctgaccagccagatcctggtgaaggagaaggacggcaccgtgaccaccgagaccagcagcgtggtgctgaccgccgccgtgcccagattctgcagctggctggtggaggacaacgaggtgaagctgagcgagaagacccagcaggccgtgagaggcgacgagagcttcctgggcacctacctgaccggcggcgagggcgcctacctgtacagcagcaacctgcagagctggcccgaggagggcaacgtgcacttcttcagcagcggcctgctgttcagccactgcagacacagaagcatcatcatcagcaaggaccacatgaacagcatcagcttctacgacggcgacagcaccagcaccgtggccgccctgctgatcgacttcaagagcagcctgctgccccacctgcccgtgcacttccacggcagcagcaacttcctgatgatcgccctgttccccaagagcaagatctaccaggccttctacagcgaggtgttcagcctgtggaagcagcaggacaacagcggcatcagcctgaaggtgatccaggaggacggcctgagcgtggagcagaagagactgcacagcagcgcccagaagctgttcagcgccctgagccagcccgccggcgagaagagaagcagcctgaagctgctgagcgccaagctgcccgagctggactggttcctgcagcacttcgccatcagcagcatcagccaggagcccgtgatgagaacccacctgcccgtgctgctgcagcaggccgagatcaacaccacccacagaatcgagagcgacaaggtgatcatcagcatcgtgaccggcctgcccggctgccacgccagcgagctgtgcgccttcctggtgaccctgcacaaggagtgcggcagatggatggtgtacagacagatcatggacagcagcgagtgcttccacgccgcccacttccagagatacctgagcagcgccctggaggcccagcagaacagaagcgccagacagagcgcctacatcagaaagaagaccagactgctggtggtgctgcagggctacaccgacgtgatcgacgtggtgcaggccctgcagacccaccccgacagcaacgtgaaggccagcttcaccatcggcgccatcaccgcctgcgtggagcccatgagctgctacatggagcacagattcctgttccccaagtgcctggaccagtgcagccagggcctggtgagcaacgtggtgttcaccagccacaccaccgagcagagacaccccctgctggtgcagctgcagagcctgatcagagccgccaaccccgccgccgccttcatcctggccgagaacggcatcgtgaccagaaacgaggacatcgagctgatcctgagcgagaacagcttcagcagccccgagatgctgagaagcagatacctgatgtaccccggctggtacgagggcaagctgaacgccggcagcgtgtaccccctgatggtgcagatctgcgtgtggttcggcagacccctggagaagaccagattcgtggccaagtgcaaggccatccagagcagcatcaagcccagccccttcagcggcaacatctaccacatcctgggcaaggtgaagttcagcgacagcgagagaaccatggaggtgtgctacaacaccctggccaacagcctgagcatcatgcccgtgctggagggccccacccccccccccgacagcaagagcgtgagccaggacagcagcggccagcaggagtgctacctggtgttcatcggctgcagcctgaaggaggacagcatcaaggactggctgagacagagcgccaagcagaagccccagagaaaggccctgaagaccagaggcatgctgacccagcaggagatcagaagcatccacgtgaagagacacctggagcccctgcccgccggctacttctacaacggcacccagttcgtgaacttcttcggcgacaagaccgacttccaccccctgatggaccagttcatgaacgactacgtggaggaggccaacagagagatcgagaagtacaaccaggagctggagcagcaggagtaccacgacctgttcgagctgaagccctag

SEQ ID NO: 23783 - protein, 123 aa, Artificial Sequence
  derived and/or modified sequence
MNPVYSPGSSGVPYANAKGIGYPAGFPMGYAAAAPAYSPNMYPGANPTFQTGYTPGTPYKVSCSPTSGAVPPYSSSPNAVPMSPCADQWARQLGQISGQPFVLLAGLLCWPHGEALESLMDCN

SEQ ID NO: 23784 - protein, 195 aa, Artificial Sequence
  derived and/or modified sequence
MNPVYSPGSSGVPYANAKGIGYPAGFPMGYAAAAPAYSPNMYPGANPTFQTGYTPGTPYKVSCSPTSGAVPPYSSSPNPYQTAVYPVRSAYPQQSPYAQQGTYYTQPLYAAPPHVIHHTTVVQPNGMPATVYPAPIPPPRGNGVTMGMVAGTTMAMSAGTLLTAHSPTPVAPHPVTVPTYRAPGTPTYSYVPPQW

SEQ ID NO: 23785 - DNA, 372 bp, Artificial Sequence
  derived and/or modified sequence
atgaaccccgtgtacagccccggcagcagcggcgtgccctacgccaacgccaagggcatcggctaccccgccggcttccccatgggctacgccgccgccgcccccgcctacagccccaacatgtaccccggcgccaaccccaccttccagaccggctacacccccggcaccccctacaaggtgagctgcagccccaccagcggcgccgtgcccccctacagcagcagccccaacgccgtgcccatgagcccctgcgccgaccagtgggccagacagctgggccagatcagcggccagcccttcgtgctgctggccggcctgctgtgctggccccacggcgaggccctggagagcctgatggactgcaactag

SEQ ID NO: 23786 - DNA, 588 bp, Artificial Sequence
  derived and/or modified sequence
atgaaccccgtgtacagccccggcagcagcggcgtgccctacgccaacgccaagggcatcggctaccccgccggcttccccatgggctacgccgccgccgcccccgcctacagccccaacatgtaccccggcgccaaccccaccttccagaccggctacacccccggcaccccctacaaggtgagctgcagccccaccagcggcgccgtgcccccctacagcagcagccccaacccctaccagaccgccgtgtaccccgtgagaagcgcctacccccagcagagcccctacgcccagcagggcacctactacacccagcccctgtacgccgcccccccccacgtgatccaccacaccaccgtggtgcagcccaacggcatgcccgccaccgtgtaccccgcccccatccccccccccagaggcaacggcgtgaccatgggcatggtggccggcaccaccatggccatgagcgccggcaccctgctgaccgcccacagccccacccccgtggccccccaccccgtgaccgtgcccacctacagagcccccggcacccccacctacagctacgtgcccccccagtggtag

SEQ ID NO: 23787 - DNA, 372 bp, Artificial Sequence
  derived and/or modified sequence
atgaatcccgtctactcacccggatctagcggggtcccgtacgcaaatgcgaaaggaattggctatccagccggcttccccatgggttacgcggctgctgctcccgcttatagtccgaacatgtatcccggggccaacccaaccttccaaaccggctacacacctggaaccccctataaggtctcctgcagtccaactagcggcgccgtgcccccatactcaagtagtccgaatgctgtgccgatgtcgccatgtgcagatcagtgggcaaggcagctgggccagatcagtgggcaaccatttgtcctcctcgcgggtctcttatgttggccacacggcgaagccctggaatcacttatggattgtaattag

SEQ ID NO: 23788 - DNA, 588 bp, Artificial Sequence
  derived and/or modified sequence
atgaaccctgtgtacagtccaggttcctcaggggtgccttatgctaatgctaaaggtatagggtaccccgcggggttccctatgggctatgccgcagcagcacccgcctacagtcctaacatgtatcccggagctaaccctacctttcaaaccggctacacacccggcactccatacaaggtctcttgtagcccgacgtctggagccgttcccccatattcgtcttccccaaatccgtatcagactgctgtgtacccggtgagaagtgcatatccacagcagtccccctatgcccagcagggcacatactatacacagcccctgtacgccgcccctccacatgtgatacaccacaccaccgtggtacagcctaatggaatgccagccacagtgtatcctgcaccaattccccctccgagagggaacggtgtaaccatgggcatggtcgccggcactactatggctatgtctgctgggaccctgttgactgctcacagtcctactccagtggcgcctcatcccgtgacggttcccacgtatcgcgctcccggcaccccgacttattcttacgtcccgccgcagtggtag

SEQ ID NO: 23789 - DNA, 588 bp, Artificial Sequence
  derived and/or modified sequence
atgaatccagtgtactcacctggatctagtggcgtcccttatgcaaatgccaaaggtatcggttaccctgccggctttccaatgggctacgcggccgccgcgcctgcgtattcccccaacatgtaccctggtgccaaccctacctttcaaaccggatatacccctgggacaccttataaagtgtcctgttctcccacatctggcgctgttccaccctacagctcgtctccaaatccataccagaccgccgtgtaccctgtccggagtgcatacccacagcagtccccctatgcacaacaggggacatactacacacagccgctatatgcagcacccccgcacgtcattcaccacaccactgtggtccagcccaatgggatgcccgcaaccgtctaccctgcccctatccctccacctcgtggcaatggcgtgaccatgggcatggtggcaggcacgactatggccatgagtgccggcaccttgcttactgctcattccccaacaccagtggcaccacaccctgttaccgtgccaacctacagggcccctggcactcctacctacagctacgtcccgccgcagtggtag

SEQ ID NO: 23790 - DNA, 589 bp, Artificial Sequence
  derived and/or modified sequence
gggctgcggagaggcgggccgggccaagcggagccgagcgagcgggagcgcggcgtccgggaggcggcggagacgcggggctcggagggtcagcctcttatcgtagcaggtctcctcggcacgccccccttgtttcgccccacggccaagcccgccgcgggccggcgtgcgctggtcactgaggcccaggtcgccgccgcggcgcgtttttgaaatcatgaatcctgtttatagtcctggatcttctggggttccctatgcaaatgccaaaggaattggttatccagctggttttcccatgggctatgcagcagcagctcctgcctattctcctaacatgtatcctggagcgaatcctaccttccaaacaggttacactcctggcacaccttacaaagtgtcctgttcccccaccagcggggctgtgccaccgtactcctcctccccgaacgctgtgcccatgagtccctgtgcagaccagtgggcaaggcagctgggccagatctcaggccagccgtttgtgctcctagcagggttgctgtgctggccacacggagaggccctagagagcctcatggattgtaactaa

SEQ ID NO: 23791 - DNA, 944 bp, Artificial Sequence
  derived and/or modified sequence
gtcggcggctccggtggctgcgcagcgtcggcggggagcgcgggctgcggagaggcgggccgggccaagcggagccgagcgagcgggagcgcggcgtccgggaggcggcggagacgcggggctcggagggtcagcctcttatcgtagcaggtctcctcggcacgccccccttgtttcgccccacggccaagcccgccgcgggccggcgtgcgctggtcactgaggcccaggtcgccgccgcggcgcgtttttgaaatcatgaatcctgtttatagtcctggatcttctggggttccctatgcaaatgccaaaggaattggttatccagctggttttcccatgggctatgcagcagcagctcctgcctattctcctaacatgtatcctggagcgaatcctaccttccaaacaggttacactcctggcacaccttacaaagtgtcctgttcccccaccagcggggctgtgccaccgtactcctcctccccgaacccctaccagactgccgtgtaccctgtgcgaagtgcctacccccagcagagcccgtatgcacagcaaggcacgtactacacacagccgctgtatgcagcacctcctcacgtcatccaccacaccacggtggtgcagcccaacggcatgcctgcaacggtgtaccctgctcccatcccccctcctagaggcaacggggtcaccatgggcatggtggctgggaccaccatggccatgtcagcaggtaccctgctgactgctcactccccaactcctgtcgccccccacccggtcactgtgcccacgtaccgggccccaggaacgcccacttacagctatgtgccccctcagtggtgatcacctgcaaatgtttgaggacggagctgtgcagtcacattattggggattccacagctggtgctgcaggccttgcgcctccaaccaggactttcttc

SEQ ID NO: 23792 - DNA, 5285 bp, Artificial Sequence
  derived and/or modified sequence
ggggagcgcgggctgcggagaggcgggccgggccaagcggagccgagcgagcgggagcgcggcgtccgggaggcggcggagacgcggggctcggaggtttttgaaatcatgaatcctgtttatagtcctggatcttctggggttccctatgcaaatgccaaaggaattggttatccagctggttttcccatgggctatgcagcagcagctcctgcctattctcctaacatgtatcctggagcgaatcctaccttccaaacaggttacactcctggcacaccttacaaagtgtcctgttcccccaccagcggggctgtgccaccgtactcctcctccccgaacccctaccagactgccgtgtaccctgtgcgaagtgcctacccccagcagagcccgtatgcacagcaaggcacgtactacacacagccgctgtatgcagcacctcctcacgtcatccaccacaccacggtggtgcagcccaacggcatgcctgcaacggtgtaccctgctcccatcccccctcctagaggcaacggggtcaccatgggcatggtggctgggaccaccatggccatgtcagcaggtaccctgctgactgctcactccccaactcctgtcgccccccacccggtcactgtgcccacgtaccgggccccaggaacgcccacttacagctatgtgccccctcagtggtgatcacctgcaaatgtttgaggacggagctgtgcagtcacattattggggattccacagctggtgctgcaggccttgcgcctccaaccaggactttcttcttaatgctctcgacacttagctaaacacgactatatcccggcccagcaggccccagcgccgttagtctccagctgactctgtgggttggtcttaaagcaaattctgttttgtggactgcctggcaattttttagctaactgtaatgataaaaagggagtattaatctattctgaatcatatctagttgaatgcatgtttaaaaaaacaaacacaaaaagcttgctcaatctacctgcagtgactgatgcaaaaccatcatatgcaaaatccaaaggaatggaaacgtattttacaacttgtatcactaatgcactgttgtaatgtatgcaaagtcttacagttataagtgttaaagtgaatttcttcatagagcatctgaaatatcttagatgattcttcaaccttttggggttgatgtgggttgccagttagggatgtggacattttagttttcagcgacctgtttctttggcactgactgtcctgggagggagttgcgaggtttgggagagagtagggaagccacagctgcttgggtgcagctggttcatggacatccctttgagtttaggcttggtggagtcagtggaacagggacatgcttaaagctcatcatgaaagattatggtagtgtggccagtgaaatttggggcgaggggggtggtttatgtgtcagcaaagcagtttctctgctatctaaattttcattacagttctcttagagagatgatgtttttatatgtctttattggaaaagtcctatgtaaaactaaattattttcctgggatggaagaaatgtgaaagagaaacagccatgcttgcaggaggtattgtcctctgctttatttagcttagaaaatcattcctttttttttttttttcctggagaaatgtttgaatcagctgaaaacaggtaggcattgctgtttttccccaacaaagaagggcaaaggtttcagctgtatgttatgaagaaagtggtatatttaagaatgagttaaaagggaacaaaactttatttaaaattcctccaatttcttgtagaaaggcagggccgtggatatgtctggaaatgtagaaacctgtagctgcttctgggatcacccacctgatggtggtgacttgtctgctgaggccggctggaggggacgcttagagatggggcgagggggaggccagtgtctgttgtctgcgagcctctcctgccatctcttttgcagctgagggcacttggcacaaagcaagcacagacagcagagagggccaggcagtgctggagtgcgtttgctggcagggtttattgtgggagaggaatttgagtttaggatctgaatcttgtacataagaaatgaaaaggcttccctccaccccgcccccaaaatatgcccgtcctgtatccatgagagtgcatgtcggttctcagtgagggtcagagtgggggtgggggatgtaaggcctgggtccctttcagcggcctctagggcaggagcgtgcgtcttcttcccagtgcagtggtggtttgagtgctgtgggctctggtggggagggggctctgctcctcttcatttgctggtagctgggtcagggcactggcgcccagtgaggatgcccactagcattctgccccagttggttggtggggggacacctgaccactgagcctttggtaaccttattttttatagtaagtacttcttataattttctttttcacatcttattttataagaagtttaggaatatttttgcatggatcattgtaaacagcagattctttattcctgatgtctattaacatagaatgtttactgataagtactttaaattgcttcatgagcacttaatccatcttagtgtctatgtgtgggggcagacatttaccgcaggcacacagtttgtgcccctttcttcaagtctctgttggtaattccatctgtttagtggatggttggcaggattagtaggttctaacggttccaggggttcagctgaccaagtagcagagaagtcttttttcccaattgagtgctaatagattaggataaaatactcacaatgttagtgtatgcttttaaaaagccccacacaacaaaatggaaacatacatgtacaactcctgtgagggctggagtcttggggttcaggaggaggttagaagttacaggcatctcttcaggcttgcttggtacttggcacacacaggatggtgttttaaagagtgggctgcaccccccacacgccatttacatcagcttcataaacacttttcttcctccctgtaacttaaccttttttcccttttatgaagttgagaggctttatgaaataagtttgcattgcacatccgtgcagaaatctttctgactttgaaatttttaggacgtcagctgtcagatacgaaaggtagatatcaggtaagaatctggacttaggaaatagtcacaaaactgtcataggttgtaattttatcaacattcgcttctagtaaaattaaagtcaattaagaaatagaacttgggtcaaaattctgttacaaagcttcataatttgtcccgaagcatatggtggagcattctgagaaatttgctttttgtgtgtttgacattcctaatttgggagtccttcagctgaattactattcttttagaagttgagacagcaggtaagcaaaggacctagttcatgtaaacatggacatcatgatggctatttaaaaaatatttgttctacaccttctcccctgaggcttggggagtgtgttcagccgctgcagtttctctgctcatggaggtcttgtttggatctgtgctggcggctgagcatttagtgtgagccagtgacccatgaacttgccgctctgtgagggccagagtcagggccagtcatggtaatgggcctgaaggcacttccagaaccttttatgtctctcgtgagccatctgttaagaacgttcttcttggtgtggtttgtaggcctacctgtcgctattctgggaaaccttcttgagtgctatgcaaatgtgttcacaggcaatgggggtggtcctgagccttggggtgggcacctggtcagtgagtgtcttgcccttccccagctgggcatacagtaccttgctctttctggtggcatcatctggctgtgatgaatgaggtctaggaaataatttgcatgtgtcttgggggacacaacagtaacgagaggaaatacattattacagcaacttgcgacgtactaatacctgtcagtgttggcccccgtaaggtatgtaaggcacctgtgagtgccagtgagtgctggtgaaaggccaacatgtactagttatgtaagtattggtgtctgctttaaaaaaggagacccagacttcacctgtcctttttaaacatttgagaacagtgttactctgagcagttgggccaccttcaccttatccgacagctgactgttggatgtgtccattgtcgccagtttggctgttgcccggacaggacaggacctccattgggcgcagcagcaggtggcaggggtgtggcttgaggtgggtggcagcgtctggtcctcctctctggtgctttctgagagggtctctaaagcagagtgtggttggcctgggggaaggcagagcacgtatttctcccctctagtacctctgcatttgtgagtgttccctctggctttctgaagggcagcagactcttgagtatactgcagaggacatgctttatcagtaggtcctgagggctccaggggctcaactgaccaagtaacacagaagttggggtatgtggcctatttgggtcggaaactgcatgtttcagaaagtttgtctctttttcctactcattatttgaagaagagagagcctgtggggatagccttatcttggtccacaggactgaagtgaagtcacttgggaaggggagacagaggatgagcggcgtctgtgtagggacccccccccgggcctgcagaagggtggtgtgctcccaggactggcatgacaggtgtctcctcctcaccacaggctgtgcccatgagtccctgtgcagaccagtgggcaaggcagctgggccagatctcaggccagccgtttgtgctcctagcagggttgctgtgctggccacacggagaggccctagagagcctcatggattgtaactaaagaagaaacggttcctttttgtttttttaaaaatgatttttaaataccgttttttacaccgttctctcggtactttttttaagctaagtcagcattgtcttccagtgttaaaggcatccctcacctctgcattgaacttacgtatccatgccaaggaatggaatttccatcctgagccagttcagttaggtgtcaattgatactattttaattttttatgcaatctgatgagatgagctcagatttaaaaatctcaaaagcacgtttattgtaacaagaattgttatgtattaatactgcagttttcaataaagattgacttgtgttgca

SEQ ID NO: 23793 - DNA, 372 bp, Artificial Sequence
  derived and/or modified sequence
atgaaccctgtgtacagccctggcagcagcggcgtgccctatgccaatgccaagggcatcggctacccagctggcttccccatgggctatgctgctgctgccccagcctacagccccaacatgtacccaggggccaaccccaccttccagacaggctacaccccaggcaccccctacaaggtgtcctgcagccccaccagcggggctgtgcccccctacagcagcagccccaatgctgtgcccatgagcccctgtgccgaccagtgggcccggcagctgggccagatcagcggccagccctttgtgctgctggccggcctgctgtgctggccccacggggaggccctggagagcctgatggactgcaactag

SEQ ID NO: 23794 - DNA, 588 bp, Artificial Sequence
  derived and/or modified sequence
atgaaccctgtgtacagccctggcagcagcggcgtgccctatgccaatgccaagggcatcggctacccagctggcttccccatgggctatgctgctgctgccccagcctacagccccaacatgtacccaggggccaaccccaccttccagacaggctacaccccaggcaccccctacaaggtgtcctgcagccccaccagcggggctgtgcccccctacagcagcagccccaacccctaccagacagctgtgtaccctgtgcgcagcgcctacccccagcagagcccctatgcccagcagggcacctactacacccagcccctgtatgctgccccaccccacgtgatccaccacaccaccgtggtgcagcccaacggcatgcctgccaccgtgtacccagcccccatccccccaccaagaggaaatggagtgaccatgggcatggtggccggcaccaccatggccatgtctgctggcaccctgctgacagcccacagccccacccctgtggccccccaccctgtgacagtgcccacctaccgggcccctggcacccccacctacagctatgtgcccccccagtggtag

SEQ ID NO: 23795 - DNA, 372 bp, Artificial Sequence
  derived and/or modified sequence
atgaaccccgtgtacagccccggcagcagcggcgtgccctacgccaatgcgaaaggtattggatatcccgcgggcttccccatggggtatgccgccgcagcgccagcgtacagcccaaatatgtaccctggggctaatcctacgttccaaacaggctatacacctggaaccccctataaagtatcatgctcacccacctccggcgccgtaccaccctatagctctagcccaaatgcggttcctatgtctccctgtgcagaccagtgggcaaggcagcttgggcagatctccggacagcctttcgttctgctggctgggctgctgtgttggccgcacggggaggctctcgagtcgctgatggactgcaactag

SEQ ID NO: 23796 - DNA, 588 bp, Artificial Sequence
  derived and/or modified sequence
atgaaccccgtgtacagccccggcagcagcggcgtgccctacgccaacgccaagggcatcggctatcccgccggattccccatggggtacgccgccgctgcaccggcctacagccctaatatgtaccctggcgctaaccctacattccagacaggctacacccctggcaccccatataaggtctcatgcagcccaacatcaggggcagtgcccccctactcctccagccccaatccttatcagactgccgtgtatcccgtgcgctccgcgtacccgcagcagtcgccttatgctcaacaaggcacgtattatacgcagcccctctacgcagccccaccacacgtgatccatcatacaaccgtcgtgcagccaaacgggatgccagccacggtgtatccagcaccgatcccacctcccagggggaacggagttaccatggggatggtggccggcacgactatggctatgtccgctggaactctccttactgcacactctccaaccccagttgcaccacaccccgtaactgttcccacgtacagagccccagggactccgacatacagctatgttcccccacagtggtag

SEQ ID NO: 23797 - DNA, 588 bp, Artificial Sequence
  derived and/or modified sequence
atgaaccccgtgtacagccccggcagcagcggcgtgccctacgccaacgccaaaggaataggataccccgccggattccctatgggctacgcggccgctgccccggcctattcccctaatatgtacccaggagcgaaccccacatttcagacagggtacacgccaggaacgccctataaagtttcttgcagtcctaccagcggcgcggtgccgccatattcctccagccctaatccctatcagacagccgtatacccagtgagaagcgcctatccacaacagagtccctatgctcagcaggggacctactacacacaacctctatacgcagcaccccctcatgtaatccaccacaccaccgtagtgcagcccaacggaatgccagctaccgtttatcctgcaccgattccgccccctagaggcaacggggtgacaatgggcatggttgcgggaacaactatggcgatgagtgccggcaccctactcactgcccactccccaacgccagtcgctccccacccagttaccgtccctacctacagggcaccaggcacccctacctacagctatgtgcctcctcagtggtag

SEQ ID NO: 23798 - DNA, 372 bp, Artificial Sequence
  derived and/or modified sequence
atgaatccagtctattcccccggttcttcaggggtgccctatgcgaacgcgaagggtatcggttacccggctggcttccccatgggatacgctgcagcagccccagcgtattctcctaacatgtacccaggagccaatcctacctttcagactggatacacaccgggtaccccttataaagtgtcctgcagccctactagtggggctgtacccccatacagctcctctccaaacgccgtacccatgtccccttgcgccgaccaatgggctcgtcagctgggacagatttcaggtcagcctttcgtgcttcttgctggtttgttatgttggcctcacggagaagcactggagtccctgatggattgcaattag

SEQ ID NO: 23799 - DNA, 588 bp, Artificial Sequence
  derived and/or modified sequence
atgaatccggtgtattccccagggagttctggagttccctatgctaacgctaagggaattggctatccagcgggattcccaatggggtacgccgctgccgctcccgcatactctccaaacatgtaccctggagccaatcctaccttccagaccggttacactccgggtaccccatacaaagtgtcttgctcccccaccagcggagccgtgccgccatattcttcttctcccaatccatatcagaccgccgtctaccctgttagatccgcctatccccaacaaagcccttatgcccagcaggggacatattatacacagccactgtacgccgcaccaccccacgtcatacatcatacaaccgtcgtccagccgaatggaatgcccgctaccgtgtaccctgcacctatccccccacctcggggaaatggcgtgactatgggaatggtggcaggcacaacgatggccatgtcggcagggaccctgctcactgctcactctccaactccagtagctccgcaccccgtcacagtgcccacttacagagctccagggacgccgacatatagctacgtgccaccgcaatggtag

SEQ ID NO: 23800 - DNA, 588 bp, Artificial Sequence
  derived and/or modified sequence
atgaatcccgtttactctcctggatcaagtggggtgccatatgctaacgccaaggggattggttatccagctggtttcccaatgggctacgccgctgccgctcctgcatattcaccaaacatgtaccctggcgcaaatcccaccttccagacaggctacaccccaggcacgccctataaggtgagctgctctccaacttcgggggctgttccaccctatagctcaagcccgaacccttatcaaacagccgtatatcccgtcagatccgcctatcctcagcagtccccttacgcgcagcaaggtacctactatacacagccactttacgccgctccgcctcacgtgatccaccacactaccgtagtgcagccgaacggcatgcccgctaccgtgtatccggcacccatacctccgccaagggggaacggggttacgatgggaatggtggccggaacaacaatggcaatgtcagctgggactttgctgaccgcacatagccccacccccgtggctccgcacccggtgaccgtacctacttaccgggctccgggaacaccaacttacagctacgtgccaccgcagtggtag

SEQ ID NO: 23801 - protein, 70 aa, Artificial Sequence
  derived and/or modified sequence
MPDGPGMTAASGKLYQFRHPVRLFWPKSKCYDYLYQEAEALLKNFPIQATISFYEDSDSEDEIEDLTCEN

SEQ ID NO: 23802 - protein, 128 aa, Artificial Sequence
  derived and/or modified sequence
MENAGGAEGTESGAAACAATDGPTRRAGADSGYAGFWRPWVDAGGKKEEETPNHAAEAMPDGPGMTAASGKLYQFRHPVRLFWPKSKCYDYLYQEAEALLKNFPIQATISFYEDSDSEDEIEDLTCEN

SEQ ID NO: 23803 - DNA, 213 bp, Artificial Sequence
  derived and/or modified sequence
atgcctgatgggccaggcatgaccgcggccagcggaaagttgtaccaatttcgacacccagtgaggctgttctggccaaagagcaagtgctacgactacctctatcaggaggcagaggcacttctaaaaaactttcctatccaggcaactatatcattctacgaagattccgattctgaagatgaaatagaagacctgacttgcgaaaactag

SEQ ID NO: 23804 - DNA, 387 bp, Artificial Sequence
  derived and/or modified sequence
atggagaatgccggtggggccgaaggcaccgaaagtggtgctgccgcttgcgcggcaaccgacggccccacaagaagagcgggcgcggattctgggtatgcgggcttttggagaccctgggtcgatgccgggggcaaaaaggaagaggagacccccaatcacgccgccgaggcgatgccggatggccctggcatgaccgcagcttcagggaaactgtaccaattccggcacccggtcaggctcttttggcccaaatccaaatgttatgactatttgtatcaggaggccgaagcactgctcaaaaacttccccatccaggctacaatcagcttttacgaggactcggatagtgaggatgagatcgaggacctcacatgcgaaaattag

SEQ ID NO: 23805 - DNA, 213 bp, Artificial Sequence
  derived and/or modified sequence
atgccagatggccctggcatgacagctgccagcggcaagctgtaccagttccgccaccctgtgcggctcttctggcccaagagcaaatgttatgactacctgtaccaggaggccgaggccctgctgaagaacttccccatccaggccaccatctccttctatgaagattctgattctgaagatgaaattgaggacctgacctgtgaaaattag

SEQ ID NO: 23806 - DNA, 387 bp, Artificial Sequence
  derived and/or modified sequence
atggagaatgctgggggcgctgagggcacagagagcggggctgctgcctgtgccgccacagatggccccaccaggagagctggagctgacagcggctacgccggcttctggaggccctgggtggatgctgggggcaagaaggaggaggagacccccaaccacgccgctgaggccatgccagatggccctggcatgacagctgccagcggcaagctgtaccagttccgccaccctgtgcggctcttctggcccaagagcaaatgttatgactacctgtaccaggaggccgaggccctgctgaagaacttccccatccaggccaccatctccttctatgaagattctgattctgaagatgaaattgaggacctgacctgtgaaaattag

SEQ ID NO: 23807 - DNA, 213 bp, Artificial Sequence
  derived and/or modified sequence
atgcccgacggccccggcatgaccgccgccagcggcaagctgtaccagttccggcatcccgtccgactcttttggcccaagagtaaatgctatgactatttgtatcaggaggctgaggcacttctaaagaattttcccatccaggcaaccatcagcttctacgaagattcagactccgaggatgaaatcgaggatcttacctgtgaaaattag

SEQ ID NO: 23808 - DNA, 387 bp, Artificial Sequence
  derived and/or modified sequence
atggagaacgccggcggcgccgagggcaccgagagcggcgccgccgcctgcgcagctaccgatgggcctactcggagagccggcgcagattcagggtacgccggcttttggcgaccctgggtcgacgctggtggcaagaaagaggaggagactcctaaccacgcagctgaagcaatgcctgatggacctgggatgactgcagcatccgggaaactctatcagttccgccatccagtgcgtcttttttggcccaaaagtaaatgctatgattatctttatcaggaagccgaggccctcctcaagaattttccaatccaagcaacgataagcttttacgaggattccgactcagaagatgagatcgaggaccttacctgcgaaaattag

SEQ ID NO: 23809 - DNA, 213 bp, Artificial Sequence
  derived and/or modified sequence
atgcccgacgggcctggtatgaccgctgccagtgggaagctgtaccagttccggcaccctgtgcgcctgttctggcctaagtcgaaatgttacgattacttgtaccaggaagcagaggctttactgaaaaatttcccaatccaggctaccatttccttttatgaagattctgactctgaggacgaaatagaagaccttacatgtgagaactag

SEQ ID NO: 23810 - DNA, 387 bp, Artificial Sequence
  derived and/or modified sequence
atggaaaatgccggaggcgctgagggtacagagtccggtgcagccgcttgcgcagcgactgatggtcccactaggagggccggagcggattccggttacgccggtttctggcgtccgtgggtggacgccggtggtaaaaaagaggaggaaacgccgaatcacgcagcagaggctatgcccgatggccctggtatgaccgccgcatccgggaaactgtaccagtttcgccaccccgtccgcctcttctggccgaagtcgaagtgctatgattacctgtaccaggaagcagaggcccttctcaagaactttcctattcaagcaaccatcagtttctacgaagacagtgattctgaagacgagatcgaagatctcacttgtgagaactag

SEQ ID NO: 23811 - DNA, 521 bp, Artificial Sequence
  derived and/or modified sequence
ctctccatcccccactgcccggtgccagcgctcggcttcggtggattctcccgggtctgggctcacgtctcctctgcgcgccttgtgctcccctatcccgcagatacgcaggcttctggagaccctgggtggacgccggaggcaagaaagaagaggagacgccgaaccacgccgcggaggcgatgcccgatggccctggaatgaccgcagcctcaggaaagctttaccaattcaggcacccagtcagactattttggccaaaatcaaaatgttatgattacttatatcaagaagcagaagctcttctgaaaaattttccaattcaagccacaatttcattttatgaagattctgatagcgaagatgaaattgaggatctgacctgtgaaaattaatctgattagctacttttgattatatccaaagcttgtggggtttaaatttagtgtacaaatgtatcataattattttaaactaatttatttgtatataaattattaataaaatgaaatattttgtaa

SEQ ID NO: 23812 - DNA, 664 bp, Artificial Sequence
  derived and/or modified sequence
gcggctagcagggagaggggcggagaggcagcgaacctctcaatgtgcagcaggccgcgagggctatataaagctcgggtctcggacctactggaactggtcaagattgcccgcgagctggcagcggccttccgcccagctctgcggcgtcatggagaacgcgggaggcgcagagggtacagagagtggagctgcggcgtgcgcggccaccgacggccctacgcggcgcgcgggcgcggactccggatacgcaggcttctggagaccctgggtggacgccggaggcaagaaagaagaggagacgccgaaccacgccgcggaggcgatgcccgatggccctggaatgaccgcagcctcaggaaagctttaccaattcaggcacccagtcagactattttggccaaaatcaaaatgttatgattacttatatcaagaagcagaagctcttctgaaaaattttccaattcaagccacaatttcattttatgaagattctgatagcgaagatgaaattgaggatctgacctgtgaaaattaatctgattagctacttttgattatatccaaagcttgtggggtttaaatttagtgtacaaatgtatcataattattttaaactaatttatttgtatataaattattaataaaatgaaatattttgtaa

SEQ ID NO: 23813 - DNA, 213 bp, Artificial Sequence
  derived and/or modified sequence
atgcccgacggccccggcatgaccgccgccagcggcaagctgtaccagttcagacaccccgtgagactgttctggcccaagagcaagtgctacgactacctgtaccaggaggccgaggccctgctgaagaacttccccatccaggccaccatcagcttctacgaggacagcgacagcgaggacgagatcgaggacctgacctgcgagaactag

SEQ ID NO: 23814 - DNA, 387 bp, Artificial Sequence
  derived and/or modified sequence
atggagaacgccggcggcgccgagggcaccgagagcggcgccgccgcctgcgccgccaccgacggccccaccagaagagccggcgccgacagcggctacgccggcttctggagaccctgggtggacgccggcggcaagaaggaggaggagacccccaaccacgccgccgaggccatgcccgacggccccggcatgaccgccgccagcggcaagctgtaccagttcagacaccccgtgagactgttctggcccaagagcaagtgctacgactacctgtaccaggaggccgaggccctgctgaagaacttccccatccaggccaccatcagcttctacgaggacagcgacagcgaggacgagatcgaggacctgacctgcgagaactag

SEQ ID NO: 23815 - protein, 570 aa, Artificial Sequence
  derived and/or modified sequence
MRKKDKQSIRDVRDIFGVSESPPRDTCGNHTNQLDGTKEERELPRVIKTSGSMPDDASLNSTTLSDASQDKEGSFAVPRSDSVAILETIPVLPVHSNGSPEPGQPVQNAISDDDFLEKNIPPEAEELSFEVSYSEMVTEALKRNKLKKSEIKKEDYVLTKFNVQKTRFGLTEAGDLSAEDMKKIRHLSLIELTAFFDAFGIQLKRNKTEKVKGRDNGIFGVPLTVLLDGDRKKDPGVKVPLVLQKFFEKVEESGLESEGIFRLSGCTAKVKQYREELDAKFNADKFKWDKMCHREAAVMLKAFFRELPTSLFPVEYIPAFISLMERGPHVKVQFQALHLMVMALPDANRDAAQALMTFFNKVIANESKNRMSLWNISTVMAPNLFFSRSKHSDYEELLLANTAAHIIRLMLKYQKILWKVPSFLITQVRRMNEATMLLKKQLPSVRKLLRRKTLERETASPKTSKVLQKSPSARRMSDVPEGVIRVHAPLLSKVSMAIQLNNQTKAKDILAKFQYENSHGSSECIKIQNQRLYEIGGNIGEHCLDPDAYILDVYRINPQAEWVIKPQQSS

SEQ ID NO: 23816 - DNA, 1713 bp, Artificial Sequence
  derived and/or modified sequence
atgcggaaaaaggataagcagtcaatcagggacgtccgagacatattcggggtttcagagagcccacccagagatacctgcggtaatcatacaaaccagctggatggaaccaaggaagagagggaattgccccgtgtgattaagacatccggtagtatgccggatgacgcgagtctgaattccacaaccctatccgacgctagccaggacaaggaaggctccttcgccgtacctcggtctgattctgttgctatcctggagacaattcccgtactgcctgtgcattcaaatggatcacctgagcctgggcagcccgtccaaaacgcaatctctgacgacgattttctggaaaagaacattccaccggaggccgaggaactctctttcgaggtcagctactccgagatggtcaccgaggcactgaagagaaataagctgaagaaatccgaaataaagaaggaagattacgttctcaccaagttcaatgtgcagaagacacgcttcgggctgacagaggctggggatttaagcgccgaggacatgaagaagatccgccatctttccctaattgaacttaccgctttctttgacgcctttggtattcagcttaaacggaacaaaacggagaaagtaaaagggcgggacaacggcatctttggggtcccacttactgtgctgcttgacggggacagaaaaaaggaccccggcgttaaggtgccattggtgctgcagaaattttttgaaaaagtggaagaaagcggactggagagtgagggaattttccgtctgtccggttgtaccgcgaaggttaagcaatatcgggaagaactggacgccaaatttaatgcagacaaatttaagtgggataagatgtgccaccgggaggcggctgttatgttaaaggctttttttcgtgagttgcccacttctttgtttcccgtagagtatataccagcgttcatttcgctgatggagcggggaccccacgttaaggtgcagttccaggcactgcacctgatggtaatggccctgcctgatgccaatcgcgacgcagcccaggcacttatgactttctttaataaagttattgccaatgagtcaaaaaataggatgagcctctggaatatttcaaccgtcatggcccccaacctcttctttagtcgaagcaaacactcagactacgaagaactgctgcttgccaacactgctgctcacattattaggcttatgctgaagtaccagaaaatcctgtggaaagtgccatccttcctaatcacccaggtccggagaatgaatgaagctacaatgctgctcaaaaaacagctcccatctgtacgcaaactgctcagacgtaaaactctggagagggagactgcaagcccaaaaacgtccaaagttctgcagaagtctccttcagcaagaaggatgagcgacgtgcctgaaggcgtgattcgggtccacgccccattgctatccaaagtgtcgatggcgatacagttgaacaaccagactaaagcaaaagatatcctcgccaagtttcagtatgagaactcgcatgggtcaagtgaatgcatcaaaatccagaaccagagattgtatgagattggtgggaacatcggagaacattgtctagaccctgacgcctacattctggacgtgtatcggatcaatccccaggcagaatgggtgattaagccacagcagtcttcgtag

SEQ ID NO: 23817 - DNA, 1713 bp, Artificial Sequence
  derived and/or modified sequence
atgcgcaaaaaggacaagcaatcaatccgggatgtcagggacatctttggagtttcggagagccctcccagggatacttgcggaaaccacacaaaccaactggacggaaccaaggaggaacgggagctccctcgggtaattaaaacatctggaagcatgcctgacgacgcctccctcaactccaccacactctctgatgcctctcaagacaaggaagggagctttgccgtaccccgaagtgattcagtggcaatcctggaaacaattccagtccttccagtgcattcgaacggttccccagagcccggacagcctgtacaaaatgctatctcagacgatgattttctagaaaaaaacatccccccggaagccgaagaactgagcttcgaggtctcttactctgagatggtgaccgaggcactgaagaggaataagctgaaaaaatccgaaatcaagaaagaggactacgtcctgacaaagtttaatgtgcagaagaccagattcgggctgacggaagccggggacctaagtgccgaagatatgaagaaaatccgccatttgagcctcatcgagttaacagctttcttcgatgctttcggcattcagctgaagagaaacaaaaccgagaaggttaaaggtagagataacgggatttttggagtgcctctcaccgttttgttagatggcgacaggaagaaagacccgggcgtgaaagtgccacttgttctacaaaagttcttcgagaaagtcgaggagtcaggcctagagtctgaaggcatctttaggctgtccggttgcacggccaaggtcaagcagtaccgggaagagctggatgccaagttcaatgccgacaagttcaagtgggataagatgtgccatagagaggcagctgtaatgctaaaggcgtttttcagagagctgcccacctctctgtttcccgtggagtacattccagcctttatttcactgatggaacgtgggccccacgttaaagtacaatttcaggcccttcacctcatggtcatggcattgccagatgccaatcgggacgctgctcaggctctgatgactttcttcaataaggtgatcgctaacgagagcaagaacagaatgtcactctggaacatttctaccgttatggctcccaatctgttcttctctcgaagtaagcacagtgattatgaggagctgctccttgccaacaccgctgcccacattattcgtctgatgcttaagtatcaaaaaatcctttggaaggtgccttcctttcttatcacccaagtgaggcgtatgaacgaggcaaccatgctgctgaaaaagcagttgccgtccgttaggaagctgctgcgtcgaaagacactggaaagagaaaccgcttcccccaagacgtctaaggtacttcagaagagcccttctgcgaggaggatgtctgatgtgccagagggagtcatccgcgtccatgcccctcttttgtcaaaggtgagcatggccattcaactaaataatcaaaccaaagccaaagacatcctcgccaagtttcagtacgaaaacagccacggcagctctgagtgtattaagattcaaaaccagagactgtacgagatcgggggcaacattggcgaacattgtctcgaccctgacgcttatatcctggatgtgtaccgcataaatcctcaggcggaatgggtgataaagccgcaacagtcatcgtag

SEQ ID NO: 23818 - DNA, 1713 bp, Artificial Sequence
  derived and/or modified sequence
atgaggaagaaggacaagcagagcatcagagatgtgcgggacatcttcggcgtgtctgagagccccccccgggacacctgtggcaaccacaccaaccagctggatggcaccaaggaggagcgggagctgcccagggtcatcaagaccagcggctccatgccagatgatgccagcctgaacagcaccaccctgagtgatgccagccaggacaaggagggcagctttgctgtgcccaggagtgacagcgtggccatcctggagaccatccctgtgctgcctgtgcacagcaatggcagccctgagcccggccagcctgtgcagaatgccatcagtgatgatgacttcctggagaagaacatccccccagaggccgaggagctgagctttgaggtgtcctacagcgagatggtgacagaggccctgaagaggaacaagctgaagaagtctgagatcaagaaggaggactatgtgctgaccaagttcaacgtgcagaagacccgcttcggcctgacagaagctggggacctgtctgctgaggacatgaagaagatccgccacctgagcctcatcgagctgacagccttctttgatgccttcggcatccagctgaagaggaacaagacagagaaggtgaagggccgggacaatggcatctttggagtgcccctgactgtgctgctggatggagacaggaagaaggaccccggggtgaaggtgcccctggtgctgcagaagttctttgagaaggtggaggagagcggcctggagagcgagggcatcttccggctgagcggctgcacagccaaggtgaagcagtaccgggaggagctggatgccaagttcaatgctgacaagttcaagtgggacaagatgtgccaccgggaggccgctgtgatgctgaaggccttcttccgggagctgcccaccagcctcttccctgtggagtacatcccagccttcatcagcctgatggagcggggcccccacgtgaaggtgcagttccaggccctgcacctgatggtgatggccctgcctgatgccaacagagatgctgcccaggccctgatgaccttcttcaacaaggtgattgccaatgaaagcaagaacaggatgagcctgtggaacatcagcacagtgatggcccccaacctcttcttcagccgcagcaagcacagcgactatgaggagctgctgctggccaacacagctgcccacatcatccggctgatgctgaagtaccagaagatcctgtggaaggtgcccagcttcctgatcacccaggtgcggaggatgaatgaggccaccatgctgctgaagaagcagctgcccagcgtgaggaagctgctgcggaggaagaccctggagcgggagacagccagccccaagaccagcaaggtgctgcagaagagccccagcgcccggaggatgtctgatgtgcctgagggcgtcatccgggtgcacgcccccctgctgagcaaggtgtccatggccatccagctgaacaaccagaccaaggccaaggacatcctggccaagttccagtatgagaacagccacggcagcagcgagtgcatcaagatccagaaccagaggctgtatgaaattggaggcaacattggagagcactgcctggaccctgatgcctacatcctggatgtgtaccgcatcaacccccaggccgagtgggtgatcaagccccagcagagcagctag

SEQ ID NO: 23819 - DNA, 1713 bp, Artificial Sequence
  derived and/or modified sequence
atgcggaagaaggacaagcagagcatccgggacgtgcgggacatcttcggtgtcagtgagagcccccctcgtgacacatgcggaaaccacaccaaccagctggacggtacaaaggaggaaagagaattgccccgggtcatcaagacctccggatccatgcctgatgacgcatccctaaactctacgactttgagcgatgcctcacaggacaaagaggggagctttgcagttccacgctctgactccgtggccattctggagactattcctgtgttgcccgtgcattctaacggaagccccgaacccggccagcccgtgcagaacgctatctccgacgatgatttcctggagaagaatataccaccagaggctgaggagctcagttttgaggtgtcttactctgaaatggtgaccgaggcgctcaaaagaaacaaacttaagaagtccgagattaaaaaggaagattatgtgctcaccaaatttaacgtccagaagacgaggtttggcctcaccgaagcgggggacctcagcgcagaggatatgaagaagatacggcacctttccttaattgagctgactgcctttttcgatgcatttggtatacagctgaaacgtaataaaactgagaaggtgaagggccgggataacgggatctttggcgtgcctctcaccgtgctgctggacggggatcgaaaaaaggatccaggggttaaagtgcccctcgtgctccagaagtttttcgagaaggtcgaagagagcgggctcgagtcagagggcatcttcaggctgtctgggtgtaccgccaaggtgaagcagtacagagaagaactggatgctaaattcaacgctgataagtttaaatgggacaagatgtgccatcgagaggctgccgtaatgcttaaggccttcttccgggaactgcctactagtctgttccctgtggagtacattcctgccttcatctccctgatggaacgggggcctcatgtgaaagtacagtttcaggcactgcatcttatggttatggcactgcccgatgccaaccgcgacgcagcacaggctctgatgacgttttttaacaaggttatcgctaatgaatccaaaaaccgcatgtctctgtggaacattagtacggtgatggctcctaatctcttcttttcgcggtctaaacatagcgactacgaagagctgttactggctaatactgccgcacacattattagactgatgctgaaatatcagaaaattctgtggaaggtccctagttttctcataacccaagttaggagaatgaacgaagcaacaatgttactcaaaaagcagcttccaagcgtgcgcaagttattgaggcgcaagaccctcgagagggaaacagccagccctaagaccagtaaagtgctgcagaagtctccctccgcccggcggatgtccgacgtgcccgaaggggtaatccgagtccacgcaccactcttgagtaaagtgagtatggctatacagctgaacaaccaaaccaaagcaaaggatatactggcgaagtttcaatacgaaaatagccacggctccagcgagtgtataaagatccaaaaccaacgactgtacgaaattggcgggaacatcggggagcactgcctagaccctgatgcgtatattctagacgtttataggattaatcctcaagccgagtgggtaattaaaccccaacagtcctcatag

SEQ ID NO: 23820 - DNA, 1713 bp, Artificial Sequence
  derived and/or modified sequence
atgcggaagaaggacaagcagagcatccgggacgtgcgggacatcttcggtgtgtcagaaagtcctccccgagatacctgtggaaatcatacgaaccagctggatggtaccaaggaggaacgcgagctgccccgggttatcaagacttcaggctctatgcccgacgacgcctctttgaacagtaccactctgagtgacgccagccaagacaaggagggaagtttcgcggtccctaggtctgactcagtggcaattctggaaacaattcccgtgctgcccgtccacagcaatggaagccctgaacccggtcagccggttcagaatgctatctccgatgatgacttcctggagaaaaacattccacctgaggccgaggagttatccttcgaagtgtcttacagcgaaatggtgacagaagctctgaagagaaacaagcttaagaaatcagaaatcaaaaaagaagattacgtcctgactaaatttaacgtgcagaaaacacggttcggtctgaccgaggctggagatctctcagctgaggatatgaagaaaatacggcacctctcactaatcgagttgacagcgttttttgacgcctttggaatacagctgaagcgaaacaaaacggaaaaagtgaagggacgcgacaatggtattttcggcgtccctcttacagttctgctggatggagaccgcaagaaagatccaggggttaaggtccctctggttcttcagaagttctttgaaaaggtcgaagagtcagggttagagtccgaggggatctttagactgtccggttgtacagccaaagttaaacagtatcgggaagaactcgatgcgaagttcaacgccgataaatttaagtgggacaagatgtgtcatcgggaggcagccgtcatgctgaaggctttcttcagggagctgcctacgagtttgtttcctgttgagtacatcccagcatttatcagtctgatggaaaggggccctcacgtaaaggtgcagtttcaggcactgcacctgatggtgatggcgctgcctgacgccaacagagatgcagcccaggccctgatgaccttcttcaataaagtcatcgcaaacgaaagcaaaaaccgcatgagcctctggaacatcagcacagtgatggctcccaacctttttttctctcgatccaagcattcagactatgaagaacttctgttggcgaatactgccgcgcatatcatacgccttatgctcaagtaccagaagattctctggaaggtgccctcttttctcataacccaggtgaggcgcatgaacgaagcaacaatgctgctgaagaagcagctaccgtccgttcgaaaattactcagacgtaagactctcgaacgggagactgccagtcccaagacgtcgaaagtcttacaaaagagtcccagtgccagaagaatgtctgatgtgccggagggtgtcatccgcgtccatgctcccctgctcagtaaggtttctatggctatccagctaaataaccagacaaaggccaaggacattctcgcaaagttccagtatgagaacagccacgggtcttcagagtgcatcaaaattcagaatcagaggttatatgagattggtgggaatatcggcgaacactgtctggacccagatgcctacatcctcgacgtctataggatcaatccccaagccgagtgggtgattaagccacagcagtccagctag

SEQ ID NO: 23821 - DNA, 1713 bp, Artificial Sequence
  derived and/or modified sequence
atgcggaaaaaggacaaacagtctatccgagacgtgcgagacattttcggcgtgtctgagagcccccctcgggacacatgcgggaaccatacaaatcaattagacggaacaaaggaggaacgggaattgcccagagtcattaaaaccagtggatctatgccagatgatgcaagcctcaattcaacaacgctatcggacgccagccaggataaggagggaagctttgccgtacctcgcagcgactctgtcgcgattctggagactatcccagtgctccctgttcattcaaacggctcacctgagcccggacaacctgttcagaacgccatcagtgatgatgatttccttgagaaaaacattcctcccgaggccgaggagcttagcttcgaggtctcatactcagagatggtcacagaagcactgaagagaaacaagctgaagaagtccgaaataaagaaagaggattatgtgctgaccaagttcaacgtgcagaaaacgcgcttcggcctgaccgaggccggtgacctctctgctgaggatatgaagaaaatccgccatctgtcactgatcgagctgaccgccttttttgatgcttttggcatccaactgaaacggaataagacggaaaaggtaaagggcagggataacggaatctttggcgtcccactaaccgttctcctggacggtgaccgcaaaaaagatcctggagttaaggtgccacttgttttgcagaagttcttcgaaaaggtggaggagtcaggcctggagtcggaaggaatcttcaggctgagcggatgtactgccaaagttaaacagtatcgtgaggagctggatgccaagttcaacgccgataagttcaagtgggacaagatgtgtcacagggaagccgctgtcatgctcaaggcctttttccgagagcttcccaccagtcttttccctgtagagtacatccctgcgttcattagcctgatggagcgtggacctcacgtaaaagtgcaattccaagcactacacctgatggttatggccctccctgatgccaatcgcgacgcagctcaggcattgatgacattcttcaataaagttattgccaacgaatctaaaaaccgcatgagcctatggaacatcagtactgttatggccccaaatttgtttttctcacggtccaagcactccgattacgaagagctgctcttggctaacaccgccgctcacatcatacggctgatgctgaaatatcagaagattctctggaaagtaccaagcttcctgattacccaagtccgcaggatgaatgaggctacaatgctgctgaagaaacagctgccaagcgtgagaaaacttctgcgcaggaagacacttgagcgcgaaaccgcttctccaaagacctccaaagtgctgcagaagtctccctcggctaggagaatgtctgatgtgcctgagggcgtaatccgggtccatgcacccctcctgtccaaggtgtccatggctatacaactcaacaatcaaactaaggcaaaggatatcctggcaaagtttcagtatgagaacagccacggctcgtccgaatgcattaaaattcaaaaccagcgcttatacgagattgggggaaacatcggtgagcactgcctggaccccgacgcatacatccttgatgtgtatagaatcaaccctcaagcagagtgggtgataaaacctcagcagtcaagctag

SEQ ID NO: 23822 - DNA, 1713 bp, Artificial Sequence
  derived and/or modified sequence
atgcgcaaaaaggacaaacaatctattagggatgtcagggacattttcggggtgagcgagtcaccacccagggatacctgcgggaatcataccaatcagcttgatggtacaaaggaggaaagggagctccctagggtaatcaaaacctccgggtcgatgcctgatgatgcgagtcttaactctacgacactatccgatgcctcccaggataaggagggcagcttcgcagtgccacggtctgattcagttgcaatcttggaaaccataccggtgctgcctgtccactcaaacggtagtccagaaccaggccaaccagtccagaacgcaatttccgacgatgacttcctggaaaagaatatcccaccagaagccgaggagctatctttcgaggtgtcctactctgagatggttactgaggccttgaagcgcaataaactaaagaagtcggaaataaaaaaagaagactatgtgctaaccaaatttaatgtgcagaagactcgcttcgggttgactgaggccggagacctgagtgcggaagacatgaaaaaaatccggcatctcagtctgatcgagttaactgcctttttcgatgcttttggaatccagctgaagcgtaataagacggaaaaggtaaaagggagagataatggaatttttggggtccctctgacagtactcttagacggggacaggaaaaaggacccaggggttaaggtaccccttgtgctgcagaagttcttcgaaaaagtggaggagtccgggcttgagtcagaaggcatctttcggctttcgggctgcactgctaaagtcaaacagtatagggaggagctggacgctaaattcaatgcagacaaatttaagtgggacaagatgtgtcacagagaggcagccgtaatgctgaaggcattctttagagagttgccaacttcacttttccctgtggaatacattcctgcctttatcagtctaatggagcggggtccccacgtcaaagtgcagttccaggcactgcatcttatggtcatggcactgccggacgctaatagggacgcagcacaggcgttgatgacattctttaataaagtgattgccaatgagagcaagaaccgcatgtcattgtggaatattagcactgtaatggcccctaatctattcttctcccgttctaaacatagcgattatgaagagctgcttctcgcaaacacggcagcacacatcatcaggctgatgctcaagtaccagaaaattctgtggaaagtgccctcctttctgatcacccaggtgcggcgtatgaacgaggctactatgctcctgaagaaacaactcccatccgtcaggaagctgttgcggaggaagacactcgagcgcgaaacagccagtccgaagacctcgaaggtgctacagaagagcccaagtgctcgtcgcatgtccgacgtccccgagggcgtgatccgcgtccacgctcccctcctcagcaaagtctctatggccatccaactcaacaaccagactaaagcgaaggacatccttgctaagttccagtacgagaactcacatggctcttctgagtgcattaagatacagaatcagcgcttatatgagatcggcggaaatattggcgagcactgtttagacccggacgcctacatccttgatgtctatcgaatcaacccccaggcggagtgggtcatcaagcctcagcagagcagctag

SEQ ID NO: 23823 - DNA, 1713 bp, Artificial Sequence
  derived and/or modified sequence
atgagaaagaaggacaagcagagcatcagagacgtgagagacatcttcggcgtgagcgagagcccccccagagacacctgcggcaaccacaccaaccagctggacggcaccaaggaggagagagagctgcccagagtgatcaagaccagcggcagcatgcccgacgacgccagcctgaacagcaccaccctgagcgacgccagccaggacaaggagggcagcttcgccgtgcccagaagcgacagcgtggccatcctggagaccatccccgtgctgcccgtgcacagcaacggcagccccgagcccggccagcccgtgcagaacgccatcagcgacgacgacttcctggagaagaacatcccccccgaggccgaggagctgagcttcgaggtgagctacagcgagatggtgaccgaggccctgaagagaaacaagctgaagaagagcgagatcaagaaggaggactacgtgctgaccaagttcaacgtgcagaagaccagattcggcctgaccgaggccggcgacctgagcgccgaggacatgaagaagatcagacacctgagcctgatcgagctgaccgccttcttcgacgccttcggcatccagctgaagagaaacaagaccgagaaggtgaagggcagagacaacggcatcttcggcgtgcccctgaccgtgctgctggacggcgacagaaagaaggaccccggcgtgaaggtgcccctggtgctgcagaagttcttcgagaaggtggaggagagcggcctggagagcgagggcatcttcagactgagcggctgcaccgccaaggtgaagcagtacagagaggagctggacgccaagttcaacgccgacaagttcaagtgggacaagatgtgccacagagaggccgccgtgatgctgaaggccttcttcagagagctgcccaccagcctgttccccgtggagtacatccccgccttcatcagcctgatggagagaggcccccacgtgaaggtgcagttccaggccctgcacctgatggtgatggccctgcccgacgccaacagagacgccgcccaggccctgatgaccttcttcaacaaggtgatcgccaacgagagcaagaacagaatgagcctgtggaacatcagcaccgtgatggcccccaacctgttcttcagcagaagcaagcacagcgactacgaggagctgctgctggccaacaccgccgcccacatcatcagactgatgctgaagtaccagaagatcctgtggaaggtgcccagcttcctgatcacccaggtgagaagaatgaacgaggccaccatgctgctgaagaagcagctgcccagcgtgagaaagctgctgagaagaaagaccctggagagagagaccgccagccccaagaccagcaaggtgctgcagaagagccccagcgccagaagaatgagcgacgtgcccgagggcgtgatcagagtgcacgcccccctgctgagcaaggtgagcatggccatccagctgaacaaccagaccaaggccaaggacatcctggccaagttccagtacgagaacagccacggcagcagcgagtgcatcaagatccagaaccagagactgtacgagatcggcggcaacatcggcgagcactgcctggaccccgacgcctacatcctggacgtgtacagaatcaacccccaggccgagtgggtgatcaagccccagcagagcagctag

SEQ ID NO: 23824 - protein, 260 aa, Artificial Sequence
  derived and/or modified sequence
MSLQKTPPTRVFVELVPWADRSRENNLASGRETLPGLRHPLSSTQAQTATREVQVSGTSEVSAGPDRAQVVVRVSSTKEAAAEAKKSVCRRLDYITQSLQQQGVQAENITVTKDFRRVENAYHMEAEVCITFTEFGKMQNICNFLVEKLDSSVVISPPQFYHTPGSVENLRRQACLVAVENAWRKAQEVCNLVGQTLGKPLLIKEEETKEWEGQIDDHQSSRLSSSLTVQQKIKSATIHAASKVFITFEVKGKEKRKKHL

SEQ ID NO: 23825 - DNA, 783 bp, Artificial Sequence
  derived and/or modified sequence
atgagcctgcagaagaccccccccaccagagtgttcgtggagctggtgccctgggccgacagaagcagagagaacaacctggccagcggcagagagaccctgcccggcctgagacaccccctgagcagcacccaggcccagaccgccaccagagaggtgcaggtgagcggcaccagcgaggtgagcgccggccccgacagagcccaggtggtggtgagagtgagcagcaccaaggaggccgccgccgaggccaagaagagcgtgtgcagaagactggactacatcacccagagcctgcagcagcagggcgtgcaggccgagaacatcaccgtgaccaaggacttcagaagagtggagaacgcctaccacatggaggccgaggtgtgcatcaccttcaccgagttcggcaagatgcagaacatctgcaacttcctggtggagaagctggacagcagcgtggtgatcagccccccccagttctaccacacccccggcagcgtggagaacctgagaagacaggcctgcctggtggccgtggagaacgcctggagaaaggcccaggaggtgtgcaacctggtgggccagaccctgggcaagcccctgctgatcaaggaggaggagaccaaggagtgggagggccagatcgacgaccaccagagcagcagactgagcagcagcctgaccgtgcagcagaagatcaagagcgccaccatccacgccgccagcaaggtgttcatcaccttcgaggtgaagggcaaggagaagagaaagaagcacctgtag

SEQ ID NO: 23826 - DNA, 783 bp, Artificial Sequence
  derived and/or modified sequence
atgtcacttcagaagacgcctcccacacgggttttcgtggaattagttccctgggctgacaggtcgcgggagaataatctggcttccggaagggagacattgcccggactgagacaccccctgtccagcacccaagctcagacagctacgagggaggttcaggtatccggcacatcagaggtcagtgcaggtccagatagggcacaggtggtcgtgagggtgtcaagcaccaaagaggccgctgccgaagctaagaaatctgtgtgtagacgcctagattacatcactcaaagcttacagcagcagggcgttcaggccgaaaatatcaccgtgaccaaggattttcgccgagtggaaaacgcctatcatatggaagccgaggtgtgtatcacttttactgagtttggcaaaatgcagaacatctgcaacttccttgtggaaaaactagacagctctgtcgtcatttctcctccacagttctaccacacccccggcagtgtcgaaaacctcaggaggcaagcttgtttagtcgcggttgagaacgcttggagaaaggcccaggaggtatgtaatctcgttggacagactctgggaaagcccctgctgatcaaggaggaagaaactaaagaatgggaaggccaaattgacgatcaccagagttcccgtctctcgtcctcactcaccgttcagcagaaaattaaatccgcgacaatccatgcggcatcgaaagtgttcattaccttcgaggtaaagggcaaggaaaaacgcaaaaagcatctatag

SEQ ID NO: 23827 - DNA, 1157 bp, Artificial Sequence
  derived and/or modified sequence
ccatcccggcatactttgcgccgtgcacaggcaagccctggtgcgcattggccccttcggccgccgtcggccggtagttactatggaaacccagctgccatcgctatgtctctgcaaaagacccctccgacccgagtgttcgtggaactggttccctgggctgaccggagccgggagaacaacctggcctcagggagagagacgctaccgggcttacgccaccccctctcctcaacacaagcccaaactgctacccgcgaggtgcaagtaagcggcacctcagaagtgtctgcgggccctgaccgggcgcaggtggtggtgcgagtgagcagcaccaaggaggcggcagccgaggccaaaaagagcgtttgtcgccgtctagattacatcacgcagagcctccagcagcagggcgtgcaggcagaaaatataactgtgacaaaggattttaggagagtggaaaatgcttatcacatggaagcagaggtctgcattacatttactgaatttggaaaaatgcaaaatatttgtaactttcttgttgaaaagctagatagctctgttgtcatcagcccaccccagttctatcatactccaggttctgttgagaatcttcgacggcaagcctgtcttgttgctgttgagaatgcgtggcgcaaagctcaagaagtctgtaaccttgttggccaaaccttaggaaaacctttactaatcaaagaagaagaaacaaaagaatgggaaggccaaatagatgatcaccagtcatccagactctcaagttcattaactgtacaacaaaaaatcaaaagtgcaacaatacatgctgcttcaaaagtatttataacttttgaggtaaagggaaaagagaagagaaaaaagcacctttgaaattccaaacaaattatattgtacttgtatctttttacctatttttatactttttataatgtttacgtttgtcctgaatatatatatatatatatatatatatatatatatggtataggagataagctatttctttccaaaatctataaatctttgaatatagtcccacagaatacttatgttcactttctatttttaaaagactactctgaaaaacactcttggataataaatgtattatgtgcatacttatatactgacagttcata

SEQ ID NO: 23828 - DNA, 783 bp, Artificial Sequence
  derived and/or modified sequence
atgagcctgcagaagaccccacccaccagggtgtttgtggagctggtgccctgggccgacaggagccgggagaacaacctggccagcggccgggagaccctgcccggcctgcggcaccccctgagcagcacccaggcccagacagccacccgggaggtgcaggtgtctggcaccagcgaggtgtctgctggccctgaccgggcccaggtggtggtgcgggtgagcagcaccaaggaggccgctgctgaggccaagaagtctgtgtgccggcggctggactacatcacccagagcctgcagcagcagggcgtgcaggccgagaacatcaccgtgaccaaggacttccggcgggtggagaatgcctaccacatggaggccgaggtgtgcatcaccttcacagaatttgggaagatgcagaacatctgcaacttcctggtggagaagctggacagctctgtggtgatcagccccccccagttctaccacaccccaggctctgtggagaacctgcggcggcaggcctgcctggtggccgtggagaatgcctggaggaaggcccaggaggtgtgcaacctggtgggccagaccctgggcaagcccctgctgatcaaggaggaggagaccaaggagtgggagggccagattgatgaccaccagagcagccggctgagcagcagcctgactgtgcagcagaagatcaagagcgccaccatccacgccgccagcaaggtgttcatcacctttgaggtgaagggcaaggagaagaggaagaagcacctgtag

SEQ ID NO: 23829 - DNA, 783 bp, Artificial Sequence
  derived and/or modified sequence
atgagcctgcagaagaccccccccacccgggtgttcgtggagctggtgccgtgggccgaccgtagccgcgagaataacctagcctccgggagggagactttgcctggcctgcgacaccctttgagctcaacacaggcccaaacagctacacgtgaagtgcaagtctctggcaccagtgaggtcagtgcagggccagaccgcgcccaggttgttgtacgagtctcctcaactaaagaagcagccgcagaggctaagaagtcggtgtgtcgccgcctcgactacatcacacagtccttgcagcagcagggcgtgcaggccgaaaatataaccgtgactaaagacttccggcgcgtggagaatgcctaccacatggaagccgaagtctgtatcacctttacggaattcggcaaaatgcagaatatctgcaattttctggtcgagaagctcgattcgtcagtcgtgatcagtcctccccagttctatcacactcccggctcagtggaaaatttgcggcgacaggcctgtctggtggccgtggaaaacgcctggagaaaagcacaggaagtctgcaatctggtcggtcagaccctgggaaaaccacttctgattaaagaggaagagaccaaggagtgggaggggcaaatcgatgatcaccaatcaagtcgtctctccagcagccttacagtgcaacagaaaattaagagcgctacaattcatgcagcttccaaagtcttcatcacattcgaggtgaagggcaaagaaaaaaggaaaaaacatctgtag

SEQ ID NO: 23830 - DNA, 783 bp, Artificial Sequence
  derived and/or modified sequence
atgtccctacagaagacgccacccaccagggtttttgtggaacttgtgccctgggccgacaggagtcgggaaaacaatctagcctccggcagggaaactctcccgggactgcggcaccctttgagtagcacccaggcgcagaccgccacacgtgaggttcaggtgagtggcacctcggaggtttccgcaggacctgacagggcacaggtggtcgtgcgcgtgtccagcacgaaagaagccgcagccgaagccaaaaagtccgtatgtaggaggctggactatattacccagagcctccagcagcagggtgtgcaagccgagaatatcacagtcacgaaggactttcggagggtggaaaatgcataccacatggaagcagaagtttgcattacctttactgagttcggtaagatgcagaatatatgtaattttcttgtggagaagctggattccagcgtggtcatctctccaccccaattctatcacacacccggatccgttgaaaatctgagaagacaggcctgcctggtcgcagtggagaatgcttggcgcaaggcacaggaggtgtgtaacctggttggtcagacactgggtaagcccctgctcattaaagaggaagagacgaaggagtgggagggccaaatcgacgatcaccaatcaagtcggctcagctcctcactgaccgtccaacagaaaatcaagtccgcaaccatccacgcggcaagtaaagtattcattaccttcgaggtgaaaggcaaggagaagagaaaaaaacacctgtag

SEQ ID NO: 23831 - protein, 696 aa, Artificial Sequence
  derived and/or modified sequence
MSEGAAAASPPGAASAAAASAEEGTAAAAAAAAAGGGPDGGGEGAAEPPRELRCSDCIVWNRQQTWLCVVPLFIGFIGLGLSLMLLKWIVVGSVKEYVPTDLVDSKGMGQDPFFLSKPSSFPKAMETTTTTTSTTSPATPSAGGAASSRTPNRISTRLTTITRAPTRFPGHRVPIRASPRSTTARNTAAPATVPSTTAPFFSSSTLGSRPPVPGTPSTQAMPSWPTAAYATSSYLHDSTPSWTLSPFQDAASSSSSSSSSATTTTPETSTSPKFHTTTYSTERSEHFKPCRDKDLAYCLNDGECFVIETLTGSHKHCRCKEGYQGVRCDQFLPKTDSILSDPTDHLGIEFMESEEVYQRQVLSISCIIFGIVIVGMFCAAFYFKSKKQAKQIQEQLKVPQNGKSYSLKASSTMAKSENLVKSHVQLQNYSKVERHPVTALEKMMESSFVGPQSFPEVPSPDRGSQSVKHHRSLSSCCSPGQRSGMLHRNAFRRTPPSPRSRLGGIVGPAYQQLEESRIPDQDTIPCQGYSSSGLKTQRNTSINMQLPSRETNPYFNSLEQKDLVGYSSTRASSVPIIPSVGLEETCLQMPGISEVKSIKWCKNSYSADVVNVSIPVSDCLIAEQQEVKILLETVQEQIRILTDARRSEDYELASVETEDSASENTAFLPLSPTAKSEREAQFVLRNEIQRDSALTK

SEQ ID NO: 23832 - DNA, 2091 bp, Artificial Sequence
  derived and/or modified sequence
atgtctgagggcgcagctgccgcctcgccaccaggagcggcctcggcagcagcagctagcgcagaagagggcacggcagctgcggcagcagctgcagcagcaggcggcggacctgacggaggcggggagggcgccgctgaacctcctagagagttgcgctgctctgattgtatagtgtggaaccgccagcaaacgtggctgtgcgttgtgcccctttttatcggcttcattggtttgggccttagcctgatgctgttaaaatggatcgttgtgggatcggtcaaagaatatgtccctacggacctggtcgattcaaagggaatgggacaggatcctttctttctgagcaaacctagtagtttccccaaggccatggagaccacaaccacgactacaagtactactagccctgccactccaagcgcaggtggcgccgccagctcacggacacctaataggatttcgaccaggctgactacgatcacccgggccccaaccaggttccccggtcacagggtgcccattagagcttctcccagatccactacggctaggaataccgctgcgcctgccacagtcccgtcgacaactgccccattctttagttccagcaccctcggttccagaccaccagtgcctggcactccgtccactcaggcaatgcctagttggcctacggctgcctatgcaacatctagctacttacacgatagcacaccgtcttggactttgagcccatttcaggacgctgcatccagttcaagctcaagttcttcatccgccaccacaaccacaccagagacctctactagtccaaaattccacacgacaacatattccaccgagcgttccgagcactttaagccctgccgggataaagatctggcatactgtctgaatgacggagaatgcttcgtgatagagaccctcacggggtcgcacaagcactgtcgctgcaaagaaggttatcaaggcgtacggtgcgatcagttcctgcctaaaaccgattcaatcttgtcagacccaaccgaccacctgggtattgaattcatggaatcagaggaagtataccagcgacaggtgctgtccattagttgcatcatttttggtatcgtcattgtcggtatgttctgcgccgccttctacttcaagagcaaaaaacaagccaaacagatccaggaacagcttaaggtccctcagaatgggaagtcttactccctcaaggcctcatccaccatggccaagtctgaaaatctcgtgaagtcccacgtacagctccagaattacagtaaagtagagagacacccagtgactgcgttggaaaaaatgatggagagtagtttcgtgggtcctcagtcatttccagaagtgcctagtcctgatcgggggtcccaaagcgtgaaacatcacaggtccttaagttcatgttgtagtcctggtcagaggtctggcatgctccatcgaaacgcattccgcagaacgccgcctagcccaagatctcgtctgggaggcattgtggggcccgcttatcaacagctggaagagagcaggatccccgatcaggatactattccttgccagggatactcaagtagcggcctgaagactcagcgtaacacatccatcaacatgcagttgccctccagggagacaaacccttatttcaattccctagaacagaaagacctggttggatacagctccacaagagcaagttctgtccccatcattccgagtgtggggctggaggaaacctgcctgcaaatgccagggatctcggaagtgaagagtatcaagtggtgcaagaattcttattctgcggacgtggttaatgtcagtattcccgtttcagattgtctcatagccgaacagcaggaggtgaagatcctgctcgagacggtgcaagagcagatccggatcctgactgacgcccggcgctctgaggattatgagctcgccagcgtggagactgaagacagcgcctcagaaaatacagccttcctacctctatctccgacagccaaatccgagcgcgaggcacaattcgtgttgcgtaatgagattcagagagattccgcacttacaaaatag

SEQ ID NO: 23833 - DNA, 2091 bp, Artificial Sequence
  derived and/or modified sequence
atgtctgagggcgctgctgctgccagccccccaggagctgccagcgctgctgctgccagcgctgaggagggcacagctgctgctgctgctgctgctgctgctgggggcggcccagatggcggcggggagggcgctgctgagcccccccgggagctgcgctgcagcgactgcatcgtgtggaaccggcagcagacctggctgtgtgtggtgcccctcttcatcggcttcatcggcctgggcctgagcctgatgctgctgaagtggatcgtggtgggctctgtgaaggagtatgtgcccacagacctggtggacagcaagggcatgggccaggaccccttcttcctgagcaagcccagcagcttccccaaggccatggagaccaccaccaccaccaccagcaccaccagccctgccaccccatctgctgggggcgccgccagcagcaggacccccaaccgcatcagcacccggctgaccaccatcacccgggcccccacccgcttccctggccaccgggtgcccatccgggccagccccaggagcaccacagccaggaacacagctgccccagccaccgtgcccagcaccacagcccccttcttcagcagcagcaccctgggcagccggccccctgtgcccggcacccccagcacccaggccatgcccagctggcccacagctgcctatgccaccagcagctacctgcatgacagcacccccagctggaccctgagccccttccaggatgctgccagcagcagcagcagcagcagcagcagcgccaccaccaccaccccagagaccagcaccagccccaagttccacaccaccacctacagcacagagaggtctgagcacttcaagccctgccgggacaaggacctggcctactgcctgaatgatggagaatgttttgtgattgagaccctgaccggcagccacaagcactgccgctgcaaggagggctaccagggcgtgcgctgtgaccagttcctgcccaagacagacagcatcctgagtgaccccacagaccacctgggcatcgagttcatggagagcgaggaggtgtaccagaggcaggtgctgagcatcagctgcatcatctttggaattgtgattgtgggcatgttctgtgccgccttctacttcaagagcaagaagcaggccaagcagatccaggagcagctgaaggtgccccagaatggcaagagctacagcctgaaggccagcagcaccatggccaagtctgagaacctggtgaagagccacgtgcagctgcagaactacagcaaggtggagcggcaccctgtgacagccctggagaagatgatggagagcagctttgtgggcccccagagcttccctgaggtgcccagcccagaccggggcagccagagcgtgaagcaccacaggagcctgagcagctgctgcagccctggccagaggagcggcatgctgcacagaaatgccttccggaggaccccacccagccccaggagccggctgggcggcatcgtgggccctgcctaccagcagctggaggagagccgcatcccagaccaggacaccatcccctgccagggctacagcagcagcggcctgaagacccagaggaacaccagcatcaacatgcagctgcccagccgggagaccaacccctacttcaacagcctggagcagaaggacctggtgggctacagcagcacccgggccagctctgtgcccatcatccccagcgtgggcctggaggagacctgcctgcagatgcctggcatcagcgaggtgaagagcatcaagtggtgcaagaacagctacagcgcagatgtggtgaatgtgtccatccctgtgtctgactgcctgattgctgagcagcaggaggtgaagatcctgctggagaccgtgcaggagcagatccgcatcctgacagatgccaggagaagtgaggactatgagctggcctctgtggagacagaggacagcgcctctgaaaatacagccttcctgcccctgagccccacagccaagtctgagcgggaggcccagtttgtgctgagaaatgagatccagagggacagcgccctgaccaagtag

SEQ ID NO: 23834 - DNA, 2091 bp, Artificial Sequence
  derived and/or modified sequence
atgagcgagggcgccgccgccgccagcccccccggcgccgccagcgcggctgccgcttccgccgaggaaggcaccgctgcagccgcagcagccgccgccgcaggcggaggacctgatggcggaggcgagggcgccgctgaacccccgcgcgagctaagatgttcggactgtattgtatggaatagacagcagacttggctgtgcgtggtaccactgtttatcggtttcattgggctcgggctgtcactcatgctattaaagtggatcgtagttggcagtgtgaaagagtacgtacctactgacttggtggactctaagggcatgggacaggaccctttctttctctcaaagcccagtagcttccccaaagccatggaaacgaccaccaccaccacttccacaacaagtccagccaccccctccgcagggggggcagcctcatcccggacccccaatcggatcagtacacggcttaccactattaccagggcccctactcggtttcccggacaccgggtccctattagagctagccctcggagtacaacagctcgtaatacagccgctccagccacagtgccctccactacggcaccattttttagctcttcaaccctggggtccagaccccccgtccctggaacccccagtacccaggctatgccttcatggcctactgcagcatacgccactagcagctatcttcacgactcaaccccgagctggactcttagccccttccaggatgctgctagtagcagctcttcatccagcagctctgcaactacgactacacctgagacctcgacgagccccaagttccacacaacaacatactcaaccgagcggagcgagcacttcaagccttgtagagacaaagacttagcctattgtttaaatgacggagaatgcttcgtcattgagaccttgactggaagccataaacattgccgttgcaaagagggctaccagggcgtcaggtgtgatcagtttctgccaaagactgactctattctgtctgatccaacagaccatctcgggatagaattcatggagtccgaggaggtctaccagagacaggtgctgagcatcagctgtattatctttgggatagtgatagtgggcatgttctgcgctgcattctattttaaatctaaaaaacaggcgaagcagatccaggaacaattgaaagtcccgcagaatgggaaatcttattctctgaaggcctcttctaccatggccaagagtgaaaatctggtgaagtctcacgttcagctgcagaattacagcaaggttgagaggcacccggtcaccgcccttgagaagatgatggaatcatctttcgtgggccctcagtcttttcccgaagttccatccccagaccgcggctcacaaagcgttaagcaccacaggtccctgtcatcatgctgcagccccggccaaagaagtggaatgctccaccggaacgcatttagacggaccccccccagccctcgctcaagactggggggtatcgtgggtcccgcttatcagcagctggaggagagtcggatccctgaccaagatacaattccgtgtcagggctactcctcaagcggtctgaagacccagaggaatactagcatcaacatgcagctcccatcccgcgagacgaacccttacttcaactctctggagcagaaggatctggtgggctacagtagtacccgagcctcctcagtcccaattataccctcagtaggcctggaggagacatgcctgcagatgccaggcatttctgaagtgaaatctattaagtggtgcaagaattcctacagtgcagacgtggtgaacgtgtccattcctgtatctgattgccttatagccgaacaacaagaagtcaagattctgctggaaaccgtgcaggagcagattcggattctgacagatgcacgaaggtctgaagactacgagcttgccagcgtcgagacagaggactccgcgtccgagaacactgcttttctgcccttgtccccaaccgcaaagagcgaaagggaggcgcagttcgtgctcagaaatgaaatacagagagacagcgccctaacgaagtag

SEQ ID NO: 23835 - DNA, 2158 bp, Artificial Sequence
  derived and/or modified sequence
gggcgaaggtgaagaccggctcctaggatgagtgaaggggcggccgctgcctcgccacctggtgccgcttcggcagccgccgcctcggccgaggagggcaccgcggcggctgcggcggcggcagcggcgggcgggggcccggacggcggcggcgaaggggcggccgagcccccccgggagttacgctgtagcgactgcatcgtgtggaaccggcagcagacgtggctgtgcgtggtacctctgttcatcggcttcatcggcctggggctcagcctcatgcttctcaaatggatcgtggtgggctccgtcaaggagtacgtgcccaccgacctagtggactccaaggggatgggccaggaccccttcttcctctccaagcccagctctttccccaaggccatggagaccaccaccactaccacttccaccacgtcccccgccaccccctccgccgggggtgccgcctcctccaggacgcccaaccggattagcactcgcctgaccaccatcacgcgggcgcccactcgcttccccgggcaccgggtgcccatccgggccagcccgcgctccaccacagcacggaacactgcggcccctgcgacggtcccgtccaccacggccccgttcttcagtagcagcacgctgggctcccgacccccggtgccaggaactccaagtacccaggcaatgccctcctggcctactgcggcatacgctacctcctcctaccttcacgattctactccctcctggaccctgtctccctttcaggatgctgcctcctcttcttcctcttcttcctcctccgctaccaccaccacaccagaaactagcaccagccccaaatttcatacgacgacatattccacagagcgatccgagcacttcaaaccctgccgagacaaggaccttgcatactgtctcaatgatggcgagtgctttgtgatcgaaaccctgaccggatcccataaacactgtcggtgcaaagaaggctaccaaggagtccgttgtgatcaatttctgccgaaaactgattccatcttatcggatccaacagaccacttggggattgaattcatggagagtgaagaagtttatcaaaggcaggtgctgtcaatttcatgtatcatctttggaattgtcatcgtgggcatgttctgtgcagcattctacttcaaaagcaagaaacaagctaaacaaatccaagagcagctgaaagtgccacaaaatggtaaaagctacagtctcaaagcatccagcacaatggcaaagtcagagaacttggtgaagagccatgtccagctgcaaaattattcaaaggtggaaaggcatcctgtgactgcattggagaaaatgatggagtcaagttttgtcggcccccagtcattccctgaggtcccttctcctgacagaggaagccagtctgtcaaacaccacaggagtctatcctcttgctgcagcccagggcaaagaagtggcatgctccataggaatgccttcagaaggacacccccgtcaccccgaagtaggctaggtggaattgtgggaccagcatatcagcaactcgaagaatcaaggatcccagaccaggatacgataccttgccaagggtattcatccagtggtttaaaaacccaacgaaatacatcaataaatatgcaactgccttcaagagagacaaacccctattttaatagcttggagcaaaaggacctggtgggctattcatccacaagggccagttctgtgcccatcatcccttcagtgggtttagaggaaacctgcctgcaaatgccagggatttctgaagtcaaaagcatcaaatggtgcaaaaactcctattcagctgacgttgtcaatgtgagtattccagtcagcgattgtcttatagcagaacaacaagaagtgaaaatattgctagaaactgtccaggagcagatccgaattctgactgatgccagacggtcagaagactacgaactggccagcgtagaaaccgaggacagtgcaagcgaaaacacagcctttctccccctgagtcccacagccaaatcagaacgagaggcgcaatttgtcttaagaaatgaaatacaaagagactctgcattgaccaagtgacttgagatgtaggaatctgtgcattctatgctttgctcaa

SEQ ID NO: 23836 - DNA, 2091 bp, Artificial Sequence
  derived and/or modified sequence
atgagcgaaggcgctgctgcagcctctccacccggagccgcaagcgcagccgcagcctctgccgaagagggcaccgctgctgctgcggctgctgcagctgccggaggagggccagacggcggaggtgaaggggcagctgaacctcctagggagttgagatgtagtgactgtatcgtctggaatcgtcagcagacttggctgtgcgttgtccctttgtttatcgggtttattggcctcgggctgtccctgatgcttctgaagtggattgtagtcgggtcggtgaaagagtatgttcctaccgacttagtcgattcaaaaggcatgggacaggatccatttttcctctccaagccatcctcattccctaaggccatggagactactacaacgacaactagtacgaccagccccgcaaccccctccgcaggaggcgctgccagttcccgaactccaaatcgcatcagcacccgactaaccacaattactcgggctccaacgaggtttcctggacacagggtccccatccgcgcttctcccagatctaccactgcacggaatactgctgctccagcgaccgtaccgagcacaactgcacctttctttagttcttctaccctgggcagccgcccaccagtgccgggaaccccatcaacccaagcaatgccttcatggcccaccgctgcctacgccacatcaagttacctccacgactctactccttcctggacactgtcaccattccaggacgctgccagttcatcatcaagcagcagctcatccgccacaactaccacacccgagacatcgacctcccctaagtttcataccaccacctacagtactgaacgctcagagcacttcaagccttgtcgcgataaagatttggcctactgtctgaacgatggggagtgcttcgtgatcgagactctcaccgggtctcacaagcactgtcggtgcaaggagggttatcagggagttagatgcgaccagtttctgcccaagactgatagtatcctgtctgacccaactgaccatcttgggattgaattcatggaatccgaagaagtgtaccaacgacaggtgctctccattagttgcattattttcgggattgtcatcgtcgggatgttttgcgccgcattttattttaaaagcaaaaagcaagcaaaacagatccaggaacagcttaaagtgcctcagaacggcaagtcgtattcattgaaagcgagtagcaccatggccaaaagcgagaatctcgtgaaaagccatgtccagctgcagaattattcaaaagtggaacggcatcccgtgacggcactggagaagatgatggagagtagctttgtgggcccacagagcttcccagaagtgccaagccccgacaggggatcgcagtctgtgaagcatcaccggagcctcagcagctgttgtagcccaggacagagatcaggaatgctccatagaaacgccttccgtcgcacacctccctcacccaggtcaagacttggtggcattgtagggccagcgtaccagcaactcgaggagagccgcatcccagatcaggacactatcccatgccaaggatattcttcatcaggattgaagacccagcgcaacacctcaatcaacatgcagctgcccagtcgcgaaaccaatccctatttcaactcgctggagcagaaggacctagttgggtatagttcgactcgcgctagtagcgtgcctatcatcccctcagttggacttgaagaaacctgcctccagatgccaggaatctctgaggtgaaatcaatcaaatggtgcaagaacagttattcagccgatgtggttaatgtgtcaattcccgtctccgattgtctgattgccgagcagcaggaggtgaaaatcctccttgaaacagttcaggaacaaattagaatcctcacagacgcgcgtaggagcgaggattacgagttggcctctgtggagacagaagactctgctagcgaaaatactgctttcctgccccttagtcctaccgccaaatcagagagagaggcacaatttgtgcttcggaatgaaatccagcgagacagcgcccttacaaagtag

SEQ ID NO: 23837 - DNA, 2091 bp, Artificial Sequence
  derived and/or modified sequence
atgagcgagggcgccgccgccgccagcccccccggcgccgccagcgccgccgccgccagcgccgaggagggcaccgccgccgccgccgccgccgccgccgccggcggcggccccgacggcggcggcgagggcgccgccgagccccccagagagctgagatgcagcgactgcatcgtgtggaacagacagcagacctggctgtgcgtggtgcccctgttcatcggcttcatcggcctgggcctgagcctgatgctgctgaagtggatcgtggtgggcagcgtgaaggagtacgtgcccaccgacctggtggacagcaagggcatgggccaggaccccttcttcctgagcaagcccagcagcttccccaaggccatggagaccaccaccaccaccaccagcaccaccagccccgccacccccagcgccggcggcgccgccagcagcagaacccccaacagaatcagcaccagactgaccaccatcaccagagcccccaccagattccccggccacagagtgcccatcagagccagccccagaagcaccaccgccagaaacaccgccgcccccgccaccgtgcccagcaccaccgcccccttcttcagcagcagcaccctgggcagcagaccccccgtgcccggcacccccagcacccaggccatgcccagctggcccaccgccgcctacgccaccagcagctacctgcacgacagcacccccagctggaccctgagccccttccaggacgccgccagcagcagcagcagcagcagcagcagcgccaccaccaccacccccgagaccagcaccagccccaagttccacaccaccacctacagcaccgagagaagcgagcacttcaagccctgcagagacaaggacctggcctactgcctgaacgacggcgagtgcttcgtgatcgagaccctgaccggcagccacaagcactgcagatgcaaggagggctaccagggcgtgagatgcgaccagttcctgcccaagaccgacagcatcctgagcgaccccaccgaccacctgggcatcgagttcatggagagcgaggaggtgtaccagagacaggtgctgagcatcagctgcatcatcttcggcatcgtgatcgtgggcatgttctgcgccgccttctacttcaagagcaagaagcaggccaagcagatccaggagcagctgaaggtgccccagaacggcaagagctacagcctgaaggccagcagcaccatggccaagagcgagaacctggtgaagagccacgtgcagctgcagaactacagcaaggtggagagacaccccgtgaccgccctggagaagatgatggagagcagcttcgtgggcccccagagcttccccgaggtgcccagccccgacagaggcagccagagcgtgaagcaccacagaagcctgagcagctgctgcagccccggccagagaagcggcatgctgcacagaaacgccttcagaagaaccccccccagccccagaagcagactgggcggcatcgtgggccccgcctaccagcagctggaggagagcagaatccccgaccaggacaccatcccctgccagggctacagcagcagcggcctgaagacccagagaaacaccagcatcaacatgcagctgcccagcagagagaccaacccctacttcaacagcctggagcagaaggacctggtgggctacagcagcaccagagccagcagcgtgcccatcatccccagcgtgggcctggaggagacctgcctgcagatgcccggcatcagcgaggtgaagagcatcaagtggtgcaagaacagctacagcgccgacgtggtgaacgtgagcatccccgtgagcgactgcctgatcgccgagcagcaggaggtgaagatcctgctggagaccgtgcaggagcagatcagaatcctgaccgacgccagaagaagcgaggactacgagctggccagcgtggagaccgaggacagcgccagcgagaacaccgccttcctgcccctgagccccaccgccaagagcgagagagaggcccagttcgtgctgagaaacgagatccagagagacagcgccctgaccaagtag

SEQ ID NO: 23838 - protein, 843 aa, Artificial Sequence
  derived and/or modified sequence
MATKKAGSRLETEIERCRSECQWERIPELVKQLSAKLIANDDMAELLLGESKLEQYLKEHPLRQGASPRGPKPQLTEVRKHLTAALDRGNLKSEFLQESNLIMAKLNYVEGDYKEALNIYARVGLDDLPLTAVPPYRLRVIAEAYATKGLCLEKLPISSSTSNLHVDREQDVITCYEKAGDIALLYLQEIERVILSNIQNRSPKPGPAPHDQELGFFLETGLQRAHVLYFKNGNLTRGVGRFRELLRAVETRTTQNLRMTIARQLAEILLRGMCEQSYWNPLEDPPCQSPLDDPLRKGANTKTYTLTRRARVYSGENIFCPQENTEEALLLLLISESMANRDAVLSRIPEHKSDRLISLQSASVVYDLLTIALGRRGQYEMLSECLERAMKFAFEEFHLWYQFALSLMAAGKSARAVKVLKECIRLKPDDATIPLLAAKLCMGSLHWLEEAEKFAKTVVDVGEKTSEFKAKGYLALGLTYSLQATDASLRGMQEVLQRKALLAFQRAHSLSPTDHQAAFYLALQLAISRQIPEALGYVRQALQLQGDDANSLHLLALLLSAQKHYHDALNIIDMALSEYPENFILLFSKVKLQSLCRGPDEALLTCKHMLQIWKSCYNLTNPSDSGRGSSLLDRTIADRRQLNTITLPDFSDPETGSVHATSVAASRVEQALSEVASSLQSSAPKQGPLHPWMTLAQIWLHAAEVYIGIGKPAEATACTQEAANLFPMSHNVLYMRGQIAELRGSMDEARRWYEEALAISPTHVKSMQRLALILHQLGRYSLAEKILRDAVQVNSTAHEVWNGLGEVLQAQGNDAAATECFLTALELEASSPAVPFTIIPRVL

SEQ ID NO: 23839 - protein, 860 aa, Artificial Sequence
  derived and/or modified sequence
MATKKAGSRLETEIERCRSECQWERIPELVKQLSAKLIANDDMAELLLGESKLEQYLKEHPLRQGASPRGPKPQLTEVRKHLTAALDRGNLKSEFLQESNLIMAKLNYVEGDYKEALNIYARVGLDDLPLTAVPPYRLRVIAEAYATKGLCLEKLPISSSTSNLHVDREQDVITCYEKAGDIALLYLQEIERVILSNIQNRSPKPGPAPHDQELGFFLETGLQRAHVLYFKNGNLTRGVGRFRELLRAVETRTTQNLRMTIARQLAEILLRGMCEQSYWNPLEDPPCQSPLDDPLRKGANTKTYTLTRRARVYSGENIFCPQENTEEALLLLLISESMANRDAVLSRIPEHKSDRLISLQSASVVYDLLTIALGRRGQYEMLSECLERAMKFAFEEFHLWYQFALSLMAAGKSARAVKVLKECIRLKPDDATIPLLAAKLCMGSLHWLEEAEKFAKTVVDVGEKTSEFKAKGYLALGLTYSLQATDASLRGMQEVLQRKALLAFQRAHSLSPTDHQAAFYLALQLAISRQIPEALGYVRQALQLQGDDANSLHLLALLLSAQKHYHDALNIIDMALSEYPENFILLFSKVKLQSLCRGPDEALLTCKHMLQIWKSCYNLTNPSDSGRGSSLLDRTIADRRQLNTITLPDFSDPETGNSPEAYFHGFPSLFSVSSVHATSVAASRVEQALSEVASSLQSSAPKQGPLHPWMTLAQIWLHAAEVYIGIGKPAEATACTQEAANLFPMSHNVLYMRGQIAELRGSMDEARRWYEEALAISPTHVKSMQRLALILHQLGRYSLAEKILRDAVQVNSTAHEVWNGLGEVLQAQGNDAAATECFLTALELEASSPAVPFTIIPRVL

SEQ ID NO: 23840 - protein, 418 aa, Artificial Sequence
  derived and/or modified sequence
MTIARQLAEILLRGMCEQSYWNPLEDPPCQSPLDDPLRKGANTKTYTLTRRARVYSGENIFCPQENTEEALLLLLISESMANRDAVLSRIPEHKSDRLISLQSASVVYDLLTIALGRRGQYEMLSECLERAMKFAFEEFHLWYQFALSLMAAGKSARAVKVLKECIRLKPDDATIPLLAAKLCMGSLHWLEEAEKFAKTVVDVGEKTSEFKAKGYLALGLTYSLQATDASLRGMQEVLQRKALLAFQRAHSLSPTDHQAAFYLALQLAISRQIPEALGYVRQALQLQGDDANSLHLLALLLSAQKHYHDALNIIDMALSEYPENFILLFSKVKLQSLCRGPDEALLTCKHMLQIWKSCYNLTNPSDSGRGSSLLDRTIADRRQLNTITLPDFSDPETGNQCSWIAFGEMLVDMGIQCI

SEQ ID NO: 23841 - DNA, 2532 bp, Artificial Sequence
  derived and/or modified sequence
atggccaccaagaaggccggcagcagactggagaccgagatcgagagatgcagaagcgagtgccagtgggagagaatccccgagctggtgaagcagctgagcgccaagctgatcgccaacgacgacatggccgagctgctgctgggcgagagcaagctggagcagtacctgaaggagcaccccctgagacagggcgccagccccagaggccccaagccccagctgaccgaggtgagaaagcacctgaccgccgccctggacagaggcaacctgaagagcgagttcctgcaggagagcaacctgatcatggccaagctgaactacgtggagggcgactacaaggaggccctgaacatctacgccagagtgggcctggacgacctgcccctgaccgccgtgcccccctacagactgagagtgatcgccgaggcctacgccaccaagggcctgtgcctggagaagctgcccatcagcagcagcaccagcaacctgcacgtggacagagagcaggacgtgatcacctgctacgagaaggccggcgacatcgccctgctgtacctgcaggagatcgagagagtgatcctgagcaacatccagaacagaagccccaagcccggccccgccccccacgaccaggagctgggcttcttcctggagaccggcctgcagagagcccacgtgctgtacttcaagaacggcaacctgaccagaggcgtgggcagattcagagagctgctgagagccgtggagaccagaaccacccagaacctgagaatgaccatcgccagacagctggccgagatcctgctgagaggcatgtgcgagcagagctactggaaccccctggaggaccccccctgccagagccccctggacgaccccctgagaaagggcgccaacaccaagacctacaccctgaccagaagagccagagtgtacagcggcgagaacatcttctgcccccaggagaacaccgaggaggccctgctgctgctgctgatcagcgagagcatggccaacagagacgccgtgctgagcagaatccccgagcacaagagcgacagactgatcagcctgcagagcgccagcgtggtgtacgacctgctgaccatcgccctgggcagaagaggccagtacgagatgctgagcgagtgcctggagagagccatgaagttcgccttcgaggagttccacctgtggtaccagttcgccctgagcctgatggccgccggcaagagcgccagagccgtgaaggtgctgaaggagtgcatcagactgaagcccgacgacgccaccatccccctgctggccgccaagctgtgcatgggcagcctgcactggctggaggaggccgagaagttcgccaagaccgtggtggacgtgggcgagaagaccagcgagttcaaggccaagggctacctggccctgggcctgacctacagcctgcaggccaccgacgccagcctgagaggcatgcaggaggtgctgcagagaaaggccctgctggccttccagagagcccacagcctgagccccaccgaccaccaggccgccttctacctggccctgcagctggccatcagcagacagatccccgaggccctgggctacgtgagacaggccctgcagctgcagggcgacgacgccaacagcctgcacctgctggccctgctgctgagcgcccagaagcactaccacgacgccctgaacatcatcgacatggccctgagcgagtaccccgagaacttcatcctgctgttcagcaaggtgaagctgcagagcctgtgcagaggccccgacgaggccctgctgacctgcaagcacatgctgcagatctggaagagctgctacaacctgaccaaccccagcgacagcggcagaggcagcagcctgctggacagaaccatcgccgacagaagacagctgaacaccatcaccctgcccgacttcagcgaccccgagaccggcagcgtgcacgccaccagcgtggccgccagcagagtggagcaggccctgagcgaggtggccagcagcctgcagagcagcgcccccaagcagggccccctgcacccctggatgaccctggcccagatctggctgcacgccgccgaggtgtacatcggcatcggcaagcccgccgaggccaccgcctgcacccaggaggccgccaacctgttccccatgagccacaacgtgctgtacatgagaggccagatcgccgagctgagaggcagcatggacgaggccagaagatggtacgaggaggccctggccatcagccccacccacgtgaagagcatgcagagactggccctgatcctgcaccagctgggcagatacagcctggccgagaagatcctgagagacgccgtgcaggtgaacagcaccgcccacgaggtgtggaacggcctgggcgaggtgctgcaggcccagggcaacgacgccgccgccaccgagtgcttcctgaccgccctggagctggaggccagcagccccgccgtgcccttcaccatcatccccagagtgctgtag

SEQ ID NO: 23842 - DNA, 2583 bp, Artificial Sequence
  derived and/or modified sequence
atggccaccaagaaggccggcagcagactggagaccgagatcgagagatgcagaagcgagtgccagtgggagagaatccccgagctggtgaagcagctgagcgccaagctgatcgccaacgacgacatggccgagctgctgctgggcgagagcaagctggagcagtacctgaaggagcaccccctgagacagggcgccagccccagaggccccaagccccagctgaccgaggtgagaaagcacctgaccgccgccctggacagaggcaacctgaagagcgagttcctgcaggagagcaacctgatcatggccaagctgaactacgtggagggcgactacaaggaggccctgaacatctacgccagagtgggcctggacgacctgcccctgaccgccgtgcccccctacagactgagagtgatcgccgaggcctacgccaccaagggcctgtgcctggagaagctgcccatcagcagcagcaccagcaacctgcacgtggacagagagcaggacgtgatcacctgctacgagaaggccggcgacatcgccctgctgtacctgcaggagatcgagagagtgatcctgagcaacatccagaacagaagccccaagcccggccccgccccccacgaccaggagctgggcttcttcctggagaccggcctgcagagagcccacgtgctgtacttcaagaacggcaacctgaccagaggcgtgggcagattcagagagctgctgagagccgtggagaccagaaccacccagaacctgagaatgaccatcgccagacagctggccgagatcctgctgagaggcatgtgcgagcagagctactggaaccccctggaggaccccccctgccagagccccctggacgaccccctgagaaagggcgccaacaccaagacctacaccctgaccagaagagccagagtgtacagcggcgagaacatcttctgcccccaggagaacaccgaggaggccctgctgctgctgctgatcagcgagagcatggccaacagagacgccgtgctgagcagaatccccgagcacaagagcgacagactgatcagcctgcagagcgccagcgtggtgtacgacctgctgaccatcgccctgggcagaagaggccagtacgagatgctgagcgagtgcctggagagagccatgaagttcgccttcgaggagttccacctgtggtaccagttcgccctgagcctgatggccgccggcaagagcgccagagccgtgaaggtgctgaaggagtgcatcagactgaagcccgacgacgccaccatccccctgctggccgccaagctgtgcatgggcagcctgcactggctggaggaggccgagaagttcgccaagaccgtggtggacgtgggcgagaagaccagcgagttcaaggccaagggctacctggccctgggcctgacctacagcctgcaggccaccgacgccagcctgagaggcatgcaggaggtgctgcagagaaaggccctgctggccttccagagagcccacagcctgagccccaccgaccaccaggccgccttctacctggccctgcagctggccatcagcagacagatccccgaggccctgggctacgtgagacaggccctgcagctgcagggcgacgacgccaacagcctgcacctgctggccctgctgctgagcgcccagaagcactaccacgacgccctgaacatcatcgacatggccctgagcgagtaccccgagaacttcatcctgctgttcagcaaggtgaagctgcagagcctgtgcagaggccccgacgaggccctgctgacctgcaagcacatgctgcagatctggaagagctgctacaacctgaccaaccccagcgacagcggcagaggcagcagcctgctggacagaaccatcgccgacagaagacagctgaacaccatcaccctgcccgacttcagcgaccccgagaccggcaacagccccgaggcctacttccacggcttccccagcctgttcagcgtgagcagcgtgcacgccaccagcgtggccgccagcagagtggagcaggccctgagcgaggtggccagcagcctgcagagcagcgcccccaagcagggccccctgcacccctggatgaccctggcccagatctggctgcacgccgccgaggtgtacatcggcatcggcaagcccgccgaggccaccgcctgcacccaggaggccgccaacctgttccccatgagccacaacgtgctgtacatgagaggccagatcgccgagctgagaggcagcatggacgaggccagaagatggtacgaggaggccctggccatcagccccacccacgtgaagagcatgcagagactggccctgatcctgcaccagctgggcagatacagcctggccgagaagatcctgagagacgccgtgcaggtgaacagcaccgcccacgaggtgtggaacggcctgggcgaggtgctgcaggcccagggcaacgacgccgccgccaccgagtgcttcctgaccgccctggagctggaggccagcagccccgccgtgcccttcaccatcatccccagagtgctgtag

SEQ ID NO: 23843 - DNA, 2532 bp, Artificial Sequence
  derived and/or modified sequence
atggcaaccaaaaaagccggcagccggttagaaaccgaaattgaacggtgtcgctctgagtgtcaatgggaacgtatccctgagctcgtgaaacagcttagcgccaagctgatagccaacgacgacatggctgagttgctcctgggagaatcaaaacttgagcaataccttaaagaacatcccctacggcagggagccagccccagaggtcccaagccccagttgaccgaagtgcgcaagcacctgacagcagccctggatcgcggaaacctcaaaagcgagtttttgcaagagagcaatctgattatggccaagctcaactatgtggagggggactataaagaggctctcaatatctatgcacgggttgggctcgacgacctgcccctcaccgctgtgcccccatacaggctccgggtgatcgccgaggcttacgccactaagggtctgtgtctggagaaactgcccatctctagctccacctccaatttacatgtggacagagagcaggatgttatcacttgctacgagaaagccggagatatcgccctgttgtatctgcaggaaatcgaacgcgtgatactgtccaatattcagaacagaagccccaagcctgggccagccccacatgaccaggaattagggttttttctggagacagggttgcaaagagcacatgtgctttatttcaaaaacggaaatctgacaagaggcgtggggaggttccgggagctgctgcgcgcggttgagactagaaccacccaaaatctacgaatgaccattgcgagacaacttgcagagattctgcttcgtggaatgtgtgaacaaagttactggaaccccctggaagacccaccttgtcaaagccccttggacgatcctctgcgtaagggggctaatacaaaaacctatactctgactcggcgggctagagtgtattcaggcgaaaacattttctgtccccaagagaacaccgaggaggccctgctgctgctcctcataagtgagtccatggccaaccgtgatgccgtgctgtctaggataccagagcacaagagcgataggctcatctccctccagagcgccagcgttgtttacgatttactaactattgccctcgggcgtaggggtcaatatgaaatgttgagtgaatgtctggagcgggcaatgaagtttgcctttgaagaattccatttatggtatcagttcgccctctcacttatggctgccggtaagtcagcacgcgctgttaaagtgctcaaagagtgcataaggctgaagcccgatgacgccactattcccctactggctgcaaagttgtgtatggggtctctgcattggttagaggaagccgagaaattcgccaagacagttgtcgatgtgggcgaaaagactagcgaattcaaggcgaaaggctacttggcactgggcttaacatacagccttcaagcaactgacgccagcttaaggggcatgcaggaggttctacagaggaaggcattactagcatttcagcgagctcactcactcagccccactgaccatcaggccgcattctatctagctctgcaattggctatatcacgccagatccctgaagctctcggttacgtgaggcaggcattacaactgcaaggggacgacgcaaacagcctgcacctgttggctctgctgctgagcgcccagaaacattatcacgacgcactcaacataatcgatatggctctctctgagtatcctgaaaacttcatcctcctgttttccaaagttaaattacagagcctgtgcagaggccccgacgaagccctcctgacatgtaagcacatgctgcagatttggaagagctgctacaacctcacaaatcctagtgattctggcaggggatcatcattgttggacagaacaattgccgaccgcaggcaattaaacacgataacactgcccgacttctcagaccccgagacgggcagtgtgcacgcgacctccgtcgcagcctcccgcgtggagcaggctctctctgaggtggctagttcgcttcagagcagtgccccaaagcagggtcccctgcacccgtggatgaccctggcccagatctggctccatgccgccgaggtgtacatcggcattggcaagcctgccgaggctaccgcttgcactcaggaggccgcaaatctatttccaatgtcacacaacgtgttgtacatgcgcggccagatagcagagctgagaggcagcatggatgaggcccgtcgctggtacgaagaagctctggccattagcccaactcacgtgaagagtatgcagagactcgctctgatccttcaccagctggggcgctatagtcttgccgagaaaattttgagggacgcagttcaggtgaattctacagcacacgaagtgtggaacgggctcggcgaagtgctgcaagcacagggcaacgacgccgctgctacagaatgtttcctgaccgcgcttgagttggaggcctcgtcccccgctgtacccttcaccattatcccacgggtgctgtag

SEQ ID NO: 23844 - DNA, 2583 bp, Artificial Sequence
  derived and/or modified sequence
atggccaccaaaaaggctggatctcggttggagactgagatcgagcgatgcaggagcgaatgtcaatgggagaggattcccgagctagtaaaacagctgtccgccaagcttatcgcaaatgatgatatggcagagctgttacttggcgagagtaagctggaacagtacctgaaggagcacccccttaggcagggtgccagtcctaggggccctaagcctcaattaactgaggtgagaaaacacttgactgccgcccttgaccgcggcaacctgaaatccgaatttctccaggaatctaatctgataatggccaagctcaactacgtggaaggagactataaggaggccttgaacatctacgccagagtgggcctggacgacctgccactgaccgccgtgcctccttatcggcttcgggtaatcgctgaagcatatgccaccaaaggcttgtgtttggaaaagctcccgatttcttctagcacctctaacctgcatgtcgatcgagaacaggacgtgattacttgttacgagaaagccggcgacattgccctgttgtacctgcaagagattgaacgggtgatcctgtctaatattcagaatcgttctcctaagcctggtccagccccacatgatcaagagttaggtttttttcttgagacaggcttgcagagagcccacgtgttgtacttcaaaaatggaaacctgacacgcggtgtgggtagattcagggagttattaagggccgtggaaacccgtaccactcagaatctccgcatgaccatagcccgccagctggctgagattctgctgcgcggcatgtgtgaacaatcttactggaaccccctcgaggatcctccatgtcaatcacccctggatgatcccttaagaaaaggcgcaaacaccaagacctacaccctgacgaggcgagcgcgggtgtatagcggggagaacatcttttgtccccaggaaaacactgaggaggcactgttgctgttgctgatatctgaatccatggcaaacagagatgccgttctgtctcgaatacccgaacataaatctgatcggctgatctctcttcaaagcgcttccgttgtttatgatctgcttactattgccctgggtcgtcgcggacagtacgagatgttgagtgaatgcctagagcgggcgatgaaatttgcattcgaagagtttcatttgtggtaccagtttgcactcagccttatggcagcaggcaagtctgccagagcagtgaaagtcttgaaggaatgtatccgactgaaaccagacgatgccaccatccctctcctcgctgctaagctgtgtatggggtcgttgcactggttagaggaggctgaaaagttcgcgaagacagtggtggacgtgggtgagaagacttctgaatttaaggccaaagggtacctggctcttgggctgacttatagcctgcaagctacagatgcttccctgagaggtatgcaggaagtgcttcagaggaaggcgctgttagcctttcagcgagctcacagcctgtccccgaccgaccaccaggctgccttttacctcgctctccaactcgccatcagccgtcagatcccggaagcccttgggtatgtacgtcaggctttgcagcttcagggggatgacgccaattccctacatctgcttgccctactcttgtccgcccagaagcattaccatgacgccctaaatatcatcgatatggcactaagtgaatatcccgaaaatttcatcctactgttctccaaggtgaaactgcagtcactgtgcagggggcccgatgaggcccttttgacctgtaagcacatgctacagatatggaagagttgttataatctgactaacccgagcgacagtggtcggggctcttctttgttagaccgaacaatcgccgaccgcagacagctgaacaccatcactttgcctgatttcagtgacccagaaactggaaattcccctgaggcgtactttcacgggtttccctccttgtttagtgtctcctccgtacacgccactagcgtggccgcatctcgagtagaacaggccctctctgaggtggcctcgagcttgcagtcctcggctccgaagcagggtccccttcatccttggatgacccttgcacagatctggcttcatgccgcagaagtttacataggcatcggtaaacctgccgaagccaccgcgtgcacccaggaagcggccaatctgtttccaatgtcgcacaacgtgctgtacatgcgcggacagatcgcggaactgcgagggtccatggatgaggctcggcgctggtacgaagaagccctcgccatctcccccacacacgttaagtcaatgcagcgactggcactaatcctgcaccagctcggaagatactctctcgcagagaagatactgagagacgccgtgcaggtcaactctaccgctcatgaagtgtggaacgggctgggagaggtcctgcaagctcagggaaatgacgctgctgctacagaatgcttcctgacggcgctggaactggaagcatccagtcctgcagtacctttcaccatcataccccgtgtgttatag

SEQ ID NO: 23845 - DNA, 2532 bp, Artificial Sequence
  derived and/or modified sequence
atggccaccaagaaggccggcagccggctggagacagaaattgagcgctgccgctctgagtgccagtgggagcgcatccctgagctggtgaagcagctgagcgccaagctgattgccaatgatgacatggccgagctgctgctgggggagagcaagctggagcagtacctgaaggagcaccccctgcggcagggcgccagcccccggggccccaagccccagctgacagaggtgaggaagcacctgacagctgccctggaccggggcaacctgaagtctgagttcctgcaggagagcaacctgatcatggccaagctgaactacgtggagggggactacaaggaggccctgaacatctatgcccgggtgggcctggatgacctgcccctgacagctgtgcccccctaccgcctgcgggtgattgctgaggcctatgccaccaagggcctgtgcctggagaagctgcccatcagcagcagcaccagcaacctgcacgtggaccgggagcaggatgtgatcacctgctatgagaaggccggggacatcgccctgctgtacctgcaggagattgaaagagtcatcctgagcaacatccagaacagaagccccaagccaggccctgcccctcatgaccaggagctgggcttcttcctggagaccggcctgcagagggcccacgtgctgtacttcaagaatggaaacctgacccggggcgtgggccgcttccgggagctgctgcgggctgtggagaccaggaccacccagaacctgaggatgaccatcgcccggcagctggccgagatcctgctgcggggcatgtgtgagcagagctactggaaccccctggaggaccccccctgccagagccccctggatgaccccctgaggaaaggagccaacaccaagacctacaccctgacccggcgggcccgggtgtacagcggggagaacatcttctgcccccaggagaacacagaggaggccctgctgctgctgctgatcagcgagagcatggccaacagagatgctgtgctgagccgcatccctgagcacaagagtgacaggctcatcagcctgcagagcgcctctgtggtgtatgacctgctgaccatcgccctgggcagaagaggccagtatgagatgctgtctgagtgcctggagcgggccatgaagtttgcctttgaggagttccacctgtggtaccagtttgccctgagcctgatggccgccggcaagagcgcccgggctgtgaaggtgctgaaggagtgcatccggctgaagccagatgatgccaccatccccctgctggccgccaagctgtgcatgggcagcctgcactggctggaggaggccgagaagtttgccaagacagtggtggatgtgggggagaagaccagcgagttcaaggccaagggctacctggccctgggcctgacctacagcctgcaggccacagatgccagcctgcggggcatgcaggaggtgctgcagaggaaggccctgctggccttccagagggcccacagcctgagccccacagaccaccaggccgccttctacctggccctgcagctggccatcagccggcagatccctgaggccctgggctacgtgcggcaggccctgcagctgcagggagatgatgccaacagcctgcacctgctggccctgctgctgagcgcccagaagcactaccatgatgccctgaacatcatcgacatggccctgtctgagtacccagagaacttcatcctgctcttcagcaaggtgaagctgcagagcctgtgccggggcccagatgaggccctgctgacctgcaagcacatgctgcagatctggaagagctgctacaacctgaccaaccccagcgacagcggccggggcagcagcctgctggacaggaccatcgctgaccggcggcagctgaacaccatcaccctgcctgacttcagtgaccctgagactggatctgtgcacgccacctctgtggccgccagccgggtggagcaggccctgtctgaggtggccagcagcctgcagagcagcgcccccaagcagggccccctgcacccctggatgaccctggcccagatctggctgcacgccgctgaggtgtacatcggcatcggcaagccagctgaggccacagcctgcacccaggaggccgccaacctcttccccatgagccacaacgtgctgtacatgaggggccagattgctgagctgcggggctccatggatgaggcccggcgctggtatgaggaggccctggccatcagccccacccacgtgaagtccatgcagaggctggccctgatcctgcaccagctgggccgctacagcctggccgagaagatcctgagagatgctgtgcaggtgaacagcacagcccacgaggtgtggaatggcctgggggaggtgctgcaggcccagggcaatgatgctgctgccacagagtgcttcctgacagccctggagctggaggccagcagccctgctgtgcccttcaccatcatcccccgggtgctgtag

SEQ ID NO: 23846 - DNA, 2583 bp, Artificial Sequence
  derived and/or modified sequence
atggccaccaagaaggccggcagccggctggagacagaaattgagcgctgccgctctgagtgccagtgggagcgcatccctgagctggtgaagcagctgagcgccaagctgattgccaatgatgacatggccgagctgctgctgggggagagcaagctggagcagtacctgaaggagcaccccctgcggcagggcgccagcccccggggccccaagccccagctgacagaggtgaggaagcacctgacagctgccctggaccggggcaacctgaagtctgagttcctgcaggagagcaacctgatcatggccaagctgaactacgtggagggggactacaaggaggccctgaacatctatgcccgggtgggcctggatgacctgcccctgacagctgtgcccccctaccgcctgcgggtgattgctgaggcctatgccaccaagggcctgtgcctggagaagctgcccatcagcagcagcaccagcaacctgcacgtggaccgggagcaggatgtgatcacctgctatgagaaggccggggacatcgccctgctgtacctgcaggagattgaaagagtcatcctgagcaacatccagaacagaagccccaagccaggccctgcccctcatgaccaggagctgggcttcttcctggagaccggcctgcagagggcccacgtgctgtacttcaagaatggaaacctgacccggggcgtgggccgcttccgggagctgctgcgggctgtggagaccaggaccacccagaacctgaggatgaccatcgcccggcagctggccgagatcctgctgcggggcatgtgtgagcagagctactggaaccccctggaggaccccccctgccagagccccctggatgaccccctgaggaaaggagccaacaccaagacctacaccctgacccggcgggcccgggtgtacagcggggagaacatcttctgcccccaggagaacacagaggaggccctgctgctgctgctgatcagcgagagcatggccaacagagatgctgtgctgagccgcatccctgagcacaagagtgacaggctcatcagcctgcagagcgcctctgtggtgtatgacctgctgaccatcgccctgggcagaagaggccagtatgagatgctgtctgagtgcctggagcgggccatgaagtttgcctttgaggagttccacctgtggtaccagtttgccctgagcctgatggccgccggcaagagcgcccgggctgtgaaggtgctgaaggagtgcatccggctgaagccagatgatgccaccatccccctgctggccgccaagctgtgcatgggcagcctgcactggctggaggaggccgagaagtttgccaagacagtggtggatgtgggggagaagaccagcgagttcaaggccaagggctacctggccctgggcctgacctacagcctgcaggccacagatgccagcctgcggggcatgcaggaggtgctgcagaggaaggccctgctggccttccagagggcccacagcctgagccccacagaccaccaggccgccttctacctggccctgcagctggccatcagccggcagatccctgaggccctgggctacgtgcggcaggccctgcagctgcagggagatgatgccaacagcctgcacctgctggccctgctgctgagcgcccagaagcactaccatgatgccctgaacatcatcgacatggccctgtctgagtacccagagaacttcatcctgctcttcagcaaggtgaagctgcagagcctgtgccggggcccagatgaggccctgctgacctgcaagcacatgctgcagatctggaagagctgctacaacctgaccaaccccagcgacagcggccggggcagcagcctgctggacaggaccatcgctgaccggcggcagctgaacaccatcaccctgcctgacttcagtgaccctgagactggaaacagccctgaggcctacttccacggcttccccagcctcttctctgtgtcctctgtgcacgccacctctgtggccgccagccgggtggagcaggccctgtctgaggtggccagcagcctgcagagcagcgcccccaagcagggccccctgcacccctggatgaccctggcccagatctggctgcatgctgctgaggtgtacatcggcatcggcaagccagctgaggccacagcctgcacccaggaggccgccaacctcttccccatgagccacaacgtgctgtacatgaggggccagattgctgagctgcggggctccatggatgaggcccggcgctggtatgaggaggccctggccatcagccccacccacgtgaagtccatgcagaggctggccctgatcctgcaccagctgggccgctacagcctggccgagaagatcctgagagatgctgtgcaggtgaacagcacagcccacgaggtgtggaatggcctgggggaggtgctgcaggcccagggcaatgatgctgctgccacagagtgcttcctgacagccctggagctggaggccagcagccctgctgtgcccttcaccatcatcccccgggtgctgtag

SEQ ID NO: 23847 - DNA, 2532 bp, Artificial Sequence
  derived and/or modified sequence
atggccaccaagaaggccggcagccggctggagaccgagatcgagagatgtcgctccgaatgccagtgggagagaatccctgagctggtcaagcagctcagcgccaagcttattgccaacgacgatatggcagagctgctacttggcgaatcaaagttagagcagtatttaaaggaacaccccttgaggcaaggtgccagtcctcgcgggccaaaaccccaactcactgaagtgaggaagcatctgacagccgctctagatcgcggcaacttaaaatccgagttcttgcaggagtccaatctgattatggcaaagctaaactacgtcgaaggcgactacaaggaggctctgaatatctacgcccgcgttgggctggatgatcttcctctcacagccgtgccaccttacagactgagagttatcgccgaggcatacgccaccaagggactttgcctagaaaagttgcctattagctctagtaccagtaatctacacgttgatcgagagcaggatgtcatcacatgctatgaaaaagccggagatattgcacttctgtacctgcaggagatagagagggtgattctcagtaacatccagaatagatctccaaagccaggcccagccccgcacgaccaggaattgggattcttcctcgagaccggattgcagcgcgctcatgtcctgtatttcaaaaacgggaacctcactcgcggcgtgggtagattcagagaattgctgcgggcggttgaaacacgcaccacccaaaatctaagaatgaccatcgcccgccagcttgctgagatactgctccgaggaatgtgcgagcagagctattggaaccctcttgaagatccaccatgccagtctccactagatgatcctctcaggaagggagctaacacaaagacctacaccctgacacggcgagccagagtgtactcgggcgagaacatattttgcccccaggaaaacactgaagaagcgctgctcttattacttatttcggaaagtatggccaatagagatgccgttctgtccaggatccctgaacacaaaagcgatcgcttgatttcactgcaaagcgctagcgttgtgtacgacttgctgactatcgccctgggtcgcagagggcagtatgaaatgctgtcagagtgccttgagagggcaatgaaattcgcatttgaagaattccacttatggtaccaatttgcactgagcctaatggccgctggcaaaagcgcccgcgcagtgaaagtgctcaaagaatgcattaggcttaaacctgacgatgccacaattccactgctggctgctaagctttgcatggggtctctgcattggttggaggaggctgaaaaattcgcaaagaccgtggtagatgtgggggaaaaaacctctgagttcaaggccaagggctatctggccttgggactgacctatagcctccaggcaacagacgctagcctgaggggcatgcaagaggtcctgcagcgcaaggctcttctcgcttttcagagggcacattccctgagtcccaccgatcaccaggccgctttttacctcgcactgcagctcgccataagcagacagatacccgaggcactcggatatgttcgccaagctctgcagctgcagggcgacgacgcaaattccctgcatttacttgcattgctgctaagcgcccagaagcactaccatgacgccttgaatatcatcgacatggcactttctgagtacccggaaaattttatccttctgttcagcaaagtgaaattgcagagcttatgcagaggacccgatgaggctctgctcacttgtaagcatatgctccagatttggaagagctgctacaatctgaccaatccatcagacagcgggcgtggctctagcttgcttgaccgaacaattgccgatcgcaggcagctaaacacaatcaccctcccggacttcagcgaccctgagacaggatcagttcatgcaacatctgtggccgcttcaagagtcgagcaggctctgagtgaggtggcttcctcattgcaatcatctgcaccgaagcagggccccctccatccctggatgacgcttgcacagatctggctgcacgctgcggaagtctacattggaattggcaagcccgctgaagctacagcctgtacacaggaagccgcgaacctcttcccgatgtctcacaacgtactttacatgcgcggacagattgccgagctgagggggtccatggacgaggcaagaagatggtatgaagaggcccttgccattagccccactcacgtgaaatcaatgcagcgtctggccctcatcctgcatcagttgggccgctattccctggctgagaagattttgcgcgacgcggtgcaggttaattcgactgcacatgaggtctggaacggtctgggggaggtcttgcaggctcagggcaacgacgccgccgcaacagaatgtttcctgaccgcgcttgagctggaggccagtagcccagccgtgcctttcaccatcatcccacgggtgctgtag

SEQ ID NO: 23848 - DNA, 2583 bp, Artificial Sequence
  derived and/or modified sequence
atggccaccaagaaggccggcagccggctggagaccgagatcgagagatgtaggtcagagtgtcagtgggaaaggatccccgaattggtgaaacagttgtctgccaagctcattgcaaacgatgacatggcagagttgctccttggggagtcaaagctagagcagtacttgaaagagcacccacttaggcaaggtgcttcgccccggggcccgaagcctcagctgacggaagttcgcaagcatctgacagctgcattggatagaggcaatctgaagagcgaatttttgcaggaatccaatctcatcatggcgaagctgaactacgttgaaggcgattataaggaagcactcaacatctatgctcgagtgggactggacgacctgcccttaacggctgtgcctccctacagactccgggtgatagccgaagcctacgcaacaaaggggctttgcctggaaaaactgccaattagcagctccacctccaatttgcatgtggatagagagcaggatgtcatcacttgttacgaaaaagctggtgacattgccctgctgtatctccaggaaattgaaagggtgattctgagtaatatccagaaccgcagtcccaaaccaggccctgcaccccatgatcaggagctgggattttttcttgaaacgggcctgcagcgggctcacgtgctatatttcaagaatggcaacctcactcggggggtgggtcggttccgcgagctgctgcgcgctgtggaaacaaggaccacccagaacctgaggatgacaattgcccggcagctcgctgagatccttctgagaggcatgtgtgaacaaagctactggaatcctttggaggaccccccatgtcagtcacccttggatgatccactgcgcaagggcgctaatactaaaacttacacactgacgaggcgggcaagagtctacagcggagaaaacatattctgccctcaggaaaacactgaagaagcattattgctcctcttgatctctgagagcatggctaatcgggacgctgtcctttctcggattccggagcacaaatctgaccgtctcatatctctccaatccgcaagcgttgtgtacgatctgctcaccatagccttgggcagaagaggacagtacgaaatgctcagcgaatgtttggagcgggcgatgaagtttgcgttcgaggagtttcacctgtggtatcagtttgcactgtcgctcatggccgcaggaaagtccgctcgggccgtcaaggtcctcaaggagtgcatcaggcttaaaccagatgacgcaacaatacctctgcttgcagccaagctttgcatgggaagcctgcactggctagaagaggctgaaaaattcgccaagaccgtagtggacgtcggggaaaaaacttccgaatttaaagccaaggggtatctggcactgggcttaacttactccctgcaggcgactgacgcgtctcttcgcgggatgcaagaagtgttgcagcgaaaggccctgctcgcgttccaacgggcccatagcctctccccaacagatcatcaggcggctttttatctggcgctacagctggcaatctcccgccagatacctgaagcacttggatatgtaaggcaggctctgcagctgcagggcgacgacgcgaactcactgcatcttctagccctcctgctctctgcacagaagcactaccacgatgctctgaacataatcgacatggctctgagcgaatatccagaaaacttcatccttctgttcagcaaggtgaaactccagagtctgtgtagagggccagacgaagccctcctcacatgtaaacacatgctacagatctggaaaagctgctacaatttaacaaatcccagcgactcgggccgaggttctagcctgcttgatagaactatcgccgatcgcaggcagctgaacacaataactctgccggattttagcgacccagaaaccggaaactccccagaagcatatttccacgggtttccttccttgttcagcgtttctagtgtacatgccactagtgtggccgcatctcgcgtcgaacaagccttgtctgaggtcgcctcttcactccagtcttctgctcccaagcagggaccactgcacccctggatgactctggctcagatctggctccacgccgccgaagtatacatcgggattggtaaaccagccgaagccacagcttgcacccaggaagccgccaatcttttcccaatgtcccacaacgtcctctacatgcgaggacagatcgcagagctgcggggctctatggatgaagcacgcaggtggtatgaggaggcactcgccataagtcctactcacgtgaagtcaatgcagagactggcgctcatcctccaccagctgggaagatactcactagccgaaaagattctcagagatgcagtccaggtcaactctacagcacacgaggtgtggaacggactcggcgaggtacttcaggcacaagggaacgacgcggccgctacggaatgttttcttaccgcgctggagctcgaagcttccagccccgcagtcccttttactatcattccacgagttctgtag

SEQ ID NO: 23849 - DNA, 2532 bp, Artificial Sequence
  derived and/or modified sequence
atggccacaaagaaagcaggaagtaggctggagaccgaaatcgaaagatgtagatcggagtgtcagtgggagagaatcccggaactggttaaacaactgtccgcgaagctcatcgctaatgatgatatggccgagctattactcggagaatcaaaactcgagcagtacttgaaagaacaccctcttagacagggggcttctccccgtggcccaaagcctcaattgacggaagtacgcaaacatctcaccgccgctctcgacaggggcaatctgaagtccgaattcctacaggaaagtaatttaattatggcaaagcttaattatgtggagggtgactacaaggaagccctgaatatttatgcaagagtgggtttggatgatctacctctgaccgctgtgcccccatatcgacttcgcgtgattgcagaagcttatgctacaaaggggttatgtctggagaagttacctatctcctctagcacaagcaatttgcacgtggatagagagcaagacgtcatcacttgctacgaaaaggccggtgacatcgccctgctttacctccaggaaattgaacgtgtgatcctttctaacatacagaacagaagccctaaacctggccctgccccacacgatcaggaactaggtttctttttggagaccggtttgcaaagagctcatgtcttatattttaaaaacgggaacctcacccgcggagtcgggcgtttccgtgagctcctcagagcagttgaaacccggaccacccagaacctgcggatgacaattgcgaggcagctcgcagaaatcttgttacgcggtatgtgcgagcagtcctactggaacccactcgaagaccccccttgccagtctcctcttgatgatccccttagaaagggcgctaatacaaagacctacacactgacaaggcgggcacgagtctattccggtgagaacatattctgtcctcaggaaaacacagaagaagccctgttactgttgttgatatctgaatcgatggccaaccgggacgccgtgctgtcccgcatcccagagcacaaaagcgatcgcttaatcagcttgcagtcggcgtcagtcgtttacgatctgctgacgatcgcccttgggaggagaggccagtatgagatgctgtccgaatgcctggagcgagcaatgaaatttgctttcgaggaattccacctttggtaccagtttgccctgagcctcatggctgcaggcaagtctgctagggccgtcaaggtgctcaaggagtgtatccggctcaagccggatgacgccaccatccccttgctcgcggctaagttgtgtatgggatccctgcattggctggaggaagccgagaaattcgcaaaaacggtggttgatgttggagaaaagacaagcgaatttaaagccaaggggtatcttgcgttaggtctgacgtattcactccaggctactgacgcgagtctaagagggatgcaagaggtactccagaggaaagcactgctcgctttccagagggcccattccctatcacctaccgatcaccaagccgctttttacctggctttacagttggcaatatctcgccagatccccgaagccttgggctacgtgagacaggccctgcagctccagggtgacgatgcaaacagcctgcacctgctggctctactgctgtcagcacagaaacattatcacgatgcacttaacattatcgatatggccttgtctgaatacccagaaaacttcatactcctattttccaaggtcaagcttcagtcgctgtgcaggggccctgacgaagccctgctaacatgcaagcacatgcttcagatatggaagtcctgttacaacctcaccaatcctagcgacagtgggagggggagttcccttctcgacaggaccatcgcagacagacgtcaactcaacaccattacgctgcctgactttagcgatcccgagaccggatccgtacacgcaacaagcgtcgctgcatccagggtggaacaagccctgtctgaagtcgcatcctcactgcagagttcagctccaaagcaagggcctctccacccatggatgaccctagcccagatctggctgcacgcggctgaagtgtatatcgggattggaaagccagctgaagccacagcctgtactcaggaagcggctaatctgttccctatgtctcacaacgttctgtacatgcgcggacagatcgcagagctgagaggaagcatggatgaagcacggaggtggtacgaagaagctctggctatttcccccacccacgttaaatcaatgcaacgcctcgctctgattttgcatcagcttggcaggtattcactggcagagaaaattttgagagatgctgtccaggttaactcgacggcacatgaagtctggaacggattaggcgaggtgctgcaggcacagggtaatgacgcagctgctacagagtgttttctcactgccctggagctcgaagcatcctccccggctgtcccttttaccatcatcccaagggtgctgtag

SEQ ID NO: 23850 - DNA, 2583 bp, Artificial Sequence
  derived and/or modified sequence
atggcaaccaagaaagccggatctcggctggaaaccgagattgagcggtgcaggagcgaatgccagtgggaacgtatcccagagcttgtgaaacaattgtctgctaagttaattgcgaatgacgacatggccgagttgctcttaggagaatctaaactggagcaatatctaaaggagcatccccttcggcaaggcgcaagcccgagagggcctaagcctcagcttaccgaggtccgaaagcatctcacagccgcactcgataggggaaatttaaagtccgagtttttacaggaaagtaacctgatcatggccaagctgaattacgttgaaggtgattacaaggaggccctgaatatttacgctagggtaggactcgacgacctgcccctgaccgccgtccctccgtaccgtctgcgtgtgatcgctgaggcttacgctactaaggggttgtgtctggagaagcttccaatcagctctagcactagtaatctgcacgtagaccgagagcaagacgtgataacttgttacgaaaaagcaggtgacattgcacttctttacctacaggagatcgaacgggtcatattatctaacattcagaacagaagcccaaaacccggacctgcaccacacgaccaggagctcggcttctttctcgagaccggactccaaagggcccatgtgttgtacttcaagaacgggaatctcactagaggtgttgggaggtttcgagagctcctgagagcggtcgagactaggacaacacaaaatctgaggatgaccatagcaagacaactggccgagattttactcagaggtatgtgcgaacaatcctattggaatcccttagaggatccaccatgccagagccccctcgatgaccctctcaggaaaggcgctaacacaaagacctacactctgaccagacgggctagagtgtattccggcgagaatatattttgcccccaggaaaatactgaagaggccctgttattgctacttatttccgagagcatggctaatcgagatgccgtcctgtctagaatcccggagcataagagtgatcgcttgatctccttacagtcagcgtccgtggtatacgacctccttaccatcgcacttggcagacgaggccaatacgagatgctttctgaatgcctggagcgggctatgaaattcgcttttgaggaattccacttgtggtaccaatttgccctgtcattgatggccgctggcaagagcgccagggccgttaaagttctcaaagaatgcatccgtctcaagcccgatgacgctactattcctctgttagctgctaaattgtgtatgggcagtctgcactggcttgaggaagctgagaagtttgccaaaacagtcgtagatgtgggagagaagacatctgagtttaaagccaagggctacctggctctggggctgacatattcgctacaggcaactgacgcatctctgcgtggaatgcaggaggtcttgcagagaaaggctcttcttgcgtttcaaagggctcattcactgagccccacggaccatcaggccgcattctacctggcgctgcagctcgcgatctctaggcaaattcccgaggccctgggttacgtgcggcaagcgttgcagctgcagggggacgacgctaattcattacacttacttgccttgctgctgagcgcccagaagcattatcatgatgctctcaatatcatagatatggcactgtctgaatacccggagaatttcatcctcttattctctaaagtcaagctgcagagcttgtgtcgcggtcctgacgaggccctgttaacctgcaaacacatgctccagatctggaagagctgctacaacctgaccaacccctccgactcaggtcgaggctcttcactgctggaccgcaccatcgccgaccggaggcaactgaacaccataactctgcccgatttttctgacccggagaccggaaacagtccagaagcatacttccatggttttccaagcctcttctcagtgtcaagtgtccatgctaccagcgtggctgctagccgcgtagagcaggcactgagtgaggtcgcgagctcgctgcagtctagtgcaccaaagcagggaccgctgcatccctggatgacgttagcccagatttggctgcatgccgctgaagtctacataggaattggaaagccggcagaggccaccgcatgtacacaggaagcagctaatctgttccctatgagccacaatgtcctctacatgcgtggacagatagccgagctgcggggtagcatggatgaggctcggaggtggtatgaagaagctttggcaatcagccccacccatgtaaagagcatgcagcggctcgcgctgatcctccatcagctcggaaggtactctctggcggagaagattttgagagatgccgtgcaggtgaattcaactgcccatgaggtttggaatggcttaggggaagtgctgcaggctcagggtaatgacgctgctgcaaccgagtgcttcctgaccgctcttgagctggaggcctctagtcctgccgtgccctttacgatcatacccagggtgctctag

SEQ ID NO: 23851 - DNA, 3433 bp, Artificial Sequence
  derived and/or modified sequence
gttacgccgcggagccgggagccggagcccgagcccgcggcggcggcgggaggcggcgagggggcgccgcggcggcggcggtggggcctgcggggcgggcggccgggcccggccaggccgcgatggcgaccaagaaggcaggctcgcggctggagacggagatcgagcgctgccgctccgagtgccagtgggagcggatccctgagctcgtcaagcagctgtcggccaagctcatcgccaacgatgacatggcagagcttctcctcggggagtcgaagctggagcagtacctgaaggaacaccccctgaggcagggggccagtccccgaggccccaagccccagctgactgaggtccgcaagcatctgaccgccgccctggaccgagggaaccttaagtcagaattcctacaagaatccaatctgatcatggccaagttgaattatgtggaaggtgattataaagaagctctgaacatttacgcccgggtgggcctggacgatctgccactgacagctgtcccgccctacaggctgcgggtgatcgcagaagcctacgctaccaaaggactttgtttggagaagctgcctatttcttcttctaccagtaatctccatgtggaccgggaacaggatgtcatcacctgttatgagaaagcaggggacatcgcactcctgtatctccaagagatagaaagggtaatactttctaatattcaaaacagaagccctaagcctggccctgctccccacgatcaagaactaggttttttcctagaaacaggacttcagagagcccatgtcctctatttcaaaaatgggaacttgacaagaggagtcggaagatttagagagcttctcagagcagttgaaacaagaacgactcaaaacctgcgaatgacaatagccaggcagctggcagagatcttgttgcggggtatgtgtgagcagagctactggaaccctctggaggatccaccgtgccagtcacctctggacgatcctctccgcaaaggagcaaacacaaaaacctacactctcactcggagagcccgtgtctactcaggagagaacattttttgtcctcaagaaaatacggaagaagccctgttgttattgctgattagtgaatcaatggccaaccgggacgctgtgctgagcaggatacctgaacacaagagtgaccgcctcatcagtctgcagagtgcatctgtggtctatgacttactcaccattgctcttggaagaagaggccagtatgagatgctgtcagagtgcctagaaagagccatgaagtttgcctttgaggaattccacctgtggtaccagtttgctctgtccctgatggctgctggaaaatctgcccgtgccgtgaaggtgctgaaagagtgtatccgcctgaagccagacgatgccaccatccctctcctcgctgccaagctctgcatgggctccctgcactggttggaagaggctgaaaagtttgccaaaactgtcgttgatgtgggagagaaaacgtcagagttcaaggccaaaggctacttagctctggggctcacgtacagtctgcaggccactgacgcttctttgcgagggatgcaggaggtcctacagagaaaggcgcttcttgcatttcagagggcccacagcctgtcacccacagatcaccaagcagctttctacctggctctgcagcttgccatctccagacagatcccagaggctctggggtatgtccgccaagctcttcagcttcaaggtgacgatgccaactccctgcacctccttgccctcctgctgtcagcacagaagcattaccatgacgctctgaacatcatcgacatggccctgagtgaatacccagaaaatttcatactactgttttccaaagtgaagttgcagtcactctgccgaggcccggacgaggcactgctgacttgtaagcacatgctgcagatatggaaatcctgctacaacctcaccaaccccagtgattctggacgtgggagcagcctcttagatagaaccattgctgacagacgacagcttaatacaattactttgccagacttcagcgatcccgagacaggctccgtccatgccacatcggtagcagcctcaagagtggagcaggcactgtcggaagtggcttcgtctctgcagagcagtgcccctaagcagggcccgctgcacccctggatgacgctggcacagatctggctccatgcagctgaagtctatatcggcatcgggaagcctgcagaagccacagcctgtacccaagaagctgccaacctcttcccaatgtcccacaatgtcctctacatgcgcggccagattgctgagctccggggaagcatggacgaggcgcggcggtggtatgaagaggccttagccatcagccccacccacgtgaagagcatgcagcgactggccctgatccttcaccagctaggccgctacagtctggcggagaagatcctccgggacgcggtgcaggtgaactcgacagcccacgaggtctggaacgggctgggcgaggtcctccaagctcagggcaacgatgcggcggctacggagtgcttcctgacagccttggagctggaggccagcagccccgccgtgcccttcaccatcatcccccgcgtgctctgagcaggcgcctgccagcctcacctgccgctcaggcctcagaggccctgccgggcaccagggcttgtgccatcgccccaaggggatgaatctgccacactgaggccagggacgagtgttcagtgggccacagtgaaccaaccaaaccaaccccgaatcatcgctctcgccatgtgcgtttctcttgttttttttgccagcccaatggtagtttctgaacctattgacattgttcaaaatggatcatgtgccatattttgttagttgacatctgagttttcagtaaaatgattatggaattaatcagcaaatgtagaagaatatattcaaagttaaaattcagtggcagcacagattatttttatcagagctgtaaagaaaacaactgtccttttctccccaccacccctcctgccccactttggcccagaaaccaaatgtgaacttcctgtctcccacctcagcactagtccatgccaggacaccagctgacaatttcttggttttactgtcaataattgtaccatgtgatcaattactgtcctcacttagaacaaagcctgagtccgagaatatttatattttaccaatatatgcctgttacaagagaaggaaatatgagttatttaagtttaacttttttatgtgaattcagagtttatttatcgagggaaatatgtacaaagaagcttcaaatggaatatttaccgacattccttatacatgacagacacttggctacatgggaagatgatgttaataataaaatgatttttaaatgg

SEQ ID NO: 23852 - DNA, 3484 bp, Artificial Sequence
  derived and/or modified sequence
gttacgccgcggagccgggagccggagcccgagcccgcggcggcggcgggaggcggcgagggggcgccgcggcggcggcggtggggcctgcggggcgggcggccgggcccggccaggccgcgatggcgaccaagaaggcaggctcgcggctggagacggagatcgagcgctgccgctccgagtgccagtgggagcggatccctgagctcgtcaagcagctgtcggccaagctcatcgccaacgatgacatggcagagcttctcctcggggagtcgaagctggagcagtacctgaaggaacaccccctgaggcagggggccagtccccgaggccccaagccccagctgactgaggtccgcaagcatctgaccgccgccctggaccgagggaaccttaagtcagaattcctacaagaatccaatctgatcatggccaagttgaattatgtggaaggtgattataaagaagctctgaacatttacgcccgggtgggcctggacgatctgccactgacagctgtcccgccctacaggctgcgggtgatcgcagaagcctacgctaccaaaggactttgtttggagaagctgcctatttcttcttctaccagtaatctccatgtggaccgggaacaggatgtcatcacctgttatgagaaagcaggggacatcgcactcctgtatctccaagagatagaaagggtaatactttctaatattcaaaacagaagccctaagcctggccctgctccccacgatcaagaactaggttttttcctagaaacaggacttcagagagcccatgtcctctatttcaaaaatgggaacttgacaagaggagtcggaagatttagagagcttctcagagcagttgaaacaagaacgactcaaaacctgcgaatgacaatagccaggcagctggcagagatcttgttgcggggtatgtgtgagcagagctactggaaccctctggaggatccaccgtgccagtcacctctggacgatcctctccgcaaaggagcaaacacaaaaacctacactctcactcggagagcccgtgtctactcaggagagaacattttttgtcctcaagaaaatacggaagaagccctgttgttattgctgattagtgaatcaatggccaaccgggacgctgtgctgagcaggatacctgaacacaagagtgaccgcctcatcagtctgcagagtgcatctgtggtctatgacttactcaccattgctcttggaagaagaggccagtatgagatgctgtcagagtgcctagaaagagccatgaagtttgcctttgaggaattccacctgtggtaccagtttgctctgtccctgatggctgctggaaaatctgcccgtgccgtgaaggtgctgaaagagtgtatccgcctgaagccagacgatgccaccatccctctcctcgctgccaagctctgcatgggctccctgcactggttggaagaggctgaaaagtttgccaaaactgtcgttgatgtgggagagaaaacgtcagagttcaaggccaaaggctacttagctctggggctcacgtacagtctgcaggccactgacgcttctttgcgagggatgcaggaggtcctacagagaaaggcgcttcttgcatttcagagggcccacagcctgtcacccacagatcaccaagcagctttctacctggctctgcagcttgccatctccagacagatcccagaggctctggggtatgtccgccaagctcttcagcttcaaggtgacgatgccaactccctgcacctccttgccctcctgctgtcagcacagaagcattaccatgacgctctgaacatcatcgacatggccctgagtgaatacccagaaaatttcatactactgttttccaaagtgaagttgcagtcactctgccgaggcccggacgaggcactgctgacttgtaagcacatgctgcagatatggaaatcctgctacaacctcaccaaccccagtgattctggacgtgggagcagcctcttagatagaaccattgctgacagacgacagcttaatacaattactttgccagacttcagcgatcccgagacaggcaactctccagaagcatactttcatggttttccttcccttttttcagttagctccgtccatgccacatcggtagcagcctcaagagtggagcaggcactgtcggaagtggcttcgtctctgcagagcagtgcccctaagcagggcccgctgcacccctggatgacgctggcacagatctggctccatgcagctgaagtctatatcggcatcgggaagcctgcagaagccacagcctgtacccaagaagctgccaacctcttcccaatgtcccacaatgtcctctacatgcgcggccagattgctgagctccggggaagcatggacgaggcgcggcggtggtatgaagaggccttagccatcagccccacccacgtgaagagcatgcagcgactggccctgatccttcaccagctaggccgctacagtctggcggagaagatcctccgggacgcggtgcaggtgaactcgacagcccacgaggtctggaacgggctgggcgaggtcctccaagctcagggcaacgatgcggcggctacggagtgcttcctgacagccttggagctggaggccagcagccccgccgtgcccttcaccatcatcccccgcgtgctctgagcaggcgcctgccagcctcacctgccgctcaggcctcagaggccctgccgggcaccagggcttgtgccatcgccccaaggggatgaatctgccacactgaggccagggacgagtgttcagtgggccacagtgaaccaaccaaaccaaccccgaatcatcgctctcgccatgtgcgtttctcttgttttttttgccagcccaatggtagtttctgaacctattgacattgttcaaaatggatcatgtgccatattttgttagttgacatctgagttttcagtaaaatgattatggaattaatcagcaaatgtagaagaatatattcaaagttaaaattcagtggcagcacagattatttttatcagagctgtaaagaaaacaactgtccttttctccccaccacccctcctgccccactttggcccagaaaccaaatgtgaacttcctgtctcccacctcagcactagtccatgccaggacaccagctgacaatttcttggttttactgtcaataattgtaccatgtgatcaattactgtcctcacttagaacaaagcctgagtccgagaatatttatattttaccaatatatgcctgttacaagagaaggaaatatgagttatttaagtttaacttttttatgtgaattcagagtttatttatcgagggaaatatgtacaaagaagcttcaaatggaatatttaccgacattccttatacatgacagacacttggctacatgggaagatgatgttaataataaaatgatttttaaatgg

SEQ ID NO: 23853 - DNA, 2153 bp, Artificial Sequence
  derived and/or modified sequence
gttacgccgcggagccgggagccggagcccgagcccgcggcggcggcgggaggcggcgagggggcgccgcggcggcggcggtggggcctgcggggcgggcggccgggcccggccaggccgcgatggcgaccaagaaggcaggctcgcggctggagacggagatcgagcgctgccgctccgagtgccagtgggagcggatccctgagctcgtcaagcagctgtcggccaagctcatcgccaacgatgacatggcagagcttctcctcggggagtcgaagctggagcagtacctgaaggaacaccccctgaggcagggggccagtccccgaggccccaagccccagctgactgaggtccgcaagcatctgaccgccgccctggaccgagggaaccttaagtcagaattcctacaagaatccaatctgatcatggccaagttgaattatgtggaaggtgattataaagaagctctgaacatttacgcccgggtgggcctggacgatctgccactgacagctgtcccgccctacaggctgcgggtgatcgcagaagcctacgctaccaaaggactttgtttggagaagctgcctatttcttcttctaccagtaatctccatgtggaccgggaacaggatgtcatcacctgttatgagaaagcaggggacatcgcactcctgtatctccaagagatagaaagggtaatactttctaatattcaaaacagaagccctaagcctggccctgctccccacgatcaagaactaggttttttcctagaaacaggacttcagagagcccatgtcctctatttcaaaaatgggaacttgacaagaggagtcggaagatttagagagcttctcagagcagttgaaacaagaacgactcaaaacctgcgaatgacaatagccaggcagctggcagagatcttgttgcggggtatgtgtgagcagagctactggaaccctctggaggatccaccgtgccagtcacctctggacgatcctctccgcaaaggagcaaacacaaaaacctacactctcactcggagagcccgtgtctactcaggagagaacattttttgtcctcaagaaaatacggaagaagccctgttgttattgctgattagtgaatcaatggccaaccgggacgctgtgctgagcaggatacctgaacacaagagtgaccgcctcatcagtctgcagagtgcatctgtggtctatgacttactcaccattgctcttggaagaagaggccagtatgagatgctgtcagagtgcctagaaagagccatgaagtttgcctttgaggaattccacctgtggtaccagtttgctctgtccctgatggctgctggaaaatctgcccgtgccgtgaaggtgctgaaagagtgtatccgcctgaagccagacgatgccaccatccctctcctcgctgccaagctctgcatgggctccctgcactggttggaagaggctgaaaagtttgccaaaactgtcgttgatgtgggagagaaaacgtcagagttcaaggccaaaggctacttagctctggggctcacgtacagtctgcaggccactgacgcttctttgcgagggatgcaggaggtcctacagagaaaggcgcttcttgcatttcagagggcccacagcctgtcacccacagatcaccaagcagctttctacctggctctgcagcttgccatctccagacagatcccagaggctctggggtatgtccgccaagctcttcagcttcaaggtgacgatgccaactccctgcacctccttgccctcctgctgtcagcacagaagcattaccatgacgctctgaacatcatcgacatggccctgagtgaatacccagaaaatttcatactactgttttccaaagtgaagttgcagtcactctgccgaggcccggacgaggcactgctgacttgtaagcacatgctgcagatatggaaatcctgctacaacctcaccaaccccagtgattctggacgtgggagcagcctcttagatagaaccattgctgacagacgacagcttaatacaattactttgccagacttcagcgatcccgagacaggaaatcagtgttcatggattgcatttggggaaatgctggtggatatggggatccagtgcatttga

SEQ ID NO: 23854 - protein, 356 aa, Artificial Sequence
  derived and/or modified sequence
MATAALLRGATPGRGGPVWRWRLRAAPRCRLAHSSCSPGGDPTAGAAWACFRLDGRTLLRVRGPDAAPFLLGLLTNELPLPSPAAAGAPPAARAGYAHFLNVQGRTLYDVILYGLQEHSEVSGFLLECDSSVQGALQKHLALYRIRRKVTVEPHPELRVWAVLPSSPEACGAASLQERAGAAAILIRDPRTARMGWRLLTQDEGPALVPGGRLGDLWDYHQHRYLQGVPEGVRDLPPGVALPLESNLAFMNGVSFTKGCYIGQELTARTHHMGVIRKRLFPVRFLDPLPTSGITPGATVLTASGQTVGKFRAGQGNVGLALLWSEKIKGPLHIRASEGAQVALAASVPDWWPTVSK

SEQ ID NO: 23855 - protein, 163 aa, Artificial Sequence
  derived and/or modified sequence
MGWRLLTQDEGPALVPGGRLGDLWDYHQHRYLQGVPEGVRDLPPGVALPLESNLAFMNGVSFTKGCYIGQELTARTHHMGVIRKRLFPVRFLDPLPTSGITPGATVLTASGQTVGKFRAGQGNVGLALLWSEKIKGPLHIRASEGAQVALAASVPDWWPTVSK

SEQ ID NO: 23856 - DNA, 1071 bp, Artificial Sequence
  derived and/or modified sequence
atggccaccgccgccctgctgagaggcgccacccccggcagaggcggccccgtgtggagatggagactgagagccgcccccagatgcagactggcccacagcagctgcagccccggcggcgaccccaccgccggcgccgcctgggcctgcttcagactggacggcagaaccctgctgagagtgagaggccccgacgccgcccccttcctgctgggcctgctgaccaacgagctgcccctgcccagccccgccgccgccggcgccccccccgccgccagagccggctacgcccacttcctgaacgtgcagggcagaaccctgtacgacgtgatcctgtacggcctgcaggagcacagcgaggtgagcggcttcctgctggagtgcgacagcagcgtgcagggcgccctgcagaagcacctggccctgtacagaatcagaagaaaggtgaccgtggagccccaccccgagctgagagtgtgggccgtgctgcccagcagccccgaggcctgcggcgccgccagcctgcaggagagagccggcgccgccgccatcctgatcagagaccccagaaccgccagaatgggctggagactgctgacccaggacgagggccccgccctggtgcccggcggcagactgggcgacctgtgggactaccaccagcacagatacctgcagggcgtgcccgagggcgtgagagacctgccccccggcgtggccctgcccctggagagcaacctggccttcatgaacggcgtgagcttcaccaagggctgctacatcggccaggagctgaccgccagaacccaccacatgggcgtgatcagaaagagactgttccccgtgagattcctggaccccctgcccaccagcggcatcacccccggcgccaccgtgctgaccgccagcggccagaccgtgggcaagttcagagccggccagggcaacgtgggcctggccctgctgtggagcgagaagatcaagggccccctgcacatcagagccagcgagggcgcccaggtggccctggccgccagcgtgcccgactggtggcccaccgtgagcaagtag

SEQ ID NO: 23857 - DNA, 1071 bp, Artificial Sequence
  derived and/or modified sequence
atggccacagccgctttgctgaggggggcgacaccagggagaggcggtcccgtgtggcgttggaggctgagggccgctccgagatgtcgcttggcacactcctcatgtagcccaggaggagacccgacagccggcgccgcatgggcttgtttcagactcgatggacggacgctcttgagggttcgaggtccggatgccgcccctttcttactggggctgctcacaaatgagttacctcttccctcccccgcggcagctggcgcacctcctgccgcacgagctggctatgctcatttcctgaacgtgcagggtcggactctttacgatgtgatcctgtatggattacaggaacactcggaggtgtccggattcctcctggaatgcgactcttcagtacagggtgccctgcagaagcaccttgccctgtaccgtattaggcgcaaagtgactgtggaacctcatccagagctccgtgtgtgggcagtgctgccttctagcccggaagcgtgtggggcagccagtttacaggagcgcgcaggcgcagccgccatcctgatcagggaccctagaaccgcaagaatggggtggcgtctgctgacccaagatgagggacctgcacttgtgccaggcgggcggcttggggacttgtgggactatcaccagcacagatacctgcaaggagtaccagagggtgtcagagaccttccgccaggggtggcgttgcctttagagtcgaatctggcttttatgaacggggtatctttcacaaaaggctgttacatcggccaagagctgactgctcggacacaccacatgggggtgatccgtaagcgcctctttcccgttcgcttcctcgaccccctgcctacgtcaggcatcactcccggagcaactgtgctcactgccagcggccagacggtagggaaattcagagcagggcagggtaacgtcggtctggccctgctatggtcggagaaaattaagggaccactgcacattagagcgtccgagggcgctcaggtggctctggccgcttctgtgcccgactggtggcccactgtaagcaagtag

SEQ ID NO: 23858 - DNA, 7817 bp, Artificial Sequence
  derived and/or modified sequence
agatggcgaccgcggcgctgcttcgaggcgccactccggggcgcggcggcccggtctggcgctggcggctgcgcgcggccccaaggtgccgcctggcccacagctcctgcagtcctggtggcgacccaacggccggagcggcctgggcctgcttccggctggacgggcgcaccctgctgcgcgtgcgtggccccgacgcggcgcccttcctgctagggctgctgaccaatgaactgccgcttccgagtcctgcggccgcgggggccccgcctgctgcgcgcgcgggctacgcccacttcctgaacgtgcagggccggacgctctatgacgtcatcttgtacgggctccaggaacactcggaggtgtctggcttccttctggagtgtgacagctcggtgcagggcgcgctgcagaagcacctcgcgctatacaggatccggcggaaggtcacggtggagccgcacccggagctgcgagtgtgggcggtgttgcccagttcccctgaggcctgcggggctgcatcgctgcaggagagggcaggggctgccgccatcctcatccgcgacccgcgaacagcacgcatggggtggcggctcctcacccaggatgaaggcccagccctggtgcccgggggccggctcggggacttgtgggattatcaccagcaccgatacctgcaaggcgttcctgagggggtccgagacttgcctcctggggtggccctgcccctggagtccaacctggccttcatgaacggcgtgagcttcaccaaaggctgctacattggccaggagctgacggcccgcacccaccacatgggcgtcatccgcaagcgcctcttccctgtccggttcttggacccccttcccaccagtggcatcacccctggtgccacggtgctgactgcctcaggacagactgtgggcaagttcagggctggccagggcaacgtggggctggccctgctgtggtcagagaagatcaagggtcctctgcacatcagagcctctgagggtgcccaggtggccttagccgcatctgtgccagactggtggcctacagtctccaagtagtccgaagccttggctggcgcaggctgatggggaggctggggcctggggcctttggcctctgtccagggtcttcccgtcccatctgtctgctgcgcctactgggtgggagccctggtttccatctgggaaagtcccccttgtaggtgccctgcctggccccacccatgctcaggggccccaggcacgtgggttgttttctccctggacttcctgtggccccagaggagcccaccgtgtgagtgctgggctccagatggcgccgggtcccaatcgtggctccacacagggttgtctgggaggacgggacggtgtctctggccagcactggcagcttccgggccttgtaccccactctgcctggcatgagcctcatggggggttggtccctgtgcctggaagcggggtggtgtccagggtctgcaggctggggctcgggctttgggagttgtttcactgtgcttgcttccagcatgtctcagggtggggctatgcgtggtctagaggggtctggggcattggatcaggtggcatgtgggtgtctacacatcgagaagcacacagggatgagccactaggtatcccatgctggaggcttgtggaaggctgtgcccatctcccatgtttccccacctctgttcctcctcagagccctccaggagcgtggggtgggggccagcgcagggctcaggagccagcagggcagagttctgcctgtgtgtgctgggttttggcatagcctgtgtttgcagtgagagtgacttgctgtcagtcacggggcacagcctcctgttcacccactggcttcccccttcccactgaagtgtgagctctatgtttcagggcatctattaaagagtgagccacaggcagccccttgggagctctggtttcatttgggggagagggaggtgggggcttagtttttgtgatctggctgactggaccccgggaacagcgctcctttgagaacgcccagacctaccagatgaagcacttggcatggctgcaggccagcaggggaggcctcagaggcccaggctgggcacgtgggtgccgagtctgcaaaggacagccccatggctgtgagctgtcggctgcagggcgcagggcctggggggcaggcgtttgggccaccaagctggacgttagggtggccacagagggccaagcaggcagggagcctgtgccgccatcctggggggccacaggtgctctctagaaatctgcagccatggcggttttggggtcaggggtctaaaggcagctctgagctgcagtgtagtttgtgatcacccaggaggagggtgtagagcggatggacgggaggaagcggctgcagctggagggaagagaggggccgtccagcctcacccgctgcagtcagctctcctatgggcaaggaaacagctaggtggccctgacccctgcggtcctgagagccggtggccttcagcccctcttggacaggtcatggtctggaagcgcccagcgcaggatggattccagaccagcatccctgcaaccttttcagccccactggctgctgctttaaactggcatggagacatttgatcagcttcccagccagttttctctccagctcagccaggagtgggtgcctgtggcctgtgtcaccaagagctggtgtctcctgcatgaggggcatgcacccctggaatgagggtctgtgcctcgagctcaaagtgtcccggctctgtcatctgcctgaagttgcctggcttttccagtggggcctccttgagtgctgcagcatctgggagcatcctagcctgtcccgtgggtgtggctgggtgagggctaggaggtgagccaggaaggaagcactccactccagagtgaggtgccgcctgagccatcctgtgccccctcagtgtcttcaggtctctgcaggtgtcaggatctcaaaatacttggttcagatcaaacacatttcgtgttcttctgtgtccttttttttttttttttttttttttgagatggagtcttgctctgttggccaggctggagctcagtggcacaatctctgctcactgcaacctctgcctcccaggttccagtgattttcctgcctcagcctcctgggtagctgggactacaggcacatgccccatgcccggctaatttttgtatttttagtagagatggggttttaccatgttggccaggatggtctcaattacaggcatgagccactgtgcccagcctcttctgtgtctttaaaaaggaaagtgtcagtcaacaaaagagcccctctgtcatacaaaccaaatcagttttcaccaaaatgtccttagtcctctcagaaaggcctggcctttaggaccttggaagcaggccctaaagcgcatcggcagggtcagagctttgtgttcaggaacactgggatctgctgagagctggtgtagccgctccaaaactgcacactgcttttcctgtctgctttagtttgtgttgtaaaaacataggaagttcgtgtgtgtgtgtgtgtgtgtgaattcaaggcataaggtgcagttgtgttatgtgggtatagtgcatggtggtgcagtctgggcttcttaccctcacacctcctgcctcccctcgttagagtcccccacatccgccttccactttctgagcccacattgcctgttgggcagctcctggttatgaggcaggacgtgtggtgtttgactgtctgtttctgagctgttttacttaacacagtgtatatggtgcatctttaggaaagcatgcttgtattttcctttcaaagccagatatgggcgggtgtggtggctcatgcctgtgatcccagcactttgggaggccgaggcaggaggattgcttgagcccaggagtttgagagcagcctgggcaacatatcaagactctgtctcttaaaaaaaaaaaaattagccaggcatggtggtccacacctgtggtcccacctattcgggaggctgaagtgcgaggatcacttgagcccaggaggttgaggctgcagtgagctgtgattgtgccactgcactccagcctgggcaacagagcaagaccctgtcttaaaacaaagaaagaataaaaaagaagagaagttgcagttggtagtatttccagagcccggcagacagtgtagaaactgtgagaaacccacctccaaatcaggccttagatagaaaacatcctaagaagtatacgttcattgtaaaatcattatcatcatcatcttctaatccccaaggagacaagctccctgttctgtgttcttgtatgaggcggtcagtcaagcgcagcccgagaggagaggcaggagcctgggagagcctctgctagacctttcctggcacttccccaggaaaggcaaggcagggcagatgtgcggctggccagctggagtgatttccatgggctccaagctgtaggagtggtccctggctgccagagtgctctggccagatagaggtgggctctggactggtgaggctgcattgcggaggcgcgcacacccagctgggcccttatctgtaaggactggctggcctgggaggggcagtctcccagccagaaggtggaatttttttttttttttgagataccaaaacatcctaaggtacaggaaagaaattgtcaacacacacacacagtaccataaacaaggcccagcagaaaggcagacagaagcacacacaccaatgttctgatcttagagtaagcagacacatcacatggaatgaggatgtttaatatatttaaagaaaacaatttatgcacaggaagcaagagactataaaaatgaccaagcagattttaaaaagagaacttgttgaaataaaaataaaatactctaaaaaatattccatgatgtgtttcctgaagaatcgggaactgtttgaagaaatgacccaaagtgcagcacagaaagacagagctggaaaatatgagatgggatgagacaagaagatggagagtttagtatgacatccgcaatttacgagtaattccagaaggaggggaaagagaatatggggtggaggcaagtattcagagaaatacggctgagaactttcccaaaccaacaggagcccctgctccttaggttcaggaaccagcagctcccaagcagcatagttaaaaagctctacccaaacagtcacgtcttggtgaaagtacagaatctcatgacaaagagatcttaaggcagaaaagaaagagattatctggaaagaagaaaataagtagttgattaaaagcaacagtggaagccagaaagatagtaaataatatcttcaaagtcctgggagaaaatagtgatagcctagaattgtgtacccagaaaatccgtctttcaagaatgaggggccaggcgcagtggctcacgtctgtattcccagcactttgggaggccaaggcaggtggatcacctgaggtcaggagttcaagaccagcctgatcaacatggtgaaaccctgtctctactaaaaatataaaaattagctgggtgtggtggcatattcctgtaatcccagctactcgggaggctgaggcaggagaatcacttgaacccaggaggcagaggttgcagtgagccaagattgtgccattgcactccagcctgggcaatagaatgagactctgtctcaaaaaaaaaaaaaaaaaaaaaaaaaaaaagagggctaaacgcattttcataccacgaaactgccctcactccggagtttgctgccagcagagcctagagcgtctaaggcatgtctgggcttctggcgagggatcctgtggggaagctggagatggaagaaggagtgaataggcaggaaggtggatttgtgggcatgtctaaaacaccacatctagaagcttctacttagaatgcctacttttggagtttataaaaaagatgccacatgttgagttgggagagaggtgcccaaacctacagtgttctaaagtccccctactggtcggaaggagggcacggacactgacttcagcatctgttacaaggcttatcagagttttcagataatctctaaaagaatggaaatatatcttccaaactatagagggaagaccatggaatttaaaagccagtccttcaaggagaaatgaacaaactcaaaatcgtagttgggagtgttttttttttttttgagacagagtctcactcttgcccaggctggagtggagtggcataaacacagctcactacagcctcaaccttctgggctcagatgattctcctgcctcagcctcctgagtagcaggaactacaggtgtgagtcatcacactcagctaattttttttttttttttttactttttgtagagatggggttctcactgcattgcccaggctggtcttgaatttctgggctcaggtgatcttcccacctcagcctcctgagtagctgggaccacaggtgcatgctaatttttaaaattttttgtttttaaatgctggtcttcaactcttgtccccaagtagctgggattggggcatgaggcactgtgctaacttcatgttgaaattgaattgccattctaacagtgttaagagatggggcctgtaagaggtgattaggctgtgagggctccactctccaagggcggagttaatgttatgaaagggtaagtccagcccgcttgtgcctctcttgccctccagtgttcaaagcaccatcttggaggtggaattcccaagtcggccagttcctggatcttggactgtccggtctccagaaccgtgagccaataaacctctgttccttgtaaatgagtcagcctcaggtattctcttgtagcagcacaaatggaggcagacacttccttcaccaatctcatgggaggcccactcctgtgagctgcctctagttccccaggccacagactccatcagggctcacctggagccgtccctgtctcacctggaagctctcccactcctctggccagcctgggcatctccacccaatatgagtgatggcgactgattcccttactttagcaagctgggaataaggaatgtttgcctgttcttattcaggggtctctgcatctccacacttgcacaggttgtgtgtacatacattttcctgtctttctggtaagcccctggggtggagctctgggccacagggcaggaaaactcagtgttgctaggaactgccagacattttcccggagtgagtgcagcatttacattcccaccagaagtgtgccaggttcttgtcatactgcgtcctcgccagcgcttggtgctgtcagtcttcttagtttccatttagagattcagtgtttaaattttgaacgtcttgggtgaacaccttggtttgagaaaagtaagaaaaagggtctgtctggctatgggccatggagacccagggcagtgctccacgtgccaaccctggggcagggagcccaagctaggactgtgactgtctgggctgtgggcatctgaccatctccagtgtccccgtctttgatttccctggcgatggtgctagcttagtttgtgcgcatcggcatttgtgggagaaatgaaggattaatacattttgttttatgtcagactctctcagtgagaagttctcagggacaataatagcagggggtcctgctgaagaaaaactgggagatggctgagctctggtccatctttcattgattcattcatttcttcattcattcaaccatgtattgaatgcttatagccaatgaaaataaagtacacagtatatttta

SEQ ID NO: 23859 - DNA, 1071 bp, Artificial Sequence
  derived and/or modified sequence
atggccacagctgccctgctgcggggggccaccccaggccggggcggccctgtgtggcgctggaggctgcgggccgccccccgctgccgcctggcccacagcagctgcagccctggaggagaccccacagctggggccgcctgggcctgcttccggctggatggccgcaccctgctgcgggtgcggggcccagatgctgcccccttcctgctgggcctgctgaccaatgagctgcccctgcccagccctgctgctgctggggcccctcctgctgcccgggccggctacgcccacttcctgaatgtgcagggccgcaccctgtatgatgtgatcctgtatggcctgcaggagcacagcgaggtgtctggcttcctgctggagtgtgacagctctgtgcagggcgccctgcagaagcacctggccctgtaccgcatccggaggaaggtgacagtggagccccaccctgagctgcgggtgtgggccgtgctgcccagcagccctgaggcctgtggggccgccagcctgcaggagagagctggagctgctgccatcctgatccgggaccccaggacagccaggatgggctggaggctgctgacccaggatgagggccctgccctggtgcctgggggccgcctgggggacctgtgggactaccaccagcaccgctacctgcagggcgtgcctgagggcgtgcgggacctgcccccaggagtggccctgcccctggagagcaacctggccttcatgaatggagtgtccttcaccaagggctgctacatcggccaggagctgacagcccggacccaccacatgggcgtcatcaggaagaggctcttccctgtgcgcttcctggaccccctgcccaccagcggcatcacccctggggccaccgtgctgacagccagcggccagacagtgggcaagttccgggccggccagggcaatgtgggcctggccctgctgtggagcgagaagatcaagggccccctgcacatccgggccagcgagggcgcccaggtggccctggccgcctctgtgcctgactggtggcccaccgtgtccaagtag

SEQ ID NO: 23860 - DNA, 1071 bp, Artificial Sequence
  derived and/or modified sequence
atggccaccgccgccctgctgcggggcgccacccccggccggggcgggcccgtctggagatggaggttgagagcagcaccccgctgtagactggcacattcgtcctgtagcccaggcggggaccctaccgcaggagcagcctgggcctgcttcagattagacggtagaaccctgttaagagttcgcggcccggatgcagccccatttctgcttggactgttaaccaacgaactccctctgccttcccctgcagcggcaggcgcaccaccggcagcacgggctggctacgcccattttttaaacgtgcaaggtagaaccctttacgatgtgatactctacggtctgcaagaacactccgaggtatccggttttctccttgaatgcgactcatctgtgcagggggcccttcagaagcacctggcactttacaggatcagacggaaagtgaccgtcgagcctcatcctgagctgcgagtctgggctgtcttaccaagttcgcccgaagcctgcggcgcggcttccttacaggagcgggccggcgccgctgccattctcatcagagacccaaggacagcgcgtatgggctggaggctcctcacgcaggacgaggggccagctctggttcccggaggaaggctgggagatttgtgggattaccatcaacatcggtacctccagggcgtcccagagggagttagggaccttccaccaggtgtggccctgcctctcgagtctaaccttgctttcatgaatggcgtctctttcactaaaggctgctacattggtcaggaactgactgcgcgcacccaccacatgggagtgatacggaaacgactgtttcccgtccgctttctggaccccctgccaactagcggcatcactccaggtgctaccgtgcttacagcttctggccagactgtcggcaaattcagagctggtcagggcaacgtgggtctggccctgctctggtccgagaagatcaaagggcctttacacattcgtgcaagtgagggtgcccaggtggccttagccgcgtcagtgcctgactggtggccaacagtgagtaaatag

SEQ ID NO: 23861 - DNA, 1071 bp, Artificial Sequence
  derived and/or modified sequence
atggctaccgccgctctcctgcggggagctactccagggagaggaggacctgtctggcggtggcgattgcgtgcagccccacgatgtcggctggcacattcaagctgctctcccggaggagacccaacagccggagccgcttgggcctgttttagactcgatgggagaaccctgctgagggtacggggaccggacgccgctcctttcctcctcggcctgctcaccaacgagctgcctctgccgtctcctgccgctgccggagccccacctgcagccagggctggttacgcccactttctgaatgtgcagggacgcaccctgtacgacgtaattctgtatgggttgcaggagcacagcgaagttagtggattcctgctggagtgtgactcgtcagtgcagggagctttacagaagcacttagctttgtaccggatccgtagaaaggtgactgtcgagccccaccccgagctgagagtatgggccgtgctcccctcgtcgccagaggcctgcggtgcggcaagtctgcaggaaagagcaggggcagctgccatactcattagggacccacgaactgccaggatgggctggagattacttacacaagacgaaggacctgcactggtcccgggaggacggttaggggacctgtgggactaccaccagcatagataccttcagggagtgccagagggcgtccgagacctgccacctggcgtggccctgcctctggagagcaatctggcctttatgaacggtgtatcctttaccaaaggatgttacataggccaggagctcaccgccaggactcaccatatgggcgtcatccgcaagcggctgttccccgttaggttcctggacccgcttcctacatctggaatcactccgggtgctaccgttcttacagcttcgggtcagaccgttggcaaattcagagctggccagggcaatgttggcctggcactcctttggtctgagaaaatcaaaggaccgttgcacattcgagcatccgagggggcacaggtggcactggccgcaagtgtccctgattggtggcctacagtaagcaagtag

SEQ ID NO: 23862 - DNA, 853 bp, Artificial Sequence
  derived and/or modified sequence
agccccttgtggctgagggcagagctctttgcgttggtccacggtgtgctcctctgcccgggctccaggaacactcggaggtgtctggcttccttctggagtgtgacagctcggtgcagggcgcgctgcagaagcacctcgcgctatacaggatccggcggaaggtcacggtggagccgcacccggagctgcgagtgtgggcggtgttgcccagttcccctgaggcctgcggggctgcatcgctgcaggagagggcaggggctgccgccatcctcatccgcgacccgcgaacagcacgcatggggtggcggctcctcacccaggatgaaggcccagccctggtgcccgggggccggctcggggacttgtgggattatcaccagcaccgatacctgcaaggcgttcctgagggggtccgagacttgcctcctggggtggccctgcccctggagtccaacctggccttcatgaacggcgtgagcttcaccaaaggctgctacattggccaggagctgacggcccgcacccaccacatgggcgtcatccgcaagcgcctcttccctgtccggttcttggacccccttcccaccagtggcatcacccctggtgccacggtgctgactgcctcaggacagactgtgggcaagttcagggctggccagggcaacgtggggctggccctgctgtggtcagagaagatcaagggtcctctgcacatcagagcctctgagggtgcccaggtggccttagccgcatctgtgccagactggtggcctacagtctccaagtagtccgaagccttggctggcgcaggctgatggggaggctggggcctggggcctttggcctctgt

SEQ ID NO: 23863 - protein, 2096 aa, Artificial Sequence
  derived and/or modified sequence
MCSTPGMPAPGASLALRVSFVDVHPDVIPVQLWGLVGERRGEYLRLSREIQEAAATRGQWALGSASASPGELCLVQVGLLWHRCRVVSRQAQESRVFLLDEGRTITAGAGSLAPGRREFFNLPSEVLGCVLAGLVPAGCGAGSGEPPQHWPADAVDFLSNLQGKEVHGCVLDVLLLHRLVLLEVPDVFQQMRELGLARRVPDSLFRSLLERYLTAATASVGSGVPVLSRVPLKQKQPGLDYFYPQLQLGVTEAVVITQVCHPHRIHCQLRSVSQEIHRLSESMAQVYRGSTGTGDENSTSATWEEREESPDKPGSPCASCGLDGHWYRALLLETFRPQRCAQVLHVDYGRKELVSCSSLRYLLPEYFRMPVVTYPCALYGLWDGGRGWSRSQVGDLKTLILGKAVNAKIEFYCSFEHVYYVSLYGEDGINLNRVFGVQSCCLADRVLQSQATEEEEPETSQSQSPAEEVDEEISLPALRSIRLKMNAFYDAQVEFVKNPSEFWIRLRKHNVTFSKLMRRMCGFYSSASKLDGVVLKPEPDDLCCVKWKENGYYRAIVTKLDDKSVDVFLVDRGNSENVDWYDVRMLLPQFRQLPILAVKCTLADIWPLGKTWSQEAVSFFKKTVLHKELVIHILDKQDHQYVIEILDESRTGEENISKVIAQAGYAKYQEFETKENILVNAHSPGHVSNHFTTESNKIPFAKTGEGEQKAKRENKTTSVSKALSDTTVVTNGSTELVVQEKVKRASVYFPLMQNCLEIKPGSSSKGELEVGSTVEVRVSYVENPGYFWCQLTRNIQGLKTLMSDIQYYCKNTAAPHQRNTLACLAKRTVNRQWSRALISGIQSVEHVNVTFVDYGDREMVSVKNIYSISEEFLKVKAQAFRCSLYNLIQPVGQNPFVWDVKAIQAFNEFIDNAWQKNLELKCTIFALASINEELFNIVDLLTPFQSACHFLVEKRLARPVKLQKPLESSVQLHSYFYSTHDMKIGSEELVYITHIDDPWTFYCQLARNANILEQLSCSITQLSKVLLNLKTSPLNPGTLCLAKYTDGNWYRGIVIEKEPKKVFFVDFGNIYVVTSDDLLPIPSDAYDVLLLPMQAVRCSLSDIPDHIPEEVVVWFQETILDKSLKALVVAKDPDGTLIIELYGDNIQISASINKKLGLLSYKDRIRKKESEVLCSTTETLEEKNENMKLPCTEYLSKSVGYKLPNKEILEESYKPQINSSYKELKLLQSLTKTNLVTQYQDSVGNKNSQVFPLTTEKKEEISAETPLKTARVEATLSERKIGDSCDKDLPLKFCEFPQKTIMPGFKTTVYVSHINDLSDFYVQLIEDEAEISHLSERLNSVKTRPEYYVGPPLQRGDMICAVFPEDNLWYRAVIKEQQPNDLLSVQFIDYGNVSVVHTNKIGRLDLVNAILPGLCIHCSLQGFEVPDNKNSKKMMHYFSQRTSEAAIRCEFVKFQDRWEVILADEHGIIADDMISRYALSEKSQVELSTQVIKSASSKSVNKSDIDTSVFLNWYNPEKKMIRAYATVIDGPEYFWCQFADTEKLQCLEVEVQTAGEQVADRRNCIPCPYIGDPCIVRYREDGHYYRALITNICEDYLVSVRLVDFGNIEDCVDPKALWAIPSELLSVPMQAFPCCLSGFNISEGLCSQEGNDYFYEIITEDVLEITILEIRRDVCDIPLAIVDLKSKGKSINEKMEKYSKTGIKSALPYENIDSEIKQTLGSYNLDVGLKKLSNKAVQNKIYMEQQTDELAEITEKDVNIIGTKPSNFRDPKTDNICEGFENPCKDKIDTEELEGELECHLVDKAEFDDKYLITGFNTLLPHANETKEILELNSLEVPLSPDDESKEFLELESIELQNSLVVDEEKGELSPVPPNVPLSQECVTKGAMELFTLQLPLSCEAEKQPELELPTAQLPLDDKMDPLSLGVSQKAQESMCTEDMRKSSCVESFDDQRRMSLHLHGADCDPKTQNEMNICEEEFVEYKNRDAISALMPLFSEEESSDGSKHNNGLPDHISAQLQNTYTLKAFTVGSKCVVWSSLRNTWSKCEILETAEEGTRVLNLSNGMEEIVNPENVWNGIPKLDKSPPEKRGLEVMEI

SEQ ID NO: 23864 - protein, 183 aa, Artificial Sequence
  derived and/or modified sequence
MRKSSCVESFDDQRRMSLHLHGADCDPKTQNEMNICEEEFVEYKNRDAISALMPLFSEEESSDGSKHNNGLPDHISAQLQNTYTLKAFTVGSKCVVWSSLRNTWSKCEILETAEEGTRVLNLSNGMEEIVNPENVWNGIPKLDKSPPEAVSQRVGKDLYFMSVGDTTIKEKGFGGDGDLTVDL

SEQ ID NO: 23865 - protein, 175 aa, Artificial Sequence
  derived and/or modified sequence
  misc_feature (1)..(1): Xaa can be any naturally occurring amino acid
XFDDQRRMSLHLHGADCDPKTQNEMNICEEEFVEYKNRDAISALMPLFSEEESSDGSKHNNGLPDHISAQLQNTYTLKAFTVGSKCVVWSSLRNTWSKCEILETAEEGTRVLNLSNGMEEIVNPENVWNGIPKLDKSPPEAVSQRVGKDLYFMSVGDTTIKEKGFGGDGDLTVDL

SEQ ID NO: 23866 - DNA, 552 bp, Artificial Sequence
  derived and/or modified sequence
atgagaaagagcagctgcgtggagagcttcgacgaccagagaagaatgagcctgcacctgcacggcgccgactgcgaccccaagacccagaacgagatgaacatctgcgaggaggagttcgtggagtacaagaacagagacgccatcagcgccctgatgcccctgttcagcgaggaggagagcagcgacggcagcaagcacaacaacggcctgcccgaccacatcagcgcccagctgcagaacacctacaccctgaaggccttcaccgtgggcagcaagtgcgtggtgtggagcagcctgagaaacacctggagcaagtgcgagatcctggagaccgccgaggagggcaccagagtgctgaacctgagcaacggcatggaggagatcgtgaaccccgagaacgtgtggaacggcatccccaagctggacaagagcccccccgaggccgtgagccagagagtgggcaaggacctgtacttcatgagcgtgggcgacaccaccatcaaggagaagggcttcggcggcgacggcgacctgaccgtggacctgtag

SEQ ID NO: 23867 - DNA, 528 bp, Artificial Sequence
  derived and/or modified sequence
tgattcgacgaccagagaagaatgagcctgcacctgcacggcgccgactgcgaccccaagacccagaacgagatgaacatctgcgaggaggagttcgtggagtacaagaacagagacgccatcagcgccctgatgcccctgttcagcgaggaggagagcagcgacggcagcaagcacaacaacggcctgcccgaccacatcagcgcccagctgcagaacacctacaccctgaaggccttcaccgtgggcagcaagtgcgtggtgtggagcagcctgagaaacacctggagcaagtgcgagatcctggagaccgccgaggagggcaccagagtgctgaacctgagcaacggcatggaggagatcgtgaaccccgagaacgtgtggaacggcatccccaagctggacaagagcccccccgaggccgtgagccagagagtgggcaaggacctgtacttcatgagcgtgggcgacaccaccatcaaggagaagggcttcggcggcgacggcgacctgaccgtggacctgtag

SEQ ID NO: 23868 - DNA, 6291 bp, Artificial Sequence
  derived and/or modified sequence
atgtgcagcacacccggtatgccagctccaggcgcgtcactagctctacgcgttagctttgtagacgtgcaccctgatgtgattcctgtccagctgtggggactggttggcgagcgcaggggcgagtacctgcgcctcagccgggaaatccaagaagccgctgctacacgaggacaatgggccctagggtcagccagcgcatctcctggagaattgtgcttggttcaggtgggattgttgtggcacaggtgcagggtcgtgtcgcgccaggcccaggagtcgcgtgtgtttctcttagatgaaggaagaaccattacggcgggcgcaggtagtctggctccgggtcgaagggaatttttcaacctccctagcgaggttctgggctgtgtcctggccggcctcgtcccagcagggtgtggcgctggctctggggaaccaccacagcactggcctgctgacgctgtggactttctctcgaacctgcaaggcaaggaggtgcacggatgcgtcttagatgtgctcttgcttcaccggttggtactgctcgaagtaccggacgtgtttcaacagatgcgagagctgggtctggcccggcgggtcccggactccctgtttagaagcttgcttgagcgttatctcacagccgccactgctagtgttggctctggcgtaccggtgctctctcgcgtaccactgaagcaaaagcagcctggattagattacttttaccctcaactccagcttggagtaactgaagctgtcgtgatcacacaggtgtgtcatccccaccggattcattgtcaattgagaagtgtcagccaagaaatccacaggctgtccgaatcaatggcgcaagtctaccggggctcaacgggcaccggtgacgagaattccacttcagcaacttgggaggagcgagaagagagcccggataaacctggtagcccctgcgcctcctgtgggttggatggacattggtatagggctcttttgctcgagacctttcgcccccagagatgtgcccaggtgcttcatgtagattacggacgcaaggaactggtgtcgtgtagttctcttaggtacctcctgccagagtacttccgcatgccggtggttacctatccttgcgccctgtacggcctgtgggatggcggcagaggatggtcaaggtctcaggtgggggacctcaagactctcatactcgggaaggctgtaaacgccaagatagaattttactgtagctttgagcatgtgtactacgtctccctctacggcgaggatggcattaatctgaatagagtctttggagtgcagagttgttgtttggccgatcgggttctgcaatctcaggccactgaagaggaggaacccgagacatcccagtctcaatcccctgccgaggaagtggacgaagagatcagcctccctgccctgaggtcaattcggctcaaaatgaatgccttttatgatgcgcaggtcgagttcgtgaagaacccttcagaattctggattcgtctaaggaaacataatgtgaccttttcaaagctaatgcgccgaatgtgcggcttttattccagtgcgtccaagctcgatggtgtcgtgctgaagcccgaaccggatgacctctgctgcgtgaagtggaaggagaacggctactaccgtgccatagttaccaagctcgatgataagagtgtggacgtgtttttggtggatagaggcaactctgaaaacgtagactggtacgacgtgcggatgttgttgcctcagtttaggcagttaccaatcctggcagtgaaatgcacccttgccgatatctggccgctcggaaagacatggagtcaagaagcagtctctttcttcaagaagacagtgctccacaaggaactggtcatccatatcttagacaaacaagatcaccaatatgtcatcgaaatcctcgacgagtcccgcactggtgaagagaatatttctaaagtgattgcgcaggctggctatgctaagtaccaggagtttgagacaaaggagaacatcctggtcaacgctcacagccccgggcatgtctcaaatcatttcaccaccgagtccaacaaaatcccgtttgctaagacaggggagggcgaacagaaggccaaaagagagaataagactactagcgtctccaaagccctatctgacacaaccgttgttacgaatggctccaccgagctcgtcgtacaagaaaaggtcaaacgggcctccgtgtacttccccctcatgcaaaactgtctggaaatcaagccaggctcctcaagcaaaggtgaactggaggtgggctcaactgtggaagttcgcgtttcctatgtcgaaaatccaggttacttctggtgtcaactgactcgtaatatccagggtctgaagaccctgatgtctgacatccagtattattgcaagaatacagcagcgcctcatcagaggaatacactggcttgtctggccaagaggaccgttaaccgccagtggagccgagctctgatcagcggtatccagagcgtcgagcacgtcaatgttacatttgtcgattatggagatagagagatggtgtctgtcaagaatatctacagcatctccgaggaattcttaaaagttaaagcccaggcatttaggtgctcactgtataatctcattcagccagttggacagaacccatttgtgtgggacgtgaaagcgattcaggcctttaatgaattcattgacaatgcgtggcagaagaacctagagttgaagtgcactatctttgctttggcgagcataaatgaggaattgtttaatattgtggacctccttactccattccagtcagcttgtcatttcttagttgagaagcgcctagcgcgccctgtgaagcttcagaagcccctggagagctctgtgcagttacattcttacttctattcaacccacgacatgaagataggttctgaggagcttgtgtacattacccatatcgacgatccttggacattttactgtcagctcgctagaaatgcgaacatccttgaacagctgagctgcagcatcacacaactcagcaaggtcttgctgaacctcaagacgagccctctgaacccgggcaccctgtgtctggccaaatacaccgacggaaattggtaccgggggatcgtgatcgagaaggagccaaagaaagtcttctttgtggatttcggaaacatctacgtcgtcacatctgacgacctgctaccaataccatctgacgcatatgatgtgctgctattgcccatgcaggctgtgcggtgctctctttctgatattccagatcatatcccagaagaggtggtggtttggtttcaggagactatcctggataaaagcctcaaggctttggtggtcgcaaaggatcctgatggtacgctcattattgagctgtacggggataacatccagatttcggccagcatcaacaaaaagctgggtcttctgtcttacaaggatcggataagaaaaaaggaatcagaggtcctgtgtagcacgacggaaaccctggaggaaaaaaatgagaatatgaagctgccttgtaccgagtatttgtccaaaagcgttggatataaacttcccaacaaggaaatacttgaagagagctataagccccaaattaatagttcctacaaagagcttaagctgttgcagagcctgacaaaaacaaatctcgtaacccagtatcaagattctgtcggcaacaaaaactcacaagttttccccctgactaccgagaagaaagaggagatctccgccgaaactccacttaagacggcaagagtcgaagccacattaagcgagagaaaaattggggatagttgcgacaaggacctccccctgaagttctgtgagttcccccagaagaccattatgccggggttcaaaacgacagtttatgtttcccatatcaatgatttgtccgacttttacgtgcagctcattgaggacgaagcggagatcagccatctgtctgagcggcttaattccgtgaagacaaggcctgaatattatgtcggccctccactgcaacggggcgatatgatttgcgccgtattcccggaggacaatttgtggtaccgagcagtgatcaaagaacaacaacctaatgacctgcttagcgtgcagtttatagactatggcaacgtgtcagtcgtgcacacaaacaagatcgggaggctagatctggtgaacgcgatcctgcccggtctttgcatccattgcagcttgcaggggttcgaagtgcctgacaacaagaactccaaaaaaatgatgcattacttcagccagagaacttctgaggccgccatacggtgcgaattcgtgaagtttcaagatcgttgggaagtgattctcgcggacgaacatggaattatagccgacgacatgatttccaggtatgcactcagcgagaagagtcaagtggagctctcaacgcaggtgattaagagcgcctcgtctaagagcgtgaacaaatcagatatcgatacatcagtgtttctgaactggtacaacccggaaaaaaaaatgattcgagcttatgctactgttatagatggccccgaatatttttggtgtcagttcgcagacaccgagaaattacaatgcttggaagtggaggtgcagacagcaggcgaacaggtggccgacagacgcaattgcattccctgcccctatatcggtgatccctgcattgtccgctatcgagaggatggacactactatagagccctcataactaacatttgtgaagactatctggttagcgtgcggctagtcgacttcggaaatattgaagactgtgtggatcctaaagccttgtgggccattccgagcgaattactgagtgttcccatgcaggcatttccctgttgtttaagcggcttcaacatcagcgaaggcctctgcagtcaagaaggcaacgactacttttacgagataatcacagaggatgtcttggagataacaattctcgagattcgccgagatgtttgcgacattccattagcaatagtggacctcaagtcaaaagggaagagcatcaatgagaagatggagaagtattcaaagacaggaataaagtcagcactaccgtacgaaaatatcgacagtgaaattaaacaaacactgggctcttacaacctcgatgttggactaaagaagctgagtaacaaagccgtgcaaaataaaatctacatggagcagcagacagatgaactggctgagataacagagaaggatgtgaatatcattggcactaagccatccaacttccgcgaccctaaaacagacaacatctgcgagggatttgagaacccttgcaaagacaagattgatactgaagagctggaaggcgagctggaatgccatctggtggacaaggccgaatttgacgataaatacttaatcacaggctttaataccctgctgcctcatgctaacgagacaaaggaaatcctcgagttgaattccctggaggtgccattatcccctgacgacgagagtaaagagtttttagagttggagagtatcgagctgcagaattcactggtggttgatgaagagaaaggagaattgtcacccgtgccaccaaatgtgcccctgtcccaggaatgtgtgacaaaaggagctatggagctcttcaccctgcagctcccgctttcgtgcgaagccgagaagcagcctgaactggaactgcctacagcccaactgcccttagacgacaagatggatcctctctccctgggcgtgtctcagaaagctcaagaatctatgtgtaccgaggacatgagaaaatcgtcctgtgtggagagctttgatgatcagcgacgaatgtcactgcatttgcacggagccgactgcgatccaaagactcagaacgaaatgaacatctgtgaagaggaattcgtggagtacaagaatagagacgccataagcgcgctaatgccactgtttagcgaggaggagtcctctgacgggtctaagcacaataacggcctaccagatcatatatccgctcagctgcagaacacctacacactgaaagcctttaccgtcgggtcaaaatgcgtggtgtggagcagcctcaggaatacctggagcaagtgcgaaatactcgagactgcagaggaaggcacacgtgttttgaatctaagcaatggcatggaggagattgtgaaccctgagaatgtctggaacggtatcccaaagctcgacaaatcaccacccgagaaacgaggactggaggtgatggaaatatag

SEQ ID NO: 23869 - DNA, 552 bp, Artificial Sequence
  derived and/or modified sequence
atgaggaagtcatcgtgtgtggaaagcttcgatgaccaacgccgaatgagtctccacctccatggggccgattgcgatccgaagacccagaacgaaatgaacatttgtgaagaggagttcgtggaatacaaaaaccgtgacgctatcagcgccttaatgccactgtttagcgaagaggagtcatcggacggaagtaagcataacaatggcctgccagatcatatctcggcgcagctgcaaaacacctacacattgaaagccttcacagtgggtagcaagtgcgtggtgtggtcaagcctccggaacacctggtctaaatgcgagatcctggaaacagcagaggaaggaactagggtcctaaacctaagcaacgggatggaggagatcgtcaacccagaaaacgtctggaacggcattcccaagcttgataagagcccccccgaggcagtgtcacagagagtgggaaaggacctgtactttatgtcagtgggggacacgaccatcaaggaaaaaggatttggtggcgatggcgatctgacagtggacttatag

SEQ ID NO: 23870 - DNA, 528 bp, Artificial Sequence
  derived and/or modified sequence
taatttgacgaccagcggcgtatgtccttgcatctgcacggagcggactgtgatccaaaaacccagaatgagatgaacatttgtgaagaggagtttgtggaatataaaaaccgagatgcaatatcagccctgatgcccttattcagcgaggaagagtcttcggacggctctaaacataataacggactcccggatcacataagcgcacaactacaaaatacctacaccttgaaggcgttcaccgtgggcagcaagtgtgtggtctggtcaagtctgcggaacacctggtccaagtgtgaaattctggagacggccgaagaaggtacacgggtcctgaatctctctaacggtatggaagaaattgtcaacccggagaatgtgtggaatgggatcccaaagctggataagtctccccctgaagctgtgagtcaacgagttggcaaggatctttattttatgtctgttggggacacaactatcaaggagaagggcttcggaggagatggtgatctgactgtggatctgtag

SEQ ID NO: 23871 - DNA, 3679 bp, Artificial Sequence
  derived and/or modified sequence
tagtaacaagtgatgatctgcttccaatacctagtgatgcatatgatgtcttacttttgcccatgcaagctgtcagatgttcattatctgatattcctgatcatataccagaagaagtggtggtgtggtttcaggagactattttagataagtcattgaaggctttagttgtagcaaaagatccagatggaacactgattatagaactatatggtgacaatattcaaattagtgctagtattaataagaagttggggctacttagttacaaagatagaataagaaaaaaagaaagtgaagtcctctgttctacaactgaaactcttgaagaaaaaaatgagaatatgaagttgccatgtacagagtatttaagtaaatcagtagggtacaagttacctaataaagaaattttggaagagtcatataaacctcagatcaactcatcatacaaggaactcaaacttttacaaagtttaacaaaaacaaacttagtcactcaatatcaagactctgtgggaaataaaaatagtcaagtgtttccattaacaacagaaaagaaagaagaaatttctgctgagacacccttgaaaacagcaagagtagaagctactctttcagagagaaaaataggagattcatgtgacaaagatttgcctctgaaattttgtgagttcccacagaagactataatgcctggatttaaaacaactgtatatgtttctcatataaatgacctttcagacttttatgttcaactaatagaagatgaagctgaaattagtcatctttcagagagattaaacagtgttaaaacaaggcccgaatattatgtaggtccacctttgcaaagaggagatatgatatgtgctgttttcccagaagataatttatggtatcgtgctgtgatcaaggagcaacaacccaatgaccttctctctgtgcagtttatagattatggcaatgtttctgtggttcatactaacaaaataggtaggcttgaccttgttaatgcaatattgccggggttgtgcattcattgctccttgcagggatttgaggttcctgacaataaaaattctaagaaaatgatgcattacttttcccaacggaccagcgaggctgcaataagatgtgaatttgttaaatttcaagacagatgggaagttattcttgctgatgaacatgggatcatagcagatgatatgattagcaggtatgctctcagtgaaaaatctcaagtagaactttctacccaagtaattaaaagtgccagttcaaagtctgttaacaaatcagacattgacacttcagtatttcttaactggtataatccagaaaaaaaaatgataagagcttatgccactgtgatagatggacctgagtacttttggtgtcagtttgctgatacggagaaacttcagtgtttagaagtagaagtacagactgctggagaacaggtagcagacaggagaaattgtatcccatgtccttatattggagatccttgtatagtaagatacagagaagatggacattattatagggcacttatcactaatatttgtgaagattatcttgtatctgtcaggcttgtggactttggaaacattgaagactgtgtggacccaaaagcactctgggccattccttctgaacttctgtcggttcccatgcaagcctttccatgttgcctctcagggtttaacatttcagaaggattatgttctcaagagggaaatgactatttctatgaaataataacagaagatgtgttggaaataacaatactagaaatcagaagggatgtttgtgatatccctttagcaattgttgacttgaaaagcaaaggtaaaagtattaatgagaaaatggagaaatattctaagactggtattaaaagtgctcttccctatgaaaatattgactcagagataaagcagactcttgggtcctacaatcttgatgtaggacttaagaaattaagtaataaagctgtacaaaataaaatatatatggaacaacagacagatgagcttgctgaaataactgaaaaagatgtaaacattattggaaccaaaccaagtaacttccgtgaccctaaaactgataacatttgtgaagggtttgaaaacccctgcaaagataaaattgatactgaggaactggaaggtgaattagagtgccatctggttgacaaagcagagtttgatgataaatacctgattacaggatttaacacattactaccacatgctaatgaaacaaaggagatactagaactgaattcacttgaggtgccgctttctcctgatgatgaatcaaaagaattcttagaactggaatctattgagttacagaattctctggtggtggatgaagaaaaaggggagctaagcccggtgccaccgaatgtgccactctcccaagagtgtgtcacaaaaggcgccatggagctatttacactgcagcttcctctcagctgtgaagctgagaaacagccagaactagaactacctacagcccagctgcctttagatgacaagatggatcctttgtctttaggagttagtcagaaagcacaggaatccatgtgtactgaggacatgagaaagtcaagttgtgtagaatcttttgatgaccagcgcaggatgtcattgcatctacatggagcagattgtgatcctaaaacacagaatgaaatgaatatatgtgaagaagaatttgtagagtataaaaacagggatgccatttcggcattgatgcctttgttctctgaggaagaaagcagtgatggaagcaagcacaataatggtttaccagatcatatctcagctcaactacagaacacctacactctgaaagcctttactgttggatctaaatgtgttgtgtggtcaagtctaagaaacacatggtctaaatgtgagattttagaaacagctgaagaaggaacaagggttttgaacctttcaaatggtatggaggagatagtgaaccctgagaatgtctggaatggcatacccaaattggataagagtccacctgaggctgtatcccaaagagtagggaaagatctttacttcatgtcagtgggtgataccactattaaagaaaaggggtttggaggtgatggagatttaaccgtggatctatagctgtggccaatcagtcagaagctgcccttgaacaagtggcatcttacgcagaccaacagagtatttgagaaaattgaaaacatgtaaccacaagaagttgtcattttcaaaaacttctatataggtggaaaacaaattaggtctcaggttgatggtggggtgtgtttatagtgatcctgttatatatacagatctgggatctttcgtctttattgtcttacgtttctaattagttgggaggatttattttgctaaacagtttactaacacattacatttcaaaaactattttggtacctttcaaatacagtgtttaaattaaaatagaaaaataagggctcatgacaagtacattatttgattctacttaggatagctttttagcaggatctccttcagaatttttgtcttgactttgaatctttgcctgtttgtctaaacatttgactaacattctgtttgaatttggaagtattctaatacaagatttgaataaagtttatccttaaataaagtttatcctt

SEQ ID NO: 23872 - DNA, 6291 bp, Artificial Sequence
  derived and/or modified sequence
atgtgcagcaccccaggcatgcctgcccctggggccagcctggccctgcgggtgtcctttgtggatgtgcacccagatgtgattcctgtgcagctgtggggcctggtgggggagaggagaggagagtacctgcggctgagccgggagatccaggaggccgccgccacccggggccagtgggccctgggcagcgccagcgccagccctggagagctgtgcctggtgcaggtgggcctgctgtggcaccgctgccgggtggtgtcccggcaggcccaggagagcagggtcttcctgctggatgagggccgcaccatcacagctggagctggcagcctggcccctggccggcgggagttcttcaacctgcccagcgaggtgctgggctgtgtgctggccggcctggtgcctgctggctgtggggccggcagcggggagcccccccagcactggccagcagatgctgtggacttcctgagcaacctgcagggcaaggaggtgcacggctgtgtgctggatgtgctgctgctgcaccggctggtgctgctggaggtgcctgatgtgttccagcagatgagggagctgggcctggcccggcgggtgcctgacagcctcttccgcagcctgctggagcgctacctgacagctgccacagcctctgtgggcagcggcgtgcctgtgctgagccgggtgcccctgaagcagaagcagcccggcctggactacttctacccccagctgcagctgggcgtgacagaagctgtggtgatcacccaggtgtgccacccccaccgcatccactgccagctgcggtctgtgtcccaggagatccaccggctgtctgagagcatggcccaggtgtaccggggcagcactggaactggagatgagaacagcaccagcgccacctgggaggagcgggaggagagcccagacaagccaggcagcccctgtgccagctgtggcctggatggccactggtaccgggccctgctgctggagaccttccggccccagagatgtgcccaggtgctgcacgtggactatggcaggaaggagctggtgtcctgcagcagcctgcgctacctgctgcctgagtacttcaggatgcctgtggtgacctacccctgtgccctgtatggcctgtgggatggcggccggggctggagccgcagccaggtgggggacctgaagaccctcatcctgggcaaggctgtgaatgccaagattgagttctactgcagctttgaacatgtgtactacgtgtccctgtatggagaagatggcatcaacctgaacagagtgtttggagtgcagagctgctgcctggccgacagagtgctgcagagccaggccacagaggaggaggagcctgagaccagccagagccagagccctgctgaggaggtggatgaggagatcagcctgcctgccctgcggagcatccggctgaagatgaatgccttctatgatgcccaggtggagtttgtgaagaaccccagcgagttctggatccggctgaggaagcacaacgtgaccttcagcaagctgatgaggaggatgtgtggcttctacagcagcgccagcaagctggatggagtggtgctgaagccagagccagatgacctgtgctgcgtgaagtggaaggaaaatggctactaccgggccatcgtgaccaagctggatgacaagtctgtggatgtgttcctggtggaccggggcaacagtgaaaatgtggactggtatgatgtgaggatgctgctgccccagttccggcagctgcccatcctggccgtgaagtgcaccctggccgacatctggcccctgggcaagacctggagccaggaggccgtgtccttcttcaagaagacagtgctgcacaaggagctggtgatccacatcctggacaagcaggaccaccagtatgtgattgagatcctggatgagagcaggactggagaggagaacatcagcaaggtgattgcccaggccggctacgccaagtaccaggagtttgagaccaaggagaacatcctggtgaatgcccacagccctggccacgtgagcaaccacttcaccacagagagcaacaagatcccctttgccaagacaggagagggggagcagaaggccaagcgggagaacaagaccacctctgtgtccaaggccctgagtgacaccaccgtggtgaccaacggcagcacagagctggtggtgcaggagaaggtgaagagggcctctgtgtacttccccctgatgcagaactgcctggagatcaagccaggcagcagcagcaaaggagagctggaggtgggcagcacagtggaggtgcgggtgtcctatgtggagaaccctggctacttctggtgccagctgaccaggaacatccagggcctgaagaccctgatgtctgacatccagtactactgcaagaacacagctgccccccaccagaggaacaccctggcctgcctggccaagaggacagtgaaccggcagtggagccgggccctgatcagcggcatccagagcgtggagcacgtgaatgtgacctttgtggactatggagaccgggagatggtgtctgtgaagaacatctacagcatcagcgaggagttcctgaaggtgaaggcccaggccttccgctgcagcctgtacaacctgatccagcctgtgggccagaacccctttgtgtgggatgtgaaggccatccaggccttcaatgagttcatcgacaatgcctggcagaagaacctggagctgaagtgcaccatctttgccctggccagcatcaatgaggagctgttcaacatcgtggacctgctgacccccttccagagcgcctgccacttcctggtggagaagaggctggcccggcctgtgaagctgcagaagcccctggagagctctgtgcagctgcacagctacttctacagcacccatgacatgaagattggcagcgaggagctggtgtacatcacccacattgatgacccctggaccttctactgccagctggccagaaatgccaacatcctggagcagctgagctgcagcatcacccagctgagcaaggtgctgctgaacctgaagaccagccccctgaaccctggcaccctgtgcctggccaagtacacagatggcaactggtaccggggcatcgtgattgagaaggagcccaagaaggtgttctttgtggactttggaaacatctacgtggtgaccagtgatgacctgctgcccatccccagtgatgcctatgatgtgctgctgctgcccatgcaggccgtgcgctgcagcctgagtgacatcccagaccacatccctgaggaggtggtggtgtggttccaggagaccatcctggacaagagcctgaaggccctggtggtggccaaggaccctgatggcaccctcatcatcgagctgtatggagacaacatccagatcagcgccagcatcaacaagaagctgggcctgctgagctacaaggaccgcatcaggaagaaggagagcgaggtgctgtgcagcaccacagagaccctggaggagaagaatgaaaacatgaagctgccctgcacagagtacctgagcaagtctgtgggctacaagctgcccaacaaggagatcctggaggagagctacaagccccagatcaacagcagctacaaggagctgaagctgctgcagagcctgaccaagaccaacctggtgacccagtaccaggacagcgtgggcaacaagaacagccaggtgttccccctgaccacagagaagaaggaggagatctctgctgagacccccctgaagacagcccgggtggaggccaccctgtctgagaggaagattggagacagctgtgacaaggacctgcccctgaagttctgtgagttcccccagaagaccatcatgcctggcttcaagaccaccgtgtatgtgagccacatcaatgacctgagtgacttctacgtgcagctgattgaagatgaagctgagatcagccacctgtctgagcggctgaacagcgtgaagaccaggcctgagtactacgtgggcccccccctgcagagaggagacatgatctgtgctgtgtttcctgaggacaacctgtggtaccgggccgtcatcaaggagcagcagcccaatgacctgctgtctgtgcagttcatcgactatggaaatgtgtctgtggtgcacaccaacaagattggccgcctggacctggtgaatgccatcctgcccggcctgtgcatccactgcagcctgcagggctttgaggtgcctgacaacaagaacagcaagaagatgatgcactacttcagccagaggaccagcgaggccgccatccgctgtgaatttgtgaagttccaggaccgctgggaggtgatcctggctgatgagcacggcatcatcgcagatgacatgatcagccgctatgccctgtctgagaagagccaggtggagctgagcacccaggtgatcaagagcgccagcagcaagtctgtgaacaagagtgacatcgacaccagcgtcttcctgaactggtacaaccctgagaagaagatgatccgggcctatgccaccgtgattgatggccctgagtacttctggtgccagtttgctgacacagagaagctgcagtgcctggaggtggaggtgcagacagctggggagcaggtggccgacagaagaaactgcatcccctgcccctacatcggggacccctgcatcgtgcgctaccgggaggatggccactactaccgggccctgatcaccaacatctgtgaggactacctggtgtctgtgcggctggtggactttggaaatattgaggactgtgtggaccccaaggccctgtgggccatccccagcgagctgctgtctgtgcccatgcaggccttcccctgctgcctgagcggcttcaacatcagcgagggcctgtgcagccaggagggcaatgactacttctatgagatcatcacagaagatgtgctggagatcaccatcctggagatcagaagagatgtgtgtgacatccccctggccatcgtggacctgaagagcaagggcaagagcatcaatgagaagatggagaagtacagcaagacaggcatcaagagcgccctgccctatgagaacatcgacagcgagatcaagcagaccctgggcagctacaacctggatgtgggcctgaagaagctgagcaacaaggctgtgcagaacaagatctacatggagcagcagacagatgagctggccgagatcacagagaaggatgtgaacatcatcggcaccaagcccagcaacttccgggaccccaagacagacaacatctgtgagggctttgagaacccctgcaaggacaagattgacacagaggagctggagggggagctggagtgccacctggtggacaaggccgagtttgatgacaagtacctgatcaccggcttcaacaccctgctgccccacgccaatgagaccaaggagatcctggagctgaacagcctggaggtgcccctgagcccagatgatgagagcaaggagttcctggagctggagagcattgagctgcagaacagcctggtggtggatgaggagaagggggagctgagccctgtgcccccaaatgtgcccctgagccaggagtgtgtgaccaagggggccatggagctgttcaccctgcagctgcccctgagctgtgaggccgagaagcagcctgagctggagctgcccacagcccagctgcccctggatgacaagatggaccccctgagcctgggcgtgtcccagaaggcccaggagagcatgtgcacagaggacatgaggaagagcagctgtgtggagagctttgatgaccagaggaggatgagcctgcacctgcacggggctgactgtgaccccaagacccagaatgagatgaacatctgtgaggaggagtttgtggagtacaagaacagagatgccatcagcgccctgatgcccctcttcagcgaggaggagagcagtgatggcagcaagcacaacaacggcctgcctgaccacatcagcgcccagctgcagaacacctacaccctgaaggccttcaccgtgggcagcaaatgtgtggtgtggagcagcctgaggaacacctggagcaaatgtgagatcctggagacagctgaggagggcaccagggtgctgaacctgagcaatggcatggaggagatcgtgaacccagaaaatgtgtggaatggcatccccaagctggacaagagccccccagagaagaggggcctggaggtgatggagatctag

SEQ ID NO: 23873 - DNA, 552 bp, Artificial Sequence
  derived and/or modified sequence
atgaggaagagcagctgtgtggagagctttgatgaccagaggaggatgagcctgcacctgcatggagctgactgtgaccccaagacccagaatgagatgaacatctgtgaggaggagtttgtggagtacaagaacagagatgccatcagcgccctgatgcccctcttcagcgaggaggagagcagtgatggcagcaagcacaacaacggcctgcctgaccacatcagcgcccagctgcagaacacctacaccctgaaggccttcaccgtgggcagcaaatgtgtggtgtggagcagcctgaggaacacctggagcaaatgtgagatcctggagacagctgaggagggcaccagggtgctgaacctgagcaatggcatggaggagatcgtgaacccagaaaatgtgtggaatggcatccccaagctggacaagagccccccagaggccgtgtcccagagggtgggcaaggacctgtacttcatgtctgtgggggacaccaccatcaaggagaagggctttggaggagatggagacctgactgtggacctgtag

SEQ ID NO: 23874 - DNA, 528 bp, Artificial Sequence
  derived and/or modified sequence
tgatttgatgaccagaggaggatgagcctgcacctgcatggagctgactgtgaccccaagacccagaatgagatgaacatctgtgaggaggagtttgtggagtacaagaacagagatgccatcagcgccctgatgcccctcttcagcgaggaggagagcagtgatggcagcaagcacaacaacggcctgcctgaccacatcagcgcccagctgcagaacacctacaccctgaaggccttcaccgtgggcagcaaatgtgtggtgtggagcagcctgaggaacacctggagcaaatgtgagatcctggagacagctgaggagggcaccagggtgctgaacctgagcaatggcatggaggagatcgtgaacccagaaaatgtgtggaatggcatccccaagctggacaagagccccccagaggccgtgtcccagagggtgggcaaggacctgtacttcatgtctgtgggggacaccaccatcaaggagaagggctttggaggagatggagacctgactgtggacctgtag

SEQ ID NO: 23875 - DNA, 6291 bp, Artificial Sequence
  derived and/or modified sequence
atgtgcagcacccccggcatgcccgcccccggcgccagcctggccttgagagtgtcgttcgtggatgtgcatcctgatgtgattccagtacagctttggggactggtgggcgagaggaggggggaatatcttcgcttatccagagaaatccaggaagccgctgctacccgcggacagtgggccctgggcagcgcctcagcatctccgggagagctctgcctggttcaagtgggactgctgtggcacaggtgtcgggttgtgtctcggcaggcccaggagagtagggtttttctactcgacgaaggtcgcaccattaccgctggcgccggctcactggccccgggcagaagagaattttttaatctgccaagcgaggtgttgggatgcgtgttggcaggcctcgtcccggccgggtgcggtgctgggagtggggagcctccgcagcattggcctgccgacgccgtggacttcctgtctaatctgcagggtaaagaagttcatggctgtgtcttagacgtcctcttacttcaccgcctcgtgctgcttgaagtacctgacgtctttcagcagatgcgagaactgggactggcccggcgcgtccccgattctctgtttaggagcctgctggaaagatacctaacagcagccactgccagtgtgggcagtggcgttccagtgcttagcagagttcccctgaaacagaagcagcccggcctggattacttctacccacagttgcagctgggggtgaccgaggctgttgtgatcacccaagtgtgccatccccatagaatccattgtcagttacgctccgtgtcacaggagatccacaggttgagcgagtctatggctcaagtgtatcgcggatccacggggacaggagacgagaactccacatcagccacctgggaagagagagaggaatctcctgacaaacctgggtccccttgtgcaagctgtggactggatggccactggtatagagcgctgctcctcgaaacttttaggccccaaagatgcgcccaggtgctgcacgttgattatggtcggaaagaactggtatcttgcagcagcctgcgatatctgctgcccgaatacttccgcatgcctgtggtaacctatccgtgcgccctctacggtctttgggacggagggagagggtggtctagatctcaggtgggagatctgaaaaccttaatactgggaaaggccgtgaatgcgaaaattgagttctattgttcattcgagcatgtttactacgtgtctctgtacggcgaggatgggatcaatctcaatcgcgtgtttggagttcagtcttgctgtcttgccgatagggtgctccagtcacaggctaccgaagaagaggaaccagagacctcccagtcacagtcaccagccgaagaggtggacgaagagatcagcctgccagccttaagaagtattcggctgaagatgaatgcattttacgacgcccaggtcgaattcgtaaagaatccatcagagttttggatccgcctccgaaagcacaacgtcaccttttcaaagctgatgaggaggatgtgtggattttattcatctgcatcaaaactggatggtgtggtcctcaaacccgagcccgacgatctgtgctgcgtgaagtggaaggagaacggatattaccgggcaattgtcaccaaactggatgacaaaagtgtggatgtcttcctggtcgatcgtggaaattctgagaacgtggactggtacgacgtccggatgcttttgccacagttcaggcagctgcccatactcgccgtaaaatgcactctcgccgacatctggccactggggaagacctggagccaagaggcagttagttttttcaagaaaacagttctgcacaaggagttggttattcacatacttgacaaacaggatcaccaatacgtaatcgagatcctcgacgaaagcagaacaggggaggagaatatttcaaaggtgattgcccaggccggctacgctaaatatcaagaatttgagaccaaggagaacatcctggtgaacgcccatagtcccggacacgtgtccaatcatttcactaccgagtcgaataagatcccatttgccaagaccggcgaaggggagcagaaggccaagcgggaaaataaaaccacaagtgtgagcaaagctctgtccgacaccactgtggtcactaacggtagcacagagctggttgtccaggagaaagtcaagagagccagcgtgtacttcccactgatgcagaattgccttgagataaagcctggttcatcttcaaagggggagttagaggtggggagtacagtggaagtgagagtgtcatacgtagagaaccctggctatttctggtgtcagttaacacggaatatacagggcctcaaaactcttatgtcagacattcagtactactgtaagaacactgccgccccccaccagagaaacaccctggcctgtctggcaaagcggaccgtgaatcgtcagtggtctcgggctttgatatccggtattcaatcagtcgaacacgttaatgtgacctttgtcgattacggcgaccgtgagatggtttccgtgaagaacatctattctatatccgaggagtttctgaaagtgaaagcacaggcctttcgctgcagcctctacaacctcatccagccggtgggacagaacccttttgtgtgggatgttaaggcaatacaggcctttaacgagtttattgacaacgcttggcagaagaacctggagctgaaatgcaccatcttcgccttggccagtatcaacgaagaactttttaatattgtggacctgctcacacctttccagagcgcttgccacttcctcgtggagaagcgtttggcccgaccggtgaaactgcagaaaccattggaatcctctgtccagctgcacagctacttttactccacacacgacatgaagatcggaagcgaagagcttgtttatatcactcacatcgatgacccttggactttctactgccagttggctagaaatgctaacatcctggagcagctgagctgttcgattacacagctgtcgaaagttctgcttaacctcaagacaagtcctctcaatcccgggaccttgtgcctcgctaagtatactgacggcaactggtatcgcggcattgtgatcgagaaggaaccaaaaaaggttttctttgtggatttcggaaacatttacgttgtgaccagtgatgatctgctgcccattccatcagatgcctatgacgtcttactgctgccgatgcaggccgtccgctgctccctttctgacatcccagaccatattcccgaggaggttgtggtgtggtttcaggaaacaatccttgacaaaagtctaaaagcactggtggttgccaaggaccccgatggaaccttgatcattgaactgtacggggataatatccagataagcgcgagtatcaacaaaaagttgggcctgctctcctataaagatcgaatcaggaaaaaggaatccgaagtgttgtgctccacaaccgaaacactggaagaaaagaatgaaaatatgaagctcccttgtacagagtacttatctaagtccgtggggtacaagcttcccaacaaagagattctggaggagtcctacaaaccgcagatcaacagctcttataaggagttgaagttacttcaaagtcttactaaaacgaacctagttactcagtatcaggatagcgtcggaaataagaactcccaagttttcccactcactactgaaaaaaaggaggagatctctgcggagacccctttgaaaaccgctagagtcgaggcaacattgagtgagcggaagatcggcgactcctgcgacaaggatctgccgcttaagttctgcgaattccctcagaaaaccataatgcccgggttcaaaacgactgtctatgtgagtcatatcaacgacttgtcggacttttatgtgcagcttattgaggatgaagcggagattagccacctgtctgaaagactgaattccgtaaagacccgtcctgagtactatgtggggccgcccctacagagaggggatatgatttgcgccgtgttccctgaagacaatctgtggtatagagccgtgattaaagaacagcagcccaacgacctgctgtccgtgcagttcatagattatggcaacgtcagtgtcgttcataccaacaaaatcgggaggttggatctggtgaacgcaattctgcccggactgtgtatacactgtagcctccagggcttcgaggtccctgataataagaatagtaaaaagatgatgcattacttctcacagcggacctccgaagccgccattaggtgtgagttcgtgaagttccaggataggtgggaggtaatactggccgatgagcacgggatcatagctgacgacatgattagcaggtatgccctcagcgagaaatcacaggtcgagctgtccacacaggtaattaaatccgcttcttctaagagcgtgaacaaatccgatattgatacctcagtgttccttaattggtacaacccagagaaaaaaatgataagggcctacgccacagtcattgacggccccgagtatttttggtgccagtttgccgacaccgagaaattgcaatgtctcgaggtggaggtccagactgccggggaacaggtggctgaccgccggaattgcatcccttgtccatatatcggcgatccctgcatagtcagatacagggaggatggacattattaccgagctctcatcacaaacatatgtgaggattacctcgtttctgtcaggctcgtggatttcggcaatattgaagattgtgttgaccctaaggctttgtgggctatcccctccgagctgctttctgtgccaatgcaggcgtttccttgctgtctctcaggctttaatatatccgagggcctttgttcccaggagggcaatgactacttctatgaaattatcacagaagacgtactggaaattacgattttagagattagacgtgacgtttgcgacattcccctggctatcgtggacctgaaatccaaggggaagtctatcaacgagaagatggagaaatattctaagacaggtatcaaatctgcgctcccatacgagaacatagattctgaaattaaacagaccctgggctcatacaacttagacgtcgggctgaagaagctatcaaataaggctgtccagaacaagatctacatggagcagcagacagacgaactggcagaaattacagagaaagatgtgaacataatcggtaccaagcccagtaatttcagagatccaaagacggataacatttgcgaagggttcgagaatccctgcaaggataagatagatactgaagaactggagggtgagctcgaatgtcacctagttgataaggctgagtttgatgataagtatcttattacaggtttcaacacacttctgccacacgctaatgagaccaaagagattctggaacttaactctctcgaggttcccctttcccccgacgacgaatccaaggagtttctcgagctcgagtcaatcgaacttcagaactctcttgtggtagatgaggaaaagggtgagctgtcacctgtccctcccaatgtacccttgagccaggaatgcgtcacgaagggggctatggagctctttacactgcagctgcctctgtcctgcgaagccgagaagcagcccgaacttgaattgccgaccgcgcagctgcctctcgacgataagatggaccctctcagtcttggcgtgtcccagaaagcccaggaatctatgtgtacggaggacatgaggaagtcaagctgtgtggaaagttttgacgatcagaggcgcatgtctctgcacctgcacggagcagactgtgaccccaaaacgcagaatgaaatgaatatctgcgaggaggaatttgtggaatacaagaatagagacgcaatctcagccttgatgcccttgttctccgaagaggaaagctcagacgggtccaagcataataatggcttacccgatcacataagcgctcagctgcagaatacctatactctcaaagcttttacggtgggtagtaagtgcgtggtttggtctagtttaagaaacacctggtcaaagtgcgaaatcctagagacagccgaggagggcacccgcgtgttaaacctttctaatggaatggaggaaatcgtcaatcctgagaatgtatggaacggcatccctaaacttgacaagagcccacccgagaagcgaggactcgaggtgatggaaatctag

SEQ ID NO: 23876 - DNA, 552 bp, Artificial Sequence
  derived and/or modified sequence
atgcggaagagcagctgcgtggagagcttcgacgaccagcggcggatgtccctccacttacatggggcagattgcgaccctaaaacccagaacgagatgaatatatgcgaggaggaattcgtagagtacaaaaaccgcgacgcaatctcggctctgatgccactatttagcgaagaagaatcttccgacggatccaagcacaataacgggctgcccgatcatatctccgctcagcttcagaatacctacaccttgaaagcctttacggtgggctctaagtgcgtggtgtggtcttctcttaggaacacttggtctaagtgcgaaatactcgagacagccgaagaggggaccagagtgctgaacctgtccaacggaatggaggagatcgttaaccccgaaaacgtgtggaacgggatccccaagttggataaaagccccccggaggctgtgagccagagagtgggtaaggatctgtatttcatgagcgtaggcgacaccactatcaaggagaaggggttcggcggtgatggagatcttacagttgacctgtag

SEQ ID NO: 23877 - DNA, 528 bp, Artificial Sequence
  derived and/or modified sequence
tgattcgacgaccagcggcggatgagcctgcacctgcacggcgccgactgtgacccaaaaactcaaaacgagatgaacatttgtgaggaagagttcgtcgagtacaagaatcgggatgctatatcagctctcatgccactgttttccgaggaagaaagttcagatggtagcaaacataataatggcttgccggatcatatatccgctcagctacagaacacttatactttaaaggcttttactgtcggctcaaagtgtgtggtctggtcatcactgcgtaatacatggtccaagtgcgagatcctcgaaactgctgaagaaggaacgagagtgctgaatttgtccaatgggatggaagagattgtgaacccagagaacgtgtggaacgggatacctaaacttgacaagagtcccccggaggccgtttctcagagagttggtaaggatctgtattttatgtctgttggggacactaccataaaggagaaaggctttggcggtgacggggacctgacagtagatctgtag

SEQ ID NO: 23878 - DNA, 6290 bp, Artificial Sequence
  derived and/or modified sequence
atgtgctccacccccggaatgccagccccaggggctagcctagctctgcgcgtgagcttcgtggatgtgcatcctgacgtgattccagtccagttatggggattggtgggtgaacgcaggggggagtacctccgcctttcacgggaaatacaggaagccgcagctaccaggggtcagtgggccctgggcagtgcgtccgcttcacctggagagctctgcctggtccaggtagggctgctctggcaccgctgtcgcgtggtcagcagacaggctcaggagagtcgggtttttctgcttgatgaaggccgaactattactgccggtgccggatccctggcgccaggtcggagagagttttttaatctgcctagcgaagtactcggctgtgtgcttgctgggctggtgcccgctggatgtggggctggcagcggagaacctccccaacactggccggctgacgccgtcgatttcctcagcaacctacaggggaaagaagtgcacggatgtgtgttagacgttctgcttctgcacaggctggtcctgctcgaagtacctgacgtctttcaacagatgagagagctgggtctcgcacgtagggtgcccgattcgctgttccgctccttactggaacgatatctgacggcggctaccgcatcagttgggtccggtgtgcctgtgctgtccagagttcctctgaaacagaagcagccagggctagactatttctatccacagctacagttaggggtcacagaggcagtggtgatcactcaggtctgccacccccatcgcattcactgccagcttcgtagcgttagtcaggagattcaccgcctgtccgagtcaatggcccaggtgtatagaggaagcactgggaccggtgacgagaactcaacttccgccacatgggaggagcgggaggaatctccagacaagccaggctccccatgcgccagttgtggactggacgggcactggtaccgcgctctgctgctcgaaacttttagacctcagagatgtgctcaggtccttcacgtcgattatgggcgaaaggagcttgtgagctgcagcagtttaagataccttctgcctgaatatttcaggatgccagtcgtcacatacccatgcgctctctacgggctgtgggacgggggaagggggtggagccgatcccaggtgggcgacctcaagacactgatccttggcaaggctgtgaatgcgaagatcgaattttattgctcatttgagcacgtatactatgtaagcctctacggcgaggatggaattaatttaaaccgggtgtttggagtacagtcatgctgcctcgccgatagagtcctgcagtctcaggctacggaggaggaggaaccagagactagccagtcacagagccccgcagaggaggtagacgaggagatcagcctcccagctctacggagtataaggttaaagatgaacgccttctatgatgcccaggtggagtttgtcaagaatccctccgaattctggatacgtctgcggaagcacaatgtgacattcagcaagctcatgcgtcggatgtgtggtttctatagctcggctagcaaactcgatggtgtggtgttaaaacccgaacctgatgacctttgttgtgtgaaatggaaagagaatggatactatcgggcaatcgttaccaagctagacgacaagagtgtcgatgtttttctggtggaccggggtaattctgaaaacgtggactggtatgatgttagaatgcttctccctcagttcagacaactcccaatccttgctgtgaagtgtacgctggctgacatatggccgctgggtaagacttggagtcaagaagccgtgagctttttcaaaaaaactgtgcttcacaaggagctagtaatccacatcttagataagcaggatcatcagtatgttatcgaaattctcgatgaatcaaggaccggagaggaaaatatttcgaaggtgatcgctcaggccggatacgctaagtaccaggaattcgagaccaaagagaatattctcgtgaatgctcatagccctggccacgtcagcaaccattttacaaccgaaagcaacaagattccattcgccaaaaccggcgagggggagcagaaagctaaacgggaaaataaaactactagcgtctccaaggccttgagtgataccaccgttgtcacaaacgggagcacagagctggtggtgcaagaaaaggttaagagagcttccgtgtacttcccattgatgcagaactgtctggagataaaaccagggtcttcttccaagggggagttggaggtgggatccacggtcgaggtgagagtctcatacgtggagaacccaggatatttttggtgccaactcacacggaatattcaggggttaaaaaccctcatgagtgacattcagtactattgtaagaatacagcggctcctcatcagcggaacactcttgcctgcttagcaaagcgcaccgtcaatcgccagtggtccagagcgctgatctctgggatccagtccgtggagcatgtcaatgtgactttcgtggattatggtgatagagagatggtgtctgtgaaaaacatatacagtatttcagaggaatttctgaaggtgaaagcacaggcattccgatgctccctctacaacctgatccagcctgtgggtcagaaccctttcgtgtgggatgtgaaggccatccaggctttcaacgagtttatcgacaatgcctggcaaaagaatttggagctaaagtgtactatttttgcattggcatcaattaatgaagaattgtttaacatagtggatcttctgacaccctttcagtcagcttgccactttctggtagagaagcggctcgcccgacccgttaagcttcagaagcccttggagagttccgtgcagttgcactcctacttttatagcacacacgacatgaaaattggatcagaggagctggtgtatatcacacatatcgacgacccatggaccttttactgtcagctcgctaggaacgccaacattctggagcagctgtcttgttcaatcacgcagctgagtaaggtcctcctgaatctgaagacctctcctctgaatcctgggacgttgtgtctcgctaagtatactgacggcaactggtacagaggcattgtcatcgagaaagagccaaaaaaggtttttttcgttgattttgggaatatttatgtcgtgacctccgacgacctcctgcccattccttccgacgcatatgatgttttattattgcctatgcaagcggtgcgctgcagcttgtcagatattccagaccatatccctgaggaggttgtcgtctggttccaggaaaccatccttgacaagtctttgaaggccctggttgtagctaaagaccctgacgggaccctgattatagaactgtatggggataacatccagatatctgccagcattaataagaagctcggcctcctgtcatacaaggataggatccggaaaaaggagtccgaggtgctgtgttcgactacagagactctggaagaaaaaaacgagaatatgaaactgccttgcaccgagtatctgtctaagtcagtgggttataagctgcctaataaagagatcttagaagaatcatacaagccacaaataaatagctcttataaagaactcaaactgctccagtcactgaccaagaccaatctggtgactcagtatcaggattccgtgggcaataaaaattctcaggtgtttcctttgacaactgagaaaaaagaagaaatctcggccgagacccctctcaagaccgctagggtcgaggccaccctctcagagcggaaaatcggggactcttgcgacaaggaccttcctctgaagttctgtgagtttccacaaaaaactatcatgcctgggttcaagactacagtctacgtgtctcacataaacgacctgagcgacttctacgtgcaattgatagaggacgaggccgagattagccatctgagtgaaagattaaatagcgttaagacccgccctgagtactacgtgggccctcctctgcaaaggggggatatgatctgtgctgtcttccctgaagataatttgtggtacagggcagtgattaaagagcagcagcctaacgaccttctgagtgttcagttcattgactatggaaacgtgagtgtggtgcacacaaataagataggacgtctcgacctcgttaacgctatactcccaggtctgtgcattcattgctctctgcaggggtttgaggtgcccgacaacaaaaattcaaaaaagatgatgcactacttttcccaaagaacttccgaggctgcaattaggtgtgaattcgtcaaatttcaagatagatgggaggtcatcctggccgatgagcacgggattatcgcggatgatatgatcagtaggtacgcactttcagaaaaaagtcaggttgagctttcaacccaggttattaaatcggcttcttctaaatccgtgaacaaatccgatatcgacacttcagttttcttgaattggtacaaccctgaaaaaaagatgattcgcgcttatgcaaccgtgattgatgggccagaatacttttggtgccagtttgccgatacggagaaactgcagtgtctcgaagtggaagtgcagaccgcgggagaacaggtggcggatcgacgcaattgtattccctgtccctacatcggcgatccgtgtatcgttcgataccgggaggacggccattactatagggccctgatcacaaacatatgtgaagattaccttgtttcagtgcggctagtggatttcggtaacattgaggactgcgtggatcccaaggctctctgggccataccctccgaactattgagcgtccctatgcaggcattcccttgctgcttatccggctttaacatctctgagggactgtgctcccaggagggaaacgattacttctacgaaatcatcaccgaggacgtcctggaaattacaattctagagattcgcagggacgtctgtgacattcctctggcgattgttgacttaaaatccaaaggcaagtccattaacgagaagatggaaaagtactctaaaacaggtatcaagtccgcactgccatacgagaatatcgactcagagatcaagcagaccctgggaagctacaacctggacgtggggctcaaaaaactgtcgaacaaggccgtacagaataagatctacatggagcagcagacggacgaactggccgaaataacagagaaagatgtgaacatcataggtacaaagccgtccaattttagggatcctaagacggataacatttgcgaagggttcgagaatccctgtaaagataagatagacaccgaagaactggagggcgagcttgagtgccacctggtagataaagccgagttcgatgataagtacctgataaccgggttcaatacactgctcccacatgccaatgagacaaaagagatcctggaactaaatagcctggaagttcccttgtctcccgatgacgagtctaaagaatttctggagctggagtcaatcgagctccagaactcactggtggtcgatgaggaaaagggagagctgtctccggtcccgcctaacgttcccctgtcccaggagtgtgttaccaaaggagccatggaacttttcaccctacaattgcccctgtcatgcgaggctgagaagcagcctgaactcgagctccccacagctcaactgccactagacgataagatggacccgctgtccctgggcgtctctcagaaggctcaggagtccatgtgcaccgaggacatgaggaaatcgtcgtgcgtggagagctttgacgatcagcgaaggatgagtctacaccttcatggtgcagactgtgatcctaagacccagaatgaaatgaacatttgcgaagaagagtttgttgaatacaaaaaccgcgacgcaatcagcgctctgatgcccttatttagcgaggaggagtctagcgacgggagcaagcacaacaatggcctccctgaccatatctcagctcagctgcaaaacacatacacgctgaaggcctttacagtagggtctaagtgcgtggtgtggagctcacttcgcaacacctggagtaaatgcgagattctcgagactgccgaagaggggactcgagtgcttaacctatcaaatggaatggaagagatcgtaaaccccgaaaatgtgtggaatgggatacctaagcttgacaagagcccgccagagaagaggggcttagaggtgatggaaatcta

SEQ ID NO: 23879 - DNA, 552 bp, Artificial Sequence
  derived and/or modified sequence
atgcgcaaaagtagttgtgttgagtctttcgatgatcagcgcagaatgtccttacacctacacggtgccgactgcgatcccaaaacccagaacgaaatgaatatctgtgaggaggaattcgtggaatacaagaacagggatgcgatcagcgctctcatgcctctgtttagcgaggaggagtcttcagacggatccaagcataacaatggcctgccagatcatatatctgcacagctccagaatacttacaccctcaaggctttcaccgtcggcagcaagtgcgtcgtgtggagctctctcagaaacacctggtctaagtgtgaaatcttagaaactgccgaagaggggacccgcgtgttaaacctctccaatggcatggaagaaatcgtgaatcccgaaaacgtgtggaatggaattcctaaattagataagagtccacccgaagccgtctctcagagggtggggaaggatttatactttatgtctgttggcgacacaactatcaaggagaaagggttcggaggcgatggggatctgactgttgacctatag

SEQ ID NO: 23880 - DNA, 528 bp, Artificial Sequence
  derived and/or modified sequence
tagttcgatgatcaaaggcggatgagcttgcatctgcacggtgctgactgcgatccgaaaacccagaatgagatgaacatctgtgaagaagagtttgtcgagtacaaaaatagggatgcaatttctgctctcatgccactgttcagtgaagaggagtctagtgatggttccaaacataacaatggtcttccagaccacatcagcgcccagctgcagaacacctacactctgaaagcctttactgtcggatcaaagtgtgtagtctggtcttctctacgcaacacatggtctaagtgtgagattctggaaacagccgaggagggaacgagagtactgaacctatccaatggtatggaagaaattgtcaaccccgaaaacgtctggaacggtatccctaaacttgacaagagcccgcctgaggctgtgtcacagagggtggggaaggacctgtatttcatgagtgttggggacacaactattaaggaaaaaggttttggtggggatggcgacctgactgtggacctctag

SEQ ID NO: 23881 - DNA, 583 bp, Artificial Sequence
  derived and/or modified sequence
ttttgatgaccagcgcaggatgtcattgcatctacatggagcagattgtgatcctaaaacacagaatgaaatgaatatatgtgaagaagaatttgtagagtataaaaacagggatgccatttcggcattgatgcctttgttctctgaggaagaaagcagtgatggaagcaagcacaataatggtttaccagatcatatctcagctcaactacagaacacctacactctgaaagcctttactgttggatctaaatgtgttgtgtggtcaagtctaagaaacacatggtctaaatgtgagattttagaaacagctgaagaaggaacaagggttttgaacctttcaaatggtatggaggagatagtgaaccctgagaatgtctggaatggcatacccaaattggataagagtccacctgaggctgtatcccaaagagtagggaaagatctttacttcatgtcagtgggtgataccactattaaagaaaaggggtttggaggtgatggagatttaaccgtggatctatagctgtggccaatcagtcagaagctgcccttgaacaagtggcatcttacgcagaccaac

SEQ ID NO: 23882 - DNA, 6817 bp, Artificial Sequence
  derived and/or modified sequence
atgtgctcgacgcccggaatgccggcgccgggggcctcgctggccctgcgggtgtccttcgtggacgtgcatcccgatgtgatcccggtgcagctgtgggggctggtgggcgagcggcggggcgagtacctgcggctgagccgggaaatccaggaagcggcggccacgcgcggccagtgggcgctgggcagcgcctcggcctcgcccggcgagctgtgcctggtgcaggtcgggcttttgtggcaccgctgccgcgtggtcagccggcaggcacaggagagccgtgtcttcctgctggacgagggccgcaccatcacggccggagcaggctcgctggcgcctgggcgcagagagttcttcaatttgccctcggaagtgctgggctgcgtgctagcgggcctggtgccggcaggctgcggcgcgggctcaggcgagccgccgcagcactggcccgccgacgccgtggacttccttagcaaccttcagggcaaggaggtgcacgggtgcgtcctggacgtgctgctgctccatcgcctggtcctcctggaggtgcctgatgtgttccaacagatgcgggagctgggcctggctcggcgggtgcccgacagcctcttccgttcgctgctggagcgctatctcacagcggccactgctagcgtgggctccggggtcccggttctctcgcgagtcccgctcaagcaaaagcagcctggtctggattacttctatccccagctgcagctgggcgtgacggaggccgtggtcataacccaagtgtgccatccccaccgcattcactgccagctccgcagcgtctcgcaggagatccaccgcctctccgagagcatggcccaggtataccggggttccacggggacaggggatgagaactctaccagtgccacctgggaggagagggaggagagcccagataagccgggctctccgtgtgcatcctgtggcctggatggacattggtacagagcactgttgcttgagacttttcggccccagcgctgtgcccaggtgcttcatgtggactatggaaggaaggagttagtgagttgcagcagccttcggtacttgctgcctgaatattttcgaatgccggtggtgacctacccttgtgctttgtatggactctgggacggtgggagaggctggtctcggtcacaggtcggtgacctgaagacactgatactaggcaaggcagtgaatgcaaagattgaattttattgctcctttgagcatgtgtattatgtcagcctgtatggagaagatgggattaatctgaaccgtgtgtttggagtacagtcgtgttgcttggctgaccgagtccttcagagccaggcaacagaggaggaggaaccagaaacatctcagtctcagtctcctgctgaagaagtagatgaagagatttcactcccagccttaagatctatcaggttaaagatgaatgccttctacgatgcgcaggtagagtttgttaaaaatccttctgagttttggattaggttgaggaaacacaatgtcaccttcagtaagctgatgaggagaatgtgtggtttctattcctctgccagtaagctggatggtgtagttttgaaacctgaacctgatgacctttgctgtgtcaagtggaaagaaaatggttattatagggccatagtcaccaaattggatgacaagagtgtggatgtattcttagttgaccgaggcaattcggaaaatgtggactggtatgacgtaaggatgctgcttcctcagtttaggcagctaccaatattggctgtgaagtgcaccctggctgatatttggcctttgggaaaaacttggagccaggaggcagtttccttttttaaaaagactgtgctccacaaagaattagtcatccatattcttgataaacaggatcatcaatatgttattgagattcttgacgaatcaagaacaggggaagaaaacattagtaaggtaattgcccaagctggatatgccaagtatcaggaatttgaaacaaaggaaaatatcctggtaaatgcccactccccagggcatgtttcaaaccactttactacggagagtaacaaaataccttttgccaagactggagaaggagagcagaaagccaagagagagaataaaaccacatctgtttcaaaagctttgagtgacacaacagttgtaacaaatggttcaactgaactagttgtgcaggaaaaagtgaaaagagcatctgtttattttcctcttatgcagaattgcttggaaattaagccaggctcctctagtaaaggagagctggaagttggaagtacagtagaagtcagagtgtcttatgttgaaaaccctggctatttctggtgtcagctgaccaggaacatacaaggacttaaaactctaatgtctgatattcagtactattgcaaaaatacagctgctcctcaccagagaaacacccttgcttgtttggctaagcgaacagtaaacagacagtggtccagagcacttattagtgggatacagtctgtggagcatgtcaatgtaacatttgtagattatggagacagagaaatggtatctgtgaagaatatttattcaattagtgaagaatttctgaaggttaaggcacaggcttttaggtgcagtctttataatttaattcaaccagttggccagaatccctttgtttgggatgtaaaggcaatacaagctttcaatgaatttatagataatgcatggcaaaaaaatctagaattaaaatgtacaatatttgctctggcttcaattaatgaagaactgtttaacattgtggatttgctaaccccctttcagagtgcatgccatttcttggtagaaaagagacttgcaagaccagtaaaacttcagaagcctttggagtcctctgttcagctacattcctacttctattctacacatgatatgaaaattggaagtgaagaattagtttatataacgcatattgatgacccttggacattttattgccagctggcaagaaatgcaaatattttagaacagttgtcatgtagtattacacaattaagtaaagttttgctgaatttaaaaacatctcccttgaaccctggaaccttgtgccttgccaagtatactgatggaaactggtataggggcatagtaatagagaaagagccaaagaaagtcttctttgttgattttgggaatatttatgtagtaacaagtgatgatctgcttccaatacctagtgatgcatatgatgtcttacttttgcccatgcaagctgtcagatgttcattatctgatattcctgatcatataccagaagaagtggtggtgtggtttcaggagactattttagataagtcattgaaggctttagttgtagcaaaagatccagatggaacactgattatagaactatatggtgacaatattcaaattagtgctagtattaataagaagttggggctacttagttacaaagatagaataagaaaaaaagaaagtgaagtcctctgttctacaactgaaactcttgaagaaaaaaatgagaatatgaagttgccatgtacagagtatttaagtaaatcagtagggtacaagttacctaataaagaaattttggaagagtcatataaacctcagatcaactcatcatacaaggaactcaaacttttacaaagtttaacaaaaacaaacttagtcactcaatatcaagactctgtgggaaataaaaatagtcaagtgtttccattaacaacagaaaagaaagaagaaatttctgctgagacacccttgaaaacagcaagagtagaagctactctttcagagagaaaaataggagattcatgtgacaaagatttgcctctgaaattttgtgagttcccacagaagactataatgcctggatttaaaacaactgtatatgtttctcatataaatgacctttcagacttttatgttcaactaatagaagatgaagctgaaattagtcatctttcagagagattaaacagtgttaaaacaaggcccgaatattatgtaggtccacctttgcaaagaggagatatgatatgtgctgttttcccagaagataatttatggtatcgtgctgtgatcaaggagcaacaacccaatgaccttctctctgtgcagtttatagattatggcaatgtttctgtggttcatactaacaaaataggtaggcttgaccttgttaatgcaatattgccggggttgtgcattcattgctccttgcagggatttgaggttcctgacaataaaaattctaagaaaatgatgcattacttttcccaacggaccagcgaggctgcaataagatgtgaatttgttaaatttcaagacagatgggaagttattcttgctgatgaacatgggatcatagcagatgatatgattagcaggtatgctctcagtgaaaaatctcaagtagaactttctacccaagtaattaaaagtgccagttcaaagtctgttaacaaatcagacattgacacttcagtatttcttaactggtataatccagaaaaaaaaatgataagagcttatgccactgtgatagatggacctgagtacttttggtgtcagtttgctgatacggagaaacttcagtgtttagaagtagaagtacagactgctggagaacaggtagcagacaggagaaattgtatcccatgtccttatattggagatccttgtatagtaagatacagagaagatggacattattatagggcacttatcactaatatttgtgaagattatcttgtatctgtcaggcttgtggactttggaaacattgaagactgtgtggacccaaaagcactctgggccattccttctgaacttctgtcggttcccatgcaagcctttccatgttgcctctcagggtttaacatttcagaaggattatgttctcaagagggaaatgactatttctatgaaataataacagaagatgtgttggaaataacaatactagaaatcagaagggatgtttgtgatatccctttagcaattgttgacttgaaaagcaaaggtaaaagtattaatgagaaaatggagaaatattctaagactggtattaaaagtgctcttccctatgaaaatattgactcagagataaagcagactcttgggtcctacaatcttgatgtaggacttaagaaattaagtaataaagctgtacaaaataaaatatatatggaacaacagacagatgagcttgctgaaataactgaaaaagatgtaaacattattggaaccaaaccaagtaacttccgtgaccctaaaactgataacatttgtgaagggtttgaaaacccctgcaaagataaaattgatactgaggaactggaaggtgaattagagtgccatctggttgacaaagcagagtttgatgataaatacctgattacaggatttaacacattactaccacatgctaatgaaacaaaggagatactagaactgaattcacttgaggtgccgctttctcctgatgatgaatcaaaagaattcttagaactggaatctattgagttacagaattctctggtggtggatgaagaaaaaggggagctaagcccggtgccaccgaatgtgccactctcccaagagtgtgtcacaaaaggcgccatggagctatttacactgcagcttcctctcagctgtgaagctgagaaacagccagaactagaactacctacagcccagctgcctttagatgacaagatggatcctttgtctttaggagttagtcagaaagcacaggaatccatgtgtactgaggacatgagaaagtcaagttgtgtagaatcttttgatgaccagcgcaggatgtcattgcatctacatggagcagattgtgatcctaaaacacagaatgaaatgaatatatgtgaagaagaatttgtagagtataaaaacagggatgccatttcggcattgatgcctttgttctctgaggaagaaagcagtgatggaagcaagcacaataatggtttaccagatcatatctcagctcaactacagaacacctacactctgaaagcctttactgttggatctaaatgtgttgtgtggtcaagtctaagaaacacatggtctaaatgtgagattttagaaacagctgaagaaggaacaagggttttgaacctttcaaatggtatggaggagatagtgaaccctgagaatgtctggaatggcatacccaaattggataagagtccacctgagaaaaggggtttggaggtgatggagatttaaccgtggatctatagctgtggccaatcagtcagaagctgcccttgaacaagtggcatcttacgcagaccaacagagtatttgagaaaattgaaaacatgtaaccacaagaagttgtcattttcaaaaacttctatataggtggaaaacaaattaggtctcaggttgatggtggggtgtgtttatagtgatcctgttatatatacagatctgggatctttcgtctttattgtcttacgtttctaattagttgggaggatttattttgctaaacagtttactaacacattacatttcaaaaactattttggtacctttcaaatacagtgtttaaattaaaatagaaaaataagggctcatgacaagtacattatttgattctacttaggatagctttttagcaggatctccttcagaatttttgtcttgactttgaatctttgcctgtttgtctaaacatttgactaacattctgtttgaatttggaagtattctaatacaagatttgaataaagtttatccttaaata

SEQ ID NO: 23883 - DNA, 6291 bp, Artificial Sequence
  derived and/or modified sequence
atgtgcagcacccccggcatgcccgcccccggcgccagcctggccctgagagtgagcttcgtggacgtgcaccccgacgtgatccccgtgcagctgtggggcctggtgggcgagagaagaggcgagtacctgagactgagcagagagatccaggaggccgccgccaccagaggccagtgggccctgggcagcgccagcgccagccccggcgagctgtgcctggtgcaggtgggcctgctgtggcacagatgcagagtggtgagcagacaggcccaggagagcagagtgttcctgctggacgagggcagaaccatcaccgccggcgccggcagcctggcccccggcagaagagagttcttcaacctgcccagcgaggtgctgggctgcgtgctggccggcctggtgcccgccggctgcggcgccggcagcggcgagcccccccagcactggcccgccgacgccgtggacttcctgagcaacctgcagggcaaggaggtgcacggctgcgtgctggacgtgctgctgctgcacagactggtgctgctggaggtgcccgacgtgttccagcagatgagagagctgggcctggccagaagagtgcccgacagcctgttcagaagcctgctggagagatacctgaccgccgccaccgccagcgtgggcagcggcgtgcccgtgctgagcagagtgcccctgaagcagaagcagcccggcctggactacttctacccccagctgcagctgggcgtgaccgaggccgtggtgatcacccaggtgtgccacccccacagaatccactgccagctgagaagcgtgagccaggagatccacagactgagcgagagcatggcccaggtgtacagaggcagcaccggcaccggcgacgagaacagcaccagcgccacctgggaggagagagaggagagccccgacaagcccggcagcccctgcgccagctgcggcctggacggccactggtacagagccctgctgctggagaccttcagaccccagagatgcgcccaggtgctgcacgtggactacggcagaaaggagctggtgagctgcagcagcctgagatacctgctgcccgagtacttcagaatgcccgtggtgacctacccctgcgccctgtacggcctgtgggacggcggcagaggctggagcagaagccaggtgggcgacctgaagaccctgatcctgggcaaggccgtgaacgccaagatcgagttctactgcagcttcgagcacgtgtactacgtgagcctgtacggcgaggacggcatcaacctgaacagagtgttcggcgtgcagagctgctgcctggccgacagagtgctgcagagccaggccaccgaggaggaggagcccgagaccagccagagccagagccccgccgaggaggtggacgaggagatcagcctgcccgccctgagaagcatcagactgaagatgaacgccttctacgacgcccaggtggagttcgtgaagaaccccagcgagttctggatcagactgagaaagcacaacgtgaccttcagcaagctgatgagaagaatgtgcggcttctacagcagcgccagcaagctggacggcgtggtgctgaagcccgagcccgacgacctgtgctgcgtgaagtggaaggagaacggctactacagagccatcgtgaccaagctggacgacaagagcgtggacgtgttcctggtggacagaggcaacagcgagaacgtggactggtacgacgtgagaatgctgctgccccagttcagacagctgcccatcctggccgtgaagtgcaccctggccgacatctggcccctgggcaagacctggagccaggaggccgtgagcttcttcaagaagaccgtgctgcacaaggagctggtgatccacatcctggacaagcaggaccaccagtacgtgatcgagatcctggacgagagcagaaccggcgaggagaacatcagcaaggtgatcgcccaggccggctacgccaagtaccaggagttcgagaccaaggagaacatcctggtgaacgcccacagccccggccacgtgagcaaccacttcaccaccgagagcaacaagatccccttcgccaagaccggcgagggcgagcagaaggccaagagagagaacaagaccaccagcgtgagcaaggccctgagcgacaccaccgtggtgaccaacggcagcaccgagctggtggtgcaggagaaggtgaagagagccagcgtgtacttccccctgatgcagaactgcctggagatcaagcccggcagcagcagcaagggcgagctggaggtgggcagcaccgtggaggtgagagtgagctacgtggagaaccccggctacttctggtgccagctgaccagaaacatccagggcctgaagaccctgatgagcgacatccagtactactgcaagaacaccgccgccccccaccagagaaacaccctggcctgcctggccaagagaaccgtgaacagacagtggagcagagccctgatcagcggcatccagagcgtggagcacgtgaacgtgaccttcgtggactacggcgacagagagatggtgagcgtgaagaacatctacagcatcagcgaggagttcctgaaggtgaaggcccaggccttcagatgcagcctgtacaacctgatccagcccgtgggccagaaccccttcgtgtgggacgtgaaggccatccaggccttcaacgagttcatcgacaacgcctggcagaagaacctggagctgaagtgcaccatcttcgccctggccagcatcaacgaggagctgttcaacatcgtggacctgctgacccccttccagagcgcctgccacttcctggtggagaagagactggccagacccgtgaagctgcagaagcccctggagagcagcgtgcagctgcacagctacttctacagcacccacgacatgaagatcggcagcgaggagctggtgtacatcacccacatcgacgacccctggaccttctactgccagctggccagaaacgccaacatcctggagcagctgagctgcagcatcacccagctgagcaaggtgctgctgaacctgaagaccagccccctgaaccccggcaccctgtgcctggccaagtacaccgacggcaactggtacagaggcatcgtgatcgagaaggagcccaagaaggtgttcttcgtggacttcggcaacatctacgtggtgaccagcgacgacctgctgcccatccccagcgacgcctacgacgtgctgctgctgcccatgcaggccgtgagatgcagcctgagcgacatccccgaccacatccccgaggaggtggtggtgtggttccaggagaccatcctggacaagagcctgaaggccctggtggtggccaaggaccccgacggcaccctgatcatcgagctgtacggcgacaacatccagatcagcgccagcatcaacaagaagctgggcctgctgagctacaaggacagaatcagaaagaaggagagcgaggtgctgtgcagcaccaccgagaccctggaggagaagaacgagaacatgaagctgccctgcaccgagtacctgagcaagagcgtgggctacaagctgcccaacaaggagatcctggaggagagctacaagccccagatcaacagcagctacaaggagctgaagctgctgcagagcctgaccaagaccaacctggtgacccagtaccaggacagcgtgggcaacaagaacagccaggtgttccccctgaccaccgagaagaaggaggagatcagcgccgagacccccctgaagaccgccagagtggaggccaccctgagcgagagaaagatcggcgacagctgcgacaaggacctgcccctgaagttctgcgagttcccccagaagaccatcatgcccggcttcaagaccaccgtgtacgtgagccacatcaacgacctgagcgacttctacgtgcagctgatcgaggacgaggccgagatcagccacctgagcgagagactgaacagcgtgaagaccagacccgagtactacgtgggcccccccctgcagagaggcgacatgatctgcgccgtgttccccgaggacaacctgtggtacagagccgtgatcaaggagcagcagcccaacgacctgctgagcgtgcagttcatcgactacggcaacgtgagcgtggtgcacaccaacaagatcggcagactggacctggtgaacgccatcctgcccggcctgtgcatccactgcagcctgcagggcttcgaggtgcccgacaacaagaacagcaagaagatgatgcactacttcagccagagaaccagcgaggccgccatcagatgcgagttcgtgaagttccaggacagatgggaggtgatcctggccgacgagcacggcatcatcgccgacgacatgatcagcagatacgccctgagcgagaagagccaggtggagctgagcacccaggtgatcaagagcgccagcagcaagagcgtgaacaagagcgacatcgacaccagcgtgttcctgaactggtacaaccccgagaagaagatgatcagagcctacgccaccgtgatcgacggccccgagtacttctggtgccagttcgccgacaccgagaagctgcagtgcctggaggtggaggtgcagaccgccggcgagcaggtggccgacagaagaaactgcatcccctgcccctacatcggcgacccctgcatcgtgagatacagagaggacggccactactacagagccctgatcaccaacatctgcgaggactacctggtgagcgtgagactggtggacttcggcaacatcgaggactgcgtggaccccaaggccctgtgggccatccccagcgagctgctgagcgtgcccatgcaggccttcccctgctgcctgagcggcttcaacatcagcgagggcctgtgcagccaggagggcaacgactacttctacgagatcatcaccgaggacgtgctggagatcaccatcctggagatcagaagagacgtgtgcgacatccccctggccatcgtggacctgaagagcaagggcaagagcatcaacgagaagatggagaagtacagcaagaccggcatcaagagcgccctgccctacgagaacatcgacagcgagatcaagcagaccctgggcagctacaacctggacgtgggcctgaagaagctgagcaacaaggccgtgcagaacaagatctacatggagcagcagaccgacgagctggccgagatcaccgagaaggacgtgaacatcatcggcaccaagcccagcaacttcagagaccccaagaccgacaacatctgcgagggcttcgagaacccctgcaaggacaagatcgacaccgaggagctggagggcgagctggagtgccacctggtggacaaggccgagttcgacgacaagtacctgatcaccggcttcaacaccctgctgccccacgccaacgagaccaaggagatcctggagctgaacagcctggaggtgcccctgagccccgacgacgagagcaaggagttcctggagctggagagcatcgagctgcagaacagcctggtggtggacgaggagaagggcgagctgagccccgtgccccccaacgtgcccctgagccaggagtgcgtgaccaagggcgccatggagctgttcaccctgcagctgcccctgagctgcgaggccgagaagcagcccgagctggagctgcccaccgcccagctgcccctggacgacaagatggaccccctgagcctgggcgtgagccagaaggcccaggagagcatgtgcaccgaggacatgagaaagagcagctgcgtggagagcttcgacgaccagagaagaatgagcctgcacctgcacggcgccgactgcgaccccaagacccagaacgagatgaacatctgcgaggaggagttcgtggagtacaagaacagagacgccatcagcgccctgatgcccctgttcagcgaggaggagagcagcgacggcagcaagcacaacaacggcctgcccgaccacatcagcgcccagctgcagaacacctacaccctgaaggccttcaccgtgggcagcaagtgcgtggtgtggagcagcctgagaaacacctggagcaagtgcgagatcctggagaccgccgaggagggcaccagagtgctgaacctgagcaacggcatggaggagatcgtgaaccccgagaacgtgtggaacggcatccccaagctggacaagagcccccccgagaagagaggcctggaggtgatggagatctag

SEQ ID NO: 23884 - protein, 1011 aa, Artificial Sequence
  derived and/or modified sequence
METSSMLSSLNDECKSDNYIEPHYKEWYRVAIDILIEHGLEAYQEFLVQERVSDFLAEEEINYILKNVQKVAQSTAHGTDDSCDDTLSSGTYWPVESDVEAPNLDLGWPYVMPGLLGGTHIDLLFHPPRAHLLTIKETIRKMIKEARKVIALVMDIFTDVDIFKEIVEASTRGVSVYILLDESNFNHFLNMTEKQGCSVQRLRNIRVRTVKGQDYLSKTGAKFHGKMEQKFLLVDCQKVMYGSYSYMWSFEKAHLSMVQIITGQLVESFDEEFRTLYARSCVPSSFAQEESARVKHGKALWENGTYQHSVSSLASVSSQRNLFGRQDKIHKLDSSYFKNRGIYTLNEHDKYNIRSHGYKPHFVPNFNGPNAIRQFQPNQINENWKRHSYAGEQPETVPYLLLNRALNRTNNPPGNWKKPSDSLSVASSSREGYVSHHNTPAQSFANRLAQRKTTNLADRNSNVRRSFNGTDNHIRFLQQRMPTLEHTTKSFLRNWRIESYLNDHSEATPDSNGSALGDRFEGYDNPENLKANALYTHSRLRSSLVFKPTLPEQKEVNSCTTGSSNSTIIGSQGSETPKEVPDTPTNVQHLTDKPLPESIPKLPLQSEAPKMHTLQVPENHSVALNQTTNGHTESNNYIYKTLGVNKQTENLKNQQTENLLKRRSFPLFDNSKANLDPGNSKHYVYSTLTRNRVRQPEKPKEDLLKSSKSMHNVTHNLEEDEEEVTKRNSPSGTTTKSVSIAALLDVNKEESNKELASKKEVKGSPSFLKKGSQKLRSLLSLTPDKKENLSKNKAPAFYRLCSSSDTLVSEGEENQKPKKSDTKVDSSPRRKHSSSSNSQGSIHKSKEDVTVSPSQEINAPPDENKRTPSPGPVESKFLERAGDASAPRFNTEQIQYRDSREINAVVTPERRPTSSPRPTSSELLRSHSTDRRVYSRFEPFCKIESSIQPTSNMPNTSINRPEIKSATMGNSYGRSSPLLNYNTGVYRSYQPNENKFRGFMQKFGNFIHKNK

SEQ ID NO: 23885 - DNA, 3036 bp, Artificial Sequence
  derived and/or modified sequence
atggagaccagcagcatgctgagcagcctgaacgacgagtgcaagagcgacaactacatcgagccccactacaaggagtggtacagagtggccatcgacatcctgatcgagcacggcctggaggcctaccaggagttcctggtgcaggagagagtgagcgacttcctggccgaggaggagatcaactacatcctgaagaacgtgcagaaggtggcccagagcaccgcccacggcaccgacgacagctgcgacgacaccctgagcagcggcacctactggcccgtggagagcgacgtggaggcccccaacctggacctgggctggccctacgtgatgcccggcctgctgggcggcacccacatcgacctgctgttccacccccccagagcccacctgctgaccatcaaggagaccatcagaaagatgatcaaggaggccagaaaggtgatcgccctggtgatggacatcttcaccgacgtggacatcttcaaggagatcgtggaggccagcaccagaggcgtgagcgtgtacatcctgctggacgagagcaacttcaaccacttcctgaacatgaccgagaagcagggctgcagcgtgcagagactgagaaacatcagagtgagaaccgtgaagggccaggactacctgagcaagaccggcgccaagttccacggcaagatggagcagaagttcctgctggtggactgccagaaggtgatgtacggcagctacagctacatgtggagcttcgagaaggcccacctgagcatggtgcagatcatcaccggccagctggtggagagcttcgacgaggagttcagaaccctgtacgccagaagctgcgtgcccagcagcttcgcccaggaggagagcgccagagtgaagcacggcaaggccctgtgggagaacggcacctaccagcacagcgtgagcagcctggccagcgtgagcagccagagaaacctgttcggcagacaggacaagatccacaagctggacagcagctacttcaagaacagaggcatctacaccctgaacgagcacgacaagtacaacatcagaagccacggctacaagccccacttcgtgcccaacttcaacggccccaacgccatcagacagttccagcccaaccagatcaacgagaactggaagagacacagctacgccggcgagcagcccgagaccgtgccctacctgctgctgaacagagccctgaacagaaccaacaacccccccggcaactggaagaagcccagcgacagcctgagcgtggccagcagcagcagagagggctacgtgagccaccacaacacccccgcccagagcttcgccaacagactggcccagagaaagaccaccaacctggccgacagaaacagcaacgtgagaagaagcttcaacggcaccgacaaccacatcagattcctgcagcagagaatgcccaccctggagcacaccaccaagagcttcctgagaaactggagaatcgagagctacctgaacgaccacagcgaggccacccccgacagcaacggcagcgccctgggcgacagattcgagggctacgacaaccccgagaacctgaaggccaacgccctgtacacccacagcagactgagaagcagcctggtgttcaagcccaccctgcccgagcagaaggaggtgaacagctgcaccaccggcagcagcaacagcaccatcatcggcagccagggcagcgagacccccaaggaggtgcccgacacccccaccaacgtgcagcacctgaccgacaagcccctgcccgagagcatccccaagctgcccctgcagagcgaggcccccaagatgcacaccctgcaggtgcccgagaaccacagcgtggccctgaaccagaccaccaacggccacaccgagagcaacaactacatctacaagaccctgggcgtgaacaagcagaccgagaacctgaagaaccagcagaccgagaacctgctgaagagaagaagcttccccctgttcgacaacagcaaggccaacctggaccccggcaacagcaagcactacgtgtacagcaccctgaccagaaacagagtgagacagcccgagaagcccaaggaggacctgctgaagagcagcaagagcatgcacaacgtgacccacaacctggaggaggacgaggaggaggtgaccaagagaaacagccccagcggcaccaccaccaagagcgtgagcatcgccgccctgctggacgtgaacaaggaggagagcaacaaggagctggccagcaagaaggaggtgaagggcagccccagcttcctgaagaagggcagccagaagctgagaagcctgctgagcctgacccccgacaagaaggagaacctgagcaagaacaaggcccccgccttctacagactgtgcagcagcagcgacaccctggtgagcgagggcgaggagaaccagaagcccaagaagagcgacaccaaggtggacagcagccccagaagaaagcacagcagcagcagcaacagccagggcagcatccacaagagcaaggaggacgtgaccgtgagccccagccaggagatcaacgccccccccgacgagaacaagagaacccccagccccggccccgtggagagcaagttcctggagagagccggcgacgccagcgcccccagattcaacaccgagcagatccagtacagagacagcagagagatcaacgccgtggtgacccccgagagaagacccaccagcagccccagacccaccagcagcgagctgctgagaagccacagcaccgacagaagagtgtacagcagattcgagcccttctgcaagatcgagagcagcatccagcccaccagcaacatgcccaacaccagcatcaacagacccgagatcaagagcgccaccatgggcaacagctacggcagaagcagccccctgctgaactacaacaccggcgtgtacagaagctaccagcccaacgagaacaagttcagaggcttcatgcagaagttcggcaacttcatccacaagaacaagtag

SEQ ID NO: 23886 - DNA, 3036 bp, Artificial Sequence
  derived and/or modified sequence
atggaaacatctagcatgctctcctccctgaatgatgagtgtaagagtgataactacattgagccccattataaggagtggtaccgcgttgcaatagatatcctgatcgagcacggtctggaggcttatcaggagttccttgtgcaagagcgggtttctgactttctggctgaggaggaaattaactatattctgaaaaacgtgcagaaggtggctcaatccaccgcccatggaaccgacgacagctgcgatgatacactaagttctgggacctattggccggtcgagtctgatgtggaggcccccaatctcgatctgggctggccctacgtgatgcctgggctgctggggggtacccacatagacttactgttccatcccccacgcgcccacttgctaaccatcaaggaaacaattcgcaaaatgatcaaggaggcccggaaggtgattgccctagtaatggacatttttactgacgtggacatattcaaggaaatagtggaggcgtctacaagaggggtgagtgtttatattcttttggacgaaagcaactttaaccacttcttaaatatgacagagaaacaggggtgctccgtgcagagattgcggaatatccgtgtgcgtactgtgaaggggcaggattatttaagtaaaactggcgcgaagttccacggcaagatggagcagaaatttctgctcgtggactgccaaaaagttatgtatggatcctacagctatatgtggtctttcgagaaggcacacctgtccatggtgcagatcattacaggacagctcgtggagagctttgatgaggaattccggactctatacgcacgcagttgtgtacctagctcattcgctcaagaagaaagtgctagagtcaagcacggcaaggctctttgggagaatggcacataccaacactctgtcagtagtttagccagcgtatcaagtcagcgcaacctgtttgggaggcaagacaaaattcataagctggactcttcttatttcaaaaaccgcggcatttacaccctcaatgaacacgataagtataacattaggtctcacggctacaaaccccatttcgtgccaaactttaacggcccaaacgctatcaggcagtttcagccaaatcaaattaatgaaaattggaagcggcattcctacgctggggagcagcctgaaaccgtgccttaccttcttctgaaccgcgccctgaacagaacgaataacccgccaggaaattggaaaaagccctccgactccctgtctgtcgcaagttcttctagagagggatatgtatctcaccataatacaccagcccaatcatttgccaatcgcctggcccaacgcaagactactaacttagctgataggaacagcaacgttcggcggagctttaatggaaccgacaaccatatccgtttcctgcagcagcgcatgcctactctagagcacacaaccaagtccttcctccggaattggcggatcgagagctacctaaacgaccactcggaggcaacgcccgactccaatgggagtgctttgggggacagattcgagggctatgacaatcctgagaatctgaaggccaatgccctgtacacccactcaagattaaggtccagcctggtattcaaacccacacttcccgagcaaaaagaagtgaattcttgtacaacggggagttcaaacagcacgatcatcgggtcccaaggatctgagaccccaaaagaggtgccagacacccccacaaatgtccagcacctgacggataaaccacttcctgaaagcatcccaaagcttccccttcagtcagaagcccccaagatgcacaccctgcaggtacccgagaatcatagcgtggcattgaaccaaactacgaacggacatacagaaagtaataattacatttacaaaactctcggtgttaacaaacagactgaaaatctgaagaaccagcagaccgaaaatctattaaagaggcgctcctttcccctgttcgataattccaaagctaacctcgatccaggcaattccaagcactatgtttacagcaccctcactcggaatcgagtcagacaaccggagaagcctaaagaggatctcttaaaatcaagcaagtcgatgcacaacgttacccataacttggaagaagacgaggaagaggtgacaaagcgaaactccccctccggcaccacgactaaaagcgtctccattgcagctctcttagacgtcaacaaggaagagtccaacaaggagctggcttctaagaaagaagtgaagggctctccttcttttttgaaaaagggcagtcagaagttaaggtcccttttgtctctgactcccgacaagaaagagaacctttcaaaaaacaaggcacccgcattttatcgactttgtagctcatccgacacacttgtgtccgaaggtgaagaaaatcagaagcctaagaaaagcgataccaaggtggactcctctcctcgcaggaagcacagttccagctccaattcccagggttccattcataaatctaaagaggatgttacggtgtcaccttctcaggaaattaatgcaccacccgatgagaataagagaaccccatctcctggtcccgttgaaagtaagttcctggaaagagccggggacgcatcagctcctagattcaacaccgagcaaatccagtatcgtgactccagagaaattaatgcagtggtcacacctgagcgcaggcctacttcttccccccgaccgaccagtagcgaacttctgcggtctcattctacagacaggcgagtctactccagatttgagcctttttgcaagatagaaagtagcatacagcctacaagcaatatgcccaataccagtattaaccggcctgagatcaaatcagctactatgggtaattcttatggacggtcaagcccgctgctcaactacaacacaggcgtgtatcggtcttatcagcccaatgaaaacaaattccggggtttcatgcaaaaattcggcaacttcattcataaaaataagtag

SEQ ID NO: 23887 - DNA, 3167 bp, Artificial Sequence
  derived and/or modified sequence
aaaccttcggcggccggcgctgtgcggcgggcgcggttgcgcgcggcttggggcaaatacttctcaccactgcatgaatggacatttgaaagtgccatagccaaacacttgcaagcatggagacctcatcaatgctttcctcattgaatgatgagtgtaaatctgacaactacattgagcctcactacaaggaatggtatcgagtagccattgatattctgattgaacacgggttagaagcataccaagaatttcttgtccaggaacgagtttcagactttcttgctgaggaagaaattaattatattttgaaaaatgtccagaaagttgcacaaagcacagcacatggtactgatgattcctgtgatgataccttatcttcagggacctactggcctgttgagtctgatgtggaagctccaaatcttgacttaggctggccatatgtgatgcccggactcttagggggcacccatatagatctcctttttcatccaccaagagcacatctacttacgataaaagaaactattcggaagatgataaaagaagcaagaaaggtcattgctttagtgatggatatatttacagatgtggacattttcaaagaaatcgttgaggcatcaactcgaggagtatctgtttacattctgcttgatgagtccaattttaatcattttctaaatatgactgagaaacaaggttgttcagttcagcgtctcaggaatattcgagtgcgaacagtaaaaggccaagattatctttcaaaaacaggggcaaaattccatggaaaaatggaacagaaatttttgttagttgactgccagaaagtgatgtacggttcttacagttatatgtggtcatttgagaaagctcacctcagcatggttcagataattacaggacaacttgttgagtcctttgatgaagaatttagaactctctatgccagatcctgtgtccctagttcatttgctcaggaagaatcagcaagggtgaagcatggaaaagccctctgggaaaatggcacttaccagcattcggtgtcttcattagcatctgtttccagccagagaaacctttttggtagacaagacaagattcataaactagattccagttacttcaaaaacagagggatatatactttaaatgaacatgacaaatataacataagaagtcacggatacaaacctcattttgttcctaactttaatggtccaaacgcaatacgtcagtttcaacccaatcagataaatgaaaattggaaaaggcatagttatgctggggaacagccagaaacagtgccatacctcctgcttaatagggctctgaatagaaccaataatccacctggtaattggaaaaagccatctgatagtctcagtgtggcgtcctcatcacgggaaggctatgtaagccaccacaacacacctgcccagagttttgccaatcggcttgcgcagagaaaaacaacaaatcttgcagacaggaattcaaatgttcggaggtcttttaatgggacagataaccatatccgctttttgcaacaacgaatgccaacccttgaacataccacaaagtcattcctacgtaactggagaattgaatcctacttaaatgatcattcagaagctacaccggactcaaatggatcagctttaggtgaccgatttgagggctatgataatcctgagaatttgaaggccaatgccctttatactcattctcggcttcgttcctctttagtatttaaacccactttacctgagcaaaaggaagttaacagttgtacaactggctcctcaaattcaactatcattggttctcagggaagtgagacacctaaagaggtcccagacacccctacgaatgtacagcatttgacagacaaacccttgccagaatcaatccccaagctcccattgcagtcagaggcaccaaaaatgcacaccttgcaggttcctgaaaaccactcagtagccttaaaccaaactacaaatggccatactgaatcaaataactatatatataaaaccttgggtgtaaataagcagacagaaaatctaaagaatcaacagactgagaatctacttaaaaggcgaagtttcccgttatttgacaactcaaaagccaacttagatcctggaaatagtaagcattatgtatatagtacacttaccaggaatcgagttagacaaccagaaaagcccaaagaagatttgctgaaaagttctaaaagcatgcacaatgtgactcataacttggaggaggatgaggaggaagttaccaagagaaactctccaagtggcactactaccaaatcagtttccattgctgctttacttgatgtgaataaagaggaatctaacaaagaacttgcttcaaagaaggaagttaagggttccccaagttttttgaaaaaggggtctcagaagttaaggtcattacttagccttaccccagataagaaagaaaatctatccaaaaataaagcacctgccttttatagattgtgtagtagctctgacacattagtttctgagggtgaagaaaatcaaaaaccaaagaaatcagacacaaaagttgattcatctcctagaagaaagcattcttcctcatcgaattctcaaggcagcatccacaagagtaaggaagatgtaacagttagcccatctcaagagataaatgctccaccagatgaaaataaaagaacaccttctccaggtccagttgaaagcaagttcttggaaagggcaggagatgcctctgccccaagatttaacactgaacagatccaataccgagattcaagggagattaatgcagttgttacccctgaaagaagacctacttcttctccaaggccaacgtccagtgagcttctacgatctcattcaactgatcggcgtgtttacagtcgttttgagccgttttgtaagattgagagctctattcagccaacaagcaacatgccaaataccagtataaatcgcccagaaataaaatctgcgactatgggcaacagttatggcaggtctagtccattgcttaattacaacactggtgtttatcgctcatatcaacccaatgagaacaagtttcgaggatttatgcaaaagtttggaaactttatacacaaaaataaatagctattaaaatgcaaa

SEQ ID NO: 23888 - DNA, 3036 bp, Artificial Sequence
  derived and/or modified sequence
atggagaccagctccatgctgagcagcctgaatgatgagtgcaagagtgacaactacatcgagccccactacaaggagtggtacagagtggccatcgacatcctgattgagcacggcctggaggcctaccaggagttcctggtgcaggagcgggtgtctgacttcctggccgaggaggagatcaactacatcctgaagaatgtgcagaaggtggcccagagcacagcccatggaacagatgacagctgtgatgacaccctgagcagcggcacctactggcctgtggagagtgatgtggaggcccccaacctggacctgggctggccctacgtgatgcctggcctgctgggcggcacccacatcgacctgctcttccaccccccccgggcccacctgctgaccatcaaggagaccatcaggaagatgatcaaggaggccaggaaggtgattgccctggtgatggacatcttcacagatgtggacatcttcaaggagatcgtggaggccagcacccggggcgtgtctgtgtacatcctgctggatgagagcaacttcaaccacttcctgaacatgacagagaagcagggctgcagcgtgcagaggctgaggaacatccgggtgaggacagtgaagggccaggactacctgagcaagacaggagccaagttccacggcaagatggagcagaagttcctgctggtggactgccagaaggtgatgtatggcagctacagctacatgtggagctttgagaaggcccacctgtccatggtgcagatcatcaccggccagctggtggagagctttgatgaggagttccgcaccctgtatgcccggagctgtgtgcccagcagctttgcccaggaggagagcgcccgggtgaagcacggcaaggccctgtgggagaatggcacctaccagcacagcgtgagcagcctggcctctgtgagcagccagaggaacctgtttggccggcaggacaagatccacaagctggacagcagctacttcaagaacagaggcatctacaccctgaatgaacatgacaagtacaacatccgcagccacggctacaagccccactttgtgcccaacttcaacggccccaatgccatccggcagttccagcccaaccagatcaatgaaaactggaagaggcacagctatgctggggagcagcctgagaccgtgccctacctgctgctgaacagagccctgaacagaaccaacaaccccccaggcaactggaagaagcccagcgacagcctgtctgtggccagcagcagccgggagggctacgtgagccaccacaacaccccagcccagagctttgccaaccggctggcccagaggaagaccaccaacctggccgacaggaacagcaatgtgcggcgctccttcaacggcacagacaaccacatccgcttcctgcagcagaggatgcccaccctggagcacaccaccaagagcttcctgaggaactggagaattgagagctacctgaatgaccacagcgaggccaccccagacagcaatggcagcgccctgggggacagatttgagggctatgacaaccctgagaacctgaaggccaatgccctgtacacccacagccggctgcggagcagcctggtgttcaagcccaccctgcctgagcagaaggaggtgaacagctgcaccaccggcagcagcaacagcaccatcatcggcagccagggcagcgagacccccaaggaggtgcctgacacccccaccaacgtgcagcacctgacagacaagcccctgcctgagagcatccccaagctgcccctgcagagcgaggcccccaagatgcacaccctgcaggtgcctgagaaccacagcgtggccctgaaccagaccaccaacggccacacagagagcaacaactacatctacaagaccctgggcgtgaacaagcagacagagaacctgaagaaccagcagacagagaacctgctgaagaggaggagcttccccctgtttgacaacagcaaggccaacctggaccccggcaacagcaagcactacgtgtacagcaccctgaccaggaacagagtgcggcagcctgagaagcccaaggaggacctgctgaagagcagcaagtccatgcacaacgtgacccacaacctggaggaggatgaggaggaggtgaccaagaggaacagccccagcggcaccaccaccaagtctgtgtccattgctgccctgctggatgtgaacaaggaggagagcaacaaggagctggccagcaagaaggaggtgaagggcagccccagcttcctgaagaagggcagccagaagctgcggagcctgctgagcctgaccccagacaagaaggagaacctgagcaagaacaaggccccagccttctaccgcctgtgcagcagcagtgacaccctggtgtctgagggggaggagaaccagaagcccaagaagagtgacaccaaggtggacagcagccccaggaggaagcacagcagcagcagcaacagccagggcagcatccacaagagcaaagaagatgtgacagtgagccccagccaggagatcaatgcccccccagatgagaacaagaggacccccagccctggccctgtggagagcaagttcctggagagagctggagatgccagcgccccccgcttcaacacagagcagatccagtacagagacagccgggagatcaatgctgtggtgaccccagagcggcggcccaccagcagcccccggcccaccagcagcgagctgctgcggagccacagcacagacagaagagtgtacagcagatttgagcccttctgcaagattgagagcagcatccagcccaccagcaacatgcccaacaccagcatcaacagacctgagatcaagagcgccaccatgggcaacagctatggccgcagcagccccctgctgaactacaacacaggagtgtaccgcagctaccagcccaatgaaaacaagttccggggcttcatgcagaagtttggaaacttcatccacaagaacaagtag

SEQ ID NO: 23889 - DNA, 3036 bp, Artificial Sequence
  derived and/or modified sequence
atggagaccagcagcatgctgagcagcctgaacgacgagtgcaagtccgataattatatcgagcctcactacaaggaatggtacagggtggcaatcgatatcttgattgaacatgggctcgaggcctaccaggagttcctagtgcaggagagagtcagcgactttctggctgaggaggaaatcaattacatcctcaaaaacgtgcagaaggtggctcaaagtactgctcatggaacggatgactcgtgtgacgacactctgtctagtggaacctactggcccgttgagagcgatgtcgaggctccaaacctagacctagggtggccctacgttatgcccggcctgctcggaggtacccacatcgatttgctttttcatcctcccagagcccatctgcttactattaaggagactatccgcaaaatgattaaagaggctagaaaggtcatcgcactcgtcatggatatcttcacagatgtggatatattcaaggaaatagttgaagctagcaccagaggggtttccgtgtatattcttctggatgagtcaaattttaatcactttttaaatatgactgagaagcaaggttgttcagtccagaggctccgcaatatccgtgtgagaacagtgaaaggacaggactatctgagcaaaacgggagccaagttccacgggaagatggaacagaagtttcttttagtggattgccagaaggtaatgtacggctcctacagttacatgtggtcttttgaaaaggcccatctatctatggtgcagataatcacaggccagctcgtagaatcattcgacgaggaattccgcaccctctacgcccgcagctgcgtgccttcatctttcgcacaggaagagtctgctagagttaaacacggcaaagctctatgggaaaatggaacctatcaacacagcgtatcctctctggcctcagtgtcaagtcaaagaaacctgtttggccgtcaggataagatacacaaattggattcctcctattttaagaatagaggtatttatacgctgaatgaacacgataaatataacatcaggtcacatgggtataagccacacttcgtgcctaactttaatggtcccaacgccatccgtcagttccagcccaatcaaatcaacgagaattggaaaagacactcttacgccggtgagcaaccagagacagtaccttacctgttactgaatagagcattgaacagaacaaataatccgcctgggaactggaaaaaaccatctgactcgctctctgtggcttcatcaagccgggagggatacgtgagccaccacaacacacctgcccagtcattcgcgaatcgtctggcccagcgtaaaaccaccaatctggcagaccggaattctaatgttcgacgctcctttaacggcacggacaatcacatcaggttccttcaacagagaatgccaacgctggaacatacaaccaagagttttctgaggaactggaggatcgagagctacctgaacgatcactctgaagcaactccagattctaacggtagcgctcttggcgaccggttcgagggctacgataacccggaaaatcttaaagcaaacgctctgtatacacactccaggcttaggagttcactagtgtttaagcccacactgcctgagcagaaagaagtgaacagctgtaccactgggtcctctaactccacgatcataggatcccagggctccgaaacccctaaagaggtccctgatactccaacaaatgtgcagcacctcacagacaagcctttacccgaatcaattccaaagctgcccctacagtcagaagctcctaagatgcacacactgcaggttcccgagaaccatagtgtcgcgctcaatcagacaacaaatggccacaccgagtccaataactacatctataagaccctgggcgtaaataaacagactgagaatctgaagaaccagcagacagaaaatctgctcaagagaagaagtttcccacttttcgacaattccaaagccaatctagacccaggcaacagcaaacattatgtgtattcaaccttgacccggaatcgagttagacagcctgaaaagcccaaagaagacctgctcaagtcatccaagtctatgcacaatgtcacccataacctggaggaagatgaagaggaggttactaagagaaactctccctcgggcacaacaactaaatctgtaagcatcgccgccctgctcgacgtgaacaaagaggagtcaaataaagaactggcaagtaagaaggaggtgaaggggtccccttccttcttaaagaagggatcgcagaagttacggagccttctgtcactgacacccgataagaaagagaatctgagcaagaataaagcccctgcgttctatcggttgtgttctagctctgacaccctcgttagcgaaggggaagaaaaccaaaaacctaagaagtctgataccaaggttgattccagcccccgccgcaaacatagctccagttcaaatagccaagggtcgattcacaaatccaaggaagacgtcaccgtcagcccctcccaggagataaacgcccctccagacgagaataagcggacaccttctccggggcccgttgagagcaaatttctggagcgggcgggcgacgcgtccgcccctcggttcaacaccgagcagatccagtatcgggatagcagggagatcaatgcggttgtgacaccagaaaggagacccacctcatcaccaaggcccacatccagcgagttgctgcgatcacacagtacagatcggcgcgtctattcaaggtttgagccgttctgtaagatagagtcctccattcagccaacatctaacatgccaaatactagtattaatcgtcccgaaattaagagtgccactatgggcaactcctacggccgatcctcccctctgctgaattacaatactggggtgtaccgctcatatcagcccaatgaaaacaagtttcgagggtttatgcaaaaattcggcaattttattcataaaaacaagtag

SEQ ID NO: 23890 - DNA, 3036 bp, Artificial Sequence
  derived and/or modified sequence
atggagacatcctctatgttaagctctctcaacgacgagtgtaagtcagacaactacattgaacctcattataaggagtggtatcgcgtcgctatagacattctgatcgagcacggtctcgaggcctaccaggaatttcttgtacaggagcgggtcagcgactttctggccgaggaggagattaattatattctgaagaatgtgcagaaagtggcgcaatccactgcgcacggaacagacgactcctgtgatgataccctctctagcggaacttattggccagttgagtccgatgtggaagctccaaatcttgatttgggctggccttacgtgatgcctggactcctggggggaacacatatcgacttgctcttccacccacccagagcacatctgctgactattaaggaaaccatccgtaaaatgatcaaggaggcacggaaggtgatcgctcttgttatggacattttcaccgacgtagatatcttcaaggagatagtcgaagcctcaacccgcggtgtttcggtgtatatcctgctggacgagagtaacttcaaccacttcctgaacatgaccgagaagcaaggttgctcagttcagaggctaagaaatatcagggtgagaaccgtgaaggggcaggactatctgtccaagactggcgcaaagttccatgggaaaatggaacaaaagttcctcctggtcgactgtcagaaagtcatgtatggcagttacagctatatgtggagcttcgagaaagcacatctgtcaatggtgcagattatcacgggacagcttgtagagtccttcgatgaagagtttcgtacgctgtatgccaggtcctgtgttcctagctccttcgcccaagaggagtctgccagagtgaagcacggtaaggccctgtgggagaatggaacctatcaacactcagtatcttctttggcatctgtttccagtcagcggaatctgtttggccgtcaggacaaaattcacaaacttgactcttcttacttcaagaacagaggcatatatactttaaatgagcacgacaaatacaatatcagaagccatggatacaaaccccactttgttcctaatttcaatggcccaaacgccattagacagttccagcctaatcaaatcaatgaaaattggaaacgacattcatacgccggagagcagcctgagacagtgccgtacctgttactgaatagggccctgaacaggacaaataatccccctggcaattggaaaaagccctccgattccctgagtgtagcctcttcgagtcgcgagggatatgtcagtcaccacaacacccctgctcagtcattcgcaaaccgccttgcgcagcggaaaaccacgaacctggctgatagaaatagcaacgtgcgaagaagcttcaacgggactgataatcacattcgctttttacagcagagaatgccgactttggagcatacgacgaaatcattcctgcgcaactggagaatcgaatcatatttaaatgaccattctgaggccaccccagacagcaacggatcggcccttggtgaccggtttgaagggtacgataatccagagaatctcaaggccaatgctctctatacccattcgcgcctgaggtcgtcactagttttcaaacctacactgcctgaacagaaagaggtgaattcctgcaccacagggagctccaacagcactattattggatcacaggggagcgaaacccccaaagaggtgcccgatactccaacaaatgttcagcacttgacagacaaaccactaccagagtccatcccgaaactgcctcttcagtcggaggcccctaagatgcacaccttgcaggtaccagagaaccatagcgttgctcttaatcagaccactaacggccatactgagtcgaacaactatatatataagacactcggtgtcaacaaacagactgagaatttgaaaaaccagcagacagagaatctcttaaaacgccgaagctttccactcttcgataactccaaggccaacctggatccgggtaactccaaacactacgtttatagcacacttacacgaaaccgcgtgcgccaacctgagaaaccaaaggaggacctgcttaaatcaagcaaatccatgcacaacgtaacacacaatctggaggaagatgaggaggaagttacgaaaagaaactcaccctcgggcaccaccaccaagtcagtatcaattgctgcattactcgacgtcaataaggaggagtcaaacaaggaattggcctcgaaaaaagaggttaagggatcccccagcttcctcaagaaagggtcacagaaactgcgatctctcctttccttaacccctgataaaaaggagaatttgagcaagaacaaggccccagcattctaccgattatgcagcagtagtgacactcttgtgtctgaaggtgaggaaaaccagaagccaaagaagtccgataccaaagtagactccagtcccaggaggaaacatagcagctcctcgaatagccagggatctatccataagtcaaaggaagatgtgactgtgtcacctagccaagagattaatgcacccccagatgaaaacaagagaacaccctcacccggacctgtagaatctaagtttttagaaagggccggagatgcgtcagccccacgcttcaacacagagcagatccaatatagggattcccgcgagatcaatgccgtggtcacaccagagcgtcgccctactagcagccccaggccgacctcctctgaactactcagaagtcacagcacagataggagagtgtactcccgattcgagccattttgcaaaatcgagagttctatccagccgacttcgaatatgccaaatactagtattaaccggccagagatcaagagcgccaccatgggaaactcctacggccgttcctctcccctgctgaactataataccggtgtttatcggagctaccagcccaatgaaaataagtttagagggtttatgcagaaatttgggaatttcattcacaaaaacaaatag

SEQ ID NO: 23891 - protein, 363 aa, Artificial Sequence
  derived and/or modified sequence
MFKRHKSLASERKRALLSQRATRFILKDDMRNFHFLSKLVLSAGPLRPTPAVKHSKTTHFEIEIFDAQTRKQICILDKVTQSSTIHDVKQKFHKACPKWYPSRVGLQLECGGPFLKDYITIQSIAASSIVTLYATDLGQQVSWTTVFLAEYTGPLLIYLLFYLRIPCIYDGKESARRLRHPVVHLACFCHCIHYIRYLLETLFVHKVSAGHTPLKNLIMSCAFYWGFTSWIAYYINHPLYTPPSFGNRQITVSAINFLICEAGNHFINVMLSHPNHTGNNACFPSPNYNPFTWMFFLVSCPNYTYEIGSWISFTVMTQTLPVGIFTLLMSIQMSLWAQKKHKIYLRKFNSYIHRKSAMIPFIL

SEQ ID NO: 23892 - DNA, 1092 bp, Artificial Sequence
  derived and/or modified sequence
atgttcaagagacacaagagcctggccagcgagagaaagagagccctgctgagccagagagccaccagattcatcctgaaggacgacatgagaaacttccacttcctgagcaagctggtgctgagcgccggccccctgagacccacccccgccgtgaagcacagcaagaccacccacttcgagatcgagatcttcgacgcccagaccagaaagcagatctgcatcctggacaaggtgacccagagcagcaccatccacgacgtgaagcagaagttccacaaggcctgccccaagtggtaccccagcagagtgggcctgcagctggagtgcggcggccccttcctgaaggactacatcaccatccagagcatcgccgccagcagcatcgtgaccctgtacgccaccgacctgggccagcaggtgagctggaccaccgtgttcctggccgagtacaccggccccctgctgatctacctgctgttctacctgagaatcccctgcatctacgacggcaaggagagcgccagaagactgagacaccccgtggtgcacctggcctgcttctgccactgcatccactacatcagatacctgctggagaccctgttcgtgcacaaggtgagcgccggccacacccccctgaagaacctgatcatgagctgcgccttctactggggcttcaccagctggatcgcctactacatcaaccaccccctgtacaccccccccagcttcggcaacagacagatcaccgtgagcgccatcaacttcctgatctgcgaggccggcaaccacttcatcaacgtgatgctgagccaccccaaccacaccggcaacaacgcctgcttccccagccccaactacaaccccttcacctggatgttcttcctggtgagctgccccaactacacctacgagatcggcagctggatcagcttcaccgtgatgacccagaccctgcccgtgggcatcttcaccctgctgatgagcatccagatgagcctgtgggcccagaagaagcacaagatctacctgagaaagttcaacagctacatccacagaaagagcgccatgatccccttcatcctgtag

SEQ ID NO: 23893 - DNA, 1092 bp, Artificial Sequence
  derived and/or modified sequence
atgttcaaacggcacaagagtctagccagcgagcgcaaaagggctctgctttcgcaaagagctacccggtttatcttgaaagacgacatgcggaacttccattttctgtctaagctggttcttagcgccggcccattgcgaccgacacccgccgtcaaacacagcaagactacacatttcgagattgaaattttcgacgcacagacacgaaaacaaatctgtatcctggataaagtcacccagagctccacgattcatgatgtcaaacagaagttccacaaggcgtgccctaagtggtatcccagtcgcgtgggcctacagctggagtgcgggggtccgtttctgaaagactatatcactatccagtccatcgcagccagttcaatcgtcacgttgtacgccaccgacctgggacagcaggtatcctggacaaccgtcttcctcgccgaatatactggccccctcctgatctatctgctcttttatctgagaattccttgtatttacgacgggaaggagagcgcccgacggttacgacatcccgtagtccacctggcttgtttctgtcactgcattcactatatacgatatctcctcgaaacactgttcgtccataaggtgtcggcaggacacacccctttaaagaaccttattatgagttgcgcattttattgggggttcacctcgtggattgcctattatataaatcatcctctgtacactccacctagtttcggaaatcgacaaattacggtgtccgcgattaattttctgatttgcgaggccggaaaccactttatcaacgtcatgctgtcacaccccaaccataccggcaacaatgcctgtttcccctcccccaattataatcccttcacgtggatgttcttcttagtgtcctgtccaaactatacatacgagatcggctcatggatcagtttcactgtaatgacccagacactgcccgtgggcatcttcaccctgctgatgtccatccagatgagcctgtgggctcaaaaaaagcacaaaatttacctcaggaagttcaattcttacatccatcgcaagagcgccatgatccccttcatactgtag

SEQ ID NO: 23894 - DNA, 1092 bp, Artificial Sequence
  derived and/or modified sequence
atgttcaagaggcacaagagcctggccagcgagaggaagagggccctgctgagccagagggccacccgcttcatcctgaaggatgacatgaggaacttccacttcctgagcaagctggtgctgtctgctggccccctgcggcccaccccagctgtgaagcacagcaagaccacccactttgaaattgagatctttgatgcccagaccaggaagcagatctgcatcctggacaaggtgacccagagcagcaccatccatgatgtgaagcagaagttccacaaggcctgccccaagtggtaccccagccgggtgggcctgcagctggagtgtggcggccccttcctgaaggactacatcaccatccagagcattgctgccagcagcatcgtgaccctgtatgccacagacctgggccagcaggtgtcctggaccaccgtcttcctggccgagtacacaggccccctgctgatctacctgctcttctacctgcgcatcccctgcatctatgatggcaaggagagcgcccggcggctgcggcaccctgtggtgcacctggcctgcttctgccactgcatccactacatccgctacctgctggagaccctgtttgtgcacaaggtgtctgctggccacacccccctgaagaacctgatcatgagctgtgccttctactggggcttcacctcctggatcgcctactacatcaaccaccccctgtacaccccacccagctttggaaaccggcagatcaccgtgtctgccatcaacttcctgatctgtgaggccggcaaccacttcatcaacgtgatgctgagccaccccaaccacactggaaataatgcctgcttccccagccccaactacaaccccttcacctggatgttcttcctggtgtcctgccccaactacacctatgaaattggctcctggatctccttcaccgtgatgacccagaccctgcctgtgggcatcttcaccctgctgatgagcatccagatgagcctgtgggcccagaagaagcacaagatctacctgaggaagttcaacagctacatccacaggaagagcgccatgatccccttcatcctgtag

SEQ ID NO: 23895 - DNA, 1092 bp, Artificial Sequence
  derived and/or modified sequence
atgttcaagcggcacaagagcctggccagcgagcggaagcgggccctgctatcgcaaagagctacaaggtttatcctgaaagacgacatgcggaactttcatttcctgtctaaattggttctctccgctgggcccttaagacccactccagcagtgaagcatagcaaaaccactcatttcgagattgaaatatttgacgctcagacaaggaaacagatatgcattttagataaggtgacacagtcttccacaattcacgacgtgaaacagaaatttcataaggcatgtcccaaatggtacccctctcgtgtcgggctccagctggaatgcgggggtccttttctgaaggactacatcacaatccaatccatcgctgcatcgagcattgtgaccctctacgctacggatctcggccagcaggttagttggaccaccgtgtttttggccgaatacacaggaccattgctgatttacctacttttttacctaagaattccctgtatctacgacggaaaggagtcggcccgacggctgcgtcaccctgtcgtgcacttagcgtgtttctgccactgtattcactacattcgatatctgctggaaacactcttcgttcacaaggtcagtgccggtcacaccccgctcaagaatttaattatgagctgtgccttctattggggcttcacctcatggattgcatattacatcaaccaccccctttacacccctccttcttttgggaaccgacagatcaccgtctccgccattaatttcctaatctgcgaggcgggcaatcacttcatcaacgtgatgctctcccatccaaaccatacaggaaacaatgcctgttttccatcccctaattacaacccctttacatggatgttcttcctcgtaagttgtccaaactacacttacgagatcggctcctggatctcatttactgtcatgacacagactctaccggttggcatcttcacactgttgatgtcaattcagatgtctttgtgggctcagaaaaagcataagatctacctaagaaaattcaactcctacatccaccggaaatcagctatgattccatttattctgtag

SEQ ID NO: 23896 - DNA, 1092 bp, Artificial Sequence
  derived and/or modified sequence
atgttcaagaggcacaagtccctggccagcgagcgcaagcgggctttgctcagccagcgggctacacgcttcatcttaaaagatgacatgcgtaactttcatttcctgtcaaagctggtgctgtctgcgggaccgttaaggccaacaccagccgtgaagcacagcaagaccacccatttcgaaatagaaatatttgacgcccagacccgtaagcagatttgtatactcgataaggtcacccagtcatccaccatccacgacgtgaagcaaaagttccacaaggcctgccccaagtggtatccatccagggtggggctgcagctggaatgcggagggccttttctgaaagattacatcactatacaatctatagccgcaagctctatcgtgacactgtatgctaccgatctgggccagcaggtctcatggacaacagtattcctggcagagtacactggacccctcctgatttatttgttattctacctaaggattccgtgtatctacgatggaaaggagagtgccaggcgcctgcggcacccggtggtgcacctcgcctgtttctgccactgtatccactacattagatatcttctggaaacactctttgtacacaaggtgtctgctggccacacaccactaaaaaatctgatcatgagctgcgccttctattggggctttacaagctggattgcctactacataaaccatcccctttatactccaccatcgtttgggaatagacagattaccgtaagcgcaatcaactttcttatctgcgaggcaggcaaccacttcatcaatgtgatgctttcacatcctaaccacacggggaataacgcctgtttcccttcccctaactacaatcccttcacttggatgttttttttagttagctgccccaactatacatacgagatcgggagctggataagcttcaccgtgatgactcagacattacccgtgggaatttttacgctcctcatgagcatccaaatgtccctttgggctcagaagaaacacaagatttacttaagaaaattcaactcatacattcaccgaaaatcagctatgatcccgtttattctttag

SEQ ID NO: 23897 - DNA, 3573 bp, Artificial Sequence
  derived and/or modified sequence
gcataccatttgacctttcaaaggttctccagcagtatttaactgatgcaaaaggaacacacttgcaattttctacttttgacatgacagaccctcctcttagttcacacaatgttcaaaaggcacaagtccctcgcttcggaacgcaagagagcattactttcccaaagagctacacggttcatactgaaggatgatatgagaaattttcactttttgtcaaaacttgtactctcagcgggccctctaagaccaactccagcagtcaaacattcaaaaacgactcactttgagattgaaatatttgatgctcaaacaaggaaacagatatgtattctggataaggtgacacaatcatctactattcatgatgttaagcaaaagtttcacaaagcatgtccaaagtggtacccttctcgagttggtctgcagctagaatgtggcgggccttttttgaaggactacattaccattcaaagtattgcagcttcctccattgtcacactgtatgctacagacctaggtcaacaagtcagttggaccacagtgtttttggctgaatacacaggacctctgctaatatacctcctcttttatttgaggatcccatgtatatatgatggaaaagagagtgctagaagattacgccacccagtggtacacttggcttgcttctgtcattgtatacactacatccgataccttttggaaaccttatttgttcacaaagtttctgcaggacacacacctttgaaaaatttgataatgagttgtgccttttactggggatttacttcttggattgcctactacattaatcatccactatatacaccaccatcatttggaaacaggcaaatcacagtatctgctatcaattttctgatttgtgaagctgggaatcatttcatcaatgtaatgttgtctcatcccaatcacacaggaaacaatgcctgtttcccaagtccaaattataaccccttcacatggatgtttttcctggtttcatgtcctaactacacctatgagattggatcatggattagtttcacagtcatgacacaaacactgccagttggaatttttacacttctgatgagtatccagatgtctttgtgggcacaaaagaaacataagatttatctgagaaaattcaattcatatattcatagaaaatcagcaatgattccattcatattgtaaaaaaagaatcttatctcctatagaaaacagcaacatataaattcaataaataagacttagttaaggatagttaactattatactccaacaattcatgagcaacagtatatacactgagtaaaaatataaaatagtaaaatttcactaaatttagagaaatgcacatggtaataaaaagtataaattataaatgcaattaactaagaacagctctgaatgtatttgcatgggattggtccttgaataaaattgtcttacttcattaatacttcacaatactatttgcataagacaaaataccacagcaaaaaaaaaaatctgattaacaaatgaaaaagcgatctgaacagacatttcccaaaggaagacatatacatggtcaataagtatatttttaaaatgctcaacattaactattcatacagaaatgcaaatcaaaaccacaatgagatatcatctcatcctaattaaggtgactattttcaaaaagacaaaaaatatgacagccgtggtggttcatatctgtaatcctaacactttgacaggccaaggcaggggaattgcttgagttcagaagtttgagatctgggcaacatattgagactctgtctctaaaaagcatattgagactctgtctctacaaaaaaattttaaaaagtaaaaattagctgggcgtggtggcacatgccagtaggtagtcccagctactcgaggttgctccagctcaggcgttcaaggctacagagagccatgattaaaccaaggcactccagcctgggtgacagagtgagactgtctcaaaataaaataaaaataacatattggtgaagatgcgggaaaaaaaaaagaactcttagacactgctggtgggaatgtaaactagagcagccatgtggagaacaacatggactttcttcaaaaattacaaatagaactatcatatgatccagcaataccattactggaaaaaggaaatctgtatattaaagagacatttgaaccctatgtttactgcagcactattcacaatagccaagatataggagcaacctaggtgtccaacaacagatgaatggataaagaaaatgtggtatatatacacaatagaatactatgcagccataaaaactgaattcctgtcattcaggacaacatggatggaattggagggcatatgttaagtgaaacaagccaggaacagaaagttaaacattgcatgttattacttatatgtggaagctaaaaaaattgatatcatagaagtaaaaaataaaacagaggatactacaggctgggaaagctgcagcaaagggagactagagagagatttgttaaaggatacaaagttacagcttggtaggaggaataatttctggtgttctataccactgtaggacgactatagttaagaacattatattccatttagtttcaaatagctaaaaggagattttgtccccaacaaaaagaaatgataaatatttgaaaccatggatactctaatttctctgatctgaccactataaattatatgtattgaaacattattatgtatctcccaaatatgttcaattcttatgtcgctcaaaaaataaaatttaatttaaaaagtatctgatttttaaagtaaatattttttaaagttttgacatttaaattacttgaatctcattattttgacaataatttaattcttttattgttcaatctgttagtgagatgtgtcataggtattatgtcattagttcaaattcttgcggaaattatagctatattaaaagtgtaacatttttatttagttgtgtacttatttgttaataatacagacattgtatgttatcatactgaaatttacaattaaaatattttctgtagattatttgaaaatcattctaaatatatattttgaaatatatagattatatttgtatgtaaattatatttatacatcttctgaaatatatttcaaaatatgtgtgtacgtgtgtatatgtgtatatatatacacatatatatacacatacacaaatatatgcatatttcaaatggattgtatgcacttgcaaagcaaaagtacattggtaatttgggcacattcagagtggaaaaaatttgttctatttttacatctttaaatacctatcttctatgaaagcctatgtgcatgtgtgtgtgtgtatgagtttctatgtgagcatgcatatatacttcacaaagagatgacctatataaatcaaagtacacattatttaaaatatttaaaaaaattttcagtttcttcatttttaaattgtgatttttagatttgttagtctatggagtattttcaattctcagattatacatatgttataaaatatgttcattaaa

SEQ ID NO: 23898 - protein, 128 aa, Artificial Sequence
  derived and/or modified sequence
MALQVRVAPSKVVLQKFLLCVILFYTVYYVSLSMGCVMFEVHELNVLAPFDFKTNPSWLNINYKVLLVSTEVTYFVCGLFFVPVVEEWVWDYAISVTILHVAITSTVMLEFPLTSHWWAALGISKLLV

SEQ ID NO: 23899 - DNA, 545 bp, Artificial Sequence
  derived and/or modified sequence
cacggtgacaattgtgtcttcttccagatgtcatcgctataaggagtggggctttcatcacctccttgacgtaggatgtgtacatggctctccaggtcagagttgctccaagcaaggttgttttgcagaagtttcttctatgtgtcattcttttctacactgtgtactatgtgtccctgagcatgggctgcgtgatgtttgaggtgcatgagttgaatgtcctggctccatttgatttcaaaacaaatccctcatggctcaacataaactataaagttcttttagtttcaacagaggtcacctactttgtttgtggattgttttttgttccagttgtggaagaatgggtttgggattatgctatttcagtcactattcttcatgttgccatcacttcaactgttatgttggaattccccttgacatcacattggtgggctgctttaggtatatcaaaattgcttgtttagattctctaatgcacagaaataatgttaaatagaataactgtggaaatatattttattttctcatagattttacaa

SEQ ID NO: 23900 - DNA, 568 bp, Artificial Sequence
  derived and/or modified sequence
gtttctaatttaagtatgagacagtaattactcatacagccagagaggattccaagtccctgcctatttgccgcactatctaaaaacaatcaactcatctttcaaatctgaccaaactacaaatgatgtcatcgctataaggagtggggctttcatcacctccttgacgtaggatgtgtacatggctctccaggtcagagttgctccaagcaaggttgttttgcagaagtttcttctatgtgtcattcttttctacactgtgtactatgtgtccctgagcatgggctgcgtgatgtttgaggtgcatgagttgaatgtcctggctccatttgatttcaaaacaaatccctcatggctcaacataaactataaagttcttttagtttcaacagaggtcacctactttgtttgtggattgttttttgttccagttgtggaagaatgggtttgggattatgctatttcagtcactattcttcatgttgccatcacttcaactgttatgttggaattccccttgacatcacattggtgggctgctttaggtatatcaaaattgcttgtttag

SEQ ID NO: 23901 - DNA, 387 bp, Artificial Sequence
  derived and/or modified sequence
atggccctgcaggtgagagtggcccccagcaaggtggtgctgcagaagttcctgctgtgcgtgatcctgttctacaccgtgtactacgtgagcctgagcatgggctgcgtgatgttcgaggtgcacgagctgaacgtgctggcccccttcgacttcaagaccaaccccagctggctgaacatcaactacaaggtgctgctggtgagcaccgaggtgacctacttcgtgtgcggcctgttcttcgtgcccgtggtggaggagtgggtgtgggactacgccatcagcgtgaccatcctgcacgtggccatcaccagcaccgtgatgctggagttccccctgaccagccactggtgggccgccctgggcatcagcaagctgctggtgtag

SEQ ID NO: 23902 - DNA, 387 bp, Artificial Sequence
  derived and/or modified sequence
atggcactgcaggtcagagtcgcacctagcaaggtggtcctgcagaaatttctgctgtgtgtcatcttgttttataccgtatattatgtcagcctgtccatggggtgtgtgatgtttgaggtccacgaactcaacgtgttggcaccattcgattttaagactaacccctcttggctgaacattaattacaaggttctcctggtaagcacagaagtgacttatttcgtgtgtggcctgttctttgtgcccgtggttgaagagtgggtctgggactatgccatcagcgtcacaatactacacgtggcgataacttcaaccgtcatgcttgaatttcctctcacatcacattggtgggctgccttgggaatttctaaactgctggtctag

SEQ ID NO: 23903 - DNA, 387 bp, Artificial Sequence
  derived and/or modified sequence
atggcactgcaggtgcgcgtggcacccagcaaagtcgtgctccagaaatttcttctgtgcgtcattctgttctacactgtgtactatgtcagtttgagtatgggatgcgtcatgtttgaagtccacgaacttaacgtactggcaccgtttgactttaagacaaacccatcatggctgaatataaactataaagtcctgctggtttctaccgaagttacctacttcgtctgcggcctctttttcgtgccggtggtcgaggagtgggtgtgggattatgctatcagcgtgaccattttacacgtggccattacatctaccgtaatgttggaatttccactcacatctcactggtgggccgctctgggtatcagcaagctgcttgtctag

SEQ ID NO: 23904 - DNA, 387 bp, Artificial Sequence
  derived and/or modified sequence
atggccctgcaggtgcgggtggcccccagcaaggtggtgctgcagaagttcctgctgtgtgtgatcctcttctacacagtgtactacgtgtccctgtccatgggctgtgtgatgtttgaggtgcatgagctgaatgtgctggccccctttgacttcaagaccaaccccagctggctgaacatcaactacaaggtgctgctggtgtccacagaggtgacctactttgtgtgtggcctcttctttgtgcctgtggtggaggagtgggtgtgggactatgccatctctgtgaccatcctgcacgtggccatcaccagcacagtgatgctggagttccccctgaccagccactggtgggccgccctgggcatcagcaagctgctggtgtag

SEQ ID NO: 23905 - DNA, 387 bp, Artificial Sequence
  derived and/or modified sequence
atggccctgcaggtgcgggtggcccccagcaaggtggtgctgcagaaatttttactctgtgttatcctcttctacacagtgtactacgtctccctgtctatggggtgtgtgatgtttgaggtgcatgagcttaacgtgctggcccctttcgactttaagaccaaccccagctggttgaacattaattacaaagttctgcttgtcagtactgaagtgacttatttcgtttgtgggctgttttttgttcctgtagtggaagaatgggtatgggactatgccatctccgtgaccattctgcatgtggccattacctctactgtgatgctagagtttcccctgacctctcattggtgggctgcgctggggatttctaaactgctggtttag

SEQ ID NO: 23906 - DNA, 387 bp, Artificial Sequence
  derived and/or modified sequence
atggccctgcaggtgcgggtggcccccagcaaggtggtgctgcagaagtttctgctatgtgtgatcttgttctatacggtatattacgtcagtctctccatgggttgtgtgatgttcgaggtacatgagctgaacgttctcgcgccattcgactttaaaacaaacccctcttggctgaatatcaactacaaggttctcttggtatctaccgaagtcacatattttgtctgtggtctttttttcgtgccagtcgtcgaagagtgggtttgggactacgccatctcagtgactatactgcacgtggccattacctccacagtgatgctagagttcccattaactagtcactggtgggccgctctgggaatctcaaaattgttggtgtag

SEQ ID NO: 23907 - DNA, 387 bp, Artificial Sequence
  derived and/or modified sequence
atggctctccaagttagggtcgcccctagcaaggtggtgctgcagaagtttttgctttgcgtgattttattctataccgtctactacgtgtccctgtcaatgggatgtgttatgttcgaagtgcatgaactcaatgtgctggccccattcgatttcaagactaatccatcttggctgaacatcaattataaggtacttcttgtgagcacagaagtcacatacttcgtatgtggcctgttttttgtgcccgtggtagaggagtgggtctgggattacgccatctcagtaacaatactgcacgtcgctattacatcaaccgttatgttggaattccccctgacaagtcactggtgggctgcgctgggtattagcaaactgcttgtttag

SEQ ID NO: 23908 - DNA, 387 bp, Artificial Sequence
  derived and/or modified sequence
atggcattacaggtccgggtcgcgccttcaaaggtagtgctccagaagttcctgctatgcgtgattttgttttacacagtttattatgtgtcactgtctatggggtgtgtgatgtttgaggtgcacgaactcaacgtgctggctccattcgacttcaagacaaaccccagctggttgaacattaattacaaggtcctgttagtgtcgactgaggtgacatactttgtgtgcggtcttttcttcgtacctgtggtggaggagtgggtgtgggattacgctatctcagtgacaatcctccacgtggctatcactagtacagtaatgctggaatttcctcttacctcccactggtgggccgcactaggcatctcgaagctgcttgtatag

SEQ ID NO: 23909 - protein, 666 aa, Artificial Sequence
  derived and/or modified sequence
MQEVVLLDESSGPPSQLLWTRQDTQLPQESALLPAPYPAFTKDGSQGNLPQADITLMSQAQESVTFEDVAVNFTNREWQCLTYAQRHLYKDVMLENYGNMVSLGFPFPKPPLISHLEREVDPCVQDPQDRESLSCSYPVSADKMWPENEKASSQQEIFENGEAYWMKFNSLLKVDSRDPKVREVCVQDVKLENQWETSIREKLREEKEGSEEVTCKKGKNQKVLSKNLNPNSKHSQCNKVLIAQKLHECARCGKNFSWHSDLILHEQIHSGEKPHVCNECGKAFKTRNQLSMHRIIHTGEKPFNCTQCGKAFNSRSALCRHKKTHSGEKPHECRDCGKAFKTRNRLCMHQLIHTGEKPYKCNCCGKAFQFKHSLTIHGRIHTGEKPYECEECGKAFSGSSDLTKHIRIHTGERPYECSKCGRAFSRSSDLSKHKRIHTREKHYGCPQCGKDFSIKAELTKHRRIHTEEKRYRCEECGKAFRHNCKRRAHEREHTGEKPYQCRDCGKTFQDKHCLTIHQRIHTGEKPYKCLECGKAFSGKSNLTNHRRIHTGEKPHKCEVCGMAFHHSSVLRQHKRIHTGEKPYTCSECGTSFRQGSALIGHKRVHTGEKPYECEECGKAFRVSSNLTGHKKRKHQVWSTHELDGSRKSLSPVTVSQTSVVSILTSA

SEQ ID NO: 23910 - protein, 666 aa, Artificial Sequence
  derived and/or modified sequence
MQEVVLLDESSGPPSQLLWTRQDTQLPQESALLPAPYPAFTKDGSQGNLPQADITLMSQAQESVTFEDVAVNFTNREWQCLTYAQRHLYKDVMLENYGNMVSLGFPFPKPPLISHLEREVDPCVQDPQDRESLSCSYPVSADKMWPENEKASSQQEIFENGEAYWMKFNSLLKVDSRDPKVREVCVQDVKLENQWETSIREKLREEKEGSEEVTCKKGKNQKVLSKNLNPNSKHSQCNKVLIAQKLHECARCGKNFSWHSDLILHEQIHSGEKPHVCNECGKAFKTRNQLSMHRIIHTGEKPFNCTQCGKAFNSRSALCRHKKTHSGEKPHECRDCGKAFKTRNRLCMHQLIHTGEKPYKCNCCGKAFQFKHSLTIHGRIHTGEKPYECEECGKAFSGSSDLTKHIRIHTGERPYECSKCGRAFSRSSDLSKHKRIHTREKHYGCPQCGKDFSIKAELTKHRRIHTEEKRYRCEECGKAFRHNCKRRAHEREHTGEKPYQCRDCGKTFQDQHCLTIHQRIHTGEKPYKCLECGKAFSGKSNLTNHRRIHTGEKPHKCEVCGMAFHHSSVLRQHKRIHTGEKPYTCSECGTSFRQGSALIGHKRVHTGEKPYECEECGKAFRVSSNLTGHKKRKHQVWSTHELDGSRKSLSPVTVSQTSVVSILTSA

SEQ ID NO: 23911 - DNA, 2001 bp, Artificial Sequence
  derived and/or modified sequence
atgcaggaggtggtgctgctggacgagagcagcggcccccccagccagctgctgtggaccagacaggacacccagctgccccaggagagcgccctgctgcccgccccctaccccgccttcaccaaggacggcagccagggcaacctgccccaggccgacatcaccctgatgagccaggcccaggagagcgtgaccttcgaggacgtggccgtgaacttcaccaacagagagtggcagtgcctgacctacgcccagagacacctgtacaaggacgtgatgctggagaactacggcaacatggtgagcctgggcttccccttccccaagccccccctgatcagccacctggagagagaggtggacccctgcgtgcaggacccccaggacagagagagcctgagctgcagctaccccgtgagcgccgacaagatgtggcccgagaacgagaaggccagcagccagcaggagatcttcgagaacggcgaggcctactggatgaagttcaacagcctgctgaaggtggacagcagagaccccaaggtgagagaggtgtgcgtgcaggacgtgaagctggagaaccagtgggagaccagcatcagagagaagctgagagaggagaaggagggcagcgaggaggtgacctgcaagaagggcaagaaccagaaggtgctgagcaagaacctgaaccccaacagcaagcacagccagtgcaacaaggtgctgatcgcccagaagctgcacgagtgcgccagatgcggcaagaacttcagctggcacagcgacctgatcctgcacgagcagatccacagcggcgagaagccccacgtgtgcaacgagtgcggcaaggccttcaagaccagaaaccagctgagcatgcacagaatcatccacaccggcgagaagcccttcaactgcacccagtgcggcaaggccttcaacagcagaagcgccctgtgcagacacaagaagacccacagcggcgagaagccccacgagtgcagagactgcggcaaggccttcaagaccagaaacagactgtgcatgcaccagctgatccacaccggcgagaagccctacaagtgcaactgctgcggcaaggccttccagttcaagcacagcctgaccatccacggcagaatccacaccggcgagaagccctacgagtgcgaggagtgcggcaaggccttcagcggcagcagcgacctgaccaagcacatcagaatccacaccggcgagagaccctacgagtgcagcaagtgcggcagagccttcagcagaagcagcgacctgagcaagcacaagagaatccacaccagagagaagcactacggctgcccccagtgcggcaaggacttcagcatcaaggccgagctgaccaagcacagaagaatccacaccgaggagaagagatacagatgcgaggagtgcggcaaggccttcagacacaactgcaagagaagagcccacgagagagagcacaccggcgagaagccctaccagtgcagagactgcggcaagaccttccaggacaagcactgcctgaccatccaccagagaatccacaccggcgagaagccctacaagtgcctggagtgcggcaaggccttcagcggcaagagcaacctgaccaaccacagaagaatccacaccggcgagaagccccacaagtgcgaggtgtgcggcatggccttccaccacagcagcgtgctgagacagcacaagagaatccacaccggcgagaagccctacacctgcagcgagtgcggcaccagcttcagacagggcagcgccctgatcggccacaagagagtgcacaccggcgagaagccctacgagtgcgaggagtgcggcaaggccttcagagtgagcagcaacctgaccggccacaagaagagaaagcaccaggtgtggagcacccacgagctggacggcagcagaaagagcctgagccccgtgaccgtgagccagaccagcgtggtgagcatcctgaccagcgcctag

SEQ ID NO: 23912 - DNA, 1725 bp, Artificial Sequence
  derived and/or modified sequence
atgctggagaactacggcaacatggtgagcctgggcttccccttccccaagccccccctgatcagccacctggagagagaggtggacccctgcgtgcaggacccccaggacagagagagcctgagctgcagctaccccgtgagcgccgacaagatgtggcccgagaacgagaaggccagcagccagcaggagatcttcgagaacggcgaggcctactggatgaagttcaacagcctgctgaaggtggacagcagagaccccaaggtgagagaggtgtgcgtgcaggacgtgaagctggagaaccagtgggagaccagcatcagagagaagctgagagaggagaaggagggcagcgaggaggtgacctgcaagaagggcaagaaccagaaggtgctgagcaagaacctgaaccccaacagcaagcacagccagtgcaacaaggtgctgatcgcccagaagctgcacgagtgcgccagatgcggcaagaacttcagctggcacagcgacctgatcctgcacgagcagatccacagcggcgagaagccccacgtgtgcaacgagtgcggcaaggccttcaagaccagaaaccagctgagcatgcacagaatcatccacaccggcgagaagcccttcaactgcacccagtgcggcaaggccttcaacagcagaagcgccctgtgcagacacaagaagacccacagcggcgagaagccccacgagtgcagagactgcggcaaggccttcaagaccagaaacagactgtgcatgcaccagctgatccacaccggcgagaagccctacaagtgcaactgctgcggcaaggccttccagttcaagcacagcctgaccatccacggcagaatccacaccggcgagaagccctacgagtgcgaggagtgcggcaaggccttcagcggcagcagcgacctgaccaagcacatcagaatccacaccggcgagagaccctacgagtgcagcaagtgcggcagagccttcagcagaagcagcgacctgagcaagcacaagagaatccacaccagagagaagcactacggctgcccccagtgcggcaaggacttcagcatcaaggccgagctgaccaagcacagaagaatccacaccgaggagaagagatacagatgcgaggagtgcggcaaggccttcagacacaactgcaagagaagagcccacgagagagagcacaccggcgagaagccctaccagtgcagagactgcggcaagaccttccaggacaagcactgcctgaccatccaccagagaatccacaccggcgagaagccctacaagtgcctggagtgcggcaaggccttcagcggcaagagcaacctgaccaaccacagaagaatccacaccggcgagaagccccacaagtgcgaggtgtgcggcatggccttccaccacagcagcgtgctgagacagcacaagagaatccacaccggcgagaagccctacacctgcagcgagtgcggcaccagcttcagacagggcagcgccctgatcggccacaagagagtgcacaccggcgagaagccctacgagtgcgaggagtgcggcaaggccttcagagtgagcagcaacctgaccggccacaagaagagaaagcaccaggtgtggagcacccacgagctggacggcagcagaaagagcctgagccccgtgaccgtgagccagaccagcgtggtgagcatcctgaccagcgcctag

SEQ ID NO: 23913 - DNA, 2001 bp, Artificial Sequence
  derived and/or modified sequence
atgcaggaagtcgtgctgctcgacgagtctagtggccctccgagccaacttctttggaccagacaagatacgcagctcccccaggagtccgccctcttacccgctccttaccccgcgtttacaaaagatggctcccaaggaaatctgccgcaggcggatattacgctgatgtcgcaggcacaggagtctgtaacattcgaggacgtggccgttaactttaccaatagagagtggcaatgccttacctacgcccaaagacacctttacaaggatgtaatgttagaaaactatggtaatatggtgtctcttggatttccttttccaaagccccctctgatctcgcatcttgaaagagaggtcgatccttgcgtccaggacccccaggatcgagaatctctgtcatgtagttatcctgtttctgccgataaaatgtggcccgagaatgagaaagcctccagccagcaggagatattcgaaaatggcgaggcttactggatgaaatttaattccctgctgaaggtagactcccgagaccctaaggttcgagaggtgtgtgtacaggatgtcaagttggaaaaccagtgggaaacatctatccgagaaaagctgagagaggaaaaagagggctctgaagaagtcacctgtaagaaaggcaagaaccagaaggtcctttctaaaaatttaaatccaaatagcaagcatagtcagtgcaacaaggttctgattgcacagaagctgcatgaatgtgcaaggtgcggaaagaatttctcttggcatagcgacttgattctgcacgagcagatacacagcggggaaaaaccccacgtttgtaacgaatgcggaaaagcctttaagacccgcaaccaactaagtatgcatagaattatccatactggagagaagccattcaactgcacacagtgtggaaaggcctttaacagtaggtctgctctctgtcgacacaaaaaaacccacagcggagagaagccccacgagtgtcgcgactgtggaaaagcctttaaaacgcgaaatagactgtgtatgcaccagcttatacatacaggtgagaaaccctacaaatgcaactgctgcgggaaggctttccagttcaagcatagcctcacaatccatggccgtatacataccggagaaaagccctatgaatgtgaggagtgcggtaaagctttttctggttcatcagacctgacaaaacacattaggatccatactggagaacgaccttacgaatgctctaagtgtggccgtgctttttctcgttccagtgacttgtcaaaacacaagaggatccatacaagagagaagcactacggatgcccgcaatgcggtaaggacttcagtatcaaggcagagttgactaaacacaggagaatccatacagaagagaaacggtaccgctgtgaggagtgtggaaaggccttccgccataactgcaaaaggagagcccatgaaagggagcataccggagagaaaccgtatcagtgccgcgactgcggaaagaccttccaggataagcactgcctgactatacatcaacgcattcacactggcgagaaaccttataagtgcctggaatgcggaaaagccttttctggtaagagcaatctgactaatcataggcgcatccacacgggcgagaaaccgcacaagtgtgaagtgtgcggcatggccttccaccattcctcggtgttgcgacagcataagcggatccacacaggcgaaaagccttatacttgtagcgagtgtggtaccagcttccgccagggctccgcgctgattgggcataaaagggtccacaccggagagaaaccgtacgagtgcgaggagtgcggtaaggcttttcgggtcagctccaatctcacagggcataagaaacggaaacaccaagtttggagtacacacgagcttgacggctctagaaagtccctgtcccctgtgaccgtctctcagacctcagtggtctcaattttaacatccgcctag

SEQ ID NO: 23914 - DNA, 2001 bp, Artificial Sequence
  derived and/or modified sequence
atgcaagaagtggtccttctcgatgaatcaagcggacccccgagccagttattgtggactcgtcaggatacccaactgccccaggagagcgcactcttacccgccccttatccagcttttaccaaggacggatcacagggcaacctgccccaagccgacattacacttatgtcacaggctcaggaatctgtgacattcgaggatgtagctgttaactttactaacagagaatggcagtgtttgacttacgcccagaggcacctgtataaggacgttatgctggagaattacggtaacatggtgtcactgggatttccattcccgaaaccccctctgatcagtcacctggagcgtgaggtggacccttgcgtgcaggatccacaagatagggagtccttatcctgttcttatcctgtcagcgctgataaaatgtggcccgagaacgaaaaggccagctcccagcaggagatcttcgagaacggggaggcttattggatgaagtttaattccttgctgaaggtcgattcccgggatcccaaggtccgcgaagtttgcgtccaagatgtgaagttggagaaccagtgggaaacaagcattagagagaaacttcgggaagagaaggaaggaagcgaagaagttacctgcaaaaaggggaagaatcaaaaggtgctgtctaagaatctgaaccctaactcaaagcattctcagtgcaacaaggtccttatagcacagaagttacacgagtgtgctaggtgtggaaaaaacttctcctggcatagtgatctgatactgcacgaacagattcactctggggaaaaaccccatgtgtgcaacgagtgtggaaaggcgtttaaaactcgtaatcagctgtccatgcatagaataatacacactggcgagaagcccttcaattgcactcagtgtggtaaagcttttaactcacgcagtgctctgtgtcggcataagaaaactcactctggagagaaaccacatgaatgtcgcgactgcggtaaagccttcaagacccggaaccgattgtgtatgcaccagctcatccataccggtgaaaagccatacaaatgcaactgttgtggtaaagctttccaattcaagcatagtctgacgattcacgggcgtatccataccggagagaagccttatgagtgtgaagagtgtggcaaagctttcagcggcagctccgatttgactaaacacatcagaattcatactggggaacgcccctatgagtgttccaagtgcggcagggccttcagccgctcaagcgatttgagcaagcacaagagaatccatacacgtgaaaaacactatggctgccctcagtgcggcaaagattttagcatcaaagcagaattgacaaaacatagacgcatccatactgaggagaagcggtatcgctgcgaagaatgtggaaaagcgttccgacacaactgtaagcgacgagcccacgaacgggagcacacaggcgaaaaaccatatcaatgtcgggactgtggcaagaccttccaggataagcattgtctgaccatccaccaaagaattcacactggagaaaagccttataagtgtcttgaatgtggcaaggcctttagcgggaaaagcaacctgactaaccaccgcaggattcatacaggggaaaagccacacaagtgcgaagtgtgtggaatggctttccaccacagctcagtgctacgccagcataaacggatccatactggggagaagccatacacatgctctgagtgtggcacctctttccgacaagggagtgctttgatcggccacaaaagggttcacaccggggagaagccatacgagtgtgaggagtgtggtaaagcgtttagagttagcagtaatctgactggccacaagaagcgaaagcatcaggtctggtctactcatgaactggatggaagtaggaagtccctgtcccccgtcaccgtctctcaaacatccgtggtctcgatactcactagtgcttag

SEQ ID NO: 23915 - DNA, 2001 bp, Artificial Sequence
  derived and/or modified sequence
atgcaggaggtggtcctgctggatgagtccagtgggcctccatcccagttactctggaccagacaagacacacagctaccccaggagagtgccctgctcccggccccttacccagctttcacgaaagacggatcccaaggaaatctgccccaggcagatataacgctcatgagtcaggcccaagagtctgtgacattcgaggatgttgcagtcaacttcactaaccgcgagtggcagtgtctcacttacgcacagcggcatctgtataaggacgtcatgttggagaactatgggaacatggtctcactcggcttccctttccctaaaccgccgctgatatctcacctggaaagagaagtggatccatgcgtacaggatccgcaagaccgcgagagtctgtcctgcagttatccagttagtgccgataaaatgtggccagagaatgaaaaggcctcctctcagcaggaaatcttcgaaaacggcgaggcttactggatgaaattcaattcactgctgaaagtcgactcgcgcgaccctaaggtgcgcgaggtgtgtgtgcaagacgtcaaattagagaatcagtgggagacctcaatacgcgagaaattacgggaggagaaagagggaagtgaggaggtgacatgcaagaaagggaaaaaccaaaaagtgctttcgaaaaatctgaatcccaattctaagcatagccagtgcaacaaggtcttgatagcccagaaactgcacgagtgcgcgagatgcgggaaaaattttagttggcattctgatttgatactgcacgaacagatccactccggcgaaaagcctcacgtgtgcaacgagtgtggaaaggcattcaagactcgaaaccagttgagcatgcaccgtatcattcacacaggtgaaaagccattcaactgtactcagtgtgggaaagcttttaattccaggagtgccctgtgtaggcataaaaagacccactctggagaaaagccccatgagtgcagagattgtggcaaggcatttaaaacccgcaacaggttgtgcatgcatcaactgatacacacgggtgaaaagccttataagtgtaattgttgcggaaaagctttccaatttaaacattctctgactatccacgggagaattcatactggtgaaaagccatacgaatgcgaagagtgcggcaaagccttctccggatcctcagacctgaccaaacatattaggatacacaccggagagagaccttatgagtgctctaagtgcggacgggccttctccaggagctcagacctctctaaacataaaaggatacacacgagagagaagcactacggctgtccccagtgtggcaaggatttcagcataaaggccgagctcactaagcaccggcgcatccatactgaagagaaaaggtaccgatgcgaagaatgcgggaaagcctttagacacaattgtaaacggagagcacacgaaagagaacataccggagagaagccttatcagtgtagagattgcggtaaaactttccaggataagcattgcctgaccatacaccagaggatccacactggggaaaagccttacaaatgtcttgagtgtggaaaggcattttccggcaaatctaatctgacaaatcaccggagaattcacacgggcgagaagccacacaaatgtgaagtctgtggcatggctttccatcatagcagtgtacttcgccaacacaaacgcatccataccggagaaaagccttacacttgctcggaatgcggcacatcattccgtcaaggctcggctctgatcggccataaacgcgtgcataccggggaaaaaccttatgaatgtgaagaatgcggcaaggccttcagagtttcaagtaatttgactgggcacaagaagaggaaacaccaggtctggtctacacacgagctggatggcagcaggaagtccctcagccctgttacggtgagccagacctcggtggtgtccattcttactagtgcctag

SEQ ID NO: 23916 - DNA, 2001 bp, Artificial Sequence
  derived and/or modified sequence
atgcaagaagtggttctcctggatgagagtagcgggccgccaagccaactcctgtggacacgtcaagatactcaattgcctcaggaatctgcactgttaccagccccttatccagcattcacgaaagatgggagtcaaggcaacctcccacaagccgacattaccctcatgtcacaggcccaggagagtgtcacctttgaggacgtggctgttaacttcactaatcgggagtggcagtgtttgacttacgctcagcgacacctgtacaaggatgtgatgctggagaactatggcaatatggtatctctcggcttcccctttccaaagccgcccctgattagccatctggagagagaggtggatccatgcgtgcaggatcctcaggacagagaatctttgtcttgcagttacccagtatccgccgacaaaatgtggcccgaaaatgaaaaagcgagttcccaacaggagatcttcgagaatggcgaggcctactggatgaagtttaatagtctgttgaaggtcgattcgcgggacccgaaggtgagagaggtatgcgtgcaagatgtaaagcttgagaaccaatgggagacatccatccgcgaaaagctccgagaggaaaaggagggatcagaagaagttacttgtaagaaaggcaaaaaccagaaggtcctcagtaagaatcttaacccaaactctaagcactcacaatgcaataaggtgctgatagcacagaaactacatgagtgtgcccgttgcgggaaaaacttctcttggcactcggacctcatcctgcacgaacaaatccattccggggagaaacctcacgtatgtaatgaatgcggtaaggcctttaaaacccggaaccagctgagcatgcaccgaatcattcacacaggtgagaaacctttcaactgtacgcagtgcggcaaagcattcaactctaggtccgccctctgtcgccacaagaaaactcatagcggggagaagcctcatgaatgtagagactgcggcaaggctttcaaaacacgcaaccggctgtgtatgcaccagttaatccatacaggcgagaaaccttacaagtgtaactgttgtggcaaggcatttcagtttaaacacagcctgacaatccatggcagaattcataccggtgaaaagccatacgagtgtgaggaatgtggaaaagcattttctggcagttcagatcttacgaagcacatccggatccataccggcgagcgaccctatgagtgtagcaagtgtggaagagccttctcccgctcctctgaccttagcaaacacaagcgcatccacaccagagaaaaacactatggctgccctcagtgtggtaaggatttcagcataaaagctgagctgaccaaacacagacggatacacactgaggaaaagcgctatagatgcgaggagtgtggtaaggctttcaggcataactgtaaacgccgggcccatgaacgggagcacaccggcgagaagccctaccagtgtcgtgattgcggtaagaccttccaggataagcactgcttgacaatccaccaacggatccacaccggggaaaaaccttataaatgtctcgagtgcggtaaggcctttagcggtaagtccaacctaaccaaccaccggcggatacacactggggaaaagccacataagtgtgaagtatgtgggatggccttccatcatagttccgtcctccggcagcacaagcgtattcacactggggagaaaccctatacctgcagcgaatgcggcacctcttttcgccagggttcagctttgatcggccacaaacgggtccacaccggtgaaaagccatacgagtgcgaggaatgtggaaaggcctttcgcgtgtccagcaatcttacggggcacaagaaacgaaagcaccaagtgtggtctacacacgagctcgacggttccagaaaatctctctctccagtaacagtgtcacaaacatctgtcgtatctatcttgaccagtgcatag

SEQ ID NO: 23917 - DNA, 2001 bp, Artificial Sequence
  derived and/or modified sequence
atgcaggaggtagtgcttcttgacgagtcctcagggccacctagccagttactgtggacacggcaggatactcagctgccgcaagagtccgccctgctacccgctccatatccggccttcacgaaagatggcagccaggggaatctcccccaggccgacataacgctcatgagccaggcacaggagtccgtgactttcgaggatgtagctgtgaattttaccaaccgcgagtggcagtgtttgacttatgcacagagacacctttacaaggacgtcatgctggaaaattacggcaacatggtcagtttagggtttcccttcccaaagccacctctgatctcacacctggagagggaagtggacccctgcgtgcaagacccccaagatagagaatcactgtcttgttcgtaccccgtcagtgccgataagatgtggccagagaatgagaaggcctctagccaacaggagattttcgaaaatggggaagcctactggatgaagtttaactctctgctgaaggtggactctagggaccccaaagtccgggaagtctgcgtccaggacgtcaagctcgaaaaccagtgggagacatccataagggaaaaactgcgtgaagagaaagaaggttctgaggaagttacctgtaaaaaaggcaaaaaccagaaagtgctgtccaagaacctcaaccccaactccaaacattcacagtgtaacaaggtgttgattgcgcaaaaactgcatgagtgtgctcggtgcggtaagaatttttcatggcacagtgatctgatcctgcacgagcagattcatagcggggagaagccacatgtctgtaacgagtgcgggaaggcgtttaagaccagaaaccagctcagcatgcacagaatcattcacactggcgagaaacctttcaactgcacacagtgcgggaaggctttcaactcgagatcagcgctgtgccgccacaagaagactcactccggggagaaaccccacgaatgtcgtgattgtggcaaggccttcaaaacaagaaatcggttgtgtatgcaccaactcatccacacaggtgaaaagccttacaaatgcaactgctgtggtaaggcctttcagtttaagcactcactgactattcatgggcgcatccataccggggagaaaccttatgagtgcgaggaatgtggaaaggctttttccggatcctccgatttgacaaagcatatccggatccacaccggcgaaaggccctacgaatgtagtaaatgcggacgcgcattcagccgctcctctgacctttccaagcacaaaaggatacacacccgggagaaacattatggatgtccccagtgcggaaaagatttctctatcaaggctgaacttaccaagcacaggcggattcacactgaagagaagcgttaccgctgcgaagagtgcggtaaggccttccgtcataactgtaagcggcgggcccatgagagggagcacaccggcgagaagccctatcaatgtcgggattgcgggaaaacatttcaggataaacattgtcttactatccaccagaggattcacactggcgagaagccatataagtgccttgagtgtgggaaagcattctctggaaaaagtaatcttaccaatcataggaggattcataccggagaaaagccccacaagtgtgaagtgtgtggtatggcttttcaccattcctccgtgctccgccagcacaagagaattcatacaggagagaaaccttatacttgttctgagtgtggcaccagctttaggcagggtagcgccctcatcggacataagcgcgtgcacactggcgaaaaaccgtacgaatgcgaagagtgcggaaaggccttccgcgtctcttcgaaccttacaggtcacaagaagaggaagcatcaggtgtggtccacacacgaactcgacgggagcagaaagagcttatctcccgtcaccgtaagccagacttcagttgtctctattcttacctccgcctag

SEQ ID NO: 23918 - DNA, 2001 bp, Artificial Sequence
  derived and/or modified sequence
atgcaggaggtggtcctgcttgatgaaagtagcgggcctcctagccagctcttgtggacgcgtcaagatacacaactgccccaggaatctgcgttgctgccagccccctatccagctttcactaaagacggctcacaggggaatctccctcaagccgatattaccttgatgtctcaagcacaggagtcagtgaccttcgaggatgtggctgttaatttcactaatcgagagtggcagtgtctgacatacgctcagcgccacctgtacaaagacgtaatgttggaaaactatggcaacatggtgagtctcggcttccccttccccaaacccccgttaatctcacatttggagagggaggttgatccctgcgtacaggaccctcaggacagagaatccctgtcctgcagctaccctgtcagtgctgataaaatgtggcccgagaatgaaaaggccagctctcaacaggaaatattcgagaatggagaggcttattggatgaagttcaactcccttcttaaagtagactcaagagatcctaaagtgcgagaggtatgcgtgcaggacgtgaagctcgaaaaccagtgggagacatccataagggaaaaactgcgcgaagagaaggaaggcagtgaagaggtcacatgcaagaaggggaagaatcagaaagtcttgagcaagaatctgaatcctaactcaaaacactcgcagtgcaacaaggttttgattgcgcagaagctgcatgagtgcgcacgctgcggaaagaactttagctggcactccgatctgatccttcatgagcagatacattctggagagaagcctcatgtgtgtaacgaatgtgggaaggcttttaagactaggaaccaactgtctatgcacaggatcattcatacaggagaaaaacctttcaactgtacacaatgtggtaaggcttttaatagccgaagcgcactgtgtaggcataagaagacccattcaggcgagaagccgcatgaatgtcgggactgcggtaaagcgttcaaaacacgcaaccggctgtgtatgcaccagctgatccacacgggcgagaagccctacaaatgtaactgctgtggcaaagcatttcagttcaagcatagccttactatccacggtcgaatccacactggcgagaaaccttatgaatgcgaggaatgtggcaaggcgttcagcggcagctccgacttgactaagcacatccggatccacactggggaacggccttatgagtgctccaagtgtggccgggcctttagtcggagttccgatctcagtaaacacaaaagaatccacactagggaaaaacattacgggtgccctcagtgtggcaaagatttcagtatcaaggccgagctgaccaaacaccgaagaatacacaccgaggagaaaagatatagatgcgaagagtgcggtaaggccttccggcataattgtaagcgcagggcccacgagagagagcatacaggagaaaaaccataccaatgccgcgactgcggaaaaacctttcaggataagcactgcctgacaatacatcagcggatacacaccggggaaaagccttataagtgccttgaatgtggtaaagcctttagcggcaagtccaaccttaccaaccaccgtcggattcataccggggaaaagcctcacaagtgtgaagtctgcggaatggcttttcatcacagctcagtgctgcgtcagcacaagcgcatccacaccggggagaagccttatacctgcagcgaatgtggaaccagttttcggcagggttcagcattgattggacataaaagggtgcacaccggtgaaaagccttacgaatgcgaggagtgcggaaaagcattccgagtgtccagtaatttaactggccataaaaaaagaaagcatcaggtctggagcacacatgaactggacggaagtaggaagagcctgagcccagttacggtctcgcagacctcagtggtctctatcctaacctccgcctag

SEQ ID NO: 23919 - DNA, 1725 bp, Artificial Sequence
  derived and/or modified sequence
atgttggaaaactatggcaatatggtaagcctcggctttcctttcccaaaacctcccctaatcagccatctggagcgggaggtggacccgtgcgtgcaggacccccaggatcgggagagcctctcttgtagctaccccgttagcgccgataaaatgtggcccgaaaatgaaaaggccagctctcagcaggaaatttttgagaatggggaggcctattggatgaagtttaatagccttttgaaggtagattccagggaccccaaggttcgggaagtatgtgtgcaagacgttaaactcgagaaccagtgggaaacgtcaatccgggaaaagcttcgagaggaaaaggagggttccgaagaggtgacctgcaagaaggggaagaaccagaaagtcctctcgaagaatttgaaccccaattcaaaacattcgcaatgcaataaggtcttgattgcgcagaaactgcatgagtgtgctcggtgtggcaagaattttagctggcactcagacctgatcttgcacgagcagatccactccggagagaaacctcacgtgtgtaacgaatgtggtaaagcttttaaaacacggaaccagcttagcatgcaccgcattatacatacaggcgagaaaccattcaactgtacacaatgcggcaaagcgtttaactcgcggagtgcactctgtagacataaaaaaacccactcgggcgaaaagcctcacgagtgtagagactgtggcaaggcgtttaaaactcgtaatcggctgtgtatgcatcagctaattcacacaggagagaagccctacaagtgtaactgctgtggaaaggctttccagttcaaacactcccttaccatccacgggcgtattcatacgggtgaaaaaccctacgaatgtgaagagtgcggaaaggccttttccgggagctcagacttgactaagcacatccggattcataccggagagcggccatatgaatgttctaaatgcggccgggcattcagtcgcagtagtgacttgagcaagcataaacgtattcatacaagagagaaacactatgggtgcccacagtgcggaaaggacttttctatcaaggcggagttgaccaagcacagaagaattcacactgaagagaagagataccgctgcgaagagtgcgggaaggccttcagacacaactgtaagcgacgcgcccacgaacgggaacacacaggtgaaaagccttatcagtgtagggactgtggcaagacttttcaggataaacattgcctaaccatccaccagcgaatccataccggcgaaaaaccatacaaatgcttggagtgtggaaaggccttcagcgggaaaagcaacctgaccaaccacaggagaattcataccggtgagaaacctcacaagtgcgaggtgtgcgggatggcctttcatcatagtagcgtgcttaggcaacataagagaatccacaccggtgagaagccatatacttgtagcgaatgtggcacttctttccggcaaggttctgccctcatcggacataaaagagtgcacaccggcgagaagccttacgaatgcgaagagtgcggaaaagccttccgcgtgtcatccaacctgacaggacacaagaagcgcaaacatcaggtttggagtacccatgaacttgacggcagtagaaaatcactgtccccggtaaccgtgtctcagacatccgtggttagcatcctgactagcgcatag

SEQ ID NO: 23920 - DNA, 1725 bp, Artificial Sequence
  derived and/or modified sequence
atgctggaaaactacgggaacatggtgtccctgggcttcccttttcctaaaccgccattaatatctcacctagaaagagaggtagatccgtgcgttcaggacccccaggaccgtgaaagtctgtcatgtagctatcccgtgtccgcagacaagatgtggcccgaaaatgagaaggcatcctcccagcaagagatctttgagaacggtgaagcttactggatgaagttcaactctttactcaaggtggattcacgggaccccaaggtgcgcgaggtgtgcgtacaggacgttaagctcgaaaaccagtgggagacgtccatccgcgagaaactgagggaggaaaaggagggctccgaggaggttacctgcaaaaaggggaaaaatcagaaggtgctctctaaaaatcttaatcctaactccaagcactcccagtgtaacaaggtgctgatagcacaaaagttgcacgagtgcgctaggtgtgggaagaatttttcttggcatagtgacctgatcctgcacgaacagatccactcaggagagaagccccatgtgtgcaacgaatgcggtaaggctttcaaaacccggaaccagctaagtatgcaccgaattatccacacgggggagaagccttttaactgtacccagtgtggcaaggcttttaatagcaggagtgctttgtgcaggcataaaaaaacacatagcggagaaaagccccacgagtgccgcgactgtggaaaagcctttaaaacaaggaatcggctctgtatgcaccagttgattcacaccggagaaaagccatacaagtgcaattgctgtggcaaggcttttcagttcaagcattccctaaccattcacggccgcatacacaccggcgagaagccttacgagtgcgaggaatgtggaaaagccttttctgggagctccgatctgaccaagcatatccgaatacatacgggggaacgcccatacgagtgctccaagtgcggccgagccttctccaggtcgagcgaccttagcaaacataaacgaatccatacccgggaaaaacattacggttgtccacaatgcggtaaagacttcagtattaaggccgagttgacaaaacatagacgaatccataccgaagagaagcgctaccggtgtgaggaatgcggaaaggccttcagacacaattgtaaaaggcgggctcacgagagagagcacacaggggaaaagccttaccagtgccgagactgcgggaagacattccaagataagcattgcctgacgatacatcagagaattcacaccggagaaaaaccatacaagtgtctcgaatgcggcaaagctttctcgggcaagagcaatctcactaaccaccgacgcattcacacaggcgagaagccgcataagtgcgaagtctgtgggatggcgttccaccattccagcgtcttgcggcagcacaagcgaatccacaccggggaaaaaccctatacatgctccgagtgcggcacttcctttaggcagggtagcgctctgatcgggcacaagcgcgttcataccggcgagaaaccttacgagtgcgaggagtgcgggaaggcatttagggtgtcttcaaacctgactggccacaagaagcgcaaacatcaggtctggagcacgcacgagttagacgggtcccgtaaatccctcagccccgtgacagtctcccaaacaagcgtggtttcaatactgacctccgcttag

SEQ ID NO: 23921 - DNA, 1725 bp, Artificial Sequence
  derived and/or modified sequence
atgcttgagaactacggcaacatggtgtccctggggtttccatttcctaagccccccctgatttcccaccttgagcgggaggtggacccctgtgttcaggaccctcaggatcgtgagtctctgagctgctcttacccagtttccgccgacaagatgtggcctgagaatgagaaagcaagctctcaacaagaaatctttgaaaacggagaggcgtactggatgaaattcaattcattgctgaaagtcgacagcagagatccgaaagtccgtgaggtctgcgtgcaagacgtgaagcttgagaatcaatgggagacatctatccgagaaaagctgagggaagaaaaggaaggaagcgaggaagtgacatgtaagaagggcaaaaatcaaaaagtgctttctaaaaatttgaaccctaatagtaagcacagccagtgtaataaagttctcattgctcagaaactccacgaatgtgctcgttgtggcaagaatttctcatggcacagtgatctgattctgcacgaacagattcactcgggggaaaagccccatgtttgcaacgaatgcggtaaggctttcaaaacccggaaccaactgtccatgcacaggatcattcacaccggagaaaaacccttcaactgtactcagtgcgggaaagctttcaactccaggagtgcgctgtgcaggcataagaagacccacagtggggagaaaccgcacgagtgtcgagattgcgggaaagccttcaagaccagaaatcggctttgcatgcatcaacttatccatacaggtgagaagccatataaatgtaattgttgcggcaaagcttttcagtttaaacactcactgaccattcacggcaggatccataccggagagaagccctacgagtgcgaagaatgcggaaaagccttctcgggttccagcgacctgactaagcacattcgcatccataccggtgagaggccctacgaatgcagcaagtgtggtagagcattcagcaggtcctccgatctgtcaaagcataagcggatccacacaagagaaaaacactacgggtgccctcagtgcggtaaagacttttctataaaggccgagcttacaaagcaccggcgaattcatacggaggaaaaaagataccggtgcgaggagtgcggcaaagcgttccgccacaattgtaagcggcgcgcccatgaaagagagcataccggcgagaagccttaccagtgtagagactgtggaaaaacttttcaggataagcactgtcttacaatccatcagcgaatccacaccggcgagaagccatataaatgtttagaatgtggaaaggctttctccggaaaatctaacctgactaatcaccgacgcattcacactggtgagaagccgcataagtgcgaggtctgcggcatggctttccaccatagcagtgtactccggcagcacaagaggatccacacaggagaaaagccttacacatgtagcgaatgtgggacatcctttaggcaagggtctgcactcatcgggcacaagcgggtgcacaccggagagaagccgtacgaatgtgaagagtgtggaaaggcctttagggtttcgtcaaatcttacaggacataaaaagagaaagcatcaggtgtggtccacccacgagttggacggttcaagaaaatccttgtctcctgttacagtatcacagacgtccgtggtctcaatcctcaccagtgcctag

SEQ ID NO: 23922 - DNA, 1725 bp, Artificial Sequence
  derived and/or modified sequence
atgctcgaaaattacggcaatatggtctccttgggctttccttttcctaaaccacccctaataagccatttagagagagaagtagacccctgtgtacaggacccccaagacagggaatccctgagctgttcataccctgtcagtgctgacaaaatgtggcccgagaacgaaaaagcctcttcacagcaggaaatttttgaaaacggggaggcttattggatgaagttcaattctctgttgaaggtcgattctcgggaccccaaagtgcgggaggtgtgtgtccaggatgttaagctcgagaaccagtgggaaaccagtattcgagagaaacttcgcgaggaaaaagaagggtcagaagaagttacatgtaaaaaagggaaaaaccagaaggtactttcgaaaaacctaaaccctaacagtaagcatagccagtgcaataaggtgctcatcgcgcaaaaactgcatgaatgtgcgcggtgtgggaaaaatttctcttggcattctgatttgatccttcacgaacagattcactcaggtgagaagccccacgtctgtaatgaatgcggtaaagctttcaaaacaaggaatcagctgtctatgcacagaatcattcacactggggagaaaccatttaactgtacacagtgcggcaaagccttcaacagcagatcagctctgtgtcggcacaaaaaaacgcactccggcgagaaaccccacgaatgtagggattgcgggaaggcctttaagacaagaaaccggctctgcatgcatcagctgatacacacgggggaaaaaccatacaagtgcaattgttgtggcaaagcgtttcagttcaaacacagcctgacaatccacggccgtatccatacaggagagaagccctacgaatgtgaggaatgtggaaaggccttctccggctcttcagacctcaccaagcacatccgtatccacaccggggaacgcccctacgagtgcagcaagtgcggaagggctttctctcgcagctcggatctgtccaagcataaaagaattcatacacgggaaaagcactatgggtgtcctcagtgcggcaaggatttctccattaaggccgagctgaccaaacaccgtaggattcacactgaagagaaaagataccgttgcgaagagtgcggaaaagccttccggcacaactgtaagcgacgggctcatgagcgtgagcatactggtgagaagccttatcagtgccgagactgtgggaagacttttcaggacaaacactgtctcacaatccatcagcggatccacactggagaaaagccatacaagtgccttgaatgcggaaaggctttttcgggcaagtccaacctgactaatcaccggcgaattcacactggtgaaaagccacacaagtgtgaagtatgcggcatggcatttcaccattcctctgtcctgagacagcataaacgcatccacactggcgagaaaccctatacatgttctgaatgtggcactagttttcgccaggggtcagccctgatcgggcacaaacgagtgcataccggagagaaaccttatgagtgcgaagagtgcgggaaggcctttagggtttccagtaaccttacgggccataaaaagcggaagcatcaagtatggagtacgcacgaactggatggctcccgaaaatccctttcacctgtgacagtctcccaaactagcgtcgtgtctatcctcaccagtgcatag

SEQ ID NO: 23923 - DNA, 1725 bp, Artificial Sequence
  derived and/or modified sequence
atgctagagaactacggaaacatggtgtctctcggcttcccttttcctaagccacccctcatcagtcacctcgagcgcgaggtcgacccatgtgtgcaggaccctcaggatcgcgagtcgctttcatgtagctacccagtcagtgcagacaagatgtggcctgagaacgagaaggcctcatcacagcaggaaattttcgagaatggagaggcctattggatgaaatttaattccctgctgaaggtggattctcgggacccaaaggtgcgcgaggtgtgtgtacaggacgtgaaacttgagaaccagtgggaaacctccattcgggaaaaactgcgagaggaaaaagaagggagcgaggaagtgacgtgcaagaagggtaagaatcagaaagtgctatctaagaacctcaaccctaatagcaaacattcacagtgcaataaagttctgatagctcagaagctgcacgagtgtgcacgatgcgggaagaacttcagctggcatagcgatctcatcctccacgaacagattcactctggggaaaaacctcacgtctgcaatgaatgcggtaaggcttttaaaacccgcaaccagctgagcatgcaccgcattattcacactggcgagaaaccttttaactgtacacagtgcggaaaagccttcaactcaagaagcgcactttgcagacacaagaagacccactccggagagaaaccacacgagtgtagggactgcggaaaggcatttaaaacaagaaacaggctgtgcatgcatcagttaattcatacaggagagaaaccgtacaaatgcaattgctgcggcaaagcctttcagttcaagcacagcctcacaattcatggccgtatccacaccggggagaagccctacgaatgtgaggaatgtggaaaagcattcagcggctccagcgacctcactaagcacatcagaatccatactggagagaggccctatgaatgtagcaagtgtgggcgcgctttttctaggagttctgacctctccaaacataagcgcattcacactcgcgagaagcactatgggtgcccccagtgcggcaaggatttctccattaaagctgaattaaccaaacaccgcaggatccacacggaagaaaaacggtacagatgtgaagagtgtgggaaggcattcagacataactgcaagagacgggcacacgaaagggagcatactggggagaagccataccaatgccgggattgtgggaagactttccaggacaaacactgcctgaccattcatcagagaatacacaccggagagaaaccctacaaatgcctggagtgtgggaaggccttctctggaaagagcaacctgaccaatcaccggcgtatacatacaggcgagaagccccacaagtgcgaggtttgtgggatggcgttccatcacagttccgttctgagacagcacaagaggatccatacgggagaaaagccgtacacctgttcagagtgcgggacttcgttccgacaggggagtgccctgatcggccacaaacgggtgcatacaggagagaaaccatatgagtgcgaagaatgtgggaaggcctttcgggtatcgtccaatctgaccggccataagaagagaaaacaccaggtgtggagcacacacgaactcgacgggtctcgaaagtctctgagcccggtcacagtgtcacaaacaagcgtcgtgagcattttgaccagtgcctag

SEQ ID NO: 23924 - DNA, 1725 bp, Artificial Sequence
  derived and/or modified sequence
atgctcgaaaattatggaaatatggtgtctttagggtttcctttccctaagcccccgcttatttcacatctggaaagagaggtggatccctgtgtccaggaccctcaggatagagagtccttgtcgtgttcctatcctgtatcggctgacaagatgtggcccgaaaacgagaaagcctcatcccagcaggagatttttgaaaatggcgaagcctactggatgaaattcaactccctgttaaaagttgacagtcgagatccaaaagttcgagaagtgtgtgtgcaggatgttaagctggagaatcaatgggagacttcaatcagggagaagcttcgcgaggagaaagagggcagcgaggaggttacatgtaaaaaggggaaaaatcaaaaggttctgtctaagaacctgaatccgaatagcaaacactcccagtgtaacaaagtcctgatcgctcagaagctgcacgagtgcgctaggtgcggcaagaacttctcttggcattctgatttgatcctccacgaacagattcattccggggagaagccacatgtttgcaatgagtgcgggaaggcttttaagactcggaatcagctgtcaatgcaccgaataatccacacaggcgagaagcccttcaactgtacgcagtgcggcaaggcgtttaatagcaggagcgccctctgccggcacaagaagactcattctggcgaaaagccgcatgaatgtcgtgattgtggaaaagcctttaagactcggaacagactatgtatgcaccagctgatccacacaggtgaaaagccttacaagtgcaactgctgcggaaaggcattccagtttaagcactccctcaccatccacggccgcatccacaccggcgagaagccttatgagtgcgaggaatgtgggaaggccttttctggatcctcagaccttacaaaacatatacgcattcacacaggcgagagaccctatgaatgcagcaagtgtgggcgcgcattttcccggagctcagacctgtccaaacacaagcgcatccatacccgcgaaaaacactatggatgcccacagtgcggaaaggacttttctattaaagcggagttgactaagcacagacgcatacatacagaggagaaaaggtatagatgtgaggagtgtggcaaagcatttagacataactgcaagaggcgtgcccatgaaagggagcacacaggggagaagccctatcagtgccgagactgcggaaaaacctttcaggataaacattgtcttacaattcatcagcgaattcataccggcgagaaaccttacaagtgtctggagtgcggtaaggcattttccggtaagagtaacttaactaatcaccgccgcatccatactggggagaagccacacaagtgcgaggtttgcggaatggcttttcatcactcttcagtcctgcgccagcacaagcggatacatacaggtgaaaaaccatacacttgcagcgaatgcggaacgtcattccggcagggaagcgcgcttataggccataaacgggttcacactggcgagaaaccttacgagtgtgaggaatgtggcaaggccttccgggtgtcgtccaatttgactggccacaagaaacggaagcaccaagtgtggagcactcatgagctggatgggagcaggaaatctttgtccccggtgacggtgagccaaaccagtgtggtatcaatcctcacctcagcatag

SEQ ID NO: 23925 - DNA, 2001 bp, Artificial Sequence
  derived and/or modified sequence
atgcaggaggtggtgctgctggatgagagcagcggcccccccagccagctgctgtggacccggcaggacacccagctgccccaggagagcgccctgctgcctgccccctacccagccttcaccaaggatggcagccagggcaacctgccccaggccgacatcaccctgatgagccaggcccaggagagcgtgacctttgaagatgtggccgtgaacttcaccaaccgggagtggcagtgcctgacctacgcccagaggcacctgtacaaggatgtgatgctggagaactacggcaacatggtgtccctgggcttccccttccccaagccacccctcatcagccacctggagcgggaggtggacccctgtgtgcaggacccccaggaccgggagagcctgagctgcagctaccctgtgtctgctgacaagatgtggccagaaaatgagaaggccagcagccagcaggagatctttgaaaatggagaggcctactggatgaagttcaacagcctgctgaaggtggacagccgggaccccaaggtgcgggaggtgtgtgtgcaggatgtgaagctggagaaccagtgggagaccagcatccgggagaagctgcgggaggagaaggagggcagcgaggaggtgacctgcaagaagggcaagaaccagaaggtgctgagcaagaacctgaaccccaacagcaagcacagccagtgcaacaaggtgctgattgcccagaagctgcatgaatgtgcccgctgtgggaagaacttctcctggcacagcgacctgatcctgcacgagcagatccacagcggggagaagccccacgtgtgcaatgaatgtgggaaggccttcaagaccaggaaccagctgtccatgcaccgcatcatccacactggagagaagcccttcaactgcacccagtgtgggaaggccttcaacagccgcagcgccctgtgccgccacaagaagacccacagcggggagaagccccatgagtgccgggactgtgggaaggccttcaagaccaggaaccggctgtgcatgcaccagctgatccacactggagagaagccctacaagtgcaactgctgcggcaaggccttccagttcaagcacagcctgaccatccacggccgcatccacactggagagaagccctatgaatgtgaagaatgtgggaaggccttcagcggcagcagtgacctgaccaagcacatccgcatccacactggagagcggccctatgagtgcagcaaatgtggccgggccttcagccgcagcagtgacctgagcaagcacaagaggatccacacccgggagaagcactacggctgcccccagtgtgggaaggacttcagcatcaaggccgagctgaccaagcaccggcgcatccacacagaggagaagcgctaccgctgtgaagaatgtgggaaggccttccgccacaactgcaagaggcgggcccacgagcgggagcacactggagagaagccctaccagtgccgggactgtgggaagaccttccaggacaagcactgcctgaccatccaccagaggatccacactggagagaagccctacaagtgcctggagtgtgggaaggccttcagcggcaagagcaacctgaccaaccaccggcgcatccacactggagagaagccccacaagtgtgaggtgtgtggcatggccttccaccacagctctgtgctgcggcagcacaagaggatccacactggagagaagccctacacctgcagtgaatgtggcaccagcttccggcagggcagcgccctgattggccacaagagggtgcacactggagagaagccctatgaatgtgaagaatgtgggaaggccttccgggtgagcagcaacctgaccggccacaagaagaggaagcaccaggtgtggagcacccatgagctggatggcagcaggaagagcctgagccctgtgacagtgtcccagacctctgtggtgtccatcctgaccagcgcctag

SEQ ID NO: 23926 - DNA, 1725 bp, Artificial Sequence
  derived and/or modified sequence
atgctggagaactacggcaacatggtgtccctgggcttccccttccccaagccacccctcatcagccacctggagcgggaggtggacccctgtgtgcaggacccccaggaccgggagagcctgagctgcagctaccctgtgtctgctgacaagatgtggccagaaaatgagaaggccagcagccagcaggagatctttgaaaatggagaggcctactggatgaagttcaacagcctgctgaaggtggacagccgggaccccaaggtgcgggaggtgtgtgtgcaggatgtgaagctggagaaccagtgggagaccagcatccgggagaagctgcgggaggagaaggagggcagcgaggaggtgacctgcaagaagggcaagaaccagaaggtgctgagcaagaacctgaaccccaacagcaagcacagccagtgcaacaaggtgctgattgcccagaagctgcatgaatgtgcccgctgtgggaagaacttctcctggcacagcgacctgatcctgcacgagcagatccacagcggggagaagccccacgtgtgcaatgaatgtgggaaggccttcaagaccaggaaccagctgtccatgcaccgcatcatccacactggagagaagcccttcaactgcacccagtgtgggaaggccttcaacagccgcagcgccctgtgccgccacaagaagacccacagcggggagaagccccatgagtgccgggactgtgggaaggccttcaagaccaggaaccggctgtgcatgcaccagctgatccacactggagagaagccctacaagtgcaactgctgcggcaaggccttccagttcaagcacagcctgaccatccacggccgcatccacactggagagaagccctatgaatgtgaagaatgtgggaaggccttcagcggcagcagtgacctgaccaagcacatccgcatccacactggagagcggccctatgagtgcagcaaatgtggccgggccttcagccgcagcagtgacctgagcaagcacaagaggatccacacccgggagaagcactacggctgcccccagtgtgggaaggacttcagcatcaaggccgagctgaccaagcaccggcgcatccacacagaggagaagcgctaccgctgtgaagaatgtgggaaggccttccgccacaactgcaagaggcgggcccacgagcgggagcacactggagagaagccctaccagtgccgggactgtgggaagaccttccaggacaagcactgcctgaccatccaccagaggatccacactggagagaagccctacaagtgcctggagtgtgggaaggccttcagcggcaagagcaacctgaccaaccaccggcgcatccacactggagagaagccccacaagtgtgaggtgtgtggcatggccttccaccacagctctgtgctgcggcagcacaagaggatccacactggagagaagccctacacctgcagtgaatgtggcaccagcttccggcagggcagcgccctgattggccacaagagggtgcacactggagagaagccctatgaatgtgaagaatgtgggaaggccttccgggtgagcagcaacctgaccggccacaagaagaggaagcaccaggtgtggagcacccatgagctggatggcagcaggaagagcctgagccctgtgacagtgtcccagacctctgtggtgtccatcctgaccagcgcctag

SEQ ID NO: 23927 - DNA, 2001 bp, Artificial Sequence
  derived and/or modified sequence
atgcaggaggtggtgctgctggacgagagcagcggcccccccagccagttgctgtggacgcgtcaagacactcagcttccgcaagagagcgctctgctgcccgcaccctacccagcttttacaaaggatgggtcacagggcaacctcccacaagccgatatcacactgatgtcccaagcccaggagtcagtcacatttgaagatgtggcagtcaatttcacaaacagggagtggcagtgccttacgtacgcccaaagacacctgtacaaagatgtgatgctggaaaactacggtaatatggtgtcattgggattcccgttccctaaacccccactcatcagccacctcgagagggaggtcgacccatgtgttcaagaccctcaagaccgcgagtccctctcttgcagttaccccgttagcgccgacaagatgtggcctgaaaacgaaaaagcgagctcccagcaggaaatctttgaaaatggcgaggcttactggatgaaattcaatagtctcctgaaagtggattcccgggaccccaaggttcgcgaggtttgtgtgcaggatgtcaagctggaaaaccaatgggagacatccattagggagaaactgcgtgaagagaaagagggatccgaggaggtgacgtgtaagaagggaaaaaaccagaaggtcctctcaaagaacctaaatccgaatagcaagcactctcagtgcaataaagtgctgatcgctcaaaaactgcatgaatgcgctcggtgtggaaaaaatttcagctggcacagcgacctgattctgcacgagcagatccattccggagagaaaccccatgtgtgtaacgagtgtggcaaagcatttaaaactaggaaccaactttcaatgcatcgaataattcacactggagaaaagccatttaattgtacccagtgcgggaaagccttcaattccagatccgcgctgtgccggcataagaagactcattctggggagaaaccccacgaatgtagggattgtggcaaggccttcaagacacggaatcgcctctgtatgcatcagctgatccatactggcgagaaaccatacaagtgcaactgttgtggaaaagcttttcagttcaaacactcgctaactatccatggccggattcacacaggcgaaaaaccatacgagtgtgaggaatgcggcaaggcattttccgggagctctgatctgactaaacatattcgcattcatacaggggagaggccgtatgaatgttccaagtgcggacgtgctttttctcgcagcagcgatcttagtaagcacaaaaggattcatacgagagagaagcattatggctgcccccaatgcggtaaggatttttctattaaagccgagctgacaaaacaccggaggatacacacagaggagaaaaggtacagatgcgaagagtgcggcaaagcctttcggcacaactgcaaacgtagagctcacgagagagagcacacgggggagaaaccttaccagtgcagagactgtggcaaaacctttcaggataaacactgtctgacaatacatcagcggatccacaccggcgaaaagccttacaagtgcctggagtgtggaaaagcattctctggtaagtcaaaccttactaaccacaggcggatccacactggagagaaacctcacaagtgtgaggtatgcggcatggcttttcatcactccagcgtgttgaggcagcataagcggatccacacaggtgaaaagccatacacgtgcagcgaatgtggaacttcttttagacaaggttctgccctcatcggacacaaaagggtgcacaccggcgaaaaaccctacgaatgcgaggagtgcgggaaagccttccgggtcagcagcaacctgactggccacaaaaaacgaaagcatcaggtctggagtactcacgagttggatggctcccggaagagcttgtctcctgtgaccgtcagtcagacttctgtagtttccattctaacatcagcatag

SEQ ID NO: 23928 - DNA, 2001 bp, Artificial Sequence
  derived and/or modified sequence
atgcaggaggtggtgctgctggacgagagcagcggcccccccagccagcttctctggacgcgccaggatacccagttgcctcaagaatcagcattgctgcccgccccttaccctgcattcacgaaagacggatctcagggcaacctgccacaagccgatatcacactgatgtcccaggcccaagagtccgtcacctttgaagatgtggccgtcaacttcacaaaccgcgaatggcaatgccttacctacgcccagcggcatctctacaaggatgttatgttggagaattatggcaatatggtctctctcggctttccatttccaaagccaccactgatcagccacctcgagcgcgaagtcgatccctgcgtccaagatccacaggatagggagtcgcttagctgctcctaccccgtaagtgctgacaaaatgtggcccgagaatgagaaggcatcttcacagcaagagattttcgaaaacggcgaggcgtactggatgaaattcaactctctcttaaaggtagactcccgtgatccgaaggtgagagaggtatgcgttcaagacgtcaaactcgaaaaccaatgggagacgtcaattcgtgaaaaactccgcgaggaaaaggagggctcagaagaggtcacatgcaaaaagggtaagaaccagaaggtactgtcaaaaaacctgaatccaaattcaaagcattcacagtgtaacaaagttctgattgcccagaagctgcatgaatgtgccagatgcgggaaaaatttctcatggcactccgacctgatcctgcatgagcagattcatagcggagaaaagccccatgtatgcaatgagtgtggaaaagcttttaaaactagaaaccagctcagcatgcatcgaataatccacacaggagaaaaaccattcaattgtacccagtgtggaaaagcctttaacagcaggagtgccctttgccgacacaaaaaaactcatagcggtgagaaacctcacgagtgcagggactgcgggaaagcctttaaaacccgtaatagactctgcatgcatcaattgattcatactggtgagaaaccctacaagtgtaattgttgcggcaaggccttccaattcaagcactccctgacaatccacggccgaatacacacgggcgagaaaccttacgagtgtgaggaatgtgggaaggcttttagcggatcatcagatctcaccaagcacattaggatccataccggcgagcgcccttacgaatgttcaaaatgtggtcgggccttctcacggtcttccgatctcagtaagcataaaaggatccacacgcgcgagaaacattatggatgtcctcagtgtggaaaggacttcagtataaaggcagagctcactaagcatagaaggatacacaccgaggagaaacgctacagatgcgaagagtgcggaaaggcctttcggcacaattgcaagcgaagggcccacgagagggaacacaccggtgagaaaccttaccaatgtcgcgattgcggaaagactttccaggacaaacattgcttaaccattcatcagaggatccacaccggtgagaaaccatataaatgtctggaatgtgggaaagccttctctgggaaatcaaatctgactaatcataggaggatacacaccggcgagaaaccacacaaatgcgaggtgtgcgggatggcctttcatcattccagcgtgctacgccagcataagcgcatccataccggtgagaagccctatacatgctcagaatgtggaactagttttaggcaaggtagcgcactgataggtcataaaagagtgcacacaggggagaagccttatgaatgcgaagagtgcggtaaggcctttcgggtgagttccaacctcaccggacacaagaaacgcaaacaccaggtttggtctacacacgaattggatggatcgagaaaaagtctatcacccgttactgtgtctcagacgtcagttgtgagcattctgacatctgcctag

SEQ ID NO: 23929 - DNA, 2001 bp, Artificial Sequence
  derived and/or modified sequence
atgcaggaggtggtgctgctggacgagagcagcggcccccccagccagctgctgtggactagacaggacacacagttgccacaggaatcggccctcctaccggccccctatcctgcttttaccaaagacggcagccaaggaaacctcccacaggctgacattactctgatgtcccaggctcaagaatctgtcacttttgaggacgtggcagtcaacttcactaatcgggaatggcagtgcttgacctacgcacagcgccacctgtataaggacgttatgctggagaattacggtaacatggtctctttgggttttccctttccaaaacccccactcatatcccacctggagagagaagtggacccttgcgtgcaggatccccaggacagggaatcattaagttgtagttacccggtttccgctgacaagatgtggccagaaaatgagaaggcctcctcacagcaggagattttcgagaacggcgaggcctattggatgaagttcaactctttgctgaaagtcgactccagagatcccaaggtgcgtgaggtgtgcgtgcaagacgtgaagcttgaaaaccaatgggaaacctcaattcgcgagaagttgcgggaggaaaaagagggcagcgaagaggtgacatgcaagaagggcaagaatcaaaaggttttgagcaaaaatctgaaccccaattcaaagcattcacagtgtaacaaagtgctgatcgctcaaaagctccacgagtgcgcacgttgtgggaagaatttttcttggcattccgacctcatcctgcacgaacaaatacattccggagaaaagccccacgtttgtaatgaatgcggcaaggcatttaaaactagaaatcagctgtctatgcatcgaatcattcacactggcgagaagccctttaattgcacacagtgcggtaaggcattcaacagcaggtctgctttatgtagacacaagaagactcattctggggaaaagccacatgaatgtagagactgtggaaaggccttcaagacacgaaaccggctgtgtatgcaccagttaattcacacaggcgaaaaaccttataagtgcaattgctgtggcaaggcttttcaattcaaacacagtctgaccatccacggccgcattcatactggggaaaaaccatacgagtgtgaagagtgcgggaaggcattcagcggctcctccgacctgacaaagcatattagaatccacacaggtgaacgcccttacgagtgtagcaagtgcgggagagcttttagtagaagtagcgacttaagtaaacacaagcggattcacacccgcgagaaacactatggatgcccacagtgcggcaaggacttttctattaaggccgagctgaccaaacaccgtcggatccataccgaggaaaagcggtatcggtgcgaagagtgcgggaaggccttcaggcacaactgtaagcgtcgggcccatgaacgggaacacacgggcgagaagccatatcagtgtcgggactgtggcaaaacatttcaggataagcactgcctgaccatccatcaacgcatccataccggtgaaaaaccttacaagtgcttggagtgcggtaaggctttcagcggcaaatcaaacctcacgaaccacagacgcatccatacgggcgagaagccccacaagtgtgaggtctgcggaatggcgtttcaccactcttccgtgttgcgacaacacaagcggatccataccggcgaaaagccctacacctgtagtgagtgcggtacgtcatttcgacagggatcagcgctaattgggcacaagagggtccacaccggagaaaagccatacgaatgcgaggagtgcgggaaagccttcagggtgtccagcaatctgacgggccataaaaagcgtaaacatcaggtgtggtcaacccacgagctggacggttccaggaagagtctatcacccgtaaccgttagccaaacaagcgtagtgtcaatccttactagcgcttag

SEQ ID NO: 23930 - DNA, 2001 bp, Artificial Sequence
  derived and/or modified sequence
atgcaggaggtggtgctgctggacgagagcagcggcccccccagccagctgctttggacaaggcaagacacacagttgcctcaagaaagtgccctccttcccgccccttatcctgccttcacaaaagacggttcacagggtaatctccctcaagccgatattacccttatgtcccaggcacaggagagcgtgacctttgaggacgtggccgtcaattttacgaatcgcgagtggcaatgccttacctatgcccagcgtcacttgtataaggacgtaatgcttgagaattacgggaacatggtctcgctgggatttccttttcccaaaccgccactgataagccacctggaacgcgaggtagacccatgcgtccaggatcctcaggaccgcgagtccctgtcctgttcttaccctgtgtctgctgacaagatgtggcctgaaaatgaaaaagcctcaagccagcaggaaattttcgaaaatggagaggcctattggatgaaattcaactccctgctaaaggtcgactccagagatcctaaagtgagagaggtctgcgtccaagacgtcaagctggagaaccagtgggaaacttcaatcagagagaagcttagagaggagaaagaaggtagtgaggaagttacatgtaaaaaagggaagaatcagaaagtgttgagcaaaaatcttaatcccaatagcaaacacagtcagtgtaataaagtcctcatcgctcaaaaacttcatgagtgcgccagatgcgggaaaaacttcagctggcattcggatctgatactccacgagcagatccacagcggcgaaaagccgcacgtgtgtaacgagtgtggaaaagcttttaagacccgcaatcaactttctatgcatagaatcatacatactggggaaaaaccttttaactgcactcagtgtggcaaagccttcaactccagatccgccctgtgcagacacaagaaaacccattccggcgagaagccccacgagtgtagggattgtggcaaagcatttaagacacgcaacagactgtgcatgcatcaactcatccatacaggagagaagccttacaagtgcaattgttgtggtaaggcctttcagttcaaacattcactgacaatacacggacgcatccatacaggagagaagccctatgaatgtgaagaatgcggtaaagctttctctggctctagcgaccttaccaaacacataaggatacacaccggggaaagaccctatgagtgctcaaaatgtggccgggctttttccaggagtagtgacctgagtaagcacaagcggatacataccagagaaaaacactatggatgtccccagtgcggcaaggatttttcaatcaaagctgagttgacaaagcacaggagaatccacactgaggagaaacgttaccgttgtgaagaatgcggtaaagctttccgtcataactgcaagaggcgggcccacgaaagggagcatacaggagagaagccatatcaatgtagggattgtggcaagacctttcaggataaacattgcctcaccatccatcagcggatccataccggtgagaagccttataagtgtctggaatgtggaaaggcctttagtggtaaatccaaccttaccaaccaccggcgcatacacactggtgagaagccacacaagtgtgaagtctgtggaatggcctttcaccactctagtgtgctgcggcagcataaaaggatccataccggcgagaagccttacacatgctcggagtgcgggacttcctttcgccagggaagtgccttgatcggccacaagcgagtacacaccggggaaaaaccttacgagtgtgaagagtgtgggaaggcctttcgggtgagcagcaatttgacgggtcataagaaacggaagcaccaagtgtggtcaacccacgagttggacggaagtcgtaagtcattgtcaccagttactgtgagtcagacctctgtggtgagcattctaacctctgcctag

SEQ ID NO: 23931 - DNA, 2001 bp, Artificial Sequence
  derived and/or modified sequence
atgcaggaggtggtgctgctggacgagagcagcggcccccccagccaattattgtggaccaggcaggatactcagctgccccaggagagcgccctactgccggccccctatcccgcttttacaaaagacggcagccagggcaatctcccgcaggcagacattacactgatgagtcaagcccaggaaagcgttacgtttgaggacgtggccgtgaactttaccaaccgtgagtggcagtgtctgacttacgctcagagacatctttataaagacgtgatgctggagaattacggaaacatggtgtcccttggctttccattcccaaagcctccgctgattagtcatcttgagcgtgaggtggatccctgtgtacaggacccccaggatcgcgagagtctaagctgctcctaccctgtgtcggcagacaagatgtggcctgagaatgagaaagccagtagccagcaggagatctttgagaatggggaagcctactggatgaaatttaattctcttctcaaggtggattcacgcgatccgaaggtgcgtgaggtctgtgtgcaagatgtcaagctagagaaccaatgggagacctctataagagagaagcttcgcgaagagaaagagggatctgaggaggtgacttgcaagaaaggcaaaaatcaaaaggtcctctccaagaatttaaatccaaatagcaaacactctcagtgtaataaagttctcatcgcgcaaaagctgcacgagtgcgcacgctgtggaaagaatttctcctggcactctgatctgattctgcatgaacaaattcactcgggcgaaaagcctcatgtttgtaatgagtgcggaaaggcatttaaaacaaggaaccagctgtccatgcatcggatcatccacaccggggagaagccatttaattgcactcaatgcggaaaggcgttcaactcccggagcgcgctctgcagacataagaagactcactccggagaaaaaccacatgaatgcagagactgcgggaaagcattcaaaaccagaaacagattgtgtatgcaccagctgatccacacgggcgagaagccatacaagtgtaactgctgcggcaaggcttttcaattcaaacattctctcactattcacggcaggatccacacaggggagaaaccctatgagtgcgaagagtgtggtaaggctttttctgggtcatcggatcttacaaagcacattcggatacacactggagagagaccgtatgaatgtagcaaatgtggacgggcattttcacggtcatcagacctctcgaagcacaaacgaatacacaccagagaaaaacattatggctgtcctcaatgcgggaaggacttctctattaaggccgaactgaccaagcacagacgcatccatacggaggaaaagcgctataggtgcgaggaatgcggtaaggctttcagacataattgcaaacgcagagcccatgagagggagcataccggagagaaaccttaccagtgtcgggactgtggaaaaacatttcaagataagcattgtctgaccatccatcaaaggatccatactggagaaaagccctataaatgcctggaatgcggcaaggcttttagcgggaagtccaatctcacgaaccacaggcggatccacaccggcgagaaaccccacaaatgcgaagtctgcggtatggcgtttcaccacagcagtgtgctgcgtcaacataaaagaatccatactggcgaaaagccctacacatgttcagaatgtggtacatcctttcgccagggaagcgccctaattggacacaagagagtgcacacaggcgagaagccatacgaatgtgaagagtgtggtaaggctttccgggtgagctcaaacctcactggtcacaagaaacggaaacaccaagtatggagtacgcacgaacttgacggcagcagaaaatctctgtctccagttactgtgtcccagacctcagtcgtgagcatcctgacctccgcctag

SEQ ID NO: 23932 - DNA, 2001 bp, Artificial Sequence
  derived and/or modified sequence
atgcaggaggtggtgctgctggacgagagcagcggcccccccagccaactcctctggaccaggcaggatacacagctgccacaggagagcgcgttgctgcccgctccatatcccgccttcactaaggacgggagtcagggcaatctgccacaggccgacataacactgatgagtcaggcacaggagtcagtgaccttcgaagacgtggcagtcaatttcaccaaccgcgaatggcagtgcctgacgtacgctcagaggcacctctacaaggatgtcatgctagagaactatgggaatatggtttctctcggcttcccatttccaaaaccaccactgataagtcatctcgaacgcgaagtcgatccgtgtgttcaggatccacaggaccgggagtcccttagttgctcctatcccgtcagtgccgacaagatgtggcctgagaacgaaaaagcaagctcgcaacaggaaatttttgaaaacggcgaagcgtattggatgaagttcaactctctgttgaaggtagactccagagatcccaaggtgcgggaagtgtgcgtgcaggacgtgaagctagagaaccagtgggaaactagtattagagagaagctacgcgaagagaaagagggctcagaggaggttacctgcaagaaagggaaaaatcagaaagtgctgtcgaagaacctcaatcccaattccaaacattcgcagtgtaataaagtgctcattgcgcagaaactccatgagtgtgctcgctgtgggaagaacttctcctggcactctgatctgatactgcacgaacagatacattccggcgagaagccgcacgtgtgcaatgagtgcggaaaagcctttaaaactcgcaaccagctctcaatgcacagaattatccacaccggcgagaagccattcaattgtacacagtgcggaaaggctttcaattctcgctctgctctctgccgccacaaaaagacccattcaggggagaagcctcatgagtgtcgggactgtggaaaggcctttaagactcgtaatcggctgtgtatgcaccagctgattcacacaggcgagaagccctacaaatgtaactgttgtggaaaggcgttccagttcaagcattctctcactattcacggtagaattcacactggcgaaaagccatatgaatgtgaagaatgcggaaaggccttcagtggatctagtgatctgacgaaacacatcaggattcataccggcgaaaggccatatgaatgtagcaaatgtggcagggctttctccaggagtagcgacctgtcaaaacacaaacggattcacaccagggaaaagcactacggatgcccacaatgcggcaaagatttctctatcaaggcagagcttacaaagcacagacggattcacacagaagagaagcggtaccggtgtgaagaatgtgggaaagctttccgccataactgtaagcggcgcgctcatgagcgtgaacacactggcgaaaagccttaccagtgccgcgattgtggaaaaacattccaagacaagcattgtctgactatccaccagcgcatccatacaggagaaaaaccttataagtgccttgagtgcgggaaggccttcagcggaaagtccaacttaaccaaccatcggaggatacatacgggcgaaaagcctcataaatgtgaagtatgtggcatggccttccatcattctagcgtcttacggcagcacaagcgcatccacaccggggaaaagccctacacatgcagcgagtgcggcacctcctttcgacaagggagcgccttgatcggccataaaagggtgcacacaggagagaagccttacgagtgcgaggaatgtggcaaggcatttcgggtcagctcaaatctaaccggtcataagaagaggaagcaccaagtctggagtactcacgagttagatgggagccgcaagtccctctctcctgtgaccgtgtcccagacttccgttgtttctatcctcacctcagcatag

SEQ ID NO: 23933 - DNA, 1725 bp, Artificial Sequence
  derived and/or modified sequence
atgctggagaactacggcaacatggtgagcctgggcttccccttccccaaacccccactgatttcccacctggagcgggaggttgacccatgtgtccaagatcctcaggacagagagtctctcagttgctcttatcctgtgtctgccgataaaatgtggccagaaaatgaaaaggcgagttctcaacaggagatttttgagaacggagaggcctactggatgaagtttaacagtctgttaaaagtcgactctagagacccaaaggttagagaggtgtgcgtgcaggacgtgaaattggagaaccagtgggaaacttcaatcagagagaaattaagggaggagaaagagggatcagaagaagttacttgcaaaaagggcaagaaccagaaagtgctgagcaagaacctcaacccaaattcaaaacactcacagtgcaataaggtgctgatcgcgcagaaactacacgagtgtgcaaggtgcggaaagaacttttcttggcacagtgacctgattttgcacgaacagatccattccggcgagaagccgcacgtgtgcaacgagtgtggaaaagccttcaagaccagaaaccaattgtctatgcatcgaatcatacacacaggtgaaaagccattcaactgtacacagtgcggcaaggcattcaattctcgctcggcattgtgcaggcacaagaagactcactccggggaaaagcctcatgagtgtagagattgtggaaaagcattcaaaactagaaatcggctctgcatgcaccaactgattcataccggagagaagccctacaagtgcaactgctgcggcaaggcttttcagtttaagcattccttaacaatccatggacggatccacaccggcgagaagccttatgaatgcgaggaatgcggcaaggctttttctggttcttctgaccttacaaagcacatccggattcacaccggcgaaaggccctatgagtgctccaagtgcggcagagctttctccaggtcttccgatctgagtaagcataaaaggatccatactcgcgaaaaacactatggctgcccccagtgtggcaaggacttttcgatcaaggctgaactgaccaagcatagaagaattcacacagaggagaagcggtatagatgcgaagagtgcggcaaagcatttagacataattgcaagaggagagctcatgaaagagaacacaccggtgaaaaaccttatcagtgtcgcgactgcgggaagaccttccaagataagcactgcctcaccattcaccagagaattcatacaggagagaagccttacaaatgtcttgagtgcggcaaggccttttctggaaaatctaatcttaccaatcacagaagaatacacaccggcgagaaacctcataagtgcgaggtctgcggaatggcatttcaccatagctcagtgctgcggcagcacaagaggattcatactggggagaaaccttatacctgctctgagtgtggtaccagttttaggcaaggctccgctttaatcgggcataagagggttcacaccggggagaagccctatgagtgcgaagaatgtgggaaggcctttcgagtgagctctaatctcacgggccataaaaaaaggaaacatcaggtatggtccacacacgagttggatggttccaggaagtctctttcgccagttaccgtaagtcagactagtgttgtgagtattctcacctcagcatag

SEQ ID NO: 23934 - DNA, 1725 bp, Artificial Sequence
  derived and/or modified sequence
atgctggagaactacggcaacatggtgagcctgggcttccccttccccaagccccctcttatttcacaccttgaacgcgaggtagacccttgcgtgcaagaccctcaggacagagaatctttgagttgtagctaccccgtgtctgccgataagatgtggcccgaaaacgagaaggctagcagtcaacaggagatattcgaaaacggtgaggcttattggatgaaatttaatagcctgctaaaggtcgattctcgagatccaaaggtgcgggaggtctgcgtgcaggatgtgaagctggagaaccagtgggagacctcaatcagagaaaaattaagggaggaaaaggaagggtctgaggaggttacttgcaagaaaggtaaaaatcagaaggtcctgtcaaaaaatttgaatccaaacagcaaacatagccagtgtaataaggtgctaatcgctcagaagctgcatgagtgtgctcgctgcggcaagaatttctcctggcactcagacttgatcctgcatgagcagatacacagcggcgagaagccgcacgtttgcaacgagtgtggcaaagccttcaagacaaggaatcaactctctatgcatcgcatcatccacaccggggaaaaacccttcaactgtacacagtgcggaaaggcattcaactctagatccgccctctgtcgtcataaaaaaactcatagcggagaaaagccacacgagtgccgtgactgcgggaaggcatttaaaacgagaaatcggctgtgtatgcaccagctcattcataccggtgagaaaccttacaagtgcaactgctgcgggaaagcctttcagtttaagcactctcttacaattcacggaaggattcacactggcgagaagccctatgaatgcgaggagtgcggcaaagctttttcaggcagctccgacctcacaaaacacatcagaattcatacgggcgagaggccgtacgaatgcagcaagtgcggtcgggcgtttagtcgctcctcagacctgagcaagcataaaagaatccacactcgagagaagcattacgggtgcccgcaatgtgggaaagatttcagcatcaaggccgagctaaccaagcaccggagaatccacactgaggaaaaacggtataggtgcgaggagtgcggaaaggccttcagacataactgcaaacggagggcccatgagcgggaacatacaggcgagaaaccttaccagtgccgcgattgcggcaagacatttcaagacaaacactgcttgacaatccaccagaggattcacacaggtgagaaaccttataagtgcttggagtgtgggaaggccttctcaggtaaaagcaacctcacgaatcataggcgtatccacacaggtgagaaaccccacaaatgtgaagtatgtggcatggccttccatcacagttcggtgctgcggcaacataaacgtattcacaccggcgaaaagccctatacttgctcagagtgcggaaccagtttccggcaagggtctgccctgatcggccacaagcgcgttcacacaggcgaaaaaccatacgagtgcgaggagtgcggcaaggcctttcgggtatccagcaatctgacgggtcacaagaaacgaaagcatcaggtttggtcgactcatgagctcgatggttcgaggaagagcctctcacccgtgacggtctcccagacatcagtggtttctatcctgacctctgcctag

SEQ ID NO: 23935 - DNA, 1725 bp, Artificial Sequence
  derived and/or modified sequence
atgctggagaactacggcaacatggtgagcctgggcttccccttccccaagccaccactgatctctcatctagagcgcgaagtggatccatgcgtgcaggaccctcaagaccgggagtcgctcagctgcagttaccctgtaagcgctgacaaaatgtggcccgaaaacgagaaggcatcttcccagcaagaaatttttgagaacggcgaggcctactggatgaagttcaattcactgctcaaggtcgacagtcgtgatcccaaagtccgggaagtctgtgtccaagatgtgaagcttgagaatcagtgggagacatccatccgagaaaaactgagggaagagaaagagggaagcgaggaggtgacgtgcaagaagggtaaaaaccagaaggtgctctcaaaaaacttaaatcctaactcaaaacattcccagtgtaacaaggtgctgattgctcagaagctgcacgaatgtgcccggtgcggaaagaattttagttggcattctgatctcatcctacacgagcagatacatagtggcgaaaaaccacacgtgtgcaacgagtgtggaaaggcatttaagacacggaaccagctcagtatgcaccgcattatccataccggagagaagccctttaattgtacacaatgcggcaaggccttcaattctagatcagctctttgtcgtcacaaaaagacccattcaggtgagaaacctcatgagtgtcgagactgtgggaaggcctttaagacccgcaatcggctgtgcatgcatcagctcatacacactggggaaaaaccctacaaatgcaattgttgtgggaaggctttccagtttaagcatagtttgacaatacacggcaggatccacacaggtgaaaagccttacgagtgtgaggagtgtggtaaagctttttccgggtccagcgacctgactaaacatatcagaatccataccggtgaacgaccgtatgaatgtagcaagtgtgggagagcctttagccggtctagcgatctgagcaagcataaacgcattcatacaagggaaaagcattacggatgtccccagtgtgggaaggatttctccataaaggcagagctgaccaaacaccgaagaattcacactgaggaaaaacgctaccgctgcgaagagtgcggaaaggcttttcggcacaattgtaaaagaagagcccatgaacgcgagcacacgggtgaaaagccttatcagtgtcgcgactgcggcaaaacttttcaggacaaacactgtctcacgatccaccagagaatccataccggcgaaaaaccatacaaatgcctcgaatgcggtaaggccttttctggtaaaagcaacttgactaaccataggcgaatccacaccggcgagaaaccccataaatgcgaggtatgcggaatggcgttccaccacagttccgtgctgaggcagcataaaagaattcacaccggggaaaagccctacacatgcagcgagtgcgggactagtttccgtcaaggatctgccctcataggccacaagcgcgtccataccggagagaaaccatatgaatgtgaggagtgtgggaaggctttccgcgttagttcgaatttgacaggccacaagaaaagaaagcaccaagtgtggagtacacacgagctcgatggctctcggaaatcactgtctccagttaccgtttcccaaacctcagttgtgtccattttgacatctgcatag

SEQ ID NO: 23936 - DNA, 1725 bp, Artificial Sequence
  derived and/or modified sequence
atgctggagaactacggcaacatggtgagcctgggcttccccttcccaaagccacctctgatctcacatcttgaaagagaagtggatccttgtgtccaggacccgcaggatagggaatcactttcgtgttcttatcctgttagcgctgataagatgtggccagagaacgagaaggctagtagtcagcaggagatttttgagaatggggaagcttactggatgaagtttaactctctgcttaaagttgatagccgcgacccaaaggtgagggaggtatgcgtgcaggacgtgaagcttgagaatcagtgggagacttcaatccgagaaaagctgcgtgaggaaaaggaagggagcgaggaagtaacttgtaagaaagggaaaaaccaaaaggtgctttctaagaacttgaaccccaacagcaaacattctcagtgcaacaaggtattgatcgcccagaagcttcatgagtgtgctcgctgtgggaaaaactttagttggcacagcgaccttattcttcacgagcagattcatagtggagaaaagccacacgtctgtaatgagtgtggaaaagcattcaaaactcggaatcagctgtcgatgcaccgcataattcacacaggtgagaagccattcaattgcacccagtgtggtaaggcttttaactctcgaagtgccttgtgcagacacaaaaagactcactcaggggagaaacctcatgaatgtcgagactgcggtaaggccttcaaaactagaaaccggctgtgcatgcaccagctgattcatacaggggaaaaaccgtacaaatgtaactgctgcggcaaggccttccaatttaagcattctctgaccatccatggacgtatccacactggagaaaagccctacgagtgcgaggaatgtgggaaggcgttcagtggtagttccgatctgacaaaacacatccgcatacacacaggcgaaaggccctacgagtgctccaaatgtggaagagcgtttagtaggtcatcagatctcagcaagcacaaacgcatccacacacgagaaaagcactacggttgtccccagtgcggaaaagacttctcaattaaggccgagcttaccaaacaccgcagaatacacactgaagaaaaacgatacaggtgcgaggagtgcggaaaagcattcaggcacaattgtaaaagacgggctcatgaacgcgagcacactggagagaaaccttatcaatgtcgggactgcggaaagacatttcaggataaacactgtctgacaattcatcagaggatacataccggagaaaagccctataaatgcttggagtgtggaaaagcctttagcgggaagtctaatctcaccaatcatcggagaatacacacaggcgagaaaccccacaaatgtgaggtctgcggcatggcctttcaccactctagtgtgttaagacaacacaaacgcatccacaccggagagaagccctatacctgttctgagtgtggcacatctttcaggcagggctccgccctcatcggccacaagagggtgcataccggcgaaaaaccctatgagtgcgaggagtgcggcaaggccttccgcgtgagttccaatttaaccggacataagaagcggaagcaccaggtgtggtcaacccacgagttggacggaagcaggaagtctctcagtcctgttacagtctctcagaccagcgtggtgtccatactgacttccgcatag

SEQ ID NO: 23937 - DNA, 1725 bp, Artificial Sequence
  derived and/or modified sequence
atgctggagaactacggcaacatggtgagcctgggcttccccttcccaaaaccacccctgatttcacaccttgaaagggaagtggacccctgtgtgcaagacccccaggatcgcgaaagcttgtcatgcagctatcccgtgtcagccgacaagatgtggcctgaaaatgagaaagcgtcaagtcagcaggagatcttcgaaaatggggaagcttattggatgaagttcaacagtctcctcaaagtggattcccgagatcccaaggttcgggaggtgtgtgtccaggatgttaagctggaaaatcagtgggaaacctccatacgtgagaaactccgtgaggaaaaggaagggtccgaagaagtcacatgcaaaaaaggtaaaaatcagaaagttctctctaaaaatctcaaccccaatagcaagcattcccagtgcaataaggtacttatcgcccagaagctgcacgagtgcgcccggtgtggcaaaaactttagctggcattcagatctcattcttcacgaacagatacacagcggagaaaagccccatgtttgcaacgagtgtgggaaggcgtttaaaactcggaaccagttgtcaatgcatcggataatccatacaggagagaaaccatttaactgtacacaatgcggaaaggcatttaattcccgctccgcgctgtgtcgccataagaaaactcacagcggagagaagccccatgaatgtcgggattgtggcaaagcattcaagactcggaacaggctctgtatgcaccaactcattcataccggcgagaagccctacaagtgcaactgctgcggtaaggccttccaatttaagcacagcttgacaattcatgggcgaatccacacgggtgagaaaccgtatgagtgtgaggagtgcggcaaggcttttagcggaagctcagatcttacaaagcacatccgtatccataccggggaaaggccatacgagtgtagtaaatgcggacgcgcgtttagcagatcttctgacttgtcaaaacataagagaatccacacccgggaaaaacactacggctgcccacaatgtggaaaggatttctcaatcaaggccgagctcaccaagcataggcgtattcatacagaagaaaaaaggtatcgatgtgaagagtgcggcaaagcatttaggcacaactgcaagcgacgggctcatgagcgagagcacaccggggaaaagccctatcagtgccgggactgtggaaagacgtttcaagacaagcattgtctgacaatccaccaacggattcatacaggagaaaaaccctacaagtgtctcgagtgcggcaaagccttctccgggaaatctaacctgacaaatcaccgacgtattcacacaggagagaagcctcacaagtgcgaggtgtgcgggatggcctttcaccattcatccgtactgcgccagcataagagaatccacacaggtgagaagccatacacatgctcggaatgcggaacttctttcagacagggcagcgccttgataggacataaaagagtgcacactggggagaagccatatgagtgcgaggagtgcggaaaagcattcagggtttcgagcaacttgacaggccacaagaagcggaaacaccaggtctggtctacccacgagctagacggcagcagaaagtcgttatcaccagtgaccgtgagccaaacatctgtcgtctcgatcctcacttcagcctag

SEQ ID NO: 23938 - DNA, 1725 bp, Artificial Sequence
  derived and/or modified sequence
atgctggagaactacggcaacatggtgagcctgggcttccccttcccgaaaccgccactgatatctcacctggagagagaagttgatccttgtgtacaggaccctcaggatcgggaatccctcagttgctcctatcccgtgtctgcagacaagatgtggcccgaaaacgaaaaggcctcatctcagcaagagatttttgagaacggcgaggcctactggatgaaatttaattcgctcctcaaagttgacagcagggatcctaaggtccgggaggtctgtgtgcaggacgtgaagctggagaaccagtgggagacttccattcgcgagaaactgcgggaggaaaaggaggggagtgaagaagtcacttgtaagaaagggaagaaccaaaaggtgctgtctaagaatctgaatcctaattccaaacattcccagtgcaataaagtgctaatcgctcagaagctacacgagtgtgctcggtgcgggaaaaacttcagctggcacagcgatctaatcctccacgaacagattcattctggcgagaagccccatgtctgcaatgagtgtgggaaagcctttaagacccggaatcagttgagcatgcaccgaatcatacatacaggcgagaaaccttttaattgcacacagtgcggaaaagcttttaattctcggtctgctttgtgtagacataagaaaacgcactctggcgaaaagccccatgagtgccgcgactgcggaaaggcctttaagacgcgcaacaggttgtgcatgcatcagctgatccacactggtgaaaaaccctacaaatgcaactgttgcggcaaagccttccaattcaaacatagcttgacaattcatggacggatccataccggcgagaagccatatgagtgtgaggaatgtggcaaagcattctcgggatcttccgatctcaccaaacatattaggattcacactggggagcgtccttacgaatgtagcaagtgtggcagggccttctcccggtctagcgatctgtctaaacataagcgaatccatactagagagaagcactacggttgcccccaatgtggtaaagatttttctataaaagctgaactcactaaacatcgacgtatccatactgaggagaagagatatagatgcgaggagtgcgggaaggcttttagacacaactgcaagagaagagcacatgagagggagcacacaggtgagaaaccataccagtgtcgagattgtggtaaaacattccaagacaagcactgcctgacaattcatcagcgtattcacaccggggagaagccttataagtgtctggagtgtggtaaagcattctcagggaaatctaacttaactaatcacagacggattcacaccggagagaaacctcacaagtgcgaagtctgtgggatggcttttcatcacagctccgtgttacggcaacacaagagaatacataccggagaaaaaccttacacctgttctgaatgtgggacctctttcaggcagggctcagctctgattggtcacaaaagggtacatacaggcgagaaaccttacgagtgtgaagagtgtgggaaggcctttcgcgtgagtagcaacttgacagggcataagaaaagaaaacaccaagtctggtctactcacgagctggacgggagcagaaaaagtctctccccagtaaccgtgtctcagacctctgtcgtgtccattctgacttcagcatag

SEQ ID NO: 23939 - DNA, 2001 bp, Artificial Sequence
  derived and/or modified sequence
atgcaggaggtcgtgttactcgacgagtcgtctggcccaccgtcacaactgctgtggacgcgccaggacacacaactgccccaggagtccgctcttctccccgctccctatcccgcattcaccaaagatggtagccagggaaatctcccccaggccgacattacgctaatgtctcaggctcaggaaagcgttacgttcgaggatgttgcagttaacttcaccaaccgagagtggcagtgccttacctacgcacagaggcatttatacaaagacgtaatgttagagaactacgggaatatggtttctttggggttcccttttccaaagccacccctgatttctcacctcgaaagggaagtggatccctgtgttcaggatccacaggatagagaatccttgtcctgcagttatcctgttagcgctgataagatgtggcctgaaaacgaaaaggcctcgtcccagcaagaaattttcgaaaatggggaggcgtattggatgaagttcaactccttgttgaaggttgattcgagggatcctaaagtgcgcgaagtctgtgtgcaagatgtgaagctggagaatcagtgggaaaccagcattcgagaaaaactgcgtgaagaaaaagaaggctccgaagaggtaacctgtaagaaaggtaagaaccagaaggtcctgagcaaaaacctgaaccccaactcgaaacattcacaatgcaacaaggtgctgatcgctcagaaactgcacgaatgtgctcgttgtgggaagaactttagctggcactcagatctaattctgcatgagcaaattcattccggagagaagccccacgtgtgcaatgagtgcggtaaggcctttaaaactagaaaccaactctccatgcatcgaatcatccatactggggaaaagccttttaactgcacacagtgtggcaaggcattcaatagtcggagcgcgctgtgccgacacaaaaagacacactcaggagaaaaaccccatgagtgtagggactgcggcaaagcctttaagacccgaaacagattgtgtatgcaccagctgatccatacaggggaaaagccatacaaatgtaattgttgtggcaaagcatttcagtttaagcatagtctcacgatccacggcagaatccacaccggagagaagccatacgaatgtgaagagtgtggcaaagccttctcaggctcctccgacttgacaaagcatatccgaatccacactggtgaacgaccctatgagtgtagcaaatgtgggcgagccttctcacgcagcagcgacctgtctaagcacaaacggattcatactcgcgagaagcactacggatgccctcaatgtggcaaggacttctcaatcaaggccgaactcaccaaacaccgcagaatccacaccgaagagaaaagatacaggtgcgaggaatgcggcaaagccttccgtcataattgtaagagaagagctcatgagcgcgagcatactggggagaagccttaccaatgccgagactgcggaaaaacattccaggataaacattgtctgacaatccaccagcggatccacactggtgaaaagccatataagtgcctcgaatgcgggaaagctttcagtgggaaatctaatctgaccaatcacagacgtatacatacgggcgaaaagcctcacaagtgcgaggtctgtgggatggccttccaccactcatctgtgctgcgccagcataagcggatccacaccggagaaaagccttacacatgttccgaatgcggcacctccttccggcaaggaagcgcccttattgggcacaagagggttcatacaggcgaaaagccctatgaatgcgaagaatgcgggaaggcttttagagtgagctcgaatctcaccggccataagaaaaggaaacaccaggtgtggagcacccacgaattagatggcagcaggaaatccttgagccccgtcactgtatcccagactagcgtcgttagcattctcacatccgcatag

SEQ ID NO: 23940 - DNA, 2001 bp, Artificial Sequence
  derived and/or modified sequence
atgcaggaagtggtgttactggacgaatcctctgggcctccatcacagctgctgtggacccgacaggacactcagctccctcaggagtctgccctcctgccagccccttaccctgcctttaccaaggacggctctcagggcaaccttccccaggccgatattacattaatgagccaagcccaggagtctgttactttcgaagatgtcgctgtgaactttacaaaccgtgaatggcaatgtttaacctatgcccaacggcacctgtacaaggacgtcatgctcgagaattacgggaatatggtctccctcggctttccattcccgaagccacctctcataagccatttagaaagagaagtagatccgtgtgttcaggatccacaagaccgcgaatcactgagctgttcgtaccctgtctcagcggacaaaatgtggcctgagaatgagaaggctagttcccagcaagagatctttgagaatggtgaggcctactggatgaagtttaatagcctcctgaaggtggattctcgggacccaaaggtgagagaggtctgcgtccaagatgtgaaactggaaaaccaatgggagacctctattcgagagaagctccgggaagaaaaagagggtagcgaagaagttacatgtaagaagggaaaaaaccagaaggtgctcagcaaaaacctcaatccgaactccaaacacagtcagtgtaacaaagtgcttattgctcagaaattacatgagtgcgcccgatgcggcaaaaacttcagttggcattctgatctgattttgcacgaacagatacatagtggtgaaaagccacacgtctgtaatgaatgtggtaaagcgttcaaaacccggaaccagttatccatgcaccgtattatacacaccggcgaaaagccatttaactgcacccaatgtgggaaggccttcaactcgaggagtgcgttatgccgtcacaagaaaacacacagcggcgagaaaccccacgaatgtcgcgattgcgggaaagctttcaagacccgaaaccgtctgtgtatgcaccagctgattcacaccggtgagaaaccctacaagtgtaactgttgcggaaaagcctttcagtttaaacattcgcttactattcacggcaggatccatactggtgagaaaccctatgagtgcgaggaatgtggtaaggccttctccggctcatctgatctgactaagcatatccggattcacaccggagaacgaccttatgaatgctcgaaatgtggcagagccttctctcgttccagtgatcttagcaagcacaaacgaatccatactagggaaaaacactacggctgcccacagtgcggaaaggatttctctattaaagcggaactgacaaagcatcggagaatccacactgaggagaagcgttaccgatgcgaagaatgcggcaaggccttccggcacaattgtaagcgtcgggcacacgagagagaacacacaggcgaaaaaccttaccagtgcagggactgcggaaagacctttcaggataaacactgtttgaccattcaccagcgcatccataccggagagaagccttacaagtgcttggaatgtgggaaggcgttttccggcaaaagtaacttgacaaatcaccgccgaattcacactggtgaaaaaccacacaagtgcgaggtctgcggcatggcgttccatcacagctccgtgctccgacaacataaaaggattcataccggtgagaaaccgtacacttgcagcgagtgcgggacctctttcaggcaaggatctgccctgatagggcacaagagggtgcacaccggagagaagccatacgaatgcgaagagtgtgggaaagcattcagagtttccagcaatctcacaggacataagaagcgcaagcaccaagtgtggtccacccacgaactggatggcagccgaaagtctcttagccccgtgacagtgtcacagactagcgtcgtgagcatcttgactagcgcatag

SEQ ID NO: 23941 - DNA, 2001 bp, Artificial Sequence
  derived and/or modified sequence
atgcaggaggtggtgctgttggacgaaagttccggacccccttcccagctgttgtggactcggcaggatacccagttgccccaagaaagcgccctgttgccagccccatatcccgcattcacgaaggacggaagtcagggcaatctcccacaggccgacatcaccttgatgtcacaggcccaggaatctgtgactttcgaagatgtggccgtcaattttacaaatcgcgaatggcaatgcttaacatatgcacagaggcacctgtacaaagatgtgatgttggaaaactatggcaacatggtctcccttggcttccctttccctaaaccgccacttattagccacctggagcgagaagtggatccttgtgtccaggacccacaggatcgcgagtcactttcatgtagctacccagtgtccgccgacaagatgtggcctgaaaacgagaaggcatcatcccagcaggagattttcgagaatggggaggcctactggatgaagttcaatagtcttttgaaagttgactcccgagacccaaaggtgagggaagtttgtgttcaggacgttaaactggagaaccaatgggaaaccagcattcgcgagaagttgagggaggaaaaggaaggcagcgaagaagtgacctgtaaaaagggcaagaaccagaaggtcctatccaagaatcttaaccccaactctaagcacagtcagtgcaacaaagttctgattgcccagaagttacatgaatgtgcccgatgtggtaagaatttttcctggcactctgacctgattcttcatgagcagattcacagcggcgagaagcctcatgtttgtaatgagtgcggaaaggccttcaagaccagaaatcaattatccatgcatagaatcatccacaccggagaaaaaccctttaattgcacccagtgtggtaaggccttcaattctaggtccgctctgtgtcgccataaaaagacacattccggggaaaaacctcacgagtgcagggactgcggcaaagcgtttaaaacccgcaaccgactgtgtatgcaccagctgatccacactggagagaagccctataaatgtaattgctgtgggaaagcctttcagtttaaacactcattaacaatccatggaagaatccacacaggcgagaaaccctatgaatgtgaggagtgtgggaaagcctttagcggtagctccgatctcactaaacacataaggatccacactggagagcgcccttacgagtgctcaaagtgcggtcgtgcattcagccgtagctccgacctgagcaagcataagagaatccatacacgggaaaaacactacggatgccctcagtgtggtaaagattttagtattaaagcagaactgacaaaacatcgtaggatccacaccgaggagaaaaggtacagatgtgaagagtgtggcaaggcgttcagacacaattgtaagaggagagcccacgaaagggaacatacaggcgaaaagccctaccagtgcagggactgcggcaagaccttccaggataagcactgtttaactattcatcagcggattcatactggtgagaaaccgtacaaatgtctggagtgcggcaaagcattcagcggaaagagtaacctgaccaaccacagacggatccacactggtgaaaagccacataagtgcgaagtctgcggcatggcttttcatcactcttcagtccttagacagcacaagcggatacatacaggcgaaaagccctatacgtgcagtgagtgtgggactagcttccgacagggatctgcactgattggacacaagcgagtgcatactggggaaaagccctacgagtgcgaggagtgcgggaaggcctttcgcgttagctccaatttaactggccataagaagcgtaagcaccaggtctggtcaacgcacgagctggacggttctcggaagtcattgagtccagtgacggtgtcacaaacatccgttgtctctattttgacatctgcctag

SEQ ID NO: 23942 - DNA, 2001 bp, Artificial Sequence
  derived and/or modified sequence
atgcaggaggtggtgctactggacgagagcagtggacctcctagccagctgctctggacacgccaagacacccagctaccgcaggagagtgctctgttacccgcaccctatccggcttttactaaggacggctctcaaggtaacctacctcaggcggatattacactgatgagccaggcccaggagagcgtaacttttgaggacgttgccgttaacttcaccaatagagagtggcagtgccttacgtatgctcagcgccacctgtataaagacgttatgttagaaaactatggcaacatggttagtcttggctttccttttccgaaacctcctttgatttcccatctggagcgagaagttgatccttgcgttcaggaccctcaggatcgcgaaagtctaagctgctcctatccagtcagtgctgataagatgtggcccgagaacgagaaggccagctcccaacaggaaatcttcgagaacggagaggcctactggatgaagttcaacagcctcctgaaggtcgacagccgtgaccctaaggtcagagaagtttgtgttcaggatgtcaaactggaaaaccagtgggaaacaagcatcagggaaaagctgcgggaagaaaaagaaggctctgaggaagtgacatgcaagaaaggaaagaaccagaaggtcttgtccaaaaacttaaaccctaattccaagcattctcagtgtaataaggtgcttatcgctcagaagctgcatgagtgtgcacggtgtggtaaaaacttctcttggcatagtgacttaatcctgcatgagcagattcactcgggggaaaaacctcatgtctgtaatgagtgcggcaaagctttcaaaaccaggaaccagctgtccatgcatcggatcatacatacgggagaaaagccattcaactgcactcagtgtgggaaggctttcaactcacgcagtgccttgtgtcgccataagaagactcattccggcgagaagccccacgagtgccgggattgcggaaaagcttttaagacaagaaatcggctatgcatgcaccagcttatccacacgggggaaaagccctacaagtgtaattgctgcggtaaggccttccagtttaaacactccctgacaatacacgggcgaatccataccggcgaaaaaccttacgagtgcgaggaatgcggaaaggcctttagcggaagttctgatctgacgaagcatattagaattcatacgggggagcggccatacgagtgctccaagtgtggtcgcgcatttagtagatcctctgacctgagtaagcacaagagaatccacacacgcgaaaagcattacgggtgtccacagtgtggaaaggattttagcatcaaagctgagcttacaaagcatcgcagaatccataccgaggagaaaagataccgctgtgaggagtgcggaaaagcattcaggcataactgcaaacgcagggctcatgaacgagaacacactggtgaaaagccataccaatgcagagattgcggaaaaactttccaggacaaacactgtctgacaatccaccagcggattcacacaggggagaagccgtataagtgcttggagtgcggcaaggccttctctggaaaatccaatttgaccaaccaccgcagaatacacacgggcgaaaagcctcataagtgtgaagtctgcggtatggcttttcaccacagcagtgtgctgcgacagcataaacgaatccatacaggagagaaaccttatacatgctcagaatgcgggacctctttcagacaggggagcgctctgatagggcacaaacgggtgcacactggtgagaaaccgtacgaatgcgaagagtgtggcaaagcattccgggtctccagtaaccttactggccacaaaaagcgcaagcaccaggtgtggtcaacccacgaactagacgggagtcgcaagtccttaagcccagttactgtgagccagacttcggtggtgtcaatcctcacatcggcttag

SEQ ID NO: 23943 - DNA, 2001 bp, Artificial Sequence
  derived and/or modified sequence
atgcaggaggtcgtcctgctggacgaatcttcggggccacctagccagctgctctggacccgccaggatactcagcttcctcaggagtcagccctcctgcccgctccatacccagcctttactaaggatggtagtcagggaaacctgccacaggcagacattacattgatgagccaggcacaggaatccgtgacgtttgaagatgtggctgtaaattttaccaatagggagtggcaatgcctgacctatgcacaacgacatctttataaagatgtgatgctggagaactacggcaacatggtatcattagggtttccttttcccaaacccccattaatttcccatctcgagcgagaggtggacccctgtgttcaggacccacaggatcgcgaatcacttagctgctcttatccggtaagtgctgacaagatgtggcctgaaaacgagaaagctagtagccagcaagaaatctttgagaatggagaggcctactggatgaagtttaattcactgctgaaagtcgatagccgggaccccaaggtgcgcgaagtctgtgtacaggacgtcaagctggagaatcagtgggagacttctatacgcgagaaactaagggaggagaaagaaggaagcgaggaggtgacatgcaaaaagggtaaaaaccagaaggtactgtccaagaacctcaacccaaacagtaaacattcacagtgcaataaggtcttgatcgctcagaagcttcacgagtgcgctagatgcggcaaaaactttagttggcactcggacttgatcctccacgagcagatacactctggagagaaacctcacgtctgcaatgagtgtgggaaggccttcaagacacgaaatcagctgagcatgcacagaataattcacacaggagaaaaaccattcaattgtacacagtgcggaaaagccttcaactctcgctcagccctgtgtcggcataagaaaacacattctggcgagaagccacacgagtgcagggattgtggcaaggcctttaagacgcgaaatcgcctgtgtatgcaccaattgatccatacaggcgaaaagccttataagtgcaattgttgtgggaaagcatttcagtttaagcactccctcaccattcacggacgcatccataccggtgagaagccctatgaatgcgaggaatgtgggaaagccttcagtggctccagtgacttgaccaaacatattagaatacatacaggtgagcgcccttatgaatgttctaaatgtggacgggctttctcacggtcttcagatctgagtaagcataaaagaattcatacccgggagaaacattacggctgtccacagtgtggaaaagactttagtatcaaggcagagctgacaaagcacagaagaattcataccgaagagaagcgctacagatgtgaggagtgtggtaaggcatttagacacaattgtaaacgccgtgcgcacgagcgcgagcacactggcgagaaaccctatcagtgtcgggactgcgggaagacctttcaagacaaacattgtttaacaatccaccagcgaatccacacaggcgagaagccatataagtgtctagagtgcggtaaggcattttccggaaagagcaacctgactaaccataggaggattcacaccggggagaaaccgcataagtgcgaagtgtgtgggatggccttccatcacagctcagtgctgaggcagcataagaggattcatacgggcgagaagccttatacttgctcagagtgcggcacttccttcagacagggcagcgcactcataggccacaagagagtccacaccggtgaaaaaccttacgagtgcgaggaatgcggcaaggcttttcgggtgtcctctaacttaaccggtcataaaaagagaaaacatcaggtctggagcacccatgagctcgatggatcaaggaagtccctctctccagtcaccgtgtcacagacatctgtggtgtccatactcacgagtgcctag

SEQ ID NO: 23944 - DNA, 2001 bp, Artificial Sequence
  derived and/or modified sequence
atgcaggaggtggtcttgctggatgagtcttctgggccacccagccagttgctatggactcgacaggacactcagctgccacaggagtcagccttgctgcccgctccatatccggcatttacgaaggacgggagtcaagggaatctgcctcaggcagacataaccctgatgtcccaggcgcaggaaagtgtgactttcgaagacgtcgctgtaaactttaccaaccgcgaatggcagtgtctgacctacgcacagcgacatctctacaaagacgtaatgttagagaactatggaaatatggtgtccctcggatttcccttcccaaaacccccacttattagccatctcgaaagagaggtcgacccatgcgtccaggacccccaagatcgagagagtcttagttgtagctatccagtgtccgccgacaagatgtggcctgagaatgaaaaagctagctcacaacaggagatttttgaaaatggggaagcctactggatgaagttcaactcactcttgaaggtcgactcccgcgatcctaaggtgagggaggtgtgtgtgcaggatgtaaaacttgagaatcagtgggaaactagtatcagagaaaagctgcgagaagaaaaggaaggctccgaagaagtcacttgcaaaaaaggaaaaaaccaaaaggtcctgtccaagaatctgaacccaaattcaaagcacagtcagtgcaacaaagttctcattgcacagaagctgcacgaatgtgccaggtgcggtaaaaacttttcgtggcacagcgacttaattctgcacgaacaaatacatagcggcgaaaaaccacatgtctgcaatgaatgcggtaaggccttcaaaacccgtaaccagctctcaatgcatcgcattattcacactggcgagaagccattcaactgtacacagtgcggtaaagctttcaactcacggagcgccctgtgccggcataagaaaacccacagtggcgaaaaacctcacgaatgtagggactgcggcaaagcctttaagaccaggaatagactgtgtatgcaccaattaatccataccggtgaaaagccatataaatgcaactgctgtggcaaggctttccagttcaaacacagtctcaccatacatggccgaatacacacgggcgagaaaccctatgagtgcgaagaatgtggcaaggcattctccgggtccagtgatctaactaaacatattcggattcacaccggggagcgcccatatgagtgctcaaaatgtggcagagcgttttcccgctcctcagatttgagcaagcataaacgcatccatacaagagaaaaacactatggctgtccacagtgcgggaaggacttttctattaaggccgagcttacaaaacaccggaggatccatacagaggagaagcgctatcggtgcgaagagtgtggaaaggccttcaggcataattgcaagaggcgcgctcatgagcgcgagcacaccggcgagaaaccatatcagtgtcgggactgcggaaaaacatttcaggacaaacactgcctgaccattcatcagcggatacacactggagagaaaccttacaaatgtttggagtgtggaaaagccttttcggggaaatctaatcttacaaaccaccgtaggattcacacaggggagaagcctcacaaatgcgaagtgtgcggcatggcttttcatcactcttctgtgttacggcagcataaacggatccacaccggcgagaaaccgtacacgtgttcagagtgtggcacttcttttcgccagggtagtgccttaattggccacaagcgggttcacaccggagagaagccatacgaatgtgaggagtgcggaaaagcgttccgggtttctagcaacctgaccggacacaaaaagaggaaacaccaagtctggtccacacacgagctggatggcagccgcaaaagtctctcgccagtaacagtctcccaaacttcagtagtttccatcctaacatctgcatag

SEQ ID NO: 23945 - DNA, 1725 bp, Artificial Sequence
  derived and/or modified sequence
atgctggaaaactatggtaatatggtgtctttgggattcccttttcccaagcctcccctaattagccacttagagagagaagttgatccctgcgtacaggacccccaagacagagagtccctaagttgctcttatccagtcagcgctgataaaatgtggccagaaaatgaaaaggcgagctcccagcaggagatattcgaaaacggcgaagcatattggatgaaatttaactcactcctgaaggtggatagcagggaccctaaggttcgggaggtgtgtgtccaagacgtgaaactcgaaaaccagtgggagacgagtataagggagaaactgcgggaagaaaaagaaggctccgaggaagtgacatgtaagaagggaaagaatcagaaagtgctgagcaaaaacctcaatccaaattctaagcacagccagtgcaacaaagtcctaattgctcagaaactgcacgagtgtgcgagatgcgggaaaaattttagttggcactccgacctgattctgcacgagcaaattcacagtggcgaaaagccccacgtctgtaacgaatgcgggaaggcgttcaagactcggaaccagttgtcaatgcacagaatcatacatacaggagagaagccttttaactgtacccaatgtgggaaggcttttaactcacgaagtgcactctgccgtcacaagaagacccactcgggcgagaagccccatgagtgccgagactgcggcaaggcatttaagactcggaatcgcctttgtatgcaccagctgatccacactggcgagaaaccgtataagtgcaattgttgtggtaaagcatttcagttcaaacacagtcttacaatccacggacggattcatacaggcgagaagccctatgaatgtgaggaatgtggcaaagccttctctgggtcttcagaccttacaaaacatatcagaatacacactggagagagaccctatgaatgttctaagtgcgggagggccttctcacgcagcagcgatctcagcaaacacaaacggattcatacgcgcgaaaaacattacggttgtccccaatgtggtaaggacttctcaattaaagctgagcttacaaagcaccgaaggattcatacagaggaaaagagatatcgttgtgaggaatgtggcaaagcattcagacataattgcaagaggcgcgcacacgaacgagaacataccggggagaaaccgtatcaatgtagggattgtggcaagacattccaggacaagcattgcctcacaattcatcaacgcatccataccggcgagaagccatacaagtgcttggagtgcggaaaagccttttccggtaaatcaaaccttaccaatcatagaagaattcataccggagaaaaacctcataaatgtgaagtttgcggcatggcattccaccactcctctgtgctccggcagcataagagaatccacacaggtgaaaagccttacacttgttctgagtgtgggacttcttttcggcaggggagtgccctgatcgggcacaagagggtgcatacaggtgagaaaccctacgagtgcgaagaatgcggtaaagccttcagggtgtcgagtaacctgactggtcataaaaaacgcaagcatcaggtgtggtcaacacacgaactagacggctcccgaaagtctctgtcccccgtaacggtcagtcagacaagtgtggtctcaatcctgactagtgcttag

SEQ ID NO: 23946 - DNA, 1725 bp, Artificial Sequence
  derived and/or modified sequence
atgctggaaaactacggcaatatggtttctcttggttttccctttcccaaaccacctcttatatctcatctcgaacgggaggtggatccctgcgtgcaggatcctcaggatagggagtctctttcatgctcatatcccgtgagcgccgacaagatgtggcccgagaatgaaaaggcctcttctcagcaagaaatctttgagaatggtgaagcttactggatgaaattcaatagcctgctgaaagtagacagtcgggatccaaaggtgcgcgaggtttgtgtgcaggatgtgaagctggagaatcaatgggagacttccatccgcgagaagctgcgcgaagaaaaggagggctcagaggaagtcacctgcaagaagggtaagaaccaaaaggtgctgtcgaagaatttaaacccaaattcaaagcactctcagtgcaataaggtgctcattgctcagaagctccacgagtgtgcacggtgcggcaaaaatttttcctggcactcggacctgatcttgcacgagcaaattcatagcggagaaaaaccacatgtgtgcaacgaatgtggcaaggcttttaagacccgcaaccaactgagcatgcaccgtattatacacactggcgaaaaaccttttaattgcacccagtgtgggaaggcctttaactctagatccgctctttgcagacataaaaaaacccacagcggggaaaagccacatgagtgtcgagattgcggtaaagcctttaaaactcgaaatagactctgcatgcatcagctaatccacaccggtgaaaaaccttacaagtgcaactgctgcggaaaagcctttcagtttaaacatagcctcactattcatggcagaatacataccggagagaagccctacgaatgtgaagagtgtggtaaggcgttctcgggttccagtgacctgaccaagcacatcaggatccacacgggagagcggccatatgaatgttcaaaatgtggtcgagcgttctcacggtcatcagatctttccaaacataaaagaattcatactcgggagaagcactatggctgtccacaatgcggcaaggacttctctatcaaggctgaattgactaagcaccggagaatccataccgaggagaaacgctatagatgcgaggaatgtggaaaggcgttccgtcacaattgtaaacgtagagcacacgagagggaacacacaggcgagaagccttatcaatgtagagactgtggaaagacctttcaggataaacactgcctgactatccatcagcgcattcataccggggagaaaccgtacaagtgcttagagtgtggtaaggccttctcaggtaaatccaaccttacaaatcacagaagaattcatactggcgagaagccgcacaaatgcgaagtgtgtgggatggcattccaccattcatccgtgctcagacagcacaaacggatccatacgggtgagaaaccctacacatgctcggagtgcggaacctcattccgccagggcagcgccttgatcggacacaagagggttcacaccggtgagaagccttacgagtgtgaagagtgcgggaaagcgtttcgagtcagctcaaacctcaccggtcataagaaacggaaacaccaggtgtggagcacacacgaattggacgggtctcggaagtctctaagtcccgtgacggtgtcccagaccagcgtagtttccatattgacaagtgcatag

SEQ ID NO: 23947 - DNA, 1725 bp, Artificial Sequence
  derived and/or modified sequence
atgctggaaaattacggaaatatggtgtcactcggcttcccatttcctaaaccgccattaatcagccatctggagcgcgaggtcgacccttgtgtgcaggacccccaagatagagagagtctgtcatgctcctaccctgtctctgcagacaaaatgtggcccgagaacgaaaaggcctcttcacagcaggagattttcgagaatggcgaagcctactggatgaaatttaatagtctgctgaaagttgacagccgagatcctaaagtgagagaagtctgcgttcaggacgtgaagctcgagaatcagtgggaaacaagcatcagagagaaactgagggaggaaaaagagggatctgaggaagtcacttgcaaaaagggaaaaaatcagaaggtcttgtctaaaaaccttaatccaaattcaaaacattcccagtgtaacaaagtgcttatcgcccagaaattgcacgaatgtgcgcgttgtggtaagaacttcagctggcactccgacctcatattgcacgaacaaattcacagtggtgaaaagccccacgtgtgcaacgaatgcggtaaggccttcaagacaaggaaccagctgagcatgcaccgtattattcacaccggagaaaaacctttcaactgcacacagtgtggaaaagcatttaacagccgaagcgccctttgtagacataagaagacacactcaggcgaaaagcctcatgaatgtagggattgtggcaaagcgttcaagacgaggaacagattgtgtatgcatcagctcatacataccggagagaaaccatataaatgcaactgctgtggcaaggcctttcaattcaagcactctctgacaattcacgggagaattcatactggggagaagccctacgagtgcgaggagtgcgggaaggcattctccggttcttctgacctgaccaagcacattaggatccacactggcgaaagaccgtatgaatgcagtaagtgcggaagggcattctcaagatcctcagacctgtccaaacataagcgtattcatacacgggagaaacactacggatgcccccaatgtgggaaagacttctcgattaaagccgaactaaccaaacaccgacgcattcatacagaggagaagcggtatcggtgcgaagagtgtgggaaggcatttagacacaactgcaaacgacgcgcacatgagagagagcacactggggaaaagccctatcagtgtagagactgcggcaagactttccaggacaagcattgcctgacgatccaccagagaatccacaccggtgaaaaaccatacaagtgtttagagtgtgggaaggccttcagcgggaaaagcaacctgaccaatcatagaagaattcataccggggagaaaccccacaagtgcgaggtctgcgggatggcgtttcatcattcatctgttctgcgacagcacaaaagaatacacaccggggaaaagccttacacatgctccgagtgcggcacaagttttcgtcaaggctcagccctgattggacacaagcgagttcacaccggggaaaagccctacgagtgcgaggagtgtggcaaagccttcagggtttcctctaatctcactggtcataaaaagagaaagcaccaggtttggtccacgcatgagcttgacggtagccgaaagtctctgtcccctgtgactgtgagccaaacctcggtcgtctctattttaacctctgcatag

SEQ ID NO: 23948 - DNA, 1725 bp, Artificial Sequence
  derived and/or modified sequence
atgctggagaactacggtaacatggtgtccctcggctttcccttccccaaaccgcctttaatcagccaccttgaacgggaagttgacccctgtgtgcaggatccccaagacagagagtccttgtcttgtagctatcctgtgtctgctgataaaatgtggcctgaaaacgagaaggcttcttctcaacaagagatcttcgaaaacggggaagcttactggatgaagtttaactccttattaaaggtggactcacgagacccaaaagtgcgtgaggtgtgcgtgcaggatgtgaaactcgaaaaccagtgggagacgtctatccgcgaaaaactgcgagaggagaaagaaggtagcgaggaggtgacatgtaaaaagggcaaaaatcagaaagtcctgtccaagaatctgaaccctaatagtaagcatagtcagtgtaataaagtgcttatcgcccagaagctgcatgagtgcgctaggtgcggcaaaaacttctcatggcactcagatctcattctccatgaacagatccacagcggggaaaaacctcacgtgtgtaatgagtgcgggaaagcattcaaaactagaaaccagttgtccatgcaccgtatcatccataccggtgagaagccgtttaattgcacccaatgcggaaaagcattcaactcgcgcagcgcactgtgcagacataaaaaaacacattccggggagaaacctcatgagtgccgcgactgcggcaaggccttcaaaactcgcaatcgcctgtgcatgcaccagctgatccacactggcgagaagccttataagtgcaactgttgcgggaaagcgttccagttcaaacatagtctgacaattcatgggagaatccataccggcgagaagccatacgagtgtgaagagtgcggaaaggcgttctcagggagctccgatctaaccaagcatatccgcatccacacaggcgagcgcccatatgaatgctccaagtgcgggagagctttcagtaggtcttctgacctcagtaagcacaaaagaatacacacacgggaaaaacactatgggtgtcctcagtgtgggaaagacttctcaatcaaggcggagcttacaaagcacagaaggattcacaccgaggagaaacggtacagatgcgaggagtgtggaaaagctttcagacacaactgtaagcgtagggcccatgaacgggagcatactggagagaagccatatcagtgccgtgactgcggaaaaacctttcaggacaagcattgccttaccatccatcagcggatccacaccggggagaaaccttacaagtgcctagagtgtggtaaagccttcagcggtaaatcaaacttaaccaatcatagaagaatccacacgggcgagaagccccataagtgtgaggtgtgcggcatggcatttcaccatagcagcgtgttacgccaacacaagcgtatccacactggggaaaagccttacacttgcagtgagtgcgggacaagctttcgacaggggtctgcactgatcggccacaagcgggtacataccggcgaaaaaccctacgagtgcgaagagtgcgggaaggcttttcgcgtctcctcaaatctgaccggccacaaaaaaagaaaacaccaggtgtggtctacccacgaacttgacggaagtaggaagtccctgagccctgtgactgtcagccagacatccgtggtctctatactgaccagcgcatag

SEQ ID NO: 23949 - DNA, 1725 bp, Artificial Sequence
  derived and/or modified sequence
atgctcgagaactatggaaatatggtgagccttggtttccccttccctaagccaccacttatatctcatctggagagggaggtcgacccatgcgttcaggacccccaggatagggaatcactgagttgctcttatcctgtgagcgctgacaagatgtggcctgaaaatgagaaagcaagctcccagcaggaaatattcgaaaacggcgaggcctactggatgaaattcaacagtttactgaaagtggacagtcgagatcccaaagtgagagaagtgtgcgtccaggatgtaaaactggagaaccaatgggaaacatctatccgtgaaaagctaagggaagaaaaggaggggtccgaggaagttacatgtaaaaagggcaaaaaccagaaagtgctgtctaagaatttgaacccaaactcaaagcacagtcaatgcaacaaggttctgatcgcccaaaaattgcatgaatgcgctaggtgcggcaagaatttctcttggcacagcgatttaatcctccacgaacagatccattcaggcgagaagccacacgtctgcaacgaatgcggcaaagctttcaaaacccggaaccagttgagcatgcataggatcattcatactggcgaaaagccattcaactgtacccaatgtggaaaggccttcaactcaaggtcagcactttgccggcataaaaaaactcacagtggagaaaagcctcacgaatgtcgggattgcgggaaagcatttaagacacggaatagattgtgtatgcatcagctaatccataccggagagaagccatataagtgcaactgttgcggaaaggctttccagtttaagcattctctgacaatccacggcagaattcatacgggagaaaagccctatgagtgcgaagagtgcgggaaagcctttagtggctctagcgatctgacaaagcacatccggattcacaccggggaacgaccttacgaatgtagcaagtgcggccgtgcttttagtcgctcatcagacctgtcaaagcacaagcggatccacacacgggaaaagcactacggatgcccccagtgtgggaaggatttcagtatcaaagccgaattgactaagcatcgaaggatccatacggaggaaaagcgctaccgttgcgaggagtgcgggaaggcctttcgacataattgcaaaagacgggctcacgagagggagcatactggcgagaaaccgtaccagtgtcgtgactgtggcaaaacattccaggacaagcactgcctgactatacatcaacggatacatactggcgaaaagccatacaagtgcctggagtgcggcaaagctttttcaggcaaatccaatctcactaaccacaggagaatccacactggtgaaaagcctcacaagtgtgaggtatgtggaatggccttccaccatagtagtgtcctgcgacaacacaagcgaatccacactggggaaaagccttatacttgctccgagtgcggcacatcattccgtcagggcagtgcgctcatcgggcacaaacgtgtccatactggtgagaagccctatgaatgcgaggagtgcgggaaagcttttcgggtgagctccaaccttacaggccacaaaaaacgaaaacaccaggtttggtctacccacgagctggatggcagccggaagagcctgtccccggtgaccgtgtcccagaccagcgtcgtgagcatcctcaccagcgcatag

SEQ ID NO: 23950 - DNA, 1725 bp, Artificial Sequence
  derived and/or modified sequence
atgttagaaaattacggaaatatggtgtcactcgggttcccctttccgaaaccccctctgatttcccatctcgaacgggaggtggatccctgcgttcaggatccgcaggatcgggagtcactgtcttgctcatatccagtgtctgccgacaaaatgtggcccgaaaacgaaaaagcatcatcccagcaggagatctttgagaacggcgaggcgtattggatgaagtttaattctctactcaaggtggacagtagagaccccaaggttcgcgaggtttgcgtgcaggacgtgaaactggaaaaccaatgggagaccagcatccgcgagaaactccgggaggagaaagaggggtctgaagaagtgacctgtaaaaaaggtaaaaaccagaaggtgttgtcaaaaaacctaaatcccaatagcaaacattcacagtgtaataaggtgctgatagcccagaaacttcatgagtgcgccaggtgcggaaagaacttctcatggcactccgatctgatccttcacgaacagatacatagtggcgaaaagcctcacgtgtgcaatgagtgcggcaaagcctttaagaccagaaaccagctgtccatgcaccgcattattcataccggcgaaaaaccttttaattgcacccagtgtgggaaggcatttaattctaggtccgccctgtgccggcataagaaaacacatagtggcgaaaagccccacgagtgccgggactgtggtaaggcttttaagactcgtaaccggctttgtatgcatcagcttatccacacaggcgagaaaccttataaatgcaactgctgtggaaaggccttccagtttaaacactctctcactattcacggaaggattcacacaggagagaaaccttacgagtgtgaggagtgtggaaaagctttttctgggtcttcggatttgactaagcatatcagaatacacacaggtgagagaccctatgagtgcagcaaatgtggaagagccttctccagatccagcgacctaagcaaacataagagaatacacacaagagagaaacattacgggtgtccacagtgtgggaaagacttctctattaaggcagaactcaccaagcatcggaggatccataccgaggagaagcgttatcgctgtgaagagtgtggtaaggcatttaggcataactgtaagagaagagcacacgagcgcgagcatactggtgagaaaccgtaccagtgccgggactgtggtaagacttttcaagataagcattgcctgaccattcatcagaggatccacacaggtgaaaaaccctataaatgcttagaatgcgggaaggcgtttagcggcaaaagcaacctcactaaccacaggagaatccacactggagaaaaaccgcataaatgcgaggtgtgcggcatggcgttccaccattcttccgttctccggcagcataaacggatccacactggcgaaaagccctatacctgctctgagtgtggtacatccttcaggcagggctccgctctcataggtcacaagagagtgcacacaggcgagaagccctatgagtgtgaagagtgtgggaaggcttttcgagtcagttccaacctcaccggacacaaaaagaggaagcatcaggtgtggtcaacccacgagctggacggaagtagaaaaagcctgtcaccagtgacggtgagccagacatccgtggtaagtatcctgacaagcgcatag

SEQ ID NO: 23951 - DNA, 2730 bp, Artificial Sequence
  derived and/or modified sequence
agcatccattcatatattcattcagtcagctaatttttaatccagcacatactattgcaagcgctgttttaggcgttgagaatacaactgtgaacaagacgacaaaaattcctgccctcatggagcctaagagcctagattttagcgaaggtagaaccaccgtaaacaatgtatatattaataagtaacttatgcaccatactggaaaattataaagtgctatagaggaaaagaagaattcatgtaaagcaagggaaacaagatgtgagatcacagcggtttagtgttgctaatgaaccccaaatccagggcagtgtttgacacattaagccaaacagtagcggcactgtgggtcaagaagggccctttggctggcaccaccaaaacatgtgttctccaaaggaggctggcatcaactggagccacttcacagcttgtttgagaactggatctgaccagtaggaagaaaccaggacagcagtggaagactgttaaagaaacctgagtaaaaagatgcaggaggttgtgctgttggatgagagttcaggaccaccaagccagctgctttggacccgccaggatacccagctccctcaggaaagcgctctattacctgctccatatcctgccttcactaaagatggaagccaaggaaacctgccgcaagcagatatcacactaatgagccaggcccaagagtcagtgacatttgaggatgtagctgtgaacttcactaacagggagtggcagtgtctgacctacgctcaaaggcatctctataaggatgtgatgttggaaaattatgggaacatggtatcacttggatttccatttcctaaacctcctttaatctctcatctggagcgagaagtagacccctgtgtgcaggatccacaggacagggagtccctaagctgctcctacccagtgtcagctgacaagatgtggcctgagaatgaaaaggcaagttcacaacaagagatttttgaaaatggagaagcctactggatgaaatttaacagtctcctaaaagttgattcccgggatcctaaggttagagaagtttgtgttcaggatgtcaaattagagaatcaatgggaaacatctataagggagaaactgagagaagagaaagaaggctctgaggaagtgacctgcaaaaaaggaaagaaccagaaagtgcttagtaaaaacttgaatccaaactcaaaacatagtcaatgtaataaagttcttatagcacagaaactccatgaatgtgccaggtgtggcaaaaacttcagttggcactcagatctaattctccatgagcaaattcattctggtgagaaaccccatgtgtgtaatgagtgtgggaaagcattcaagaccagaaatcagctttctatgcaccggataatccacacaggggagaaaccttttaattgcacccagtgtgggaaggctttcaacagtagatcagctctttgccgacataaaaaaacccacagtggggagaagcctcacgagtgcagggactgtgggaaggccttcaagaccaggaaccgtctctgtatgcatcagcttatccacaccggggagaagccttacaaatgtaactgctgtgggaaggccttccagtttaagcattcccttaccatccatggcagaatccacactggggagaagccatatgaatgtgaggagtgcgggaaggccttcagtgggagttcagacctcaccaaacacataagaatccacactggggaacgaccttatgagtgcagcaagtgtggaagggccttcagtcggagctcagacctaagcaaacacaaacgaatccatactcgggagaaacactatgggtgtccccagtgtggaaaagacttcagcatcaaggcagaactcaccaaacacagaaggatccacactgaagagaaacgttacaggtgtgaggagtgtgggaaagcctttcgtcataactgtaagcgcagggctcatgaacgagagcatacaggggagaagccctatcaatgcagggattgtgggaaaaccttccaagataagcactgccttaccatccatcagagaatccacactggagagaaaccttacaaatgtttagagtgtgggaaagctttcagtgggaagtcaaacttgaccaatcatcgaagaattcacactggagagaagcctcacaaatgtgaggtatgtggaatggccttccatcatagttcagtcctgaggcagcacaaaagaatccacactggtgagaagccatacacctgcagtgagtgtggcacgtccttccgtcagggctcagctctgattggacataagcgagttcatactggggagaaaccttatgaatgtgaggaatgtggaaaagcttttagagtgagctcaaatcttactggacataagaaaagaaaacatcaagtatggagtacccatgaacttgatgggagtaggaaatccctctctccagtgactgtttctcagacctcagtagtcagtattttgaccagtgcctgagtataacgattctggtgttactttctgtttttcctacctcttaggctggtccttctgtctcttatattagttattcctgatttcctgacccttaattgtgagattccccaaagacattgtcctttaccttcttattcactattttttcagtgagcacatttacttccaagagtttatcaatcacttcctaatattaataaacacttattagtgctt

SEQ ID NO: 23952 - DNA, 2700 bp, Artificial Sequence
  derived and/or modified sequence
taatttttaatccagcacatactattgcaagcgctgttttaggcgttgagaatacaactgtgaacaagacgacaaaaattcctgccctcatggagcctaagagcctaaattttagcgaaggtagaaccaccgtaaacaatgtatatattaataagtaacttatgcaccatactggaaaattataaagtgctatagaggaaaagaagaattcatgtaaagcaagggaaacaagatgtgagatcacagcggtttagtgttgctaatgaaccccaaatccagggcagtgtttgacacattaagccaaacagtagcggcactgtgggtcaagaagggccctttggctggcaccaccaaaacatgtgttctccaaaggaggctggcatcaactggagccacttcacagcttgtttgagaactggatctgaccagtaggaagaaaccaggacagcagtggaagactgttaaagaaacctgagtaaaaagatgcaggaggttgtgctgttggatgagagttcaggaccaccaagccagctgctttggacccgccaggatacccagctccctcaggaaagcgctctattacctgctccatatcctgccttcactaaagatggaagccaaggaaacctgccgcaagcagatatcacactaatgagccaggcccaagagtcagtgacatttgaggatgtagctgtgaacttcactaacagggagtggcagtgtctgacctacgctcaaaggcatctctataaggatgtgatgttggaaaattatgggaacatggtatcacttggatttccatttcctaaacctcctttaatctctcatctggagcgagaagtagacccctgtgtgcaggatccacaggacagggagtccctaagctgctcctacccagtgtcagctgacaagatgtggcctgagaatgaaaaggcaagttcacaacaagagatttttgaaaatggagaagcctactggatgaaatttaacagtctcctaaaagttgattcccgggatcctaaggttagagaagtttgtgttcaggatgtcaaattagagaatcaatgggaaacatctataagggagaaactgagagaagagaaagaaggctctgaggaagtgacctgcaaaaaaggaaagaaccagaaagtgcttagtaaaaacttgaatccaaactcaaaacatagtcaatgtaataaagttcttatagcacagaaactccatgaatgtgccaggtgtggcaaaaacttcagttggcactcagatctaattctccatgagcaaattcattctggtgagaaaccccatgtgtgtaatgagtgtgggaaagcattcaagaccagaaatcagctttctatgcaccggataatccacacaggggagaaaccttttaattgcacccagtgtgggaaggctttcaacagtagatcagctctttgccgacataaaaaaacccacagtggggagaagcctcacgagtgcagggactgtgggaaggccttcaagaccaggaaccgtctctgtatgcatcagcttatccacaccggggagaagccttacaaatgtaactgctgtgggaaggccttccagtttaagcattcccttaccatccatggcagaatccacactggggagaagccatatgaatgtgaggagtgcgggaaggccttcagtgggagttcagacctcaccaaacacataagaatccacactggggaacgaccttatgagtgcagcaagtgtggaagggccttcagtcggagctcagacctaagcaaacacaaacgaatccatactcgggagaaacactatgggtgtccccagtgtggaaaagacttcagcatcaaggcagaactcaccaaacacagaaggatccacactgaagagaaacgttacaggtgtgaggagtgtgggaaagcctttcgtcataactgtaagcgcagggctcatgaacgagagcatacaggggagaagccctatcaatgcagggattgtgggaaaaccttccaagataagcactgccttaccatccatcagagaatccacactggagagaaaccttacaaatgtttagagtgtgggaaagctttcagtgggaagtcaaacttgaccaatcatcgaagaattcacactggagagaagcctcacaaatgtgaggtatgtggaatggccttccatcatagttcagtcctgaggcagcacaaaagaatccacactggtgagaagccatacacctgcagtgagtgtggcacgtccttccgtcagggctcagctctgattggacataagcgagttcatactggggagaaaccttatgaatgtgaggaatgtggaaaagcttttagagtgagctcaaatcttactggacataagaaaagaaaacatcaagtatggagtacccatgaacttgatgggagtaggaaatccctctctccagtgactgtttctcagacctcagtagtcagtattttgaccagtgcctgagtataacgattctggtgttactttctgtttttcctacctcttaggctggtccttctgtctcttatattagttattcctgatttcctgacccttaattgtgagattccccaaagacattgtcctttaccttcttattcactattttttcagtgagcacatttacttccaagagtttatcaatcacttcctaatattaataaacacttattagtgctt

SEQ ID NO: 23953 - DNA, 2643 bp, Artificial Sequence
  derived and/or modified sequence
agcatccattcatatattcattcagtcagctaatttttaatccagcacatactattgcaagcgctgttttaggcgttgagaatacaactgtgaacaagacgacaaaaattcctgccctcatggagcctaagagcctagattttagcgaaggtagaaccaccgtaaacaatgtatatattaataagtaacttatgcaccatactggaaaattataaagtgctatagaggaaaagaagaattcatgtaaagcaagggaaacaagatgtgagatcacagcggtttagtgttgctaatgaaccccaaatccagggcagtgtttgacacattaagccaaacagtagcggcactgtgggtcaagaagggccctttggctggcaccaccaaaacatgtgttctccaaaggaggctggcatcaactggagccacttcacagcttgtttgagaactggatctgaccagtaggaagaaaccaggacagcagtggaagactgttaaagaaacctgagtaaaaagatgcaggaggttgtgctgttggatgagagttcaggaccaccaagccagctgctttggacccgccaggatacccagctccctcaggaaagcgctctattacctgctccatatcctgccttcactaaagatggaagccaaggaaacctgccgcaagcagatatcacactaatgagccaggcccaagagtcagtgacatttgaggatgtagctgtgaacttcactaacagggagtggcagtgtctgacctacgctcaaaggcatctctataaggatgtgatgttggaaaattatgggaacatggtatcacttggatttccatttcctaaacctcctttaatctctcatctggagcgagaagtagacccctgtgtgcaggatccacaggacagggagtccctaagctgctcctacccagtgtcagctgacaagatgtggcctgagaatgaaaaggcaagttcacaacaagagatttttgaaaatggagaagcctactggatgaaatttaacagtctcctaaaagttgattcccgggatcctaaggttagagaagtttgtgttcaggatgtcaaattagagaatcaatgggaaacatctataagggagaaactgagagaagagaaagaaggctctgaggaagtgacctgcaaaaaaggaaagaaccagaaagtgcttagtaaaaacttgaatccaaactcaaaacatagtcaatgtaataaagttcttatagcacagaaactccatgaatgtgccaggtgtggcaaaaacttcagttggcactcagatctaattctccatgagcaaattcattctggtgagaaaccccatgtgtgtaatgagtgtgggaaagcattcaagaccagaaatcagctttctatgcaccggataatccacacaggggagaaaccttttaattgcacccagtgtgggaaggctttcaacagtagatcagctctttgccgacataaaaaaacccacagtggggagaagcctcacgagtgcagggactgtgggaaggccttcaagaccaggaaccgtctctgtatgcatcagcttatccacaccggggagaagccttacaaatgtaactgctgtgggaaggccttccagtttaagcattcccttaccatccatggcagaatccacactggggagaagccatatgaatgtgaggagtgcgggaaggccttcagtgggagttcagacctcaccaaacacataagaatccacactggggaacgaccttatgagtgcagcaagtgtggaagggccttcagtcggagctcagacctaagcaaacacaaacgaatccatactcgggagaaacactatgggtgtccccagtgtggaaaagacttcagcatcaaggcagaactcaccaaacacagaaggatccacactgaagagaaacgttacaggtgtgaggagtgtgggaaagcctttcgtcataactgtaagcgcagggctcatgaacgagagcatacaggggagaagccctatcaatgcagggattgtgggaaaaccttccaagataagcactgccttaccatccatcagagaatccacactggagagaaaccttacaaatgtttagagtgtgggaaagctttcagtgggaagtcaaacttgaccaatcatcgaagaattcacactggagagaagcctcacaaatgtgaggtatgtggaatggccttccatcatagttcagtcctgaggcagcacaaaagaatccacactggtgagaagccatacacctgcagtgagtgtggcacgtccttccgtcagggctcagctctgattggacataagcgagttcatactggggagaaaccttatgaatgtgaggaatgtggaaaagcttttagagtgagctcaaatcttactggacataagaaaagaaaacatcaagtatggagtacccatgaacttgatgggagtaggaaatccctctctccagtgactgtttctcagacctcagtagtcagtattttgaccagtgcctgagtataacgattctggtgttactttctgtttttcctacctcttaggctggtccttctgtctcttatattagttattcctgatttcctgacccttaattgtgagattccccaaagacattgtcctttacct

SEQ ID NO: 23954 - DNA, 2503 bp, Artificial Sequence
  derived and/or modified sequence
atatttctgtttctcatttcttggggagagtaccggcgggaagcatccattcatatattcattcagtcagctaatttttaatccagcacatactattgcaagcgctgttttaggcgttgagaatacaactgtgaacaagacgacaaaaattcctgccctcatggagcctaagagcctagattttagcgaaggtagaaccaccgtaaacaatgtatatattaataagtaacttatgcaccatactggaaaattataaagtgctatagaggaaaagaagaattcatgtaaagcaaggaggctggcatcaactggagccacttcacagcttgtttgagaactggatctgaccagtaggaagaaaccaggacagcagtggaagactgttaaagaaacctgagtaaaaagatgcaggaggtaagaagaggagggtctgtgatacatcacaaggaggaagaaggagaagtgagtccaagagtcagtgacatttgaggatgtagctgtgaacttcactaacagggagtggcagtgtctgacctacgctcaaaggcatctctataaggatgtgatgttggaaaattatgggaacatggtatcacttggatttccatttcctaaacctcctttaatctctcatctggagcgagaagtagacccctgtgtgcaggatccacaggacagggagtccctaagctgctcctacccagtgtcagctgacaagatgtggcctgagaatgaaaaggcaagttcacaacaagagatttttgaaaatggagaagcctactggatgaaatttaacagtctcctaaaagttgattcccgggatcctaaggttagagaagtttgtgttcaggatgtcaaattagagaatcaatgggaaacatctataagggagaaactgagagaagagaaagaaggctctgaggaagtgacctgcaaaaaaggaaagaaccagaaagtgcttagtaaaaacttgaatccaaactcaaaacatagtcaatgtaataaagttcttatagcacagaaactccatgaatgtgccaggtgtggcaaaaacttcagttggcactcagatctaattctccatgagcaaattcattctggtgagaaaccccatgtgtgtaatgagtgtgggaaagcattcaagaccagaaatcagctttctatgcaccggataatccacacaggggagaaaccttttaattgcacccagtgtgggaaggctttcaacagtagatcagctctttgccgacataaaaaaacccacagtggggagaagcctcacgagtgcagggactgtgggaaggccttcaagaccaggaaccgtctctgtatgcatcagcttatccacaccggggagaagccttacaaatgtaactgctgtgggaaggccttccagtttaagcattcccttaccatccatggcagaatccacactggggagaagccatatgaatgtgaggagtgcgggaaggccttcagtgggagttcagacctcaccaaacacataagaatccacactggggaacgaccttatgagtgcagcaagtgtggaagggccttcagtcggagctcagacctaagcaaacacaaacgaatccatactcgggagaaacactatgggtgtccccagtgtggaaaagacttcagcatcaaggcagaactcaccaaacacagaaggatccacactgaagagaaacgttacaggtgtgaggagtgtgggaaagcctttcgtcataactgtaagcgcagggctcatgaacgagagcatacaggggagaagccctatcaatgcagggattgtgggaaaaccttccaagataagcactgccttaccatccatcagagaatccacactggagagaaaccttacaaatgtttagagtgtgggaaagctttcagtgggaagtcaaacttgaccaatcatcgaagaattcacactggagagaagcctcacaaatgtgaggtatgtggaatggccttccatcatagttcagtcctgaggcagcacaaaagaatccacactggtgagaagccatacacctgcagtgagtgtggcacgtccttccgtcagggctcagctctgattggacataagcgagttcatactggggagaaaccttatgaatgtgaggaatgtggaaaagcttttagagtgagctcaaatcttactggacataagaaaagaaaacatcaagtatggagtacccatgaacttgatgggagtaggaaatccctctctccagtgactgtttctcagacctcagtagtcagtattttgaccagtgcctgagtataacgattctggtgttactttctgtttttcctacctcttaggctggtccttctgtctcttatattagttattcctgatttcctgacccttaattgtgagattccccaaagacattgtcctttaccttcttattcactattttttcagtgagcacatttacttccaagagtttatcaatcacttcctaatattaataaacacttattagtg

SEQ ID NO: 23955 - DNA, 2503 bp, Artificial Sequence
  derived and/or modified sequence
atatttctgtttctcatttcttggggagagtaccggcgggaagcatccattcatatattcattcagtcagctaatttttaatccagcacatactattgcaagcgctgttttaggcgttgagaatacaactgtgaacaagacgacaaaaattcctgccctcatggagcctaagagcctaaattttagcgaaggtagaaccaccgtaaacaatgtatatattaataagtaacttatgcaccatactggaaaattataaagtgctatagaggaaaagaagaattcatgtaaagcaaggaggctggcatcaactggagccacttcacagcttgtttgagaactggatctgaccagtaggaagaaaccaggacagcagtggaagactgttaaagaaacctgagtaaaaagatgcaggaggtaagaagaggagggtctgtgatacatcacaaggaggaagaaggagaagtgagtccaagagtcagtgacatttgaggatgtagctgtgaacttcactaacagggagtggcagtgtctgacctacgctcaaaggcatctctataaggatgtgatgttggaaaattatgggaacatggtatcacttggatttccatttcctaaacctcctttaatctctcatctggagcgagaagtagacccctgtgtgcaggatccacaggacagggagtccctaagctgctcctacccagtgtcagctgacaagatgtggcctgagaatgaaaaggcaagttcacaacaagagatttttgaaaatggagaagcctactggatgaaatttaacagtctcctaaaagttgattcccgggatcctaaggttagagaagtttgtgttcaggatgtcaaattagagaatcaatgggaaacatctataagggagaaactgagagaagagaaagaaggctctgaggaagtgacctgcaaaaaaggaaagaaccagaaagtgcttagtaaaaacttgaatccaaactcaaaacatagtcaatgtaataaagttcttatagcacagaaactccatgaatgtgccaggtgtggcaaaaacttcagttggcactcagatctaattctccatgagcaaattcattctggtgagaaaccccatgtgtgtaatgagtgtgggaaagcattcaagaccagaaatcagctttctatgcaccggataatccacacaggggagaaaccttttaattgcacccagtgtgggaaggctttcaacagtagatcagctctttgccgacataaaaaaacccacagtggggagaagcctcacgagtgcagggactgtgggaaggccttcaagaccaggaaccgtctctgtatgcatcagcttatccacaccggggagaagccttacaaatgtaactgctgtgggaaggccttccagtttaagcattcccttaccatccatggcagaatccacactggggagaagccatatgaatgtgaggagtgcgggaaggccttcagtgggagttcagacctcaccaaacacataagaatccacactggggaacgaccttatgagtgcagcaagtgtggaagggccttcagtcggagctcagacctaagcaaacacaaacgaatccatactcgggagaaacactatgggtgtccccagtgtggaaaagacttcagcatcaaggcagaactcaccaaacacagaaggatccacactgaagagaaacgttacaggtgtgaggagtgtgggaaagcctttcgtcataactgtaagcgcagggctcatgaacgagagcatacaggggagaagccctatcaatgcagggattgtgggaaaaccttccaagataagcactgccttaccatccatcagagaatccacactggagagaaaccttacaaatgtttagagtgtgggaaagctttcagtgggaagtcaaacttgaccaatcatcgaagaattcacactggagagaagcctcacaaatgtgaggtatgtggaatggccttccatcatagttcagtcctgaggcagcacaaaagaatccacactggtgagaagccatacacctgcagtgagtgtggcacgtccttccgtcagggctcagctctgattggacataagcgagttcatactggggagaaaccttatgaatgtgaggaatgtggaaaagcttttagagtgagctcaaatcttactggacataagaaaagaaaacatcaagtatggagtacccatgaacttgatgggagtaggaaatccctctctccagtgactgtttctcagacctcagtagtcagtattttgaccagtgcctgagtataacgattctggtgttactttctgtttttcctacctcttaggctggtccttctgtctcttatattagttattcctgatttcctgacccttaattgtgagattccccaaagacattgtcctttaccttcttattcactattttttcagtgagcacatttacttccaagagtttatcaatcacttcctaatattaataaacacttattagtg

SEQ ID NO: 23956 - DNA, 2001 bp, Artificial Sequence
  derived and/or modified sequence
atgcaggaggtggtgctgctggacgagagcagcggcccccccagccagctgctgtggaccagacaggacacccagctgccccaggagagcgccctgctgcccgccccctaccccgccttcaccaaggacggcagccagggcaacctgccccaggccgacatcaccctgatgagccaggcccaggagagcgtgaccttcgaggacgtggccgtgaacttcaccaacagagagtggcagtgcctgacctacgcccagagacacctgtacaaggacgtgatgctggagaactacggcaacatggtgagcctgggcttccccttccccaagccccccctgatcagccacctggagagagaggtggacccctgcgtgcaggacccccaggacagagagagcctgagctgcagctaccccgtgagcgccgacaagatgtggcccgagaacgagaaggccagcagccagcaggagatcttcgagaacggcgaggcctactggatgaagttcaacagcctgctgaaggtggacagcagagaccccaaggtgagagaggtgtgcgtgcaggacgtgaagctggagaaccagtgggagaccagcatcagagagaagctgagagaggagaaggagggcagcgaggaggtgacctgcaagaagggcaagaaccagaaggtgctgagcaagaacctgaaccccaacagcaagcacagccagtgcaacaaggtgctgatcgcccagaagctgcacgagtgcgccagatgcggcaagaacttcagctggcacagcgacctgatcctgcacgagcagatccacagcggcgagaagccccacgtgtgcaacgagtgcggcaaggccttcaagaccagaaaccagctgagcatgcacagaatcatccacaccggcgagaagcccttcaactgcacccagtgcggcaaggccttcaacagcagaagcgccctgtgcagacacaagaagacccacagcggcgagaagccccacgagtgcagagactgcggcaaggccttcaagaccagaaacagactgtgcatgcaccagctgatccacaccggcgagaagccctacaagtgcaactgctgcggcaaggccttccagttcaagcacagcctgaccatccacggcagaatccacaccggcgagaagccctacgagtgcgaggagtgcggcaaggccttcagcggcagcagcgacctgaccaagcacatcagaatccacaccggcgagagaccctacgagtgcagcaagtgcggcagagccttcagcagaagcagcgacctgagcaagcacaagagaatccacaccagagagaagcactacggctgcccccagtgcggcaaggacttcagcatcaaggccgagctgaccaagcacagaagaatccacaccgaggagaagagatacagatgcgaggagtgcggcaaggccttcagacacaactgcaagagaagagcccacgagagagagcacaccggcgagaagccctaccagtgcagagactgcggcaagaccttccaggaccagcactgcctgaccatccaccagagaatccacaccggcgagaagccctacaagtgcctggagtgcggcaaggccttcagcggcaagagcaacctgaccaaccacagaagaatccacaccggcgagaagccccacaagtgcgaggtgtgcggcatggccttccaccacagcagcgtgctgagacagcacaagagaatccacaccggcgagaagccctacacctgcagcgagtgcggcaccagcttcagacagggcagcgccctgatcggccacaagagagtgcacaccggcgagaagccctacgagtgcgaggagtgcggcaaggccttcagagtgagcagcaacctgaccggccacaagaagagaaagcaccaggtgtggagcacccacgagctggacggcagcagaaagagcctgagccccgtgaccgtgagccagaccagcgtggtgagcatcctgaccagcgcctag

SEQ ID NO: 23957 - DNA, 2001 bp, Artificial Sequence
  derived and/or modified sequence
atgcaggaagtcgtgctcctggacgaaagctctggtcccccctcgcagctgttgtggacgcgtcaggatacacagcttccccaggagtccgctttgctccccgccccctacccagcatttacaaaggacggttcccagggaaatctgccccaagctgatattaccctgatgagccaggcccaggaatccgtgacctttgaagacgtcgccgtaaacttcacaaaccgagaatggcagtgtctcacttacgcccagagacacttatataaggacgtcatgcttgagaattacgggaatatggtctcactgggctttccttttcccaaacccccccttatttctcacctggaacgagaggttgacccttgtgtacaagacccccaggaccgggagtcccttagttgcagttacccagtctctgcagacaagatgtggcctgagaatgagaaggcttctagccagcaggagatctttgaaaacggcgaggcgtattggatgaagtttaacagcctcctcaaggttgacagcagagatcccaaagttagagaggtatgcgtccaggacgtgaagctcgagaaccaatgggagacttctattagggagaagctgcgcgaagaaaaggaaggtagtgaggaggtgacttgtaagaagggaaaaaaccagaaggttctctctaaaaacttgaacccaaattcaaagcactctcagtgtaacaaggtgctcatcgcccaaaagcttcatgaatgtgcgcggtgcggcaagaacttctcttggcattccgatctaatcttacacgagcagattcatagcggagaaaaaccccacgtgtgcaatgaatgtgggaaggcattcaaaaccagaaaccaactgtctatgcataggattattcacaccggagaaaagccgttcaactgcacgcaatgtggcaaagccttcaatagcaggagcgccctgtgcaggcataaaaagactcactccggagaaaagccccatgagtgcagggactgcggtaaagcttttaagactcgcaaccgtctgtgcatgcaccagttaatccatactggggagaaaccatataaatgcaactgttgcggaaaggcttttcagtttaagcacagtctgactatccatggaagaattcacacaggggagaagccatatgagtgtgaagagtgcggtaaggcattctcaggcagcagtgatctgacgaaacatattcgcattcacactggggaacggccttacgaatgtagcaaatgtgggcgcgcattttctcggtctagtgatctcagtaagcataagcgaatccatacccgcgaaaagcactacgggtgtccccagtgtggtaaggatttcagcataaaagccgagctcacaaagcatcggaggatccatactgaggagaaacgatacagatgcgaagagtgtggcaaagcattcaggcacaactgcaaaaggagagcccatgagagagagcataccggggagaaaccgtatcagtgtagggattgcggcaaaactttccaagatcagcattgcctaacgatacaccagagaatccataccggagagaagccgtataagtgccttgaatgtggaaaggcattttccggcaagagtaatctcaccaaccaccgtcgaatccacaccggcgagaaaccacacaaatgcgaggtgtgcggtatggcctttcatcatagctcagtcctaaggcagcacaagcgcattcacacgggggagaagccttatacatgttccgagtgcggcacaagcttcagacaggggtctgctctcatcggccacaaaagagtccacacgggcgaaaaaccttatgaatgcgaagaatgcggcaaggcttttcgggtgtcctccaacctcaccgggcataaaaagcggaaacaccaagtgtggagcacacacgaacttgatggaagtagaaaatctttgagtccagtcactgtatctcagacatccgtggtgagcatactgacatcagcatag

SEQ ID NO: 23958 - DNA, 2001 bp, Artificial Sequence
  derived and/or modified sequence
atgcaggaggtggtgctgctggatgagagcagcggcccccccagccagctgctgtggacccggcaggacacccagctgccccaggagagcgccctgctgcctgccccctacccagccttcaccaaggatggcagccagggcaacctgccccaggccgacatcaccctgatgagccaggcccaggagagcgtgacctttgaagatgtggccgtgaacttcaccaaccgggagtggcagtgcctgacctacgcccagaggcacctgtacaaggatgtgatgctggagaactacggcaacatggtgtccctgggcttccccttccccaagccacccctcatcagccacctggagcgggaggtggacccctgtgtgcaggacccccaggaccgggagagcctgagctgcagctaccctgtgtctgctgacaagatgtggccagaaaatgagaaggccagcagccagcaggagatctttgaaaatggagaggcctactggatgaagttcaacagcctgctgaaggtggacagccgggaccccaaggtgcgggaggtgtgtgtgcaggatgtgaagctggagaaccagtgggagaccagcatccgggagaagctgcgggaggagaaggagggcagcgaggaggtgacctgcaagaagggcaagaaccagaaggtgctgagcaagaacctgaaccccaacagcaagcacagccagtgcaacaaggtgctgattgcccagaagctgcatgaatgtgcccgctgtgggaagaacttctcctggcacagcgacctgatcctgcacgagcagatccacagcggggagaagccccacgtgtgcaatgaatgtgggaaggccttcaagaccaggaaccagctgtccatgcaccgcatcatccacactggagagaagcccttcaactgcacccagtgtgggaaggccttcaacagccgcagcgccctgtgccgccacaagaagacccacagcggggagaagccccatgagtgccgggactgtgggaaggccttcaagaccaggaaccggctgtgcatgcaccagctgatccacactggagagaagccctacaagtgcaactgctgcggcaaggccttccagttcaagcacagcctgaccatccacggccgcatccacactggagagaagccctatgaatgtgaagaatgtgggaaggccttcagcggcagcagtgacctgaccaagcacatccgcatccacactggagagcggccctatgagtgcagcaaatgtggccgggccttcagccgcagcagtgacctgagcaagcacaagaggatccacacccgggagaagcactacggctgcccccagtgtgggaaggacttcagcatcaaggccgagctgaccaagcaccggcgcatccacacagaggagaagcgctaccgctgtgaagaatgtgggaaggccttccgccacaactgcaagaggcgggcccacgagcgggagcacactggagagaagccctaccagtgccgggactgtgggaagaccttccaggaccagcactgcctgaccatccaccagaggatccacactggagagaagccctacaagtgcctggagtgtgggaaggccttcagcggcaagagcaacctgaccaaccaccggcgcatccacactggagagaagccccacaagtgtgaggtgtgtggcatggccttccaccacagctctgtgctgcggcagcacaagaggatccacactggagagaagccctacacctgcagtgaatgtggcaccagcttccggcagggcagcgccctgattggccacaagagggtgcacactggagagaagccctatgaatgtgaagaatgtgggaaggccttccgggtgagcagcaacctgaccggccacaagaagaggaagcaccaggtgtggagcacccatgagctggatggcagcaggaagagcctgagccctgtgacagtgtcccagacctctgtggtgtccatcctgaccagcgcctag

SEQ ID NO: 23959 - DNA, 2001 bp, Artificial Sequence
  derived and/or modified sequence
atgcaggaggtggtgctgctggacgagagcagcggcccccccagccagctcttgtggacgcgccaggatacgcagctgcctcaagagtctgctctcctgcctgcaccctatccagcatttactaaagatgggtctcaggggaatttaccccaagctgacatcactttgatgtcacaggcacaggagtccgtcacctttgaagatgtcgctgtgaacttcactaaccgggagtggcagtgtttgacctatgcccagcgacatttatataaggatgtgatgctggagaattacggtaatatggtctctctcggatttccttttcctaagccgccattgattagccatctcgaaagagaggtggatccctgtgtacaggatccacaggatagggaaagtttgtcttgtagctaccctgtgtccgctgacaagatgtggcccgagaatgaaaaagcgagctcgcagcaggaaatctttgagaacggcgaagcatactggatgaaattcaattctttgctaaaggtggactcacgggatcccaaggtccgggaggtgtgtgtccaagacgtgaagctggagaaccaatgggagactagtatccgcgagaagctacgcgaggaaaaagagggcagtgaggaggtaacatgtaaaaagggcaagaaccaaaaagtactgtcgaagaacctgaacccaaactcaaaacattcccaatgcaacaaggtgcttatcgctcaaaaactgcatgagtgtgcacgatgtggcaaaaatttttcctggcactcagatctgatcctccacgaacagatccattctggggagaaaccacacgtgtgcaacgaatgcggcaaagcttttaaaacaaggaatcagctatccatgcatcggattatccataccggcgaaaagcccttcaattgtacacaatgtggcaaagcatttaactcccgaagtgccctgtgtcgacacaaaaagacccattctggggaaaagccacatgaatgtcgcgactgtggaaaggcattcaaaaccagaaacaggctgtgtatgcaccagttaatccatactggggagaaaccatacaagtgtaactgttgtggaaaggcctttcagtttaagcacagtcttacaattcatggccgaatacacacaggagagaagccatatgagtgtgaagaatgcggcaaggcttttagtggatcaagtgacttaacgaaacatattcggatccacacgggcgaaaggccctatgagtgtagcaagtgtggtcgcgctttcagtcgttcctctgatctctccaagcacaaacggatccacacccgcgagaaacactatggctgcccgcagtgcgggaaagattttagcatcaaggcagaattgaccaagcaccgcaggatccacactgaggaaaaacgatatcggtgtgaagagtgcgggaaagccttcagacataactgcaagcggagggctcatgagcgagaacacaccggtgaaaagccgtaccagtgcagggactgtgggaaaactttccaagaccaacattgtcttactatccatcagaggatccatactggcgagaagccttacaagtgccttgaatgcggtaaggccttctccggtaaatctaatctcacaaaccatcggcgtattcatacgggtgaaaaacctcacaaatgtgaggtgtgcggaatggccttccaccatagctcagttcttcggcaacataaacgcattcatacaggggagaaaccgtatacctgcagcgagtgtggcactagtttcaggcagggctctgctctgattgggcacaaacgcgtccatactggggagaagccgtatgaatgtgaagagtgcggaaaagcatttcgagtgtcttccaaccttaccggacacaagaaaagaaagcaccaagtttggagcacccacgagctggacgggtcacggaagagcctttcaccagtgacagtaagtcagacgtccgttgtaagcatcctaacaagcgcatag

SEQ ID NO: 23960 - DNA, 2001 bp, Artificial Sequence
  derived and/or modified sequence
atgcaagaagtggtacttctcgatgagagcagtggtcctccttctcagttactttggacccgccaagatacccagttgccacaggaatctgccttgttgcctgccccttatccagcctttacaaaggatggctcccaggggaatctgccgcaggcagatatcactctgatgtcgcaagcccaggaaagcgttactttcgaggatgtcgccgtaaactttacaaatagggaatggcagtgtctaacttacgctcagcgtcatctttacaaggatgtcatgctcgagaactacggcaatatggtttccctgggttttcctttccccaagcccccactcatctcccacctcgaacgcgaagtggatccttgtgtgcaagacccccaggacagggagtcgctctcttgctcttacccagtgtccgccgataaaatgtggccggaaaacgagaaagcttcgagtcagcaggaaatttttgaaaatggtgaggcatactggatgaagtttaatagccttctgaaggtcgacagcagggaccccaaagtcagagaggtctgtgtccaggatgttaaactcgagaatcagtgggaaacgagtatcagagaaaagcttagggaggaaaaagagggtagcgaagaggttacttgcaaaaagggtaaaaaccagaaagtactgtctaaaaaccttaatcctaacagtaagcactcgcagtgcaataaggtactgattgcacaaaagctccacgagtgcgcacgatgtggcaagaatttctcatggcatagcgacctgatcttacacgagcagatccattcaggtgagaagccgcatgtttgcaacgagtgcgggaaggcgtttaagaccagaaaccaactgtctatgcataggatcatacacactggcgaaaagccgttcaactgcacacagtgtggtaaggccttcaacagccgttcagccctgtgccgccataagaagactcattccggagaaaaaccgcatgagtgtagagactgtggaaaagccttcaaaacccggaacagactgtgtatgcaccagttaatccacaccggcgagaagccttataaatgtaactgttgcggaaaggccttccagttcaaacattccctgaccattcatgggaggattcataccggcgagaaaccatatgagtgcgaagaatgcggtaaggcattttcaggcagttctgacctcaccaaacacatccggattcacaccggagaaagaccctatgagtgtagtaaatgtggtcgcgctttctctaggagttccgacctgagtaaacacaagagaatccacactcgtgagaaacactatggctgcccacagtgcggcaaggatttttctattaaagccgaactcactaagcatcgcaggattcacactgaagaaaagcgctatcgatgtgaagagtgtggcaaagctttccgtcataactgtaaacgcagagcacatgagcgagaacatactggcgaaaaaccatatcagtgtagagactgcggaaaaactttccaagaccagcactgtttgacaattcatcaacgcatccataccggggaaaagccgtataagtgcctggaatgtggtaaggccttctccggcaagtcaaatctcaccaaccataggagaattcacacaggcgagaagccccacaagtgtgaggtgtgtgggatggcctttcatcattcaagcgtactgcgccagcataaacgcattcataccggcgaaaagccatacacttgctctgaatgcggcacgagtttccgccaaggctccgctctcattggccataaacgggttcataccggcgagaaaccatatgagtgtgaggagtgtggcaaggcattccgtgtcagctctaacctcacggggcataaaaaacgaaagcaccaggtttggtccacacacgagctggacggctcgcgtaaaagccttagtccagttaccgtgtcccagaccagcgtcgtctcaatcctgacctctgcctag

SEQ ID NO: 23961 - DNA, 2730 bp, Artificial Sequence
  derived and/or modified sequence
agcatccattcatatattcattcagtcagctaatttttaatccagcacatactattgcaagcgctgttttaggcgttgagaatacaactgtgaacaagacgacaaaaattcctgccctcatggagcctaagagcctagattttagcgaaggtagaaccaccgtaaacaatgtatatattaataagtaacttatgcaccatactggaaaattataaagtgctatagaggaaaagaagaattcatgtaaagcaagggaaacaagatgtgagatcacagcggtttagtgttgctaatgaaccccaaatccagggcagtgtttgacacattaagccaaacagtagcggcactgtgggtcaagaagggccctttggctggcaccaccaaaacatgtgttctccaaaggaggctggcatcaactggagccacttcacagcttgtttgagaactggatctgaccagtaggaagaaaccaggacagcagtggaagactgttaaagaaacctgagtaaaaagatgcaggaggttgtgctgttggatgagagttcaggaccaccaagccagctgctttggacccgccaggatacccagctccctcaggaaagcgctctattacctgctccatatcctgccttcactaaagatggaagccaaggaaacctgccgcaagcagatatcacactaatgagccaggcccaagagtcagtgacatttgaggatgtagctgtgaacttcactaacagggagtggcagtgtctgacctacgctcaaaggcatctctataaggatgtgatgttggaaaattatgggaacatggtatcacttggatttccatttcctaaacctcctttaatctctcatctggagcgagaagtagacccctgtgtgcaggatccacaggacagggagtccctaagctgctcctacccagtgtcagctgacaagatgtggcctgagaatgaaaaggcaagttcacaacaagagatttttgaaaatggagaagcctactggatgaaatttaacagtctcctaaaagttgattcccgggatcctaaggttagagaagtttgtgttcaggatgtcaaattagagaatcaatgggaaacatctataagggagaaactgagagaagagaaagaaggctctgaggaagtgacctgcaaaaaaggaaagaaccagaaagtgcttagtaaaaacttgaatccaaactcaaaacatagtcaatgtaataaagttcttatagcacagaaactccatgaatgtgccaggtgtggcaaaaacttcagttggcactcagatctaattctccatgagcaaattcattctggtgagaaaccccatgtgtgtaatgagtgtgggaaagcattcaagaccagaaatcagctttctatgcaccggataatccacacaggggagaaaccttttaattgcacccagtgtgggaaggctttcaacagtagatcagctctttgccgacataaaaaaacccacagtggggagaagcctcacgagtgcagggactgtgggaaggccttcaagaccaggaaccgtctctgtatgcatcagcttatccacaccggggagaagccttacaaatgtaactgctgtgggaaggccttccagtttaagcattcccttaccatccatggcagaatccacactggggagaagccatatgaatgtgaggagtgcgggaaggccttcagtgggagttcagacctcaccaaacacataagaatccacactggggaacgaccttatgagtgcagcaagtgtggaagggccttcagtcggagctcagacctaagcaaacacaaacgaatccatactcgggagaaacactatgggtgtccccagtgtggaaaagacttcagcatcaaggcagaactcaccaaacacagaaggatccacactgaagagaaacgttacaggtgtgaggagtgtgggaaagcctttcgtcataactgtaagcgcagggctcatgaacgagagcatacaggggagaagccctatcaatgcagggattgtgggaaaaccttccaagatcagcactgccttaccatccatcagagaatccacactggagagaaaccttacaaatgtttagagtgtgggaaagctttcagtgggaagtcaaacttgaccaatcatcgaagaattcacactggagagaagcctcacaaatgtgaggtatgtggaatggccttccatcatagttcagtcctgaggcagcacaaaagaatccacactggtgagaagccatacacctgcagtgagtgtggcacgtccttccgtcagggctcagctctgattggacataagcgagttcatactggggagaaaccttatgaatgtgaggaatgtggaaaagcttttagagtgagctcaaatcttactggacataagaaaagaaaacatcaagtatggagtacccatgaacttgatgggagtaggaaatccctctctccagtgactgtttctcagacctcagtagtcagtattttgaccagtgcctgagtataacgattctggtgttactttctgtttttcctacctcttaggctggtccttctgtctcttatattagttattcctgatttcctgacccttaattgtgagattccccaaagacattgtcctttaccttcttattcactattttttcagtgagcacatttacttccaagagtttatcaatcacttcctaatattaataaacacttattagtgctt

SEQ ID NO: 23962 - protein, 487 aa, Artificial Sequence
  derived and/or modified sequence
MAAAALRAPTQVTVSPETHMDLTKGCVTFEDIAIYFSQDEWGLLDEAQRLLYLEVMLENFALVASLGCGHGTEDEETPSDQNVSVGVSQSKAGSSTQKTQSCEMCVPVLKDILHLADLPGQKPYLVGECTNHHQHQKHHSAKKSLKRDMDRASYVKCCLFCMSLKPFRKWEVGKDLPAMLRLLRSLVFPGGKKPGTITECGEDIRSQKSHYKSGECGKASRHKHTPVYHPRVYTGKKLYECSKCGKAFRGKYSLVQHQRVHTGERPWECNECGKFFSQTSHLNDHRRIHTGERPYECSECGKLFRQNSSLVDHQKIHTGARPYECSQCGKSFSQKATLVKHQRVHTGERPYKCGECGNSFSQSAILNQHRRIHTGAKPYECGQCGKSFSQKATLIKHQRVHTGERPYKCGDCGKSFSQSSILIQHRRIHTGARPYECGQCGKSFSQKSGLIQHQVVHTGERPYECNKCGNSFSQCSSLIHHQKCHNT

SEQ ID NO: 23963 - protein, 438 aa, Artificial Sequence
  derived and/or modified sequence
MDLTKGCVTFEDIAIYFSQDEWGLLDEAQRLLYLEVMLENFALVASLGCGHGTEDEETPSDQNVSVGVSQSKAGSSTQKTQSCEMCVPVLKDILHLADLPGQKPYLVGECTNHHQHQKHHSAKKSLKRDMDRASYVKCCLFCMSLKPFRKWEVGKDLPAMLRLLRSLVFPGGKKPGTITECGEDIRSQKSHYKSGECGKASRHKHTPVYHPRVYTGKKLYECSKCGKAFRGKYSLVQHQRVHTGERPWECNECGKFFSQTSHLNDHRRIHTGERPYECSQCGKSFSQKATLVKHQRVHTGERPYKCGECGNSFSQSAILNQHRRIHTGAKPYECGQCGKSFSQKATLIKHQRVHTGERPYKCGDCGKSFSQSSILIQHRRIHTGARPYECGQCGKSFSQKSGLIQHQVVHTGERPYECNKCGNSFSQCSSLIHHQKCH

SEQ ID NO: 23964 - DNA, 1464 bp, Artificial Sequence
  derived and/or modified sequence
atggccgccgccgccctgagagcccccacccaggtgaccgtgagccccgagacccacatggacctgaccaagggctgcgtgaccttcgaggacatcgccatctacttcagccaggacgagtggggcctgctggacgaggcccagagactgctgtacctggaggtgatgctggagaacttcgccctggtggccagcctgggctgcggccacggcaccgaggacgaggagacccccagcgaccagaacgtgagcgtgggcgtgagccagagcaaggccggcagcagcacccagaagacccagagctgcgagatgtgcgtgcccgtgctgaaggacatcctgcacctggccgacctgcccggccagaagccctacctggtgggcgagtgcaccaaccaccaccagcaccagaagcaccacagcgccaagaagagcctgaagagagacatggacagagccagctacgtgaagtgctgcctgttctgcatgagcctgaagcccttcagaaagtgggaggtgggcaaggacctgcccgccatgctgagactgctgagaagcctggtgttccccggcggcaagaagcccggcaccatcaccgagtgcggcgaggacatcagaagccagaagagccactacaagagcggcgagtgcggcaaggccagcagacacaagcacacccccgtgtaccaccccagagtgtacaccggcaagaagctgtacgagtgcagcaagtgcggcaaggccttcagaggcaagtacagcctggtgcagcaccagagagtgcacaccggcgagagaccctgggagtgcaacgagtgcggcaagttcttcagccagaccagccacctgaacgaccacagaagaatccacaccggcgagagaccctacgagtgcagcgagtgcggcaagctgttcagacagaacagcagcctggtggaccaccagaagatccacaccggcgccagaccctacgagtgcagccagtgcggcaagagcttcagccagaaggccaccctggtgaagcaccagagagtgcacaccggcgagagaccctacaagtgcggcgagtgcggcaacagcttcagccagagcgccatcctgaaccagcacagaagaatccacaccggcgccaagccctacgagtgcggccagtgcggcaagagcttcagccagaaggccaccctgatcaagcaccagagagtgcacaccggcgagagaccctacaagtgcggcgactgcggcaagagcttcagccagagcagcatcctgatccagcacagaagaatccacaccggcgccagaccctacgagtgcggccagtgcggcaagagcttcagccagaagagcggcctgatccagcaccaggtggtgcacaccggcgagagaccctacgagtgcaacaagtgcggcaacagcttcagccagtgcagcagcctgatccaccaccagaagtgccacaacacctag

SEQ ID NO: 23965 - DNA, 1464 bp, Artificial Sequence
  derived and/or modified sequence
atggcagctgctgcgctacgcgccccaacccaggtcacggtatctccagaaacacatatggacttgacaaagggctgcgtaaccttcgaggatatcgctatttacttctctcaagatgagtggggtctgctcgatgaggcccagcggctgctctatctcgaagtgatgctcgagaacttcgctctggtagcctccttgggttgcggacacggtactgaagatgaggagacccccagcgaccagaacgttagcgttggggtgagccagtctaaagctggcagttctactcaaaaaacacagtcctgcgaaatgtgcgtgccggtgttaaaagacatccttcacttagccgatctgcccggccagaagccttatctggtgggcgagtgcacaaatcaccatcagcaccagaagcaccatagtgctaaaaagtctctgaagagggatatggaccgggcctcctatgtgaagtgctgtctcttttgcatgagcttaaagccctttcggaagtgggaggtagggaaagatcttccagctatgctcagactgttgcgatctctggtgttcccagggggtaaaaagcctggcacaattactgagtgtggagaggatatcaggagtcagaagagccactacaaaagcggcgagtgcggcaaggctagcagacacaagcatacaccagtgtaccacccacgtgtgtacactggcaagaagttatatgagtgttccaagtgtgggaaagcatttcgaggaaagtactcacttgtgcagcaccagcgcgttcacactggcgagcggccatgggagtgtaatgaatgcgggaaatttttcagtcagacttcacacctcaatgatcaccgccgtatccacacaggcgaaagaccttacgaatgcagcgagtgcggaaagcttttcaggcagaattcgtccctggtggaccatcagaagattcacaccggggcccgaccctatgaatgcagccagtgtgggaagagctttagtcaaaaagctacactcgttaaacaccagagggtacacactggagaacggccgtacaaatgcggggaatgtggtaattcttttagtcagtcggctatcctcaatcaacacaggaggatacacacgggagcgaaaccctatgagtgtggccagtgcggaaagtccttcagtcagaaagcgactttgatcaagcaccaacgggtccacaccggggagcgaccctacaagtgtggcgattgcggaaaatcattctcccagagtagcattctaattcaacacagacggatccacactggtgcaaggccatacgagtgtggtcagtgcgggaagtctttctctcagaaaagcggtctcatacagcaccaggtggttcacacgggtgaacgcccctacgagtgcaataaatgtggcaactcattctcacaatgtagctccttgatccatcaccagaagtgccataatacctag

SEQ ID NO: 23966 - DNA, 1464 bp, Artificial Sequence
  derived and/or modified sequence
atggccgctgcagctttgagggcccctactcaggtcaccgtctctcccgaaacccacatggatctgaccaaggggtgcgtgactttcgaggacattgccatttatttcagccaagacgaatggggtcttctagacgaggctcagcggctcctctatctggaagtgatgttagagaacttcgctctagtcgctagtctgggctgcggacatgggacagaggatgaggagacccctagtgatcagaacgtctccgtcggtgtgtcacagtcaaaggccgggtcaagtactcagaagacccagtcctgtgagatgtgcgtcccagtgctcaaagatatactgcacctggcagatctccctgggcagaagccttatctggtgggtgagtgtacaaaccatcaccagcatcagaagcatcattccgccaagaaatctctgaaacgggatatggaccgagccagttacgtgaagtgctgtctcttttgtatgtcattgaaacccttccggaaatgggaggtcggaaaagatcttccggccatgcttcggcttctcaggtctcttgtcttccccggcggaaaaaagcccggcaccatcactgagtgcggtgaagatatccgcagccagaaaagtcactacaagtcaggagagtgtggcaaagcttcacggcataaacacacacctgtgtaccaccctcgcgtgtacacaggcaagaaactatacgagtgtagcaagtgcggtaaggctttcaggggcaagtatagcctggtgcagcaccagcgggttcacaccggagaacgcccgtgggaatgtaacgagtgtggcaaatttttctcccagacaagccatttgaacgaccatcggaggatccacactggcgagcgaccgtacgagtgttcagagtgcgggaaactgttccgccaaaactccagcctcgtagaccaccagaagattcacacaggtgcgcgaccttacgaatgctctcagtgtgggaagtctttctcccagaaagccacattggtgaagcaccagagagtccatactggggagaggccgtataaatgtggagaatgcggcaactctttttcccagtccgccatcctgaatcaacacagaaggatccacacaggtgccaagccatacgagtgcggccaatgcggcaagagtttttctcaaaaggctacacttatcaagcaccagagagtgcataccggggagcgaccgtacaagtgtggcgactgcggaaagtctttttcacagtctagcatactgatccaacatcggcgcatccacactggagctcgcccttatgagtgcggacaatgtggcaagtcattctcgcagaagtcgggattaatccagcaccaggtcgtccatacgggggagaggccctacgagtgtaacaagtgtggtaatagtttttctcagtgctcctcgcttattcatcatcagaagtgccataatacatag

SEQ ID NO: 23967 - DNA, 1464 bp, Artificial Sequence
  derived and/or modified sequence
atggctgctgctgccctgcgggcccccacccaggtgacagtgtccccagagacccacatggacctgaccaagggctgtgtgacctttgaggacatcgccatctacttcagccaggatgagtggggcctgctggatgaggcccagaggctgctgtacctggaggtgatgctggagaactttgccctggtggccagcctgggctgcggccacggcacagaagatgaggagacccccagcgaccagaatgtgtctgtgggcgtgtcccagagcaaggccggcagcagcacccagaagacccagagctgtgagatgtgtgtgcctgtgctgaaggacatcctgcacctggccgacctgcccggccagaagccctacctggtgggggagtgcaccaaccaccaccagcaccagaagcaccacagcgccaagaagagcctgaagagggacatggaccgggccagctatgtgaagtgctgcctcttctgcatgagcctgaagcccttcaggaagtgggaggtgggcaaggacctgcctgccatgctgcggctgctgcggagcctggtgtttcctgggggcaagaagccaggcaccatcacagaatgtggggaggacatccgcagccagaagagccactacaagtctggagaatgtgggaaggccagccgccacaagcacacccctgtgtaccacccccgggtgtacaccgggaagaagctgtatgagtgcagcaaatgtgggaaggccttccggggcaagtacagcctggtgcagcaccagagggtgcacactggagagcggccctgggagtgcaatgaatgtgggaagttcttcagccagaccagccacctgaatgaccaccggcgcatccacactggagagcggccctatgagtgcagtgaatgtgggaagctgttccggcagaacagcagcctggtggaccaccagaagatccacactggagcccggccctatgagtgcagccagtgtgggaagagcttcagccagaaggccaccctggtgaagcaccagagggtgcacactggagagcggccctacaagtgtggagaatgtggcaacagcttcagccagagcgccatcctgaaccagcaccggcgcatccacactggagccaagccctatgaatgtggccagtgtgggaagagcttcagccagaaggccaccctcatcaagcaccagagggtgcacactggagagcggccctacaagtgtggggactgtgggaagagcttcagccagagcagcatcctgatccagcaccggcgcatccacactggagcccggccctatgaatgtggccagtgtgggaagagcttcagccagaagagcggcctcatccagcaccaggtggtgcacactggagagcggccctatgagtgcaacaagtgtggcaacagcttcagccagtgcagcagcctcatccaccaccagaagtgccacaacacctag

SEQ ID NO: 23968 - DNA, 1464 bp, Artificial Sequence
  derived and/or modified sequence
atggccgccgccgccctgcgggcccccacccaggtgaccgtgagcccagaaactcacatggatttgacgaagggctgcgtcacatttgaagatatcgccatctacttttcacaagacgagtggggtcttctcgatgaagcacagcgtttactgtacttggaagtcatgctcgaaaactttgccctggtcgcgtcattagggtgtgggcacgggacggaagatgaggagacaccttccgatcagaatgtatctgtgggagtgtcccaaagtaaagccgggagctctactcagaaaacacaatcctgtgagatgtgcgtgcctgtgctgaaggacattctgcatttggcagatcttcctgggcagaaaccttatctggtaggggaatgcaccaatcatcaccagcatcagaagcatcactcagccaagaagtccctgaagagagatatggatcgagcctcctacgtgaagtgttgcctgttttgcatgtctctgaaaccttttaggaagtgggaggtggggaaggacctgccagcgatgcttcgactcctgaggtctctggtgtttccgggtggcaagaaacccggaacaatcacagaatgtggggaagacattaggagtcagaaaagtcactataaatctggtgaatgcggtaaggcgtctagacacaaacatacccccgtataccacccacgggtatacactggaaagaagctgtatgaatgctcgaagtgtgggaaggcctttcgcgggaagtactcgctggttcaacatcagagagttcacacaggtgagagaccctgggagtgtaacgaatgtgggaagtttttctcccaaacctcccacctgaacgaccatagacgaatccacacaggagagcgcccttatgaatgctctgaatgtggcaagttatttagacagaacagctcactggtggatcaccagaagatccacacaggcgcacggccctacgagtgtagccagtgtgggaagagcttcagccagaaggccacgctggtcaaacaccagagggtgcacacaggagaacgcccatacaaatgcggcgagtgcggcaactccttttctcagtccgcaattctgaatcagcaccgccggatccataccggagccaagccctacgagtgtggccaatgtggcaagagcttcagtcagaaggcaaccctaattaagcatcagagagtgcatacaggggagagaccttataaatgcggtgactgcggtaagtccttttcacaaagctccatcctgatccagcaccgccggatccacacaggcgctcgcccctacgagtgcggacagtgtggcaaatctttctctcagaaatccggactcattcagcatcaggtggtccacactggggagagaccgtacgagtgtaataagtgtggaaactcgttttcacagtgcagcagccttatccatcatcagaaatgtcacaacacttag

SEQ ID NO: 23969 - DNA, 1464 bp, Artificial Sequence
  derived and/or modified sequence
atggccgccgccgccctgcgggcccccacccaggtgaccgtgagccccgagacgcatatggacctgacgaagggctgcgtcaccttcgaggacattgccatctacttctcgcaggacgagtggggcctgctggacgaggcacaaaggctgctgtatttggaagtcatgcttgagaattttgcactggttgcttcacttggatgcggccatggcactgaggatgaagagacccctagcgatcagaacgtgagcgtaggcgtgtcacaaagtaaggccggctcgtcaacacaaaaaacgcagtcttgcgagatgtgcgtgccagtcctcaaggatattcttcatttggcggacttgcctggccagaaaccatatctggtcggagagtgtacgaaccaccaccagcaccagaagcatcactcagctaagaagtcgctgaagcgagatatggatagagcttcttatgtgaagtgctgtctattctgtatgagtttaaagcctttcaggaaatgggaagtgggaaaggatctgcctgccatgctccgtttgcttaggtcacttgtttttcccggcggcaaaaaacctggcaccatcaccgaatgtggggaagacattagatcccagaaatctcactacaagagcggggagtgcggcaaagcctctcgccacaagcatacccctgtgtatcacccaagagtatatactggcaagaagctctatgaatgttccaaatgtggaaaggcctttcgggggaagtatagcctcgttcagcaccagcgcgttcataccggagagagaccttgggagtgcaacgagtgcgggaaattcttctctcagacctctcacttgaatgatcacaggcgcattcacacgggagaacgtccctacgaatgctctgaatgcggaaagctgttccgccagaactcttctttagtcgaccaccagaagattcataccggcgccaggccctacgagtgttcccagtgtggaaagtccttcagccagaaggccactctggtgaaacaccagagagttcataccggtgagagaccgtacaaatgtggagagtgcggcaattcatttagccagtctgccatcttgaatcagcaccggagaatccacaccggcgctaagccttatgagtgtgggcagtgtggcaaaagctttagtcagaaggccactctgatcaagcatcagcgagtccatactggtgagcgcccctataaatgtggggattgtggtaaaagttttagtcagagtagcatcctgattcagcacaggcggatccataccggcgcccggccatatgaatgtggtcagtgcgggaagagcttctctcagaagtcggggctcattcaacaccaagtggtccacaccggagagagaccatacgagtgcaataagtgtggcaactccttttcacagtgctctagcttgattcatcaccagaagtgccataatacatag

SEQ ID NO: 23970 - DNA, 1464 bp, Artificial Sequence
  derived and/or modified sequence
atggctgctgctgctctacgggcacctacacaggtgaccgtttctcctgagacccacatggacctcacaaaaggctgtgttaccttcgaagacattgccatctatttttcacaggacgaatggggcctgctcgacgaagctcagcgcctcctctatctggaggtaatgctggagaactttgccctggtcgcctctctcgggtgcggccacggcaccgaggacgaggagaccccatctgatcagaacgtgtctgtcggcgtctcccaatccaaagcagggagctcaacacaaaaaacgcagtcttgcgagatgtgtgtgccagtgctgaaggacattctccacctggcagacttgccaggtcagaagccatacctcgttggtgagtgtaccaatcatcatcagcatcagaaacaccactcagctaagaagtcattgaagcgcgacatggaccgggctagctacgtgaaatgctgtctcttttgtatgtccttgaagccttttagaaaatgggaggtcggaaaggacctaccggcaatgctgaggctcttaaggtcccttgtcttccctggcggaaagaaacccggaacaatcactgagtgcggagaagacattagatcacagaagtcccattacaagtcaggtgagtgtggtaaggcatctcgccacaagcataccccggtatatcatccccgtgtgtacactggcaaaaagctttacgaatgcagcaaatgtggcaaggcctttaggggtaagtattcattagtccagcatcagcgtgtccacacaggcgaaagaccttgggaatgcaatgagtgtggaaagttcttctcacagacgtcacaccttaatgaccaccgcagaatacacaccggcgagcggccatacgagtgctctgaatgcggaaagctgtttcgacagaatagctctcttgtggatcaccagaagatccacaccggtgcacggccatatgaatgttctcagtgtggaaaatctttctcccaaaaggctaccctcgtcaagcatcaacgcgtccacactggagagagaccctataagtgcggtgaatgcggcaatagtttttctcagagcgctatactgaaccagcaccgtaggatccacaccggggctaaaccttatgaatgtggacagtgcgggaagagcttctcacaaaaggcaacactgataaagcaccagagagtccacaccggcgagcgcccatacaaatgcggtgactgtgggaagtccttttcgcagtccagtatccttatccagcacagacggatccataccggcgcacgtccttatgaatgcggacaatgtggcaagtctttcagccagaagagcgggctcatccaacatcaggtggtgcacaccggggagcgaccttacgaatgcaataaatgcggcaactccttctcccagtgtagttctctaatacaccatcaaaagtgccataacacctag

SEQ ID NO: 23971 - DNA, 1464 bp, Artificial Sequence
  derived and/or modified sequence
atggcggctgctgcacttagagcccctactcaggtcaccgttagtcccgagactcacatggacttaacgaagggttgcgtcaccttcgaggacatagccatctatttctcccaggacgagtggggattgctcgatgaggctcagcgattgctctacctggaggtgatgctagaaaatttcgctctggtggcctctctcggctgcgggcacggcactgaggacgaggagactccttctgatcagaatgttagcgtcggggtctcccaaagtaaggccggaagcagcacacagaagactcagagctgtgaaatgtgcgtcccagttctgaaagatatcttacacttggctgatctcccaggccaaaaaccttacctggtgggagaatgtacaaaccaccaccaacatcaaaagcatcactcggccaaaaagagccttaaacgcgatatggacagagcctcctacgtgaaatgttgtctgttttgtatgtcattgaaacccttcagaaaatgggaggtgggaaaagatttacctgcaatgctgcgactgctccgaagtctcgtcttcccaggaggaaaaaagccaggcactatcaccgagtgcggggaagacattcgaagccaaaaaagtcactacaagtccggcgagtgcggcaaagccagccgccataagcatactccagtgtaccatccgagagtctacacgggaaagaaactatatgagtgtagtaagtgcggcaaagcctttagagggaaatacagtttagtgcagcatcagagggttcacacaggggaacggccatgggagtgcaatgaatgcggcaagttctttagtcagacatcacatcttaacgaccaccggcgaatccataccggcgagcggccttacgaatgctcagagtgcggtaagttattccggcagaactcatctctggtggaccatcagaaaattcacaccggagcgaggccgtatgagtgtagccagtgcggaaaatctttcagccagaaggctacactcgtcaaacatcagagagtgcacaccggagagcgcccatataagtgcggcgagtgcggaaattcattttctcagtccgcgatactgaaccagcacagaaggatccacaccggcgcaaagccttatgaatgtggtcaatgtggcaagtcctttagtcagaaggcgaccctcattaagcaccaacgggtgcacaccggcgagcggccttacaagtgcggagactgcggtaaaagtttctcgcaaagttctatcctgattcagcatcgcagaatccacactggtgctcgtccttatgaatgcgggcagtgcgggaagtcgttctcacagaagagtgggctgattcagcaccaagtcgtccacacgggagaacgaccatacgagtgcaacaaatgtggcaacagcttttcccagtgttccagcctcatacatcatcagaagtgtcacaacacttag

SEQ ID NO: 23972 - DNA, 2676 bp, Artificial Sequence
  derived and/or modified sequence
gggttctaagggtcggcggcggcggggttgacggctttgcctaggtccctccgcccgtagctgtcgggtcccggccccgctctgcccacagactccgatggctgcggccgcgctgagggccccgactcaggttactgtgtctccagaaacacatatggacctcacaaagggctgtgtgacctttgaggacatcgccatttacttctcacaggacgagtggggacttcttgatgaggctcagagactcctgtaccttgaagtgatgctggagaactttgcccttgtagcctcactgggttgtggccatggaacagaggatgaagagacaccttctgaccagaatgtttctgtaggagtgtcacagtcaaaggcaggttcatccacacagaagactcaatcctgtgagatgtgtgtcccagtcctgaaagatattttgcatctagctgatctccctgggcagaaaccatacttggttggagaatgtacaaaccatcaccagcaccagaagcatcacagtgcaaagaaatccttgaagagggacatggacagagcctcatatgtgaagtgctgcctattctgtatgtcattgaagccctttcgcaaatgggaggttggaaaggaccttccagccatgttgcggcttctgaggtccctggtctttcctggaggcaagaaacccggcacaattactgaatgtggggaggacattcgcagtcaaaaaagtcattacaagtcaggtgaatgtgggaaggcttccaggcacaaacacactcctgtttaccatccaagagtctacactggaaaaaagctttatgagtgtagcaaatgtgggaaagccttccgtggcaagtactcacttgttcagcaccagagagtccatactggagaaaggccttgggagtgcaatgaatgtggaaaattctttagccaaacctcccacctgaatgatcatcggagaatccacaccggagaaaggccttatgagtgcagcgaatgtggaaaattatttagacaaaactccagccttgttgaccaccagaaaatacacactggagcaaggccttatgagtgtagccagtgtgggaaatcctttagccaaaaagccacccttgttaaacaccaaagagttcacactggagaaaggccttataagtgtggtgaatgtgggaattcctttagtcaaagtgccattcttaatcaacaccgaagaattcacactggagcaaagccttatgagtgtggccagtgtgggaaatcctttagtcaaaaagctaccctcattaaacaccagagagttcacactggagaaaggccttataagtgtggtgactgtgggaaatcctttagtcaaagctccatccttattcaacaccggagaattcatactggagcaaggccttatgagtgtggccagtgtggaaagtcctttagccaaaagtctggtctcattcaacaccaagtggttcacactggagaaaggccttatgagtgcaacaaatgtgggaattcctttagccaatgctccagcctcatacatcaccaaaaatgtcataacacatagaggcctcatgaatgcagcaaatgtggaagcgccttcaactcaagatctatcatcatttagctcctgaaagtccacacttaagtagagccttagacctacagggaaagtgctgtctctgtagtattgtagcagtagagagcctttgtgagggagccatctgcctgaagttgaacctcattcttccttgtttctctggtagaaaccatctaccctctaccaccttgcacagtgggcactggtcactcctatgtgctaagacaaggcagacatctgtgtgttctcttaagtctttggaggaaatcttgagcagtctaagcctttagagaaaattcattcttttttctgactgatcacagcatacgtgtgacccagtttgggtcaggagggcccagccttggttctgctggacacttatgtgcaaggattcccttcatgtaaattcttggtctcacatgacacttggtcattcttccagcctccatgtcaccacgtggtgaatggctgcctcacattgctccagtttgtgcactaataaaagccttatatttgaatctacctgtagtcttggggttctgtttactgtgtggggtggctgggagacagacttcaactctatatgaaggaatggatggcttttgtgggcctctgcaggaaagtaagatgacagagtaattctaattctggttttggtcatacttgctttgctacctaaaatctcctaggaaaaaatgcaaggttttggttattctaatttgtggcctggatccctattctttctgtgagactagaggtcatcctgaggagaggccagctgttatgacaagcatgtgtgcttcagggaataggacaattttattccattgtttccagaggatgtcatatgatgcccagtgctgctgagaagcttttcatggggttctataaggaggcatgccctgatatcaaacattccataggccgatgtcacgcagaagacaacgcgagtcacatgtgaactgtaattggtacagaaatacctgggtatttctgtactgtgtgtactgtagcaaactagttggaatgtgcctcttataaaagtacatttacaaatcttcccgtgactgtggctttgagca

SEQ ID NO: 23973 - DNA, 1586 bp, Artificial Sequence
  derived and/or modified sequence
ttcagtggcggtcatttttgcagcgcttgggtgcatccagaccgtcagagctttgggagcgctttgtttggcgacagtcggaaggcgcgaggggaggggtcctcccgctgaacagtgggggttctaagggtcggcggcggcggggttgacggctttgcctaggtccctccgcccgtagctgtcgggtcccggccccgctctgcccacagactccgatggctgcggccgcgctgagggccccgactcaggttactgtgtctccagaaacacatatggacctcacaaagggctgtgtgacctttgaggacatcgccatttacttctcacaggacgagtggggacttcttgatgaggctcagagactcctgtaccttgaagtgatgctggagaactttgcccttgtagcctcactgggttgtggccatggaacagaggatgaagagacaccttctgaccagaatgtttctgtaggagtgtcacagtcaaaggcaggttcatccacacagaagactcaatcctgtgagatgtgtgtcccagtcctgaaagatattttgcatctagctgatctccctgggcagaaaccatacttggttggagaatgtacaaaccatcaccagcaccagaagcatcacagtgcaaagaaatccttgaagagggacatggacagagcctcatatgtgaagtgctgcctattctgtatgtcattgaagccctttcgcaaatgggaggttggaaaggaccttccagccatgttgcggcttctgaggtccctggtctttcctggaggcaagaaacccggcacaattactgaatgtggggaggacattcgcagtcaaaaaagtcattacaagtcaggtgaatgtgggaaggcttccaggcacaaacacactcctgtttaccatccaagagtctacactggaaaaaagctttatgagtgtagcaaatgtgggaaagccttccgtggcaagtactcacttgttcagcaccagagagtccatactggagaaaggccttgggagtgcaatgaatgtggaaaattctttagccaaacctcccacctgaatgatcatcggagaatccacaccggagaaaggccttatgagtgcagccagtgtgggaaatcctttagccaaaaagccacccttgttaaacaccaaagagttcacactggagaaaggccttataagtgtggtgaatgtgggaattcctttagtcaaagtgccattcttaatcaacaccgaagaattcacactggagcaaagccttatgagtgtggccagtgtgggaaatcctttagtcaaaaagctaccctcattaaacaccagagagttcacactggagaaaggccttataagtgtggtgactgtgggaaatcctttagtcaaagctccatccttattcaacaccggagaattcatactggagcaaggccttatgagtgtggccagtgtggaaagtcctttagccaaaagtctggtctcattcaacaccaagtggttcacactggagaaaggccttatgagtgcaacaaatgtgggaattcctttagccaatgctccagcctcatacatcaccaaaaatgtcat

SEQ ID NO: 23974 - DNA, 4181 bp, Artificial Sequence
  derived and/or modified sequence
ttcagtggcggtcatttttgcagcgcttgggtgcatccagaccgtcagagctttgggagcgctttgtttggcgacagtcggaaggcgcgaggggaggggtcctcccgctgaacagtgggggttctaagggtcggcggcggcggggttgacggctttgcctaggtccctccgcccgtagctgtcgggtcccggccccgctctgcccacagactccgatggctgcggccgcgctgagggccccgactcaggttactgtgtctccagaaacacatatggacctcacaaagggctgtgtgacctttgaggacatcgccatttacttctcacaggacgagtggggacttcttgatgaggctcagagactcctgtaccttgaagtgatgctggagaactttgcccttgtagcctcactgggttgtggccatggaacagaggatgaagagacaccttctgaccagaatgtttctgtaggagtgtcacagtcaaaggcaggttcatccacacagaagactcaatcctgtgagatgtgtgtcccagtcctgaaagatattttgcatctagctgatctccctgggcagaaaccatacttggttggagaatgtacaaaccatcaccagcaccagaagcatcacagtgcaaagaaatccttgaagagggacatggacagagcctcatatgtgaagtgctgcctattctgtatgtcattgaagccctttcgcaaatgggaggttggaaaggaccttccagccatgttgcggcttctgaggtccctggtctttcctggaggcaagaaacccggcacaattactgaatgtggggaggacattcgcagtcaaaaaagtcattacaagtcaggtgaatgtgggaaggcttccaggcacaaacacactcctgtttaccatccaagagtctacactggaaaaaagctttatgagtgtagcaaatgtgggaaagccttccgtggcaagtactcacttgttcagcaccagagagtccatactggagaaaggccttgggagtgcaatgaatgtggaaaattctttagccaaacctcccacctgaatgatcatcggagaatccacaccggagaaaggccttatgagtgcagcgaatgtggaaaattatttagacaaaactccagccttgttgaccaccagaaaatacacactggagcaaggccttatgagtgtagccagtgtgggaaatcctttagccaaaaagccacccttgttaaacaccaaagagttcacactggagaaaggccttataagtgtggtgaatgtgggaattcctttagtcaaagtgccattcttaatcaacaccgaagaattcacactggagcaaagccttatgagtgtggccagtgtgggaaatcctttagtcaaaaagctaccctcattaaacaccagagagttcacactggagaaaggccttataagtgtggtgactgtgggaaatcctttagtcaaagctccatccttattcaacaccggagaattcatactggagcaaggccttatgagtgtggccagtgtggaaagtcctttagccaaaagtctggtctcattcaacaccaagtggttcacactggagaaaggccttatgagtgcaacaaatgtgggaattcctttagccaatgctccagcctcatacatcaccaaaaatgtcataacacatagaggcctcatgaatgcagcaaatgtggaagcgccttcaactcaagatctatcatcatttagctcctgaaagtccacacttaagtagagccttagacctacagggaaagtgctgtctctgtagtattgtagcagtagagagcctttgtgagggagccatctgcctgaagttgaacctcattcttccttgtttctctggtagaaaccatctaccctctaccaccttgcacagtgggcactggtcactcctatgtgctaagacaaggcagacatctgtgtgttctcttaagtctttggaggaaatcttgagcagtctaagcctttagagaaaattcattcttttttctgactgatcacagcatacgtgtgacccagtttgggtcaggagggcccagccttggttctgctggacacttatgtgcaaggattcccttcatgtaaattcttggtctcacatgacacttggtcattcttccagcctccatgtcaccacgtggtgaatggctgcctcacattgctccagtttgtgcactaataaaagccttatatttgaatctacctgtagtcttggggttctgtttactgtgtggggtggctgggagacagacttcaactctatatgaaggaatggatggcttttgtgggcctctgcaggaaagtaagatgacagagtaattctaattctggttttggtcatacttgctttgctacctaaaatctcctaggaaaaaatgcaaggttttggttattctaatttgtggcctggatccctattctttctgtgagactagaggtcatcctgaggagaggccagctgttatgacaagcatgtgtgcttcagggaataggacaattttattccattgtttccagaggatgtcatatgatgcccagtgctgctgagaagcttttcatggggttctataaggaggcatgccctgatatcaaacattccataggccgatgtcacgcagaagacaacgcgagtcacatgtgaactgtaattggtacagaaatacctgggtatttctgtactgtgtgtactgtagcaaactagttggaatgtgcctcttataaaagtacatttacaaatcttcccgtgactgtggctttgagcagtcataggacctagaaatctgtgtatgtccaatagctgaggttattttcagcaaaaataattaaagggttttattttttaattcttgttggttttctaggttgttcacctcaagtgcattgctgtagaggcagaaaaaggaggataaagataacagaagtcctataggccagggatgtattgatagctcttgtgatttccaccagtgttgctgttgtctcaaattgccacagccttcattgcttgccaacatttcctgcatggagggactcatggttgcccttccccaggcctgaagagagagtgcagtcaacatgagattgctaggcattctggtttctgaaagttgggtgatcagatactttattgtgaaacatgttttacaaactttcttgatgtgtaagtgacatgccatagtttacatccatttatggtgtataatttgaagagtttgtcatacaagcctgtgaaaccataatcatgatcatgaacatattcatgattcacctcttgctgttttacaatctctgcgtgtactttccaggccttcaggagtcctgtcatttactttccctacaggagaatagtttgtgttttctaggattttatgtgaattgaaacgtaaaatacttactccatttttcctgatgatgcacaattttttttttttttttgagatggagtctcagtctgtcaccaggctggagtgcagtggcatgatcttggctcactccaacctcctcctgggttccagcgattctcctgcctcagcctcctgagaagctaggactacaggcatgcactaccacgcccaactaatttttgtatttttagtagagatgtggttttaccatgtttgccaggatggtcttgatctcttgacctcgtgatccgcccgcctcagcctcccgaagtgctgggattacaggcgtaagccaccacaccagctgatgcacaattacttttaagatttatcaatattgcttatgtgaatagttcatttgtattgctgagaaatagtctgtggatatgtcacaatttggataaacagttggatgctttccagttttgggctgttgcaaataatgctactatgaacataggcatataactcttaatatgcagaaatgctttatttctcctgtgtcagtagtacagtgtacgtgaatgcgtcacttttaaagacaaggccagactataacctaactgtaccatttgcattctcatcaacagtatgtgaaccttcttatttctctacattcttgccatacttggtatggttagtctttttaattttagttgttttaatagctgtataatagcatctgtctgtgattttattgcatttttctggtattttatggtattgaacatttgaacatcttgta

SEQ ID NO: 23975 - protein, 275 aa, Artificial Sequence [sequence omitted]

SEQ ID NO: 23976 - DNA, 828 bp, Artificial Sequence
  derived and/or modified sequence
atgggcgctccgcactggtgggaccaattacaggccggatcatcagaagtggactggtgcgaagataattatactatcgttccagcaatagccgagttttataacacgatcagtaatgtcctttttttcatcctgcctcccatttgcatgtgtctgtttcgccagtacgccacctgcttcaatagcgggatttatctgatttggaccctcctggtcgttgtgggcatcggatccgtgtacttccacgccactcttagttttctagggcagatgctggacgagcttgctgtgctttgggttttgatgtgcgccctagcaatgtggtttccccggagatacttacctaagatttttagaaatgatcgcggtaggttcaaagtggttgtttccgtcttaagtgccgtaactacatgtttggcttttgttaagcctgctattaataacatctcattgatgaccttaggcgtgccgtgcaccgcactgctgatagcagagctgaagcgctgtgataatatgcgggtgttcaagctgggcttgtttagcgggctgtggtggaccctggccctgttttgttggatttctgaccgcgctttttgtgaattactttcttcttttaactttccatatctgcactgcatgtggcacattctcatttgtttggcagcgtacctcggttgtgtgtgctttgcctatttcgacgctgcatctgagatccccgaacaaggccccgtaattaagttttggccgaatgaaaagtgggccttcatcggagtcccctatgtctctctgctctgtgccaacaagaagtcttctgtcaagattacatag

SEQ ID NO: 23977 - DNA, 828 bp, Artificial Sequence
  derived and/or modified sequence
atgggcgccccccactggtgggaccagctgcaggccggcagcagcgaggtggactggtgtgaggacaactacaccatcgtgcctgccatcgccgagttctacaacaccatcagcaatgtgctcttcttcatcctgccccccatctgcatgtgcctcttccggcagtatgccacctgcttcaacagcggcatctacctgatctggaccctgctggtggtggtgggcatcggctctgtgtacttccacgccaccctgtccttcctgggccagatgctggatgagctggccgtgctgtgggtgctgatgtgtgccctggccatgtggttcccccggcgctacctgcccaagatcttcagaaatgaccggggccgcttcaaggtggtggtgtctgtgctgtctgctgtgaccacctgcctggcctttgtgaagccagccatcaacaacatcagcctgatgaccctgggcgtgccctgcacagccctgctgattgctgagctgaagagatgtgacaacatgagggtcttcaagctgggcctcttcagcggcctgtggtggaccctggccctcttctgctggatcagtgaccgggccttctgtgagctgctgagcagcttcaacttcccctacctgcactgcatgtggcacatcctgatctgcctggccgcctacctgggctgtgtgtgctttgcctactttgatgctgccagcgagatccctgagcagggccctgtgatcaagttctggcccaatgagaagtgggccttcatcggcgtgccctacgtgtccctgctgtgtgccaacaagaagagctctgtgaagatcacctag

SEQ ID NO: 23978 - DNA, 2238 bp, Artificial Sequence
  derived and/or modified sequence
agctgctccaatgccccggagtggccatgggcgccccgcactggtgggaccagctgcaggctggtagctcggaggtggactggtgcgaggacaactacaccatcgtgcctgctatcgccgagttctacaacacgatcagcaatgtcttatttttcattttaccgcccatctgcatgtgcttgtttcgtcagtatgcaacatgcttcaacagtggcatctacttaatctggactcttttggttgtagtgggaattggatccgtctacttccatgcaacccttagtttcttgggtcagatgcttgatgaacttgcagtcctttgggttctgatgtgtgctttggccatgtggttccccagaaggtatctaccaaagatctttcggaatgaccggggtaggttcaaggtggtggtcagtgtcctgtctgcggttacgacgtgcctggcatttgtcaagcctgccatcaacaacatctctctgatgaccctgggagttccttgcactgcactgctcatcgcagagctaaagaggtgtgacaacatgcgtgtgtttaagctgggcctcttctcgggcctctggtggaccctggccctgttctgctggatcagtgaccgagctttctgcgagctgctgtcatccttcaacttcccctacctgcactgcatgtggcacatcctcatctgccttgctgcctacctgggctgtgtatgctttgcctactttgatgctgcctcagagattcctgagcaaggccctgtcatcaagttctggcccaatgagaaatgggccttcattggtgtcccctatgtgtccctcctgtgtgccaacaagaaatcatcagtcaagatcacgtgatggcaagatggtggctggcttctctgcttatcgcccctcatgcagtgggcttcctttgctaggaagacagccaagggagttcgaatagttggggtgtgggctatcttttcaaaaatctatttgctggggctcttaatttctttagtgttctttgtatgtagggatttaaactttgtcatatggtacaaatattccctgcccccctgcagtttcccatttgtctttcagtatgttaatatttttgtgccatactggttttaaactttcatgttgtcacatctgttaatcttttctttaggatttctggattttgtgtaatttttaaaaaggtcccctcctcctccctaatgtgtctgtggaccacctggattccactgtacaaggggaaaagtgtctattcctttcccaaagatggaaaatggagggcttagggacactagatgcatctttctcagcatcacttccagatgcagtgacttgttgggctgcgtccttaatggccatggcagagcagtcccttgggggatccagccctgtacaatgcatctcttcctggagaaagctggcctgctccagaccccaccattcccaggcgcccttggagtggactctactgatgacagacagaccctctgagagacaagaccctctgactctgtgatggaagatgccagagattttcctttggggtaattgtccttaaacaaaaccaaacagatgaaacacacacaggacttgtggctaaaaaggctagtttttcacttgcatttctcaactaacccaggttttacatgcatctgtgaatccttttactactacctctgtggagagatggagagacttcagataaacgtgaagctaatgagtaaaaccctctctgccaaaacctacactccactttaggcccttcttgaagatgagcacaatttttaaatactgagcacaatttttaaatactgacatcacttcctcttccccctcccaccccagctcagcagcctcaaatctacagagaagaagaattatggcatgaacattcccacagacccaccatctttaagacttgacctctgtaagtttaccaaagggctcctcacaattgtggtgggggttctggttcaaaatttggagcaaacatgaagtttttggaaacgttttctcatttgaagcctccagtatgctgtactattctggaaattaccttcaagagtctcacttcttgtttctgttgtgttttctgtgggcatcatgttcttcacgcttgcagtagaaggtgctttctcggtttcccagagtatccaacggctcacctttctcaagtgctggcagtagctatgcactcacgggctggtttgggtcgctggtgcagcagcgcaaatctgtt

SEQ ID NO: 23979 - DNA, 828 bp, Artificial Sequence
  derived and/or modified sequence
atgggcgccccccactggtgggaccagctgcaggccggcagcagcgaggtcgactggtgcgaagataactataccattgtcccagctatcgccgagttttataataccatttctaacgtcctgttcttcatcttgccgcccatctgcatgtgcctgtttcgtcagtacgcgacctgcttcaacagtgggatttacttgatctggacccttctggtggtggtgggaatcggatcagtgtatttccacgctacactgtcattccttggtcaaatgctggacgaactagccgttctgtgggtgttgatgtgtgcgctggctatgtggtttccccggcgctacctgcccaagatcttccgtaacgatcggggacgcttcaaggtggtggtgtccgtgctgagcgctgtgactacatgtctggccttcgtgaagcccgccattaacaacatctccctcatgaccttgggagttccctgcactgccctgctgattgctgagctgaagcggtgtgacaacatgcgggtgttcaagctggggctattcagcggcttgtggtggacgctggccctattctgctggatttcagaccgagccttttgcgagttgctctcaagctttaattttccttacttgcactgtatgtggcatatcttaatatgcctggcggcatatctcggttgcgtctgtttcgcatatttcgatgcggcgtcagaaatacctgagcagggacctgtcattaagttctggcccaatgagaagtgggcctttattggggtcccatatgtgagcctattgtgtgcgaataagaaatcctctgtaaaaattacttag

SEQ ID NO: 23980 - DNA, 828 bp, Artificial Sequence
  derived and/or modified sequence
atgggagccccacattggtgggatcaactacaggccggatcctccgaggtcgactggtgcgaagacaactataccatcgtcccagccatcgcagagttttataacaccatctccaatgtgttattctttatcctcccacctatctgtatgtgcctgtttcgccagtatgctacatgcttcaatagcggcatttacctaatctggacactgcttgtggtggtcggaatcggatcagtctattttcatgcaacactgagcttccttgggcagatgctggacgaactggccgtgctctgggtcctgatgtgtgctctggctatgtggttccccaggagatacctgccaaaaatctttaggaacgatagaggcaggttcaaagtggttgtaagtgtcctctcggcagtgaccacctgcctcgcttttgtcaagccagctattaataacatcagcctgatgactctaggcgtgccttgcaccgccctcttgatcgccgagctgaagaggtgtgacaatatgcgagtgttcaaattgggtctattcagcggactctggtggacactggcactgttttgctggatatccgaccgggcattttgtgaactgctttcttctttcaacttcccatatctgcactgcatgtggcacatactgatctgtctggcagcctacctcgggtgcgtgtgctttgcatatttcgacgccgcaagcgaaattcccgagcagggcccagttattaagttttggccgaacgagaaatgggcctttattggagtgccatacgtgagccttctgtgtgcaaataagaagtcctctgtcaaaattacttag

SEQ ID NO: 23981 - DNA, 828 bp, Artificial Sequence
  derived and/or modified sequence
atgggcgccccccactggtgggaccagctgcaggccggcagcagcgaggtggactggtgcgaggacaactacaccatcgtgcccgccatcgccgagttctacaacaccatcagcaacgtgctgttcttcatcctgccccccatctgcatgtgcctgttcagacagtacgccacctgcttcaacagcggcatctacctgatctggaccctgctggtggtggtgggcatcggcagcgtgtacttccacgccaccctgagcttcctgggccagatgctggacgagctggccgtgctgtgggtgctgatgtgcgccctggccatgtggttccccagaagatacctgcccaagatcttcagaaacgacagaggcagattcaaggtggtggtgagcgtgctgagcgccgtgaccacctgcctggccttcgtgaagcccgccatcaacaacatcagcctgatgaccctgggcgtgccctgcaccgccctgctgatcgccgagctgaagagatgcgacaacatgagagtgttcaagctgggcctgttcagcggcctgtggtggaccctggccctgttctgctggatcagcgacagagccttctgcgagctgctgagcagcttcaacttcccctacctgcactgcatgtggcacatcctgatctgcctggccgcctacctgggctgcgtgtgcttcgcctacttcgacgccgccagcgagatccccgagcagggccccgtgatcaagttctggcccaacgagaagtgggccttcatcggcgtgccctacgtgagcctgctgtgcgccaacaagaagagcagcgtgaagatcacctag

SEQ ID NO: 23982 - protein, 716 aa, Artificial Sequence
  derived and/or modified sequence
MEDSTSPKQEKENQEELGETRRPWEGKTAASPQYSEPESSEPLEAKQGPETGRQSRSSRPWSPQSRAKTPLGGPAGPETSSPAPVSPREPSSSPSPLAPARQDLAAPPQSDRTTSVIPEAGTPYPDPLEQSSDKRESTPHHTSQSEGNTFQQSQQPKPHLCGRRDVSYNNAKQKELRFDVFQEEDSNSDYDLQQPAPGGSEVAPSMLEITIQNAKAYLLKTSSNSGFNLYDHLSNMLTKILNERPENAVDIFENISQDVKMAHFSKKFDALQNENELLPTYEIAEKQKALFLQGHLEGVDQELEDEIAENALPNVMESAFYFEQAGVGLGTDETYRIFLALKQLTDTHPIQRCRFWGKILGLEMNYIVAEVEFREGEDEEEVEEEDVAEERDNGESEAHEDEEDELPKSFYKAPQAIPKEESRTGANKYVYFVCNEPGRPWVKLPPVIPAQIVIARKIKKFFTGRLDAPIISYPPFPGNESNYLRAQIARISAGTHVSPLGFYQFGEEEGEEEEEAEGGRNSFEENPDFEGIQVIDLVESLSNWVHHVQHILSQGRCNWFNSIQKNEEEEEEEDEEKDDSDYIEQEVGLPLLTPISEDLEIQNIPPWTTRLSSNLIPQYAIAVLQSNLWPGAYAFSNGKKFENFYIGWGHKYSPDNYTPPVPPPVYQEYPSGPEITEMDDPSVEEEQAFRAAQEAVLLAAENEESEEDEDEEDDYD

SEQ ID NO: 23983 - protein, 511 aa, Artificial Sequence
  derived and/or modified sequence
MLEITIQNAKAYLLKTSSNSGFNLYDHLSNMLTKILNERPENAVDIFENISQDVKMAHFSKKFDALQNENELLPTYEIAEKQKALFLQGHLEGVDQELEDEIAENALPNVMESAFYFEQAGVGLGTDETYRIFLALKQLTDTHPIQRCRFWGKILGLEMNYIVAEVEFREGEDEEEVEEEDVAEERDNGESEAHEDEEDELPKSFYKAPQAIPKEESRTGANKYVYFVCNEPGRPWVKLPPVIPAQIVIARKIKKFFTGRLDAPIISYPPFPGNESNYLRAQIARISAGTHVSPLGFYQFGEEEGEEEEEAEGGRNSFEENPDFEGIQVIDLVESLSNWVHHVQHILSQGRCNWFNSIQKNEEEEEEEDEEKDDSDYIEQEVGLPLLTPISEDLEIQNIPPWTTRLSSNLIPQYAIAVLQSNLWPGAYAFSNGKKFENFYIGWGHKYSPDNYTPPVPPPVYQEYPSGPEITEMDDPSVEEEQAFRAAQEAVLLAAENEESEEDEDEEDDYD

SEQ ID NO: 23984 - DNA, 2151 bp, Artificial Sequence
  derived and/or modified sequence
atggaggacagcaccagccccaagcaggagaaggagaaccaggaggagctgggcgagaccagaagaccctgggagggcaagaccgccgccagcccccagtacagcgagcccgagagcagcgagcccctggaggccaagcagggccccgagaccggcagacagagcagaagcagcagaccctggagcccccagagcagagccaagacccccctgggcggccccgccggccccgagaccagcagccccgcccccgtgagccccagagagcccagcagcagccccagccccctggcccccgccagacaggacctggccgcccccccccagagcgacagaaccaccagcgtgatccccgaggccggcaccccctaccccgaccccctggagcagagcagcgacaagagagagagcaccccccaccacaccagccagagcgagggcaacaccttccagcagagccagcagcccaagccccacctgtgcggcagaagagacgtgagctacaacaacgccaagcagaaggagctgagattcgacgtgttccaggaggaggacagcaacagcgactacgacctgcagcagcccgcccccggcggcagcgaggtggcccccagcatgctggagatcaccatccagaacgccaaggcctacctgctgaagaccagcagcaacagcggcttcaacctgtacgaccacctgagcaacatgctgaccaagatcctgaacgagagacccgagaacgccgtggacatcttcgagaacatcagccaggacgtgaagatggcccacttcagcaagaagttcgacgccctgcagaacgagaacgagctgctgcccacctacgagatcgccgagaagcagaaggccctgttcctgcagggccacctggagggcgtggaccaggagctggaggacgagatcgccgagaacgccctgcccaacgtgatggagagcgccttctacttcgagcaggccggcgtgggcctgggcaccgacgagacctacagaatcttcctggccctgaagcagctgaccgacacccaccccatccagagatgcagattctggggcaagatcctgggcctggagatgaactacatcgtggccgaggtggagttcagagagggcgaggacgaggaggaggtggaggaggaggacgtggccgaggagagagacaacggcgagagcgaggcccacgaggacgaggaggacgagctgcccaagagcttctacaaggccccccaggccatccccaaggaggagagcagaaccggcgccaacaagtacgtgtacttcgtgtgcaacgagcccggcagaccctgggtgaagctgccccccgtgatccccgcccagatcgtgatcgccagaaagatcaagaagttcttcaccggcagactggacgcccccatcatcagctacccccccttccccggcaacgagagcaactacctgagagcccagatcgccagaatcagcgccggcacccacgtgagccccctgggcttctaccagttcggcgaggaggagggcgaggaggaggaggaggccgagggcggcagaaacagcttcgaggagaaccccgacttcgagggcatccaggtgatcgacctggtggagagcctgagcaactgggtgcaccacgtgcagcacatcctgagccagggcagatgcaactggttcaacagcatccagaagaacgaggaggaggaggaggaggaggacgaggagaaggacgacagcgactacatcgagcaggaggtgggcctgcccctgctgacccccatcagcgaggacctggagatccagaacatccccccctggaccaccagactgagcagcaacctgatcccccagtacgccatcgccgtgctgcagagcaacctgtggcccggcgcctacgccttcagcaacggcaagaagttcgagaacttctacatcggctggggccacaagtacagccccgacaactacaccccccccgtgcccccccccgtgtaccaggagtaccccagcggccccgagatcaccgagatggacgaccccagcgtggaggaggagcaggccttcagagccgcccaggaggccgtgctgctggccgccgagaacgaggagagcgaggaggacgaggacgaggaggacgactacgactag

SEQ ID NO: 23985 - DNA, 2151 bp, Artificial Sequence
  derived and/or modified sequence
atggaggatagcacttcccctaagcaggagaaggaaaatcaagaggagctcggggaaacacggaggccttgggagggcaagacagcggcctcaccacagtatagcgaacctgagagcagtgagcccttagaggccaaacaaggtcccgagactggcaggcagagcagaagctcacgcccatggagtccccagtctcgcgctaagaccccccttgggggaccagccggtcctgagaccagcagtcctgcacctgtgtccccacgcgagcccagctccagcccatcccccctcgcgccagctagacaggacctcgctgcaccccctcagagcgacagaacaacctctgtcatcccagaggcggggaccccttaccctgaccctctagaacagtcatccgacaaacgtgaaagtacccctcaccacacgtctcagagcgagggaaacacattccagcagagccagcagcccaagcctcacctatgtggtcgccgggatgtcagctataacaacgccaagcagaaggagctccggtttgatgtgtttcaggaggaagacagtaattccgattatgacctacagcaaccagcacctgggggtagcgaggttgcaccttccatgttagagattaccatccagaatgccaaggcgtacctgcttaaaacaagctccaattctggattcaatttgtacgatcatctatcaaacatgttaaccaaaattctcaatgagcgccccgagaatgcagtggacatcttcgagaacatctcacaggatgtaaagatggcacactttagcaaaaagttcgacgcgttgcaaaatgaaaatgaattgcttccaacgtacgaaatcgctgaaaaacaaaaagcattgtttcttcagggacatttagagggagtcgaccaggagctcgaggatgagattgctgagaatgctctgccaaacgtgatggagtccgctttttacttcgaacaggccggggtgggactcggcactgatgaaacatacagaatttttttggcccttaaacaactgaccgatacccaccccatccaaaggtgtaggttttggggcaagatcctcgggctggaaatgaactacatagttgctgaggtcgagtttagagaaggggaagatgaagaagaagtcgaagaggaagatgtggcggaggagcgagacaacggagaatccgaagcgcatgaggatgaagaagatgagttacctaagtcattctacaaagcccctcaggctatacctaaggaggagagccgaacaggagccaataaatacgtttattttgtctgtaatgaaccaggcaggccctgggtgaaactgccacccgtgatcccagcccaaatcgttattgcccgaaagatcaaaaaatttttcacaggccggctagatgcccccatcatctcttacccgccctttccgggaaatgagagcaactacctcagagcacaaattgcacgaatatccgcaggcacccatgtgtccccactgggattctatcagttcggcgaggaagagggggaggaggaggaagaagctgaaggcggccgaaacagtttcgaagaaaaccctgacttcgaggggattcaggtgatagacctggttgagtcactatcaaactgggttcaccatgtgcagcacatcctctcccagggtcggtgtaactggtttaactctatccagaagaacgaagaggaggaggaagaggaggatgaggagaaggatgactccgactacatcgaacaggaggtaggcctgcccctgctcactcccatctccgaagatctggagatacagaatatcccaccctggacaacccgtctcagttccaatctcatccctcaatacgccattgccgtgctgcagtccaacctctggccaggcgcatacgcgttttcaaatggcaagaaatttgaaaatttctatataggctggggtcataagtacagtccagacaactatacaccaccagtgccgcctcccgtctaccaggagtacccaagcggcccagaaataacagaaatggacgatccatccgtagaggaagaacaggccttccgcgcagcccaggaggcagtcctgcttgctgcagaaaatgaagaatccgaggaggatgaagatgaggaggacgattacgactag

SEQ ID NO: 23986 - DNA, 2151 bp, Artificial Sequence
  derived and/or modified sequence
atggaggacagcaccagccccaagcaggagaaggagaaccaggaggagctgggggagacccggcggccctgggagggcaagacagctgccagcccccagtacagcgagcctgagagcagcgagcccctggaggccaagcagggccctgagaccggccggcagagccgcagcagccggccctggagcccccagagccgggccaagacccccctgggcggccctgctggccctgagaccagcagccctgcccctgtgagcccccgggagcccagcagcagccccagccccctggccccagcccggcaggacctggccgccccaccccagagcgacaggaccaccagcgtcatccctgaggccggcaccccctacccagaccccctggagcagagcagtgacaagcgggagagcaccccccaccacaccagccagagcgagggcaacaccttccagcagagccagcagcccaagccccacctgtgtggcagaagagatgtgtcctacaacaatgccaagcagaaggagctgcgctttgatgtgttccaggaggaggacagcaacagcgactatgacctgcagcagcctgcccctgggggcagcgaggtggcccccagcatgctggagatcaccatccagaatgccaaggcctacctgctgaagaccagcagcaacagcggcttcaacctgtatgaccacctgagcaacatgctgaccaagatcctgaatgaaagaccagaaaatgctgtggacatctttgagaacatcagccaggatgtgaagatggcccacttcagcaagaagtttgatgccctgcagaatgaaaatgagctgctgcccacctatgaaattgctgagaagcagaaggccctcttcctgcagggccacctggagggcgtggaccaggagctggaggatgaaattgctgaaaatgccctgcccaacgtgatggagagcgccttctactttgagcaggccggcgtgggcctgggcacagatgagacctaccgcatcttcctggccctgaagcagctgacagacacccaccccatccagcgctgccgcttctggggcaagatcctgggcctggagatgaactacatcgtggccgaggtggagttccgggagggagaagatgaggaggaggtggaggaggaggatgtggccgaggagcgggacaatggagagagcgaggcccatgaagatgaagaagatgagctgcccaagagcttctacaaggccccccaggccatccccaaggaggagagcaggactggagccaacaagtatgtgtactttgtgtgcaatgaacctggccggccctgggtgaagctgccccctgtgatcccagcccagatcgtcatcgccaggaagatcaagaagttcttcaccggccgcctggatgcccccatcatctcctacccacccttccctggaaatgaaagcaactacctgcgggcccagatcgcccgcatctctgctggcacccacgtgagccccctgggcttctaccagtttggagaggaggagggggaggaggaggaggaggccgagggcggcaggaacagctttgaagaaaatccagactttgagggcatccaggtgattgacctggtggagagcctgagcaactgggtgcaccacgtgcagcacatcctgagccagggccgctgcaactggttcaacagcatccagaagaatgaggaggaggaggaggaggaggatgaggagaaggatgacagcgactacatcgagcaggaggtgggcctgcccctgctgacccccatcagcgaggacctggagatccagaacatccccccctggaccacccggctgagcagcaacctgatcccccagtatgccatcgctgtgctgcagagcaacctgtggccaggggcctatgccttcagcaatggcaagaagtttgagaacttctacatcggctggggccacaagtacagcccagacaactacaccccacctgtgcccccacctgtgtaccaggagtaccccagcggccctgagatcacagagatggatgaccccagcgtggaggaggagcaggccttccgggccgcccaggaggccgtgctgctggccgcagaaaatgaggagagtgaagaagatgaagatgaggaggatgattatgactag

SEQ ID NO: 23987 - DNA, 2151 bp, Artificial Sequence
  derived and/or modified sequence
atggaggacagcaccagccccaagcaggagaaggagaaccaggaggagttgggagaaacccggcggccttgggaagggaaaaccgctgcctcaccccagtattccgagcctgagagctctgaacccttagaagccaagcagggccccgagacgggaagacaatcacgctcaagccgaccctggagtccccagtctcgagcaaagacccccctgggcggccccgcagggccggaaacatccagccccgcacccgtttccccgcgcgagccttcgagcagtcccagtcctctcgcccccgcgcgccaggacctggcagcccctcctcagtcggaccgaaccacatcagtgattcccgaggcaggaaccccataccccgaccccctggagcagtcttcggacaagagagaaagtacaccccaccacacctcccagagcgaaggcaacactttccagcagtcgcaacagcctaagccgcacttatgcggacggagagacgtgtcttacaacaacgccaaacagaaggaactccgctttgacgtattccaggaggaagatagcaactccgattatgatctccagcagccagcgcccggcgggtccgaagttgccccttccatgcttgagattaccattcaaaatgctaaagcttatctcctgaagacaagcagtaacagtgggtttaacctctacgaccacctgagcaacatgctgaccaaaatacttaatgagcgcccagaaaacgccgtggatatttttgagaatatttctcaggatgttaagatggcccactttagtaaaaaatttgatgcattgcagaacgagaacgaactgctgcccacatatgagatcgcagagaaacagaaggcactgtttcttcaggggcacctggagggcgtagatcaagagttagaggatgagatcgctgaaaatgctctgccaaacgtgatggaatccgctttctactttgagcaggcaggtgttggcctggggaccgatgagacctacagaatctttctagcccttaaacagttgactgacactcaccccatccagagatgccgcttctggggtaagatactgggccttgagatgaactatatcgtagcagaagtggaatttcgcgagggcgaagacgaggaggaggtcgaggaagaagatgtcgcagaggaaagggacaacggggaatctgaggcacacgaagacgaggaggacgaactgcccaagagcttctacaaggctccccaggccatcccaaaagaagaatctcgaacgggtgccaacaaatacgtgtattttgtttgtaatgagccgggcaggccctgggtgaagctcccgcccgtgataccggcccaaattgttatcgccaggaagattaaaaaattcttcaccggcaggctggatgctccaataatctcatatcctccattccctggaaacgaaagcaactatctacgggcccaaatcgcccgtattagtgccggcactcacgtcagtccacttgggttctatcagtttggcgaagaggaaggcgaagaggaggaggaagccgagggcgggcgtaatagtttcgaagaaaaccccgattttgagggcatacaggttattgatctcgtggagtcgctgtcgaattgggttcatcacgtgcagcacatcttgtcacagggcaggtgtaattggtttaacagcatccaaaagaatgaagaagaggaagaggaggaagacgaggagaaggacgacagtgactacatcgagcaagaggtcggactgccattgttgaccccgattagcgaagacctggagattcaaaacataccaccatggaccacccgcttgagctccaatctgatcccacagtacgctattgcagtgttacagagtaacttgtggcctggcgcctatgcatttagcaatggaaagaagttcgagaatttttatattggctggggtcacaaatattcacctgacaattatacacccccagtgccccctcccgtgtatcaggagtatcctagcggtccagagattacagagatggatgaccctagcgtcgaggaggagcaagcgttccgagctgcccaggaagcggtattactcgctgcggaaaatgaggaatccgaagaagatgaggacgaggaagatgactatgattag

SEQ ID NO: 23988 - DNA, 2151 bp, Artificial Sequence
  derived and/or modified sequence
atggaggatagcacctcgcctaaacaggaaaaggagaatcaggaggaattgggtgaaactaggaggccctgggagggaaaaaccgcagccagtccccaatattcagaacctgagtcctccgagcccctggaggccaagcagggccctgagaccggaaggcaaagcagatcaagccggccatggtctccccagtcaagagcaaaaacgcccctgggaggcccagctggccctgagacgtcttctcctgctccggtaagtccacgggagcctagtagttctccgagcccccttgcacccgctcgccaggatctcgcggctccccctcaaagcgataggacaacaagcgtgatccctgaagccggtacaccctatccagaccctctggagcagagttccgacaaacgagaatcaacaccccaccacacatcacagagcgaaggcaatacatttcaacagtcgcaacagcccaaaccccacctgtgcggcaggagagatgtctcttacaacaacgcgaagcagaaggaactgaggttcgatgtattccaagaggaagactcaaacagcgactacgaccttcagcagcccgcacccggagggtccgaagtggctccaagcatgctagagatcactatacagaatgcaaaggcatatcttctgaaaactagcagcaatagcgggttcaacctctacgatcacctgtccaacatgttaactaaaatcctgaatgagcgtccggaaaatgccgtggatatcttcgagaatatatcgcaagatgtgaaaatggcccacttttctaaaaagttcgacgctctgcaaaacgaaaacgaactcctgcctacttacgagattgccgagaaacagaaggcactgtttttgcagggccatttagagggagtcgaccaggaactggaggatgagatcgccgagaacgccttgcccaacgttatggagtccgctttttacttcgagcaagcaggcgtcgggttgggcacagatgaaacttataggattttcttggctttgaaacaactgactgatacccaccccatccagcgttgtagattttgggggaagatcctgggactggaaatgaactacattgtggccgaggtcgaattccgcgaaggggaggacgaggaggaagtggaggaggaagatgttgccgaggaacgggataacggtgaatctgaggcgcacgaggacgaagaggatgaattgcctaagtccttttacaaggccccacaggctatccctaaagaggagtccaggaccggcgcaaacaagtatgtatactttgtttgcaatgagccgggtaggccttgggtgaaactccctccggtcattccagcacagatcgttatcgcaagaaaaatcaagaagtttttcactggcaggctcgacgctccaattatctcataccccccattccccggtaacgaatccaattacctcagagcccagatcgccaggatctccgctgggacccatgtgagccctctgggcttttaccagtttggagaagaagaaggcgaagaggaggaggaggccgagggcggtcggaactccttcgaggaaaatcccgatttcgaagggattcaggtaattgacttggtcgagtctttgtctaattgggtccatcacgttcagcacatactctcgcagggcaggtgtaattggttcaatagcatacagaagaatgaagaggaagaggaagaagaggacgaggaaaaggatgattccgattacatcgagcaggaagttggattaccacttcttactcctatttctgaggacctggagatccagaacataccaccatggacgactcgtctcagtagtaatctcattccccaatatgccatcgcagtgttacaaagtaacctgtggcccggtgcatatgcattcagtaacggaaagaagtttgaaaacttttatattggatggggccacaaatattccccagacaattataccccgccagtgccccctccagtctatcaggaatatccctccggaccagaaatcacagagatggatgacccttctgtcgaggaagagcaggctttccgggcagctcaagaggcggtactgctcgccgcagaaaatgaagagtcagaggaagacgaggacgaggaagatgattacgactag

SEQ ID NO: 23989 - DNA, 1536 bp, Artificial Sequence
  derived and/or modified sequence
atgctcgagatcacaatccaaaatgccaaggcatatctgctcaaaacaagctccaattcgggattcaacctgtacgatcatctgagcaacatgcttacaaaaattttaaatgagagacccgagaatgccgttgatattttcgaaaatattagccaagacgtgaagatggcccatttttccaagaagttcgatgctctgcagaatgagaatgaactccttcctacgtacgagatcgccgagaaacagaaagcgctcttcctgcaagggcacctggaaggcgtcgaccaggagctcgaagacgaaattgccgaaaacgctctcccaaacgtgatggaaagtgccttctattttgagcaggcgggggtgggattaggaacagacgagacttatcgaatcttcctcgccctgaaacagctcaccgatacacacccaatccagagatgtaggttctggggaaagatacttggactcgaaatgaactatattgtcgcggaggttgaattccgagaaggcgaggacgaggaagaagttgaagaagaagatgtcgccgaagagagagacaacggggagtcagaagcacacgaagacgaagaagacgagctgcctaaatccttctataaggcccctcaggctatcccaaaggaagaaagtagaaccggagccaataaatacgtctactttgtgtgtaatgaacctgggcgcccctgggtaaaactgccaccggtaattccagcccagatcgtgattgctcggaagatcaagaaatttttcacgggtcgcctggatgctccgatcatctcctaccctccgttccccggcaacgagtccaactatctgcgtgctcagatcgctagaatcagcgccggcacccacgttagtcccctgggtttctatcagttcggcgaggaggagggtgaggaagaagaagaggcagaggggggacggaactcattcgaggagaacccggattttgaggggattcaggttatcgatctggtagagagccttagcaactgggttcatcacgtccagcacattctgtcgcaagggcgatgcaattggttcaactcaatacagaaaaatgaggaggaggaggaagaggaagatgaagagaaggacgattctgattatattgagcaagaggttggcctcccgctgctcactcccattagcgaggatctcgagatccaaaacattccgccatggaccacaaggctcagctcaaatctaattccccaatacgccattgcggttctgcaatctaacttgtggccaggagcctatgcatttagtaatgggaaaaagtttgaaaacttttatatcgggtgggggcataaatattcaccagataattacacgccgcccgtaccccctcccgtataccaggagtacccctcaggtcccgaaatcaccgaaatggacgaccccagcgtggaagaggagcaggcttttagagctgcccaagaagcggtgctgctggctgccgagaatgaggagagtgaggaggacgaggatgaagaggatgattatgattag

SEQ ID NO: 23990 - DNA, 1536 bp, Artificial Sequence
  derived and/or modified sequence
atgctggagatcaccatccagaatgccaaggcctacctgctgaagaccagcagcaacagcggcttcaacctgtatgaccacctgagcaacatgctgaccaagatcctgaatgaaagaccagaaaatgctgtggacatctttgagaacatcagccaggatgtgaagatggcccacttcagcaagaagtttgatgccctgcagaatgaaaatgagctgctgcccacctatgaaattgctgagaagcagaaggccctcttcctgcagggccacctggagggcgtggaccaggagctggaggatgaaattgctgaaaatgccctgcccaacgtgatggagagcgccttctactttgagcaggccggcgtgggcctgggcacagatgagacctaccgcatcttcctggccctgaagcagctgacagacacccaccccatccagcgctgccgcttctggggcaagatcctgggcctggagatgaactacatcgtggccgaggtggagttccgggagggggaggatgaggaggaggtggaggaggaggatgtggccgaggagcgggacaacggggagagcgaggcccatgaagatgaggaggatgagctgcccaagagcttctacaaggccccccaggccatccccaaggaggagagcaggactggagccaacaagtatgtgtactttgtgtgcaatgagcccggccggccctgggtgaagctgccccctgtgatcccagcccagatcgtgattgccaggaagatcaagaagttcttcaccggccgcctggatgcccccatcatctcctacccacccttccctggaaatgaaagcaactacctgcgggcccagatcgcccgcatctctgctggcacccacgtgagccccctgggcttctaccagtttggagaggaggagggggaggaggaggaggaggccgagggcggcagaaattcctttgaggagaacccagactttgagggcatccaggtgattgacctggtggagagcctgagcaactgggtgcaccacgtgcagcacatcctgagccagggccgctgcaactggttcaacagcatccagaagaatgaggaggaggaggaggaggaggatgaggagaaggatgacagcgactacatcgagcaggaggtgggcctgcccctgctgacccccatcagcgaggacctggagatccagaacatccccccctggaccacccggctgagcagcaacctgatcccccagtatgccatcgctgtgctgcagagcaacctgtggccaggggcctatgccttcagcaatggcaagaagtttgagaacttctacatcggctggggccacaagtacagcccagacaactacaccccacctgtgcccccacctgtgtaccaggagtaccccagcggccctgagatcacagagatggatgaccccagcgtggaggaggagcaggccttccgggccgcccaggaggccgtgctgctggccgcagaaaatgaggagagcgaggaggatgaagatgaagaagatgattatgactag

SEQ ID NO: 23991 - DNA, 1536 bp, Artificial Sequence
  derived and/or modified sequence
atgctggagatcaccatccagaacgccaaggcctacctgctgaagaccagctccaactccggattcaacctgtacgatcacttgtccaacatgttgacgaagatactcaacgagcggcctgaaaacgccgtggatatatttgagaacatttcccaggacgtgaaaatggctcactttagcaagaaatttgacgctttgcagaatgagaatgagctcctcccaacatacgaaatcgctgaaaaacaaaaggccttgtttctccagggtcatctcgaaggagtggaccaggagctggaggacgagattgccgagaatgcacttcccaatgtaatggagtcagctttttacttcgagcaggctggggtcgggctggggaccgatgagacctatcgcatattcctcgcgctgaaacaactcaccgacactcacccaatccagaggtgcaggttctggggtaaaatattaggacttgagatgaattacattgtcgcggaggtagaattccgcgagggagaggatgaagaagaggtcgaagaggaggatgtcgctgaagaacgcgacaacggggagtcagaggctcatgaagacgaggaagatgagcttccaaaatcgttctataaggctccccaggctataccgaaggaagagtcaaggactggcgcaaataaatatgtgtacttcgtttgcaacgaacccggtcggccatgggtgaagctcccgccagtgatcccggctcagatcgttatagctcggaagattaagaaatttttcacaggacggttggacgcccctattattagctatccacccttcccaggaaacgaaagcaattacctgagggcgcaaattgccaggatcagcgctggcactcatgtgtcgcccttaggcttctaccagttcggagaagaggagggcgaggaagaagaagaggccgaaggtgggaggaacagctttgaggagaaccctgatttcgagggaattcaggtgatagacctggtagagtcactaagcaattgggtacaccacgtacagcatatcctgagccagggccgctgcaactggttcaattctatccagaaaaacgaggaggaggaagaagaggaggatgaggaaaaagacgatagtgactatatcgagcaggaagtaggcctgcctctgctcacgcccatttcagaagacctggaaattcaaaatatccctccttggaccactaggctgagttcaaacctcatacctcagtacgcgattgccgttcttcagagcaacctatggcccggggcctatgccttctctaacgggaaaaagtttgagaatttctatattggctggggccacaaatacagtcctgataactacacaccacctgtacctcctcccgtgtaccaggagtacccatccggacccgaaatcacagagatggacgacccttctgttgaagaggagcaggcctttagagccgctcaggaggctgttttattagccgccgaaaatgaagagtctgaggaggatgaggatgaggaggatgattacgattag

SEQ ID NO: 23992 - DNA, 1536 bp, Artificial Sequence
  derived and/or modified sequence
atgcttgaaataaccattcagaacgcaaaagcttatctgctgaagacatcttctaactcaggctttaatctgtatgatcacctgtcaaacatgctgaccaagatactcaacgagcgccctgagaacgcggtcgatatttttgagaatatatcacaagacgtgaaaatggcccacttctccaaaaaattcgatgcactacagaatgagaatgaactcttgcctacctacgaaattgccgagaaacagaaggcactctttctccagggccatttggaaggcgttgatcaagaactggaggacgagattgccgaaaatgctctgcctaacgtaatggaatcagctttttacttcgaacaagcgggagtgggcctcggtactgatgagacttatagaatttttcttgccttaaagcagcttactgatacccatcccatccaaagatgccggttctggggcaaaattctgggcttggaaatgaactatattgtagccgaagtggagttccgggagggtgaggacgaggaagaagtggaggaggaggacgtagctgaggagagagacaacggcgagagcgaagcacacgaggatgaggaggatgagctgcccaaatcgttttacaaggcacctcaagccatccccaaggaagagagccgtacgggagctaacaagtacgtgtactttgtgtgcaacgagccaggacggccttgggtgaagcttccgccagtgatcccggcacagattgtaattgccaggaaaattaaaaagttcttcactgggagactagacgccccaattatatcttacccaccattccctggcaacgaaagtaactatctgagagcacagatcgcccgaatcagtgctggcacacacgtttctccactgggcttttaccagttcggggaggaggagggcgaagaggaagaggaggcagagggcggacggaattcatttgaagagaatcctgattttgagggcatccaggtgattgatctggtcgagagtttgtccaattgggtccatcatgtgcaacacatcctaagtcaggggaggtgtaattggttcaacagcatccagaagaacgaagaagaggaggaggaggaagatgaggaaaaggacgattcggattatatcgagcaggaggtcggactgcctctcctcactccaatttccgaggacctggaaatacaaaatattcccccttggacaacccggttgtcttccaacctgattccccagtacgctatagctgtgctgcagagcaacctttggccaggagcctacgcgttcagcaacgggaaaaaattcgagaatttttatattggatgggggcataagtattcccccgataactatacccctcctgtgccacctccagtataccaagagtaccctagtggccctgaaattaccgagatggatgatccttcagtcgaagaggaacaggctttccgtgccgctcaggaggcagtactgctggctgcagagaatgaggaatcagaagaagacgaggacgaagaggatgattatgactag

SEQ ID NO: 23993 - DNA, 2825 bp, Artificial Sequence
  derived and/or modified sequence
aggacgcagcaactcacagagcaaccaggacccagaaatcgcttaagagaccgcggcaaagtaacttaactgagttgccttcttccatattttcacgcccctttcatccagaacattttttttcttgaactgcttccatggaggactcaacctccccgaagcaagaaaaagaaaaccaagaagaactaggggaaacaaggcggccatgggaaggaaagacagcagcttctccccaatattctgagcctgagtcgtctgagcccttggaggcgaagcaggggccagaaactggacgccagtcccgaagcagccgtccttggagcccgcagtctagagccaagacgcctctgggtggccccgcgggaccagaaacatcatcacctgctcctgtctctccgcgggagccctcttcctctccttctcccctggctccggccagacaagacctcgcggcaccacctcagtcggacaggaccacgagtgtgattcctgaagctgggacaccttatcctgatcctttggaacaatcatctgataaaagagaatcaactcctcatcacacaagccagtcagaaggaaacacctttcaacagtctcagcaacccaaaccccacctgtgtggacgaagggacgtgagctataacaacgctaaacagaaagagctgagatttgacgtttttcaggaggaagactcaaacagtgactatgatttacagcagccggcgcctgggggctctgaagtggcccccagcatgcttgagatcaccattcagaatgctaaggcttacctgctgaagactagcagcaattcgggctttaatctatatgatcatctttctaatatgttgaccaagatattaaatgagcgtcctgaaaatgctgttgacatctttgaaaatattagccaagatgtgaagatggcacattttagtaaaaaatttgatgcactacaaaatgagaatgagttgcttccaacatatgaaatagcagaaaagcaaaaggctctttttctccagggacatttggaaggagttgaccaagaattggaagatgaaatagcagaaaacgctcttccaaatgtaatggagtcagctttttattttgaacaagctggagttggtttgggcacagatgagacataccgcatatttcttgccctcaagcagcttactgatacccacccaatccaaagatgccgcttctggggaaagatcttgggtctggaaatgaattatattgtagctgaagtggaatttcgtgagggggaagatgaagaggaagtggaagaggaagatgtagctgaagagagggacaatggagaaagtgaagctcatgaagatgaggaagatgaattaccaaagtccttttacaaggccccacaggctataccaaaagaagaaagtagaacaggtgccaacaaatatgtctattttgtttgcaatgaaccaggaagaccatgggtgaagttaccaccagttatacctgcacaaattgttattgcaagaaaaatcaagaaatttttcactgggcgattggatgctcccatcataagctacccacctttcccaggaaatgagagtaattatttacgagcacaaattgcccgaatttcagcaggaacccacgtcagtcctctaggattttatcagtttggtgaagaggaaggagaggaggaggaagaggcagaaggtgggcgaaatagctttgaggaaaaccctgattttgaaggcatccaagtgattgatctagtagaatccctatccaattgggttcatcatgtacagcatattctctctcagggtcgctgtaattggttcaactccatacaaaaaaatgaggaagaagaagaggaagaagatgaagaaaaagacgattctgactacatagaacaggaagtggggcttcctcttttgacaccaatctctgaagatttagagattcagaatatacccccctggacaacacggttatcctcaaatctcattccacaatatgctattgcagtccttcaatccaacctttggcctggagcatatgccttctccaatggcaaaaagtttgaaaatttctacataggctggggtcataagtatagtccagacaattatacacccccagttccaccaccagtttatcaagaataccccagtggaccagaaattacagaaatggatgatcctagtgtggaggaggagcaggctttcagggctgcacaagaagcagttctactcgcagctgagaatgaagaatctgaggaagatgaagatgaggaagatgattatgactaataaacataaaattagcctggttttatgtgacactgatacacacacaccccttatatgggactaattttacacttttctgtgttatgtgtgtatatacatacacatgtaagaaattattcaactgcaaaatctcaatcttgaaaatcaagcttgaaatttcataggtagaaatattagcatttttattgaaagatactcacaggattttccagaggctaaataacatgcaattgcataattgttctgagggttatggataatggaatatgtgtttgtacattcctgtttttaaaagggctcaggtttcacatggtccaggtgaggtaaaacaattaaaataaataaataaatggtctcaggtttaatttgtaatacgacaaacactggaagatataacccacaggaaattcttggaaacatcaatactttttaaagagtgtcaaggggtatgaagacaaaaaatattgatagtcactagagtaatgtattcttaacctttgtaagaactgatctcagcatgtattcttaaacctttgt

SEQ ID NO: 23994 - DNA, 2489 bp, Artificial Sequence
  derived and/or modified sequence
cagaaatcgcttaagagaccgcggcaaagtaacttaactgagttgccttcttccatattttcacgcccctttcatccagaacattttttttcttgaactgcttccatggaggactcaacctccccgaagcaagaaaaagaaaaccaagaagaactaggggaaacaaggcggccatgggaaggaaagacagcagcttctccccaatattctgagcctgagtcgtctgagcccttggaggcgaagcaggggccagaaactggacgccagtcccgaagcagccgtccttggagcccgcagtctagagccaagacgcctctgggtggccccgcgggaccagaaacatcatcacctgctcctgtctctccgcgggagccctcttcctctccttctcccctggctccggccagacaagacctcgcggcaccacacaagccagtcagaaggaaacacctttcaacagtctcagcaacccaaaccccacctgtgtggacgaagggacgtgagctataacaacgctaaacagaaagagctgagatttgacgtttttcaggaggaagactcaaacagtgactatgatttacagcagccggcgcctgggggctctgaagtggcccccagcatgcttgagatcaccattcagaatgctaaggcttacctgctgaagactagcagcaattcgggctttaatctatatgatcatctttctaatatgttgaccaagatattaaatgagcgtcctgaaaatgctgttgacatctttgaaaatattagccaagatgtgaagatggcacattttagtaaaaaatttgatgcactacaaaatgagaatgagttgcttccaacatatgaaatagcagaaaagcaaaaggctctttttctccagggacatttggaaggagttgaccaagaattggaagatgaaatagcagaaaacgctcttccaaatgtaatggagtcagctttttattttgaacaagctggagttggtttgggcacagatgagacataccgcatatttcttgccctcaagcagcttactgatacccacccaatccaaagatgccgcttctggggaaagatcttgggtctggaaatgaattatattgtagctgaagtggaatttcgtgagggggaagatgaagaggaagtggaagaggaagatgtagctgaagagagggacaatggagaaagtgaagctcatgaagatgaggaagatgaattaccaaagtccttttacaaggccccacaggctataccaaaagaagaaagtagaacaggtgccaacaaatatgtctattttgtttgcaatgaaccaggaagaccatgggtgaagttaccaccagttatacctgcacaaattgttattgcaagaaaaatcaagaaatttttcactgggcgattggatgctcccatcataagctacccacctttcccaggaaatgagagtaattatttacgagcacaaattgcccgaatttcagcaggaacccacgtcagtcctctaggattttatcagtttggtgaagaggaaggagaggaggaggaagaggcagaaggtgggcgaaatagctttgaggaaaaccctgattttgaaggcatccaagtgattgatctagtagaatccctatccaattgggttcatcatgtacagcatattctctctcagggtcgctgtaattggttcaactccatacaaaaaaatgaggaagaagaagaggaagaagatgaagaaaaagacgattctgactacatagaacaggaagtggggcttcctcttttgacaccaatctctgaagatttagagattcagaatatacccccctggacaacacggttatcctcaaatctcattccacaatatgctattgcagtccttcaatccaacctttggcctggagcatatgccttctccaatggcaaaaagtttgaaaatttctacataggctggggtcataagtatagtccagacaattatacacccccagttccaccaccagtttatcaagaataccccagtggaccagaaattacagaaatggatgatcctagtgtggaggaggagcaggctttcagggctgcacaagaagcagttctactcgcagctgagaatgaagaatctgaggaagatgaagatgaggaagatgattatgactaataaacataaaattagcctggttttatgtgacactgatacacacacaccccttatatgggactaattttacacttttctgtgttatgtgtgtatatacatacacatgtaagaaattattcaactgcaaaatctcaatcttgaaaatcaagcttgaaatttcataggtagaaatattagcatttttattgaaagatactcacaggattttccagaggctaaataacatgcaattgcataattgttctgagggttatggataatggaatatgtgtttgtacattcctgtttttaaaagggctcaggtttcacatggtccaggtgaggtaaaacaatt

SEQ ID NO: 23995 - DNA, 1536 bp, Artificial Sequence
  derived and/or modified sequence
atgctggagatcaccatccagaacgccaaggcctacctgctgaagaccagcagcaacagcggcttcaacctgtacgaccacctgagcaacatgctgaccaagatcctgaacgagagacccgagaacgccgtggacatcttcgagaacatcagccaggacgtgaagatggcccacttcagcaagaagttcgacgccctgcagaacgagaacgagctgctgcccacctacgagatcgccgagaagcagaaggccctgttcctgcagggccacctggagggcgtggaccaggagctggaggacgagatcgccgagaacgccctgcccaacgtgatggagagcgccttctacttcgagcaggccggcgtgggcctgggcaccgacgagacctacagaatcttcctggccctgaagcagctgaccgacacccaccccatccagagatgcagattctggggcaagatcctgggcctggagatgaactacatcgtggccgaggtggagttcagagagggcgaggacgaggaggaggtggaggaggaggacgtggccgaggagagagacaacggcgagagcgaggcccacgaggacgaggaggacgagctgcccaagagcttctacaaggccccccaggccatccccaaggaggagagcagaaccggcgccaacaagtacgtgtacttcgtgtgcaacgagcccggcagaccctgggtgaagctgccccccgtgatccccgcccagatcgtgatcgccagaaagatcaagaagttcttcaccggcagactggacgcccccatcatcagctacccccccttccccggcaacgagagcaactacctgagagcccagatcgccagaatcagcgccggcacccacgtgagccccctgggcttctaccagttcggcgaggaggagggcgaggaggaggaggaggccgagggcggcagaaacagcttcgaggagaaccccgacttcgagggcatccaggtgatcgacctggtggagagcctgagcaactgggtgcaccacgtgcagcacatcctgagccagggcagatgcaactggttcaacagcatccagaagaacgaggaggaggaggaggaggaggacgaggagaaggacgacagcgactacatcgagcaggaggtgggcctgcccctgctgacccccatcagcgaggacctggagatccagaacatccccccctggaccaccagactgagcagcaacctgatcccccagtacgccatcgccgtgctgcagagcaacctgtggcccggcgcctacgccttcagcaacggcaagaagttcgagaacttctacatcggctggggccacaagtacagccccgacaactacaccccccccgtgcccccccccgtgtaccaggagtaccccagcggccccgagatcaccgagatggacgaccccagcgtggaggaggagcaggccttcagagccgcccaggaggccgtgctgctggccgccgagaacgaggagagcgaggaggacgaggacgaggaggacgactacgactag

SEQ ID NO: 23996 - DNA, 1098 bp, Artificial Sequence
  derived and/or modified sequence
atgaaggagctgtggtgcgtgatggactgggccgtgcccggcctgctgggcagcggcacctacttcaagaagcagttcagcgaccccgtggagcacggccagagacacaccgccaccaagagagagctggccaccggcagaaaggccatgcagagactggccaagaagatgagcggctggttcctgagaagaaccaagaccctgatcaaggaccagctgcccaagaaggaggacagaatggtgtactgcagcctgaccgacttccagaaggccgtgtaccagaccgtgctggagaccgaggacgtgaccctgatcctgcagagcagcgagccctgcacctgcagaagcggccagaagagaagaaactgctgctacaagaccaacagccacggcgagaccgtgaagaccctgtacctgagctacctgaccgtgctgcagaaggtggccaaccacgtggccctgctgcaggccgccagcaccagcaagcagcaggagaccctgatcaagagaatctgcgaccaggtgttcagcagattccccgacttcgtgcagaagagcaaggacgccgccttcgagaccctgagcgaccccaagtacagcggcaagatgaaggtgctgcagcagctgctgaaccactgcagaaagaacagagacaaggtgctgctgttcagcttcagcaccaagctgctggacgtgctgcagcagtactgcatggccagcggcctggactacagaagactggacggcagcaccaagagcgaggagagactgaagatcgtgaaggagttcaacagcacccaggacgtgaacatctgcctggtgagcaccatggccggcggcctgggcctgaacttcgtgggcgccaacgtggtggtgctgttcgaccccacctggaaccccgccaacgacctgcaggccatcgacagaacccagacccactgcagaagagagagagacgccgagcccctgagcagcgcccccggcctgcagaacggcagcgagaacgccgtgccctacccctggtggtgctgcgtgaccggcgccagcatcagctgctggagatgcgagatctgcagaatccaggacgtgctggagtag

SEQ ID NO: 23997 - DNA, 1572 bp, Artificial Sequence
  derived and/or modified sequence
atgcagaaggagagagagctgcaggagaccatctacttcaagaacacctggcccgcctgcatgttcctgatcgtggcccccctgagcgtgctgtacaactggaaggacgagctggacacctggggctacttcagagtgaccgtgctgcacggcaacagaaaggacaacgagctgatcagagtgaagcagagaaagtgcgagatcgccctgaccacctacgagaccctgagactgtgcctggacgagctgaacagcctggagtggagcgccgtgatcgtggacgaggcccacagaatcaagaaccccaaggccagagtgaccgaggtgatgaaggccctgaagtgcaacgtgagaatcggcctgaccggcaccatcctgcagaacaacatgaaggagctgtggtgcgtgatggactgggccgtgcccggcctgctgggcagcggcacctacttcaagaagcagttcagcgaccccgtggagcacggccagagacacaccgccaccaagagagagctggccaccggcagaaaggccatgcagagactggccaagaagatgagcggctggttcctgagaagaaccaagaccctgatcaaggaccagctgcccaagaaggaggacagaatggtgtactgcagcctgaccgacttccagaaggccgtgtaccagaccgtgctggagaccgaggacgtgaccctgatcctgcagagcagcgagccctgcacctgcagaagcggccagaagagaagaaactgctgctacaagaccaacagccacggcgagaccgtgaagaccctgtacctgagctacctgaccgtgctgcagaaggtggccaaccacgtggccctgctgcaggccgccagcaccagcaagcagcaggagaccctgatcaagagaatctgcgaccaggtgttcagcagattccccgacttcgtgcagaagagcaaggacgccgccttcgagaccctgagcgaccccaagtacagcggcaagatgaaggtgctgcagcagctgctgaaccactgcagaaagaacagagacaaggtgctgctgttcagcttcagcaccaagctgctggacgtgctgcagcagtactgcatggccagcggcctggactacagaagactggacggcagcaccaagagcgaggagagactgaagatcgtgaaggagttcaacagcacccaggacgtgaacatctgcctggtgagcaccatggccggcggcctgggcctgaacttcgtgggcgccaacgtggtggtgctgttcgaccccacctggaaccccgccaacgacctgcaggccatcgacagagcctacagaatcggccagtgcagagacgtgaaggtgctgagactgatcagcctgggcaccgtggaggagatcatgtacctgagacagatctacaagcagcagctgcactgcgtggtggtgggcagcgagaacgccaagagatacttcgaggccgtgcagggcagcaaggagcaccagggcgagctgttcggcatccacaacctgttcaagttcagaagccagggcagctgcctgaccaaggacatcctggaggtgtag

SEQ ID NO: 23998 - DNA, 2139 bp, Artificial Sequence
  derived and/or modified sequence
atgcagcccgggagtgcgcctcctcccgggaggatggatccttcagctcctcagccacgcgccgaaaccagtgggaaggatatttggcaccctggcgagagatgtcttgcaccctcaccggataacggcaagttgtgcgaagcctctattaagtccataacggtcgacgaaaacgggaagtcattcgccgtagtgctgtacgcggattttcaggagagaaagatcccacttaaacagctgcaagaagtaaaatttgtgaaagattgtccacggaacctgatctttgacgacgaggatctcgaaaaaccttattttcctaacaggaagttcccgagctcctcagtagcatttaagctcagcgacaacggagattccattccatacacaatcaaccgttacctaagggactatcagagggaggggactcgattcctatatgggcactacattcatgggggtggctgcattttgggggatgacatggggctgggcaagacggtgcaggtgatcagctttttggctgctgtcttgcacaagaagggcacccgggaggacatcgagaataatatgcccgaatttcttctacggtcaatgaagaaagaacccctgtcctcaaccgccaagaaaatgtttctgatcgtggctccactttctgtgttgtataattggaaggatgagctggacacctggggctattttcgagtgaccgtcctgcatggtaatagaaaggataacgagctcattcgcgtcaaacagaggaagtgtgaaatcgctcttaccacatacgagactctgcgcctctgcctggacgagctgaactcccttgagtggtcagctgtaatcgtcgatgaggcccatcggatcaaaaatcctaaggcaagggttaccgaggtgatgaaggcactcaagtgtaatgtaagaatcggcctgacaggaacaatcctccagaacaatatgaaggagctttggtgtgtaatggattgggctgtcccaggtctgttgggctccggcacgtatttcaagaaacagttcagcgacccagtcgagcatggacagcgacacactgcaacgaaaagagaacttgcaaccgggcggaaagccatgcagaggcttgcaaagaaaatgagcggatggttcttacgacgaactaagacactgataaaagatcagttacccaagaaagaggatagaatggtgtactgttctctaacagactttcaaaaagccgtttatcagactgtgctggaaactgaggatgtcactcttattcttcagagcagcgagccctgcacctgccggagtggccaaaagagaaggaactgctgttataagacgaatagccacggcgaaacggttaagactctgtacctatcctatctgacagtactgcaaaaagtggccaatcatgtggcactgctccaggcggcttcgacttctaaacagcaagagacactgatcaagcgaatctgtgatcaggtgttctcccgcttccccgacttcgtccagaaatctaaggatgccgcatttgaaacactctccgaccctaagtactctggtaagatgaaagttctgcagcagctgctaaaccattgtcgcaagaatcgtgacaaggtcctcctgttctctttctcaacgaagctgctggacgttctccaacagtactgtatggcttctggactggattataggagactggatggaagtacaaaatctgaagagagactcaagatcgtgaaggaatttaattcaactcaggatgtcaacatttgcctagtttctactatggccggggggctgggactgaatttcgtgggcgccaacgtggtggtcctttttgacccaacctggaaccccgctaatgatttgcaggcaatcgaccgtgcctatcgaatcggccagtgtcgggatgttaaagttctcaggttaatatccctgggcacagttgaagaaatcatgtatctccgccaaatctataagcaacagctccattgtgtggtagtgggctctgagaacgctaagagatactttgaagcagtgcagggcagtaaagaacaccagggagagttgtttggcattcacaatctttttaaatttcgctcccagggaagctgcctgaccaaagatatccttgaagtatag

SEQ ID NO: 23999 - DNA, 1098 bp, Artificial Sequence
  derived and/or modified sequence
atgaaggagttatggtgcgtgatggactgggcagtgccgggcctgctgggaagcggcacctacttcaagaagcagttctccgacccagtggaacatgggcagagacatacagccactaagcgggaattggcaacggggcgaaaggcaatgcagcggctcgccaagaagatgtcgggttggttcttgcgacgaaccaaaacactgatcaaagaccagctgcccaagaaagaggaccggatggtgtactgtagcttgacagattttcagaaagccgtctaccagacagttttggagactgaggacgttaccctcatcttgcagtccagcgaaccctgtacttgcagatctggacaaaagagaaggaattgttgctataagactaattcacacggtgagactgtgaaaaccctgtacctctcctacttgaccgtgctacagaaggtggccaaccatgtggctctgcttcaggctgcctctacctccaaacagcaggagaccctcattaaaaggatttgtgaccaagtcttttctagatttccagatttcgtccaaaagtctaaagatgctgcctttgaaactctgagtgatcctaagtactctgggaaaatgaaagtcttacaacaattgctgaaccactgccgtaaaaacagggataaggtgctgctgttttcgttcagcacgaaactgctcgatgtattgcagcagtattgtatggccagcggtctggattaccgtagactggacggttcaactaaatctgaagaaagacttaagatcgttaaggagtttaactccactcaggatgtgaatatctgtctggtgagtactatggcgggggggttgggactgaacttcgtgggtgcaaacgtagtagttctgtttgaccctacatggaacccggccaatgatctgcaggccattgatcggacgcagacgcactgcaggcgagagcgtgatgctgaaccactttcctcggcgcctggcctgcaaaacggcagtgaaaacgccgttccttatccatggtggtgttgcgtgacaggggccagtatatcatgttggaggtgtgagatatgccgcatccaagatgtgcttgagtag

SEQ ID NO: 24000 - DNA, 1572 bp, Artificial Sequence
  derived and/or modified sequence
atgcagaaagagcgcgagctgcaggaaaccatctactttaagaatacttggcctgcttgcatgtttctaatcgttgcacccttatccgtgctatacaactggaaggatgagctggatacttggggatacttcagggtcactgtgctgcacggaaatcgcaaggacaacgaattaatcagagtcaaacagcggaaatgtgaaatagcactcactacatacgaaacgttaagactgtgtctcgatgagctgaactctctagagtggtccgctgtgatagtggacgaggcccacaggattaaaaatccaaaagcacgtgtcacagaggtgatgaaggctctgaagtgcaatgtcagaatagggctcacaggaacgatcctgcagaacaatatgaaggagctctggtgcgtgatggattgggccgtccccggactcctcggatctggcacatactttaaaaagcagtttagtgaccctgtcgaacacggtcaacgacacacggccaccaagagggaattagccacgggcaggaaagccatgcagcggctggcaaagaagatgagcggttggttcctgaggaggactaagactttaatcaaagaccaacttccgaagaaggaggaccgcatggtgtactgtagtctcacggatttccagaaagctgtataccagaccgtccttgagacagaagatgttacactaatcctccagagttcagaaccttgcacatgccgatccggtcagaaaaggcggaattgctgttacaaaacaaattcccatggggagacggtcaaaacactgtacctgagctatctgaccgttctacagaaggtggctaaccacgtggctcttctgcaagccgcatcaacttccaagcaacaagagacattaattaaacgcatttgcgatcaggtttttagccgatttcccgatttcgtgcaaaagagcaaagacgcagccttcgagactctaagtgatcccaaatatagtgggaaaatgaaagttctccagcagttgctgaatcactgcagaaagaaccgcgacaaggttctgctgtttagctttagcactaaattgctcgacgtgctccagcagtactgcatggcttccggccttgactatcgcagactagatggttccacgaagagtgaggagcgtctgaagatcgttaaagagtttaattcgacccaagacgtaaatatttgcctcgtctcaactatggctggcggcctgggtctaaattttgtcggtgctaacgtcgttgttctgtttgatccaacatggaatcccgcaaatgacctacaagcgatcgaccgagcatacaggattggccagtgccgtgacgtgaaagtgttacggttgatttctctggggacagtcgaggagataatgtatctgaggcagatttataagcagcagcttcactgtgtggtcgtcggcagtgagaatgctaagcggtactttgaagcagtccaggggtctaaagagcaccagggcgagctgtttggaatacacaacttattcaagttcagatctcagggttcctgccttacaaaagatatattagaagtgtag

SEQ ID NO: 24001 - DNA, 2139 bp, Artificial Sequence
  derived and/or modified sequence
atgcagcccggcagcgcccctcctcctggccgcatggaccccagcgccccccagcccagggctgagaccagcggcaaggacatctggcaccctggagagcgctgcctggcccccagcccagacaacgggaagctgtgtgaggccagcatcaagagcatcaccgtggatgaaaatggcaagagctttgctgtggtgctgtatgctgacttccaggagaggaagatccccctgaagcagctgcaggaggtgaagtttgtgaaggactgccccaggaacctgatctttgatgatgaggacctggagaagccctacttccccaacaggaagttccccagcagctctgtggccttcaagctgagtgacaacggggacagcatcccctacaccatcaaccgctacctgcgggactaccagcgggagggcacccgcttcctgtatggccactacatccatggaggcggctgcatcctgggagatgacatgggcctgggcaagacagtgcaggtgatctccttcctggccgctgtgctgcacaagaagggcacccgggaggacatcgagaacaacatgcctgagttcctgctgcgctccatgaagaaggagcccctgagcagcacagccaagaagatgttcctgattgtggcccccctgtctgtgctgtacaactggaaggatgagctggacacctggggctacttccgggtgacagtgctgcacggcaacaggaaggacaatgaactcatccgggtgaagcagaggaaatgtgaaattgccctgaccacctatgagaccctgcggctgtgcctggatgagctgaacagcctggagtggagcgctgtgattgtggatgaggcccaccgcatcaagaaccccaaggcccgggtgacagaggtgatgaaggccctgaagtgcaatgtgcgcatcggcctgaccggcaccatcctgcagaacaacatgaaggagctgtggtgtgtgatggactgggccgtgcccggcctgctgggcagcggcacctacttcaagaagcagttcagtgaccctgtggagcacggccagaggcacacagccaccaagcgggagctggccactggaaggaaggccatgcagaggctggccaagaagatgagcggctggttcctgcggaggaccaagaccctcatcaaggaccagctgcccaagaaggaggacaggatggtgtactgcagcctgacagacttccagaaggctgtgtaccagacagtgctggagacagaagatgtgaccctcatcctgcagagcagcgagccctgcacctgccgcagcggccagaagagaagaaactgctgctacaagaccaacagccacggggagaccgtgaagaccctgtacctgagctacctgactgtgctgcagaaggtggccaaccacgtggccctgctgcaggccgccagcaccagcaagcagcaggagaccctcatcaagaggatctgtgaccaggtgttcagccgcttcccagactttgtgcagaagagcaaggatgctgcctttgagaccctgagtgaccccaagtacagcggcaagatgaaggtgctgcagcagctgctgaaccactgcaggaagaacagagacaaggtgctgctcttctccttcagcaccaagctgctggatgtgctgcagcagtactgcatggccagcggcctggactacagaaggctggatggcagcaccaagtctgaggagcggctgaagatcgtgaaggagttcaacagcacccaggatgtgaacatctgcctggtgtccaccatggccggcggcctgggcctgaactttgtgggcgccaacgtggtggtgctgtttgaccccacctggaacccagccaatgacctgcaggccatcgaccgggcctacagaattggccagtgcagagatgtgaaggtgctgcggctcatcagcctgggcaccgtggaggagatcatgtacctgcggcagatctacaagcagcagctgcactgtgtggtggtgggctctgaaaatgccaagcgctactttgaggccgtgcagggcagcaaggagcaccagggcgagctgtttggcatccacaacctcttcaagttccgcagccagggcagctgcctgaccaaggacatcctggaggtgtag

SEQ ID NO: 24002 - DNA, 1098 bp, Artificial Sequence
  derived and/or modified sequence
atgaaggagctgtggtgtgtgatggactgggccgtgcccggcctgctgggcagcggcacctacttcaagaagcagttcagtgaccctgtggagcacggccagaggcacacagccaccaagcgggagctggccactggaaggaaggccatgcagaggctggccaagaagatgagcggctggttcctgcggaggaccaagaccctcatcaaggaccagctgcccaagaaggaggacaggatggtgtactgcagcctgacagacttccagaaggctgtgtaccagacagtgctggagacagaagatgtgaccctcatcctgcagagcagcgagccctgcacctgccgcagcggccagaagagaagaaactgctgctacaagaccaacagccacggggagaccgtgaagaccctgtacctgagctacctgactgtgctgcagaaggtggccaaccacgtggccctgctgcaggccgccagcaccagcaagcagcaggagaccctcatcaagaggatctgtgaccaggtgttcagccgcttcccagactttgtgcagaagagcaaggatgctgcctttgagaccctgagtgaccccaagtacagcggcaagatgaaggtgctgcagcagctgctgaaccactgcaggaagaacagagacaaggtgctgctcttctccttcagcaccaagctgctggatgtgctgcagcagtactgcatggccagcggcctggactacagaaggctggatggcagcaccaagtctgaggagcggctgaagatcgtgaaggagttcaacagcacccaggatgtgaacatctgcctggtgtccaccatggccggcggcctgggcctgaactttgtgggcgccaacgtggtggtgctgtttgaccccacctggaacccagccaatgacctgcaggccatcgacaggacccagacccactgcagaagagaaagagatgctgagcccctgagcagcgcccctggcctgcagaatggaagtgaaaatgctgtgccctacccctggtggtgctgcgtgactggagccagcatcagctgctggaggtgtgagatctgccgcatccaggatgtgctggagtag

SEQ ID NO: 24003 - DNA, 1572 bp, Artificial Sequence
  derived and/or modified sequence
atgcagaaggagcgggagctgcaggagaccatctacttcaagaacacctggccagcctgcatgttcctgattgtggcccccctgtctgtgctgtacaactggaaggatgagctggacacctggggctacttccgggtgacagtgctgcacggcaacaggaaggacaatgagctgatccgggtgaagcagaggaaatgtgagatcgccctgaccacctatgagaccctgcggctgtgcctggatgagctgaacagcctggagtggagcgctgtgattgtggatgaggcccaccgcatcaagaaccccaaggcccgggtgacagaggtgatgaaggccctgaagtgcaatgtgagaattggcctgaccggcaccatcctgcagaacaacatgaaggagctgtggtgtgtgatggactgggccgtgcccggcctgctgggcagcggcacctacttcaagaagcagttcagtgaccctgtggagcacggccagaggcacacagccaccaagcgggagctggccaccggcaggaaggccatgcagaggctggccaagaagatgagcggctggttcctgcggaggaccaagaccctcatcaaggaccagctgcccaagaaggaggacaggatggtgtactgcagcctgacagacttccagaaggctgtgtaccagacagtgctggagacagaagatgtgaccctcatcctgcagagcagcgagccctgcacctgccgcagcggccagaagagaagaaactgctgctacaagaccaacagccatggagagaccgtgaagaccctgtacctgagctacctgactgtgctgcagaaggtggccaaccacgtggccctgctgcaggccgccagcaccagcaagcagcaggagaccctcatcaagaggatctgtgaccaggtgttcagccgcttcccagactttgtgcagaagagcaaggatgctgcctttgagaccctgagtgaccccaagtacagcggcaagatgaaggtgctgcagcagctgctgaaccactgcaggaagaacagagacaaggtgctgctcttctccttcagcaccaagctgctggatgtgctgcagcagtactgcatggccagcggcctggactaccgccgcctggatggcagcaccaagtctgaggagcggctgaagatcgtgaaggagttcaacagcacccaggatgtgaacatctgcctggtgtccaccatggccggcggcctgggcctgaactttgtgggcgccaacgtggtggtgctgtttgaccccacctggaacccagccaatgacctgcaggccatcgaccgggcctaccgcatcggccagtgcagagatgtgaaggtgctgcggctcatcagcctgggcaccgtggaggagatcatgtacctgcggcagatctacaagcagcagctgcactgtgtggtggtgggctctgaaaatgccaagcgctactttgaagctgtgcagggcagcaaggagcaccagggcgagctgtttggcatccacaacctcttcaagttccgcagccagggcagctgcctgaccaaggacatcctggaggtgtag

SEQ ID NO: 24004 - DNA, 2139 bp, Artificial Sequence
  derived and/or modified sequence
atgcagcccggcagcgcccccccccccggccggatggaccccagcgccccccagcctcgtgccgagacctctggcaaggatatttggcaccccggggaacgatgcctggcaccctcccctgacaacggtaagctgtgcgaggctagcatcaaatccataactgtcgatgagaatgggaagagcttcgcagtggtgctgtatgctgactttcaggagcgcaaaatccccctaaagcagttacaggaggttaaatttgtgaaggattgtccaagaaacctgatttttgatgatgaggaccttgaaaagccatactttccaaacagaaagttccccagcagttccgttgccttcaagctgagtgataatggtgatagcattccctataccattaacaggtatctgcgtgactaccagagagaggggactaggttcctttatggtcattacatccacgggggtgggtgcatcctgggggatgatatgggcctcgggaagacagtacaagttatctcttttctggctgctgtgctgcataagaagggtacgagggaggatattgaaaataacatgccagaattcctgctgcgatctatgaagaaggagccactgtcttctacagcgaagaagatgttcctgatcgtagcgcccctgtctgttttatataattggaaggacgagttagatacctggggctattttcgggtgacggtgctgcatgggaaccggaaggacaacgagcttattcgggtgaagcagagaaagtgcgagatcgcgctcaccacttacgaaaccctccggttgtgtttggatgaactgaattccttggagtggagtgcagttattgtagacgaagcacaccgcattaaaaaccccaaggctagggtgactgaggtgatgaaagcgttaaaatgcaatgtgcggattgggcttacaggaacaatactgcagaataacatgaaggaactgtggtgtgtgatggactgggctgttcccggtctcctgggctccggtacatactttaagaagcagttctctgaccctgtggagcatggccagaggcacaccgctacaaaaagagagctcgccaccggaaggaaggcaatgcaaaggctcgccaagaaaatgagcgggtggtttctacgcaggacaaagacccttattaaagaccaactaccaaagaaggaggaccggatggtatactgctccctcaccgatttccagaaggccgtgtaccagacggtgttggaaacggaggacgttacactgatcctacagtcatctgagccttgcacgtgccgtagtggccagaaacggaggaattgctgctacaagacaaactcgcacggtgagactgtgaagacactatatctcagctatctaactgtgctacagaaggtcgcaaatcacgtggcactcctgcaggccgctagcactagcaaacagcaggaaacgttaattaaacggatttgtgatcaggttttcagccggttcccagactttgtacagaagtccaaagacgcagccttcgagacgctgtcagaccctaaatatagcggcaaaatgaaggtacttcagcagctgttaaatcactgccgtaagaacagagataaagtgctcctgttctcattcagtacaaagctgctcgatgtactgcaacaatattgcatggcctcaggactggactatagaaggttggacggctctacaaaatctgaagagcggcttaaaatcgtgaaagagttcaactccactcaggacgtgaacatctgcctggtgtctactatggctggtggcctcggcctaaattttgtgggcgccaacgtggtagtcctcttcgaccctacttggaaccctgcaaacgatttgcaggccatagatagagcataccgtattgggcagtgtcgagacgtcaaagtgctgcgcctgatttctttggggaccgtagaggagattatgtacttgaggcagatttacaaacagcaactccattgcgtagtagtggggagcgaaaacgccaagaggtactttgaggcggtccaggggtctaaggagcaccaaggggaactgttcggcatccataacttgttcaaatttagatctcaaggaagttgcctgacaaaggatatcctggaggtgtag

SEQ ID NO: 24005 - DNA, 1098 bp, Artificial Sequence
  derived and/or modified sequence
atgaaggagctgtggtgcgtgatggactgggccgtgcccggcctgttagggtcaggaacttacttcaaaaaacaatttagcgatccagtagagcatggccagagacataccgctacaaaacgagaactggcaacaggcagaaaagccatgcagcgactggccaagaagatgagtgggtggtttctgaggcgcactaagacgttaattaaggatcagctaccgaagaaagaagaccggatggtctactgttccttgaccgatttccagaaggctgtctaccagaccgtgctggaaactgaggacgtgacgctgatcctccagtccagcgagccatgcacatgtcgatcggggcagaagcgacggaattgttgctataagaccaatagtcacggcgagaccgttaagacattgtacttatcgtatcttaccgtgttgcagaaagtggcaaaccatgtggccctcctccaggccgcatccaccagtaaacaacaggaaacactcattaagcgcatatgcgatcaggtattctcccggtttcctgattttgtgcagaaaagcaaggatgcagctttcgagaccctgagtgaccctaagtacagtgggaaaatgaaagtactgcagcagcttctgaatcactgccgaaagaatcgcgataaagtgttattattcagtttcagcacgaagctccttgatgtccttcagcagtattgtatggcctcaggactggactaccggcgccttgatggatccacaaaaagcgaagaaaggctcaagatcgtgaaggagttcaacagcacacaggacgtaaacatttgtctggtgagcaccatggccggaggtctcgggttaaacttcgtgggagccaacgtggttgtgctcttcgatccgacgtggaacccggcaaacgacctgcaggccatcgacaggactcagacgcattgccgtcgcgaacgggacgcggaacctctgtcttccgcgccgggcctccagaatggcagcgagaatgctgttccatacccttggtggtgctgtgtaaccggggccagtatcagttgttggcgatgcgagatttgtcgcatccaggacgtcctggagtag

SEQ ID NO: 24006 - DNA, 1572 bp, Artificial Sequence
  derived and/or modified sequence
atgcagaaggagcgggagctgcaggagaccatctacttcaagaacacttggccggcatgcatgttcctcatcgttgcccccttgtctgttctgtataactggaaggacgaacttgacacatggggctatttccgggtcactgtcctccacggcaaccgcaaggacaatgaactgatccgagtgaagcagcgaaaatgcgaaatagccctcacaacctatgaaacgctgcgcttatgtcttgacgagctgaatagtctggagtggagcgctgtgattgtcgatgaggcgcacagaatcaaaaaccccaaggctcgcgtgactgaggtcatgaaggcccttaaatgtaatgtgaggattggtctaactggcaccatcctgcagaataacatgaaagagctttggtgtgtcatggactgggccgtccctgggctcttgggatctggtacctattttaagaaacaatttagcgatcccgttgagcacggccagagacacaccgccacaaagcgggaactggccacggggcggaaggcgatgcaacggttagccaagaagatgtctggttggtttttaagaagaacaaagactcttattaaggatcagctgcctaagaaggaggataggatggtatactgctcgctgaccgatttccagaaggctgtgtaccagactgtgctagagaccgaagatgtgacgctgatcctgcagtcctcagagccttgtacctgccgcagtggacagaagcgcagaaactgttgttacaagaccaactcacacggcgagacagtgaaaacactttacctgtcgtacctcacggttttgcagaaggtggccaatcacgtagcactgctacaggctgcttccacctcaaagcagcaagagacattgataaagaggatctgcgaccaggtattcagcaggtttcccgacttcgtccaaaaatctaaagacgccgcctttgagacactcagcgatcctaaatactcgggcaaaatgaaagtcctgcagcagctgctgaaccactgtaggaagaacagagacaaggtcttacttttttcattcagtaccaagctccttgatgtcctacagcagtattgcatggccagcgggcttgactatagacgcttagacggctccactaaaagcgaggagcggctcaaaatcgtaaaagagttcaactcaacacaggatgtcaatatatgtctggtgtccactatggccggcggcctcggtcttaacttcgtgggagctaacgtggtggtgctgtttgacccaacatggaaccctgccaatgacctacaagcgatagacagggcctacaggatcggacaatgtcgagatgtgaaggtgctgcgactgatcagcctgggtaccgtggaagaaatcatgtacctgaggcagatatacaagcaacagctccactgtgtggtggtcgggtctgaaaatgcaaaacgctacttcgaggcagtccagggaagcaaggagcatcagggtgagctgtttggtatccacaacttattcaagtttagaagtcagggaagctgtctgacgaaggacattctggaggtttag

SEQ ID NO: 24007 - DNA, 2440 bp, Artificial Sequence
  derived and/or modified sequence
caattcgggagcccgttctcgcgggattttccaagaccgggttggaatttgcgggggttaggagacggaagtcagagcctaggaagatttgggggtcgccttgccggcctcctgtcctcctccggcggcggcggagcccgagagaactaggtgaacaccgctttgccagcctcacacagcgtcccctggctctgccgccgctccggacgtcgccctcccgttctgcttgggtccccttagtcgctacctttgctgggatccccctcctccatcctgtggcttcgggttgccgaagagcgatgctcggagggcggccggaagtggcgttggccgccattggcctgccggccagccaccttgctgtcctccgccgccttccgggtgttacatgcagccgggctcggcccctccccctggccggatggatccgtcggcgccacagccccgcgcggaaacctcaggcaaagacatatggcatccaggagaaagatgtcttgccccttctccagataatggaaaactttgtgaagcaagcataaaatctatcacagtggatgaaaatggcaagtcatttgcagtcgtcttatatgcagattttcaagaaaggaaaatacctcttaaacagcttcaagaagtgaaatttgttaaagattgccctaggaatcttatatttgatgatgaagatttagaaaaaccttatttcccaaaccgaaaatttccatcatcttctgttgcttttaaattatctgacaatggagactctattccttataccatcaataggtatttgagagactaccaaagagaaggaacccggtttctttatggacactacatccatggaggagggtgcattctgggtgatgacatgggacttggaaaaacagtacaggttatttcatttctggctgcagttttgcataaaaagggaactcgtgaggatattgaaaataacatgccagagtttttactaagaagtatgaaaaaggaacccctttcttctacagcaaaaaagatgttcttaatagttgctcctctttctgtcctctacaactggaaggatgaattggacacctggggatatttcagagtcactgttttacatggaaacagaaaagataatgaattaattcgtgtaaagcagaggaaatgtgaaattgctctaacaacttatgaaacactacgcttatgcctggatgaacttaacagtttggaatggtcagctgtcattgtggatgaagctcatagaatcaagaatccaaaagctagagtaacagaagttatgaaagctttgaaatgtaatgtccgcattggcctcactggaaccatccttcagaacaacatgaaggaactgtggtgtgttatggactgggctgtgccaggccttttagggagtgggacctacttcaagaagcagttttctgacccagtagaacatggtcagagacacacggcaacaaagagagaactagccactggccgaaaggccatgcaaagacttgccaaaaagatgtctggctggtttctcaggcgcaccaagactcttatcaaggatcagttgcctaagaaggaagaccggatggtgtattgttctttgacagatttccagaaagctgtctatcaaacagtgttagaaacagaggacgtgactttgatacttcaatcttctgagccttgtacctgtaggagtggccaaaaaaggagaaattgttgttataagaccaattctcatggtgaaacagtgaaaaccttgtatctcagttaccttacagtccttcagaaggtagctaaccatgtcgcgctactgcaagctgctagtacttccaaacaacaggaaacacttatcaaaaggatatgtgatcaggtattttccagattcccagattttgtgcagaaaagcaaagatgcagcctttgaaacactttctgaccctaaatacagtggaaaaatgaaggtccttcagcagcttttaaatcattgcaggaaaaacagagataaagttcttctcttttctttttccaccaagttgcttgacgtgctacagcagtactgtatggcgtctgggcttgattaccgacgacttgatggaagtacaaaatcagaggaaagactcaagattgtaaaagagttcaacagtacacaagatgttaacatttgccttgtctctacaatggctggtggactaggcctcaattttgtcggtgccaatgttgttgtattatttgatcctacttggaatccagccaatgatcttcaagccattgacagaacccaaacacattgtaggagagaaagggatgctgagcccctctcctctgctcctgggttgcagaatggaagtgagaatgcagtaccttacccctggtggtgctgtgtcacaggagcctccatttcctgctggagatgtgagatttgcaggatccaagatgtcctcgagtaa

SEQ ID NO: 24008 - DNA, 2139 bp, Artificial Sequence
  derived and/or modified sequence
atgcagccagggtccgctcccccacccggacgcatggacccgtcagctcctcagccgagagccgagacatccggcaaagatatctggcaccctggcgagaggtgcctcgctccaagcccagataacggaaaactgtgcgaagccagtataaagagcataacagtggatgagaatgggaagagctttgctgtggtactctatgctgactttcaggagaggaagattcccctcaagcaactgcaagaagtcaaatttgtcaaggattgtcctcggaaccttatcttcgacgacgaggacctggagaagccttatttccctaaccgtaaattcccctcatcaagcgtggcttttaaattgtccgataacggagactccattccatatactatcaacagatacttgcgggattaccaacgcgagggaactagattcctgtacggtcattatatccacggaggcggttgtatcttaggtgacgacatgggcttgggtaagactgtgcaggtgataagcttcctagcagcagtgctacataaaaaagggacgcgcgaggatattgagaataacatgcctgaattcttgctgagatcaatgaaaaaggagcccctctcctccacagcaaaaaagatgtttttgatcgtggccccactgtcagtcttgtataattggaaggacgaacttgacacatggggatacttccgcgtcaccgtgttgcacggtaacagaaaagacaacgaactgatacgtgtgaagcagcgaaagtgcgaaatcgctttgacaacatatgagactcttaggctctgtttggacgagctgaatagcctggaatggtcagcagttatcgtcgatgaggctcaccgtatcaaaaatccaaaggcacgcgtaacagaggtgatgaaggcactgaaatgtaacgtccgtataggactcaccggcacgattctgcagaacaacatgaaagagctgtggtgcgtcatggattgggcagtgccaggcctgctcgggtccggtacatactttaaaaaacagttttcggatcctgtcgagcacggccagcgccataccgctacaaagagagaactggctactggcagaaaagctatgcaaagactcgctaagaaaatgagtgggtggtttctaaggcgtacgaaaacgctcatcaaggatcaactgcctaaaaaggaggaccggatggtttattgctcgttgaccgatttccagaaagctgtgtaccagactgtgttggagactgaagacgtaactctgatcctgcaatcatccgagccctgcacctgcagaagtgggcagaagcggagaaattgctgctacaaaaccaattctcatggggagaccgtcaagacactgtatttgagttatttaactgtgctccaaaaagttgcaaaccatgtggctctcctgcaggcagcgtccacatcaaagcagcaagaaacactgattaagagaatctgtgaccaagtcttctcccggtttccggactttgttcagaagagtaaagacgccgcttttgaaactctctctgatcctaagtattcaggtaaaatgaaagtgctgcaacaacttttgaatcactgcagaaagaacagggataaggtgctgctgttctccttttccactaagctcctggacgtgttgcagcagtattgtatggctagcgggctggactatcgccgactggatgggagtacaaaaagcgaagaacggctgaagattgtaaaggagttcaattctactcaggatgttaacatctgtctcgtgagcaccatggccggtggcctcgggctgaatttcgtgggtgcaaacgttgtggttctgtttgatccaacctggaatccagcgaacgacttgcaggccattgatagagcctacagaatcggacagtgtcgggacgtgaaggttctgcgcttaatcagcctggggaccgttgaagagattatgtacctgcgacaaatatataaacaacaactgcactgtgtcgtcgtcgggtcagagaacgctaaaagatactttgaggctgtgcaaggcagcaaggagcatcagggtgaactctttggcatccataaccttttcaaattccgatcccaggggtcttgcctgactaaggatatacttgaggtgtag

SEQ ID NO: 24009 - DNA, 1098 bp, Artificial Sequence
  derived and/or modified sequence
atgaaggagctgtggtgcgtgatggattgggctgttcctggtctgctaggcagtgggacatacttcaaaaagcaattttctgaccccgtagagcatggtcagagacataccgccaccaagagagagctggccaccgggagaaaggccatgcagcgccttgctaaaaagatgagcgggtggtttctgcggagaactaagacgttgatcaaggaccagttgcctaaaaaagaagaccgcatggtctattgctctttgacagattttcagaaagctgtttatcagacggtgctggaaaccgaggatgtgaccctgattttgcagtcaagcgaaccctgcacatgccgaagtggtcagaaacggaggaactgctgttataaaaccaatagccacggtgaaaccgtcaaaaccctgtacctctcctacctgaccgtgttgcaaaaagtagccaatcacgtggcactcctacaagccgcaagcacaagtaaacaacaggagacattgatcaagagaatctgcgaccaggtcttttctagatttccagatttcgtgcaaaaaagtaaagatgccgcttttgaaactctctctgatcccaagtatagtggcaaaatgaaggtgctgcaacagctgctgaatcactgcagaaagaacagggataaggtactcctcttttcattctccacgaagctgttagacgtgctgcagcagtactgcatggccagtggcctggattaccggcgactggacggttcaaccaaatcagaagaaaggctgaaaatagtcaaagaattcaatagcacccaggacgttaacatctgtctggtctctactatggcagggggacttggtttaaatttcgttggagcaaatgttgtagttctgtttgacccaacctggaatcccgcaaacgacctgcaggccatcgacagaacccagactcactgtagaagagagcgagacgctgaaccgctttcgtcagctcctgggctacaaaacgggagcgagaatgctgttccctacccttggtggtgttgcgtaactggtgcatcaatttcctgttggagatgtgaaatctgtcgcatccaggatgtgctggagtag

SEQ ID NO: 24010 - DNA, 1572 bp, Artificial Sequence
  derived and/or modified sequence
atgcagaaggaacgtgaacttcaggaaaccatttactttaaaaacacctggccagcctgtatgttcctgatagtagcaccactaagcgtactatacaattggaaggacgagctggatacttggggctatttccgcgtaaccgtccttcacggcaatagaaaagataacgagctgattcgcgttaaacagcgaaagtgcgagatagcgctcacaacatatgaaacattgagactgtgtctggacgagcttaactccttagaatggagcgcggttatcgtggatgaagcccatcggatcaagaacccaaaggcccgagtgactgaagtgatgaaggccctgaagtgcaacgtgcgaatagggctgaccggcacaatcctccaaaataatatgaaggaactttggtgtgtaatggactgggccgtgcccggactgctagggagcggcacatatttcaaaaaacagttctctgatcccgtcgagcacgggcagagacacacagcaacgaagcgcgagttggcgacaggaagaaaagccatgcaaagattagcaaaaaagatgtctggctggttcctcagaaggactaagactctgatcaaggaccaactgccaaagaaggaagatcggatggtctactgttctttaactgactttcaaaaagccgtgtatcagaccgtcttggaaactgaagatgttaccctgatactgcagagctcagagccttgcacctgccgttctggtcagaaaaggcggaactgttgttataagacaaattctcatggggaaacagtcaaaacattgtatctttcttatctgacggtcctgcaaaaggtggccaaccacgtggcactgctccaggctgctagtacttcaaagcagcaggaaacgctgataaagcgcatctgcgaccaggtgttttctcggtttcccgactttgtgcagaagagcaaagacgctgcattcgaaacactgtctgatcccaaatattcaggtaagatgaaggtgctccaacagctgctcaatcactgccgcaagaaccgagacaaggttctcctcttctccttttctacgaagttgttggatgtgttgcagcagtactgcatggcctccggcctggactacagacgccttgacggaagcactaagagtgaagaacggctgaagatcgtgaaagagtttaacagcacacaagatgtgaacatttgcctggtgagtaccatggcgggagggctcggtctcaatttcgtgggggcaaatgtggtggtcctctttgatcccacctggaaccccgcaaacgacctgcaagctatcgaccgcgcttaccggatcggccagtgtagagacgtcaaagtactgcgacttattagcctgggaaccgtggaagaaattatgtatctccgtcaaatttacaagcaacagctgcactgtgtcgtggtggggagcgagaatgcaaagcggtactttgaagcagtgcagggctcgaaagagcatcagggagagttatttggaatccataatctttttaaattccgtagccagggttcctgcctgacaaaggatatactggaggtatag

SEQ ID NO: 24011 - DNA, 3691 bp, Artificial Sequence
  derived and/or modified sequence
atgcagaaggaaagagagctccaggagaccatatatttcaagaacacgtggcctgcttgtatgttcttaatagttgctcctctttctgtcctctacaactggaaggatgaattggacacctggggatatttcagagtcactgttttacatggaaacagaaaagataatgaattaattcgtgtaaagcagaggaaatgtgaaattgctctaacaacttatgaaacactacgcttatgcctggatgaacttaacagtttggaatggtcagctgtcattgtggatgaagctcatagaatcaagaatccaaaagctagagtaacagaagttatgaaagctttgaaatgtaatgtccgcattggcctcactggaaccatccttcagaacaacatgaaggaactgtggtgtgttatggactgggctgtgccaggccttttagggagtgggacctacttcaagaagcagttttctgacccagtagaacatggtcagagacacacggcaacaaagagagaactagccactggccgaaaggccatgcaaagacttgccaaaaagatgtctggctggtttctcaggcgcaccaagactcttatcaaggatcagttgcctaagaaggaagaccggatggtgtattgttctttgacagatttccagaaagctgtctatcaaacagtgttagaaacagaggacgtgactttgatacttcaatcttctgagccttgtacctgtaggagtggccaaaaaaggagaaattgttgttataagaccaattctcatggtgaaacagtgaaaaccttgtatctcagttaccttacagtccttcagaaggtagctaaccatgtcgcgctactgcaagctgctagtacttccaaacaacaggaaacacttatcaaaaggatatgtgatcaggtattttccagattcccagattttgtgcagaaaagcaaagatgcagcctttgaaacactttctgaccctaaatacagtggaaaaatgaaggtccttcagcagcttttaaatcattgcaggaaaaacagagataaagttcttctcttttctttttccaccaagttgcttgacgtgctacagcagtactgtatggcgtctgggcttgattaccgacgacttgatggaagtacaaaatcagaggaaagactcaagattgtaaaagagttcaacagtacacaagatgttaacatttgccttgtctctacaatggctggtggactaggcctcaattttgtcggtgccaatgttgttgtattatttgatcctacttggaatccagccaatgatcttcaagccattgacagagcatataggattggacaatgtagagatgtcaaagtgcttaggctgatatccttgggaactgtggaggaaatcatgtatttacgacagatatacaagcagcaacttcactgtgtggtggttggaagtgaaaatgccaaacgatattttgaagcagttcaaggatctaaagagcatcaaggagagctttttgggatccataacctcttcaaatttaggtcccaagggtcttgtcttacgaaggacatcctggaggtgtgaacttcttctctgaccttttcaataatattttaaatacagtttttcttcctcaggaaatctgaaatacaattgctgttgccttttcagagaaacttttggttttctttatcaaaaatgccttggaatttttacttttagagaataagaaatgaattattgtacctctaaactaagattttcccatgcataattacaaataatgcacacacacaaatgtatatgctgggtagtatgaactccaaggcaattttaaataggcagagagaagtttatagttttgaaaacagctgctgaagtcaggaactaaaaaaagaggttttcctaaataaacaaaaatataaaatgtgttttaattaaaagttaccaaatactccctgagatgtactctcatgtctcatggagatttttgttttctgttcccaataaaaattccacaccagtattttaaactctccctgttgtgttcatcctcagcatacagatgtttcttattcctcaaacaaaatattttatatccttttttaaaaaaatctttaagttcttttatataccggaatactaaggatattaacctattttctaattgatattcatataggtatcataaaatcctggagtatcatctttttcaacctcctcatggtatagatgaggaaactgagtcttagagaacttcaggatatttctcttgacttccaggactttgtagtaaaatcttaatgtacttcatttattcagtaagtaccataaaggcagttcaaggagcaattggttcctgtccttgaggaacttaaaccatcttgaccggaggtggaagagaacgtttacataataaccatgcaatgtcaggaatcgtatgctgaacaagttaaacagtagaccatggatggctgggggagaggaaggtatatattatttgaatcctataaatgttgttactattatacagtttctgatatatactgctgagtttctattttatagtaactatatttgattctgaattcagtggcccatttggagtcctactttttggggttttttccccttgctttttaaatacgctgtttctttcatgaatttgttctttccagtttcccttttcatatcaataactttgtttgccctccagctcccaaacccagctgctacctccatctcagagtactacttgacatgcctatattgatgttaaagtcaattgtctataaaaatattagcattttattatttatcctgttttctgtcatatatgacatagttacctgtttttatcagaataaccacctatttctttgttaaacaagtgttatataagacatatcaggatgacaggttattaagtagaaaaagttcccttgtttatcgtgccactgcactccagcctggggaacaaagcaagagacttgtctcaaaaacaaaaaacaaaaacaaaaaaaagttctcttgttcactggttattctaagaatatcttgtttcaccttcagaagtgtttattaatgacaggaccatccatgtcttacattttcttttttaaaaatatcttttaagttctttaatataccagaacactaagaatattaacctattttctaattgatattaataaggggtgacaaggccatccatgccctacatttgtcttgctaggcatatcattggcacttgattattaagttaaattttgaattaaaattactcatttgtcatcaatcagaatgtaaatttattcaggattggttagattcatgctgctttgggccaaaaggtgcttctaaatattattattagccccatataatgggagtacctatcataaagtaaaaggagtatttcacttcatgtgagacatttttaatttttaaaggttgtataaaatctcttttaaaatgttttaagatgtaaaaatttgaatatttacacttataatcttatgatttctgggcaatttcattctgttttgcattgactttccattatctatattatggtttctcttcaaagatagatattgagagttcattttacaagtatttgttgagcatctgctaaatgtcaggtactgttcatagagctttgcatacataaaagaacaaaataaacaaaacgatcctgtct

SEQ ID NO: 24012 - DNA, 4564 bp, Artificial Sequence
  derived and/or modified sequence
aagatttgggggtcgccttgccggcctcctgtcctcctccggcggcggcggagcccgagagaactaggtgaacaccgctttgccagcctcacacagcgtcccctggctctgccgccgctccggacgtcgccctcccgttctgcttgggtccccttagtcgctacctttgctgggatccccctcctccatcctgtggcttcgggttgccgaagagcgatgctcggagggcggccggaagtggcgttggccgccattggcctgccggccagccaccttgctgtcctccgccgccttccgggtgttacatgcagccgggctcggcccctccccctggccggatggatccgtcggcgccacagccccgcgcggaaacctcaggcaaagacatatggcatccaggagaaagatgtcttgccccttctccagataatggaaaactttgtgaagcaagcataaaatctatcacagtggatgaaaatggcaagtcatttgcagtcgtcttatatgcagattttcaagaaaggaaaatacctcttaaacagcttcaagaagtgaaatttgttaaagattgccctaggaatcttatatttgatgatgaagatttagaaaaaccttatttcccaaaccgaaaatttccatcatcttctgttgcttttaaattatctgacaatggagactctattccttataccatcaataggtatttgagagactaccaaagagaaggaacccggtttctttatggacactacatccatggaggagggtgcattctgggtgatgacatgggacttggaaaaacagtacaggttatttcatttctggctgcagttttgcataaaaagggaactcgtgaggatattgaaaataacatgccagagtttttactaagaagtatgaaaaaggaacccctttcttctacagcaaaaaagatgttcttaatagttgctcctctttctgtcctctacaactggaaggatgaattggacacctggggatatttcagagtcactgttttacatggaaacagaaaagataatgaattaattcgtgtaaagcagaggaaatgtgaaattgctctaacaacttatgaaacactacgcttatgcctggatgaacttaacagtttggaatggtcagctgtcattgtggatgaagctcatagaatcaagaatccaaaagctagagtaacagaagttatgaaagctttgaaatgtaatgtccgcattggcctcactggaaccatccttcagaacaacatgaaggaactgtggtgtgttatggactgggctgtgccaggccttttagggagtgggacctacttcaagaagcagttttctgacccagtagaacatggtcagagacacacggcaacaaagagagaactagccactggccgaaaggccatgcaaagacttgccaaaaagatgtctggctggtttctcaggcgcaccaagactcttatcaaggatcagttgcctaagaaggaagaccggatggtgtattgttctttgacagatttccagaaagctgtctatcaaacagtgttagaaacagaggacgtgactttgatacttcaatcttctgagccttgtacctgtaggagtggccaaaaaaggagaaattgttgttataagaccaattctcatggtgaaacagtgaaaaccttgtatctcagttaccttacagtccttcagaaggtagctaaccatgtcgcgctactgcaagctgctagtacttccaaacaacaggaaacacttatcaaaaggatatgtgatcaggtattttccagattcccagattttgtgcagaaaagcaaagatgcagcctttgaaacactttctgaccctaaatacagtggaaaaatgaaggtccttcagcagcttttaaatcattgcaggaaaaacagagataaagttcttctcttttctttttccaccaagttgcttgacgtgctacagcagtactgtatggcgtctgggcttgattaccgacgacttgatggaagtacaaaatcagaggaaagactcaagattgtaaaagagttcaacagtacacaagatgttaacatttgccttgtctctacaatggctggtggactaggcctcaattttgtcggtgccaatgttgttgtattatttgatcctacttggaatccagccaatgatcttcaagccattgacagagcatataggattggacaatgtagagatgtcaaagtgcttaggctgatatccttgggaactgtggaggaaatcatgtatttacgacagatatacaagcagcaacttcactgtgtggtggttggaagtgaaaatgccaaacgatattttgaagcagttcaaggatctaaagagcatcaaggagagctttttgggatccataacctcttcaaatttaggtcccaagggtcttgtcttacgaaggacatcctggaggtgtgaacttcttctctgaccttttcaataatattttaaatacagtttttcttcctcaggaaatctgaaatacaattgctgttgccttttcagagaaacttttggttttctttatcaaaaatgccttggaatttttacttttagagaataagaaatgaattattgtacctctaaactaagattttcccatgcataattacaaataatgcacacacacaaatgtatatgctgggtagtatgaactccaaggcaattttaaataggcagagagaagtttatagttttgaaaacagctgctgaagtcaggaactaaaaaaagaggttttcctaaataaacaaaaatataaaatgtgttttaattaaaagttaccaaatactccctgagatgtactctcatgtctcatggagatttttgttttctgttcccaataaaaattccacaccagtattttaaactctccctgttgtgttcatcctcagcatacagatgtttcttattcctcaaacaaaatattttatatccttttttaaaaaaatctttaagttcttttatataccggaatactaaggatattaacctattttctaattgatattcatataggtatcataaaatcctggagtatcatctttttcaacctcctcatggtatagatgaggaaactgagtcttagagaacttcaggatatttctcttgacttccaggactttgtagtaaaatcttaatgtacttcatttattcagtaagtaccataaaggcagttcaaggagcaattggttcctgtccttgaggaacttaaaccatcttgaccggaggtggaagagaacgtttacataataaccatgcaatgtcaggaatcgtatgctgaacaagttaaacagtagaccatggatggctgggggagaggaaggtatatattatttgaatcctataaatgttgttactattatacagtttctgatatatactgctgagtttctattttatagtaactatatttgattctgaattcagtggcccatttggagtcctactttttggggttttttccccttgctttttaaatacgctgtttctttcatgaatttgttctttccagtttcccttttcatatcaataactttgtttgccctccagctcccaaacccagctgctacctccatctcagagtactacttgacatgcctatattgatgttaaagtcaattgtctataaaaatattagcattttattatttatcctgttttctgtcatatatgacatagttacctgtttttatcagaataaccacctatttctttgttaaacaagtgttatataagacatatcaggatgacaggttattaagtagaaaaagttcccttgtttatcgtgccactgcactccagcctggggaacaaagcaagagacttgtctcaaaaacaaaaaacaaaaacaaaaaaaagttctcttgttcactggttattctaagaatatcttgtttcaccttcagaagtgtttattaatgacaggaccatccatgtcttacattttcttttttaaaaatatcttttaagttctttaatataccagaacactaagaatattaacctattttctaattgatattaataaggggtgacaaggccatccatgccctacatttgtcttgctaggcatatcattggcacttgattattaagttaaattttgaattaaaattactcatttgtcatcaatcagaatgtaaatttattcaggattggttagattcatgctgctttgggccaaaaggtgcttctaaatattattattagccccatataatgggagtacctatcataaagtaaaaggagtatttcacttcatgtgagacatttttaatttttaaaggttgtataaaatctcttttaaaatgttttaagatgtaaaaatttgaatatttacacttataatcttatgatttctgggcaatttcattctgttttgcattgactttccattatctatattatggtttctcttcaaagatagatattgagagttcattttacaagtatttgttgagcatctgctaaatgtcaggtactgttcatagagctttgcatacataaaagaacaaaataaacaaaacgatcctgtcta

SEQ ID NO: 24013 - DNA, 2139 bp, Artificial Sequence
  derived and/or modified sequence
atgcagcccggcagcgcccccccccccggcagaatggaccccagcgccccccagcccagagccgagaccagcggcaaggacatctggcaccccggcgagagatgcctggcccccagccccgacaacggcaagctgtgcgaggccagcatcaagagcatcaccgtggacgagaacggcaagagcttcgccgtggtgctgtacgccgacttccaggagagaaagatccccctgaagcagctgcaggaggtgaagttcgtgaaggactgccccagaaacctgatcttcgacgacgaggacctggagaagccctacttccccaacagaaagttccccagcagcagcgtggccttcaagctgagcgacaacggcgacagcatcccctacaccatcaacagatacctgagagactaccagagagagggcaccagattcctgtacggccactacatccacggcggcggctgcatcctgggcgacgacatgggcctgggcaagaccgtgcaggtgatcagcttcctggccgccgtgctgcacaagaagggcaccagagaggacatcgagaacaacatgcccgagttcctgctgagaagcatgaagaaggagcccctgagcagcaccgccaagaagatgttcctgatcgtggcccccctgagcgtgctgtacaactggaaggacgagctggacacctggggctacttcagagtgaccgtgctgcacggcaacagaaaggacaacgagctgatcagagtgaagcagagaaagtgcgagatcgccctgaccacctacgagaccctgagactgtgcctggacgagctgaacagcctggagtggagcgccgtgatcgtggacgaggcccacagaatcaagaaccccaaggccagagtgaccgaggtgatgaaggccctgaagtgcaacgtgagaatcggcctgaccggcaccatcctgcagaacaacatgaaggagctgtggtgcgtgatggactgggccgtgcccggcctgctgggcagcggcacctacttcaagaagcagttcagcgaccccgtggagcacggccagagacacaccgccaccaagagagagctggccaccggcagaaaggccatgcagagactggccaagaagatgagcggctggttcctgagaagaaccaagaccctgatcaaggaccagctgcccaagaaggaggacagaatggtgtactgcagcctgaccgacttccagaaggccgtgtaccagaccgtgctggagaccgaggacgtgaccctgatcctgcagagcagcgagccctgcacctgcagaagcggccagaagagaagaaactgctgctacaagaccaacagccacggcgagaccgtgaagaccctgtacctgagctacctgaccgtgctgcagaaggtggccaaccacgtggccctgctgcaggccgccagcaccagcaagcagcaggagaccctgatcaagagaatctgcgaccaggtgttcagcagattccccgacttcgtgcagaagagcaaggacgccgccttcgagaccctgagcgaccccaagtacagcggcaagatgaaggtgctgcagcagctgctgaaccactgcagaaagaacagagacaaggtgctgctgttcagcttcagcaccaagctgctggacgtgctgcagcagtactgcatggccagcggcctggactacagaagactggacggcagcaccaagagcgaggagagactgaagatcgtgaaggagttcaacagcacccaggacgtgaacatctgcctggtgagcaccatggccggcggcctgggcctgaacttcgtgggcgccaacgtggtggtgctgttcgaccccacctggaaccccgccaacgacctgcaggccatcgacagagcctacagaatcggccagtgcagagacgtgaaggtgctgagactgatcagcctgggcaccgtggaggagatcatgtacctgagacagatctacaagcagcagctgcactgcgtggtggtgggcagcgagaacgccaagagatacttcgaggccgtgcagggcagcaaggagcaccagggcgagctgttcggcatccacaacctgttcaagttcagaagccagggcagctgcctgaccaaggacatcctggaggtgtag

SEQ ID NO: 24014 - protein, 145 aa, Artificial Sequence
  derived and/or modified sequence
MESMAPEISEDIGCPLAYMRESVCALLINQSFFSCVAEMYIPDMNRPGKAERRAEKGLRPPRKLVGETRRLQSWPTLARWLRRVSFSLYKPPIQAAPEPDPGNWAKSPRLSLGPEGITKGKHGFKFQGIKEKFNVSKKVLKMTFL

SEQ ID NO: 24015 - protein, 155 aa, Artificial Sequence
  derived and/or modified sequence
MAKSERRIYSMESMAPEISEDIGCPLAYMRESVCALLINQSFFSCVAEMYIPDMNRPGKAERRAEKGLRPPRKLVGETRRLQSWPTLARWLRRVSFSLYKPPIQAAPEPDPGNWAKSPRLSLGPEGITKGKHGFKFQGIKEKFNVSKKVLKMTFL

SEQ ID NO: 24016 - DNA, 578 bp, Artificial Sequence
  derived and/or modified sequence
atgcccaaacacagcaccattttcaccattttctgataatgcaggagtaggatggctaaaagtgaaagaagaatctactctatggaaagcatggcacctgaaatttctgaagatattggctgtcctctagcttatatgagagagagtgtttgtgctttactaatcaaccagtcatttttttcttgtgtggctgaaatgtacattccagacatgaacaggcctggtaaggcagaacggagagccgagaagggcctgaggcctcccaggaagctggttggggagaccagaaggctgcaaagctggccaacgcttgccaggtggctgcggagagtcagcttcagtctctacaagccgcccatccaggcagctcctgaaccagatccaggcaactgggccaagtccccaaggctgtctctgggaccagaaggtataaccaaagggaagcatggatttaaattccagggcataaaagaaaagttcaacgtatctaagaaggtgctgaaaatgacttttttgtaaatgtctgaaggacactgtcttataccataccatatacaataaaattttaaatgagcctg

SEQ ID NO: 24017 - DNA, 614 bp, Artificial Sequence
  derived and/or modified sequence
atgcccaaacacagcaccattttcaccattttctgataatgcaggagtaggatggctaaaagtgaaagaagaatctactctatggaaagcatggcacctgaaatttctgaagatattggctgtcctctagcttatatgagagagagtgtttgtgctttactaatcaaccagtcatttttttcttgtgtggctgaaatgtacattccagacatgaacaggcttgaagaacggacagctgcactttatcccataggcctggtaaggcagaacggagagccgagaagggcctgaggcctcccaggaagctggttggggagaccagaaggctgcaaagctggccaacgcttgccaggtggctgcggagagtcagcttcagtctctacaagccgcccatccaggcagctcctgaaccagatccaggcaactgggccaagtccccaaggctgtctctgggaccagaaggtataaccaaagggaagcatggatttaaattccagggcataaaagaaaagttcaacgtatctaagaaggtgctgaaaatgacttttttgtaaatgtctgaaggacactgtcttataccataccatatacaataaaattttaaatgagcctga

SEQ ID NO: 24018 - DNA, 579 bp, Artificial Sequence
  derived and/or modified sequence
atgcccaaacacagcaccattttcaccattttctgataatgcaggagtaggatggctaaaagtgaaagaagaatctactctatggaaagcatggcacctgaaatttctgaagatattggctgtcctctagcttatatgagagagagtgtttgtgctttactaatcaaccagtcatttttttcttgtgtggctgaaatgtacattccagacatgaacaggcctggtaaggcagaacggagagccgagaagggcctgaggcctcccaggaagctggttggggagaccagaaggctgcaaagctggccaacgcttgccaggtggctgcggagagtcagcttcagtctctacaagccgcccatccaggcagctcctgaaccagatccaggcaactgggccaagtccccaaggctgtctctgggaccagaaggtataaccaaagggaagcatggatttaaattccagggcataaaagaaaagttcaacgtatctaagaaggtgctgaaaatgacttttttgtaaatgtctgaaggacactgtcttataccataccatatacaataaaattttaaatgagcctga

SEQ ID NO: 24019 - DNA, 438 bp, Artificial Sequence
  derived and/or modified sequence
atggagagcatggcccccgagatcagcgaggacatcggctgccccctggcctacatgagagagagcgtgtgcgccctgctgatcaaccagagcttcttcagctgcgtggccgagatgtacatccccgacatgaacagacccggcaaggccgagagaagagccgagaagggcctgagaccccccagaaagctggtgggcgagaccagaagactgcagagctggcccaccctggccagatggctgagaagagtgagcttcagcctgtacaagccccccatccaggccgcccccgagcccgaccccggcaactgggccaagagccccagactgagcctgggccccgagggcatcaccaagggcaagcacggcttcaagttccagggcatcaaggagaagttcaacgtgagcaagaaggtgctgaagatgaccttcctgtag

SEQ ID NO: 24020 - DNA, 468 bp, Artificial Sequence
  derived and/or modified sequence
atggccaagagcgagagaagaatctacagcatggagagcatggcccccgagatcagcgaggacatcggctgccccctggcctacatgagagagagcgtgtgcgccctgctgatcaaccagagcttcttcagctgcgtggccgagatgtacatccccgacatgaacagacccggcaaggccgagagaagagccgagaagggcctgagaccccccagaaagctggtgggcgagaccagaagactgcagagctggcccaccctggccagatggctgagaagagtgagcttcagcctgtacaagccccccatccaggccgcccccgagcccgaccccggcaactgggccaagagccccagactgagcctgggccccgagggcatcaccaagggcaagcacggcttcaagttccagggcatcaaggagaagttcaacgtgagcaagaaggtgctgaagatgaccttcctgtag

SEQ ID NO: 24021 - DNA, 438 bp, Artificial Sequence
  derived and/or modified sequence
atggaatctatggcccccgaaatttccgaagacatcgggtgccccctggcatatatgagggagtctgtgtgcgcgctcctgattaatcagtcatttttcagctgcgtggctgaaatgtacattcccgatatgaatagacctgggaaagcggagcgtcgcgcagaaaagggactgaggccccctaggaaactagtaggtgagaccaggcgtctgcagtcctggcccaccctcgcccggtggttacggcgggtgtccttttccctgtacaaaccccccattcaggcagcccccgagcctgaccctgggaattgggcaaagtcacccaggctcagcctcgggccagagggtatcacgaaggggaagcacgggtttaaattccaaggaatcaaggagaaatttaatgtgagcaagaaagtgttgaaaatgacctttctctag

SEQ ID NO: 24022 - DNA, 468 bp, Artificial Sequence
  derived and/or modified sequence
atggctaagagcgaacgccgcatctatagcatggagtcgatggccccagagatatctgaagacatcggatgccctctggcatacatgagggagtcagtctgtgccttattaatcaatcagtccttcttttcatgtgtggccgagatgtatatcccagacatgaatcgaccaggaaaagccgagcgccgagccgaaaaaggcctgagaccccctcgtaagttggtgggcgaaaccagacggttgcagtcctggccaaccctggctagatggttgagacgggtgtcgttcagtctctataaacctccgattcaggccgcccctgaaccggaccccggcaattgggcaaagagtcctcggctgtctctgggccccgaaggcatcacaaagggcaagcacgggtttaagtttcaggggattaaagagaagttcaacgtttcaaaaaaggtgttaaaaatgacatttctgtag

SEQ ID NO: 24023 - DNA, 438 bp, Artificial Sequence
  derived and/or modified sequence
atggagagcatggcccctgagatcagcgaggacatcggctgccccctggcctacatgagggagagcgtgtgtgccctgctgatcaaccagagcttcttcagctgtgtggccgagatgtacatcccagacatgaacagacctgggaaggccgagcggcgggcagagaagggcctgcggccccccaggaagctggtgggggagacccggcggctgcagagctggcccaccctggcccgctggctgcggcgggtgtccttcagcctgtacaagccacccatccaggccgcccctgagccagaccccggcaactgggccaagagcccccggctgagcctgggccctgagggcatcaccaagggcaagcacggcttcaagttccagggcatcaaggagaagttcaacgtgtccaagaaggtgctgaagatgaccttcctgtag

SEQ ID NO: 24024 - DNA, 468 bp, Artificial Sequence
  derived and/or modified sequence
atggccaagtctgagcggcgcatctacagcatggagagcatggcccctgagatcagcgaggacatcggctgccccctggcctacatgagggagagcgtgtgtgccctgctgatcaaccagagcttcttcagctgtgtggccgagatgtacatcccagacatgaacagacctgggaaggccgagcggcgggcagagaagggcctgcggccccccaggaagctggtgggggagacccggcggctgcagagctggcccaccctggcccgctggctgcggcgggtgtccttcagcctgtacaagccacccatccaggccgcccctgagccagaccccggcaactgggccaagagcccccggctgagcctgggccctgagggcatcaccaagggcaagcacggcttcaagttccagggcatcaaggagaagttcaacgtgtccaagaaggtgctgaagatgaccttcctgtag

SEQ ID NO: 24025 - DNA, 438 bp, Artificial Sequence
  derived and/or modified sequence
atggagagcatggcccccgagatcagcgaggacatcggctgccccttagcgtacatgcgcgagagtgtgtgcgcgcttctcatcaaccagtcgtttttttcttgcgtggccgaaatgtatataccagatatgaatcgacctggcaaagctgagcggcgagctgagaaaggactgcggcctccccgtaagctggttggcgagactcgtaggttgcagtcctggcctactctcgccaggtggttaagaagagtctctttcagcctgtataagcccccaattcaggctgctcccgagcccgatcccggtaattgggccaagtcacctagactttcgcttggacctgaaggtataaccaaaggtaaacacggtttcaaatttcaggggataaaagagaaattcaatgtgtcgaagaaagtgctgaaaatgacatttctttag

SEQ ID NO: 24026 - DNA, 468 bp, Artificial Sequence
  derived and/or modified sequence
atggccaagagcgagcggcggatctacagcatggagagcatggcccctgagatctcagaagacattggctgccctctggcttatatgcgagagtccgtgtgcgcacttctgataaaccagtcatttttcagctgcgttgcagagatgtatatccctgacatgaacagaccgggaaaggccgagaggagggccgagaaggggttaagacctccccgtaaactagtgggcgaaactcgcagactacaatcctggcctacactggctcgttggctcaggcgcgtgtccttctccctttataagcctcccatccaggccgcacctgaaccagatccgggcaattgggccaaaagcccacggctttccctcggccctgaagggatcacaaaaggcaagcatgggttcaaattccaggggattaaggagaagtttaatgtgtcaaagaaagtcttaaagatgacttttttgtag

SEQ ID NO: 24027 - DNA, 438 bp, Artificial Sequence
  derived and/or modified sequence
atggagagcatggcacctgagatcagcgaggatatcggatgccccttagcctatatgcgtgaaagcgtatgtgctttgctcattaatcagtcatttttttcatgtgtggccgagatgtacattcccgacatgaaccggccaggaaaggccgagcggcgagctgaaaaaggactgagacctcctcgcaagcttgtgggggagaccaggagactccagtcatggccaaccttggcccgatggctgcgtagggtgtcgtttagcttatataagcctcctattcaggcagccccagagcccgatcccggaaattgggcgaagtccccgagattgagcctgggtcctgagggcattaccaaaggcaagcacgggttcaaatttcagggaattaaggagaagttcaatgtgtccaaaaaggtgctcaaaatgacgtttctgtag

SEQ ID NO: 24028 - DNA, 468 bp, Artificial Sequence
  derived and/or modified sequence
atggctaagagcgaacgacggatatactccatggagagcatggcacccgaaatcagtgaagatatcggctgtccactcgcctatatgcgagagagcgtttgtgctctgctgattaaccagagtttcttttcctgtgtggcagagatgtacatacccgatatgaatcgacccggaaaagccgaacggagagccgaaaagggcctgcgtccaccacggaagctcgtaggggaaacacgaagacttcagagttggcctaccctggctaggtggcttagaagagtctcgttctcattgtataaaccaccaatccaggcagcgcctgaaccagatccaggaaattgggctaaaagcccacggctttctctgggtcctgagggcattaccaaagggaaacatggcttcaagttccagggtatcaaggagaagtttaatgtgagtaagaaagtgctcaaaatgacatttctgtag

SEQ ID NO: 24029 - protein, 65 aa, Artificial Sequence
  derived and/or modified sequence
MVAKQRIRMANEKHSKNITQRGNVAKTLRPQEEKYPVGPWLLALFVFVVCGSAIFQIIQSIRMGM

SEQ ID NO: 24030 - DNA, 198 bp, Artificial Sequence
  derived and/or modified sequence
atggtggccaagcagagaatcagaatggccaacgagaagcacagcaagaacatcacccagagaggcaacgtggccaagaccctgagaccccaggaggagaagtaccccgtgggcccctggctgctggccctgttcgtgttcgtggtgtgcggcagcgccatcttccagatcatccagagcatcagaatgggcatgtag

SEQ ID NO: 24031 - DNA, 198 bp, Artificial Sequence
  derived and/or modified sequence
atggttgctaagcaacgcatcaggatggccaacgagaagcactccaagaacataacccaacgaggaaatgttgcgaagacgcttaggccccaggaagaaaagtaccctgtgggtccttggctcttagcattgtttgtctttgtcgtgtgtggttccgctatcttccaaattattcagagcatccggatggggatgtag

SEQ ID NO: 24032 - DNA, 198 bp, Artificial Sequence
  derived and/or modified sequence
atggtggccaagcagaggatccgcatggccaatgagaagcacagcaagaacatcacccagagaggaaatgtggccaagaccctgcggccccaggaggagaagtaccctgtgggcccctggctgctggccctgtttgtgtttgtggtgtgtggcagcgccatcttccagatcatccagagcatccgcatgggcatgtag

SEQ ID NO: 24033 - DNA, 198 bp, Artificial Sequence
  derived and/or modified sequence
atggtggccaagcagcggatccggatggccaacgagaagcacagcaaaaatataactcagcgcggcaacgtcgcgaagacgctcaggccacaagaggagaagtaccccgtggggccctggctactcgcccttttcgtattcgtggtctgcgggtctgccatctttcagattatccagtccattcgtatggggatgtag

SEQ ID NO: 24034 - DNA, 198 bp, Artificial Sequence
  derived and/or modified sequence
atggtcgccaagcaaaggatacggatggccaacgagaaacactcaaagaacattacacaacgtgggaacgtcgcaaagacactgaggcctcaagaagagaagtatcctgtagggccttggctcttagcattattcgtcttcgttgtatgcggttcagcaatttttcaaattattcagtctataaggatgggcatgtag

SEQ ID NO: 24035 - DNA, 784 bp, Artificial Sequence
  derived and/or modified sequence
gcctctctctggagtcggctagccggggctcggggagcggggtgcgcagggctcggggccacgccttgccacctgcagcgcccgggtgggccgcgggggcctcggcgggacgcgctcggccctgtcgcaggagctaacgcagggggaatccttgcaggtgggagcatttcagagcgcacaagccatggtggccaaacagcggatccggatggctaacgagaagcacagcaaaaacatcacccagagggggaacgtagccaaaaccctgaggccgcaagaggagaaatatcctgtgggaccatggctgttggcactgtttgtttttgttgtctgtggctcagctatctttcagatcattcagagcataaggatgggcatgtgagaaagccagggatttgacaccacctccctcccactggaggcgggaggacaacggaagcggtcagccagtttctgcgggaaacaagcaggccacacggaatagaaaaaaacgctcccccacttgttccctgatcacttcatcgtggatgtcagaccaaattgccttctcacaggacatcttggtgcatccgcgttctcaagcggaaaggacattttgcttttctgttggcaggattagtagccacgcgggtcgtccgcagcagtgctgtttttttggtttttcccttggtttcactaatgcgtgcatgtggccctctgaacgatcactggtttactttctatggatacaatctctcctccattgagaattgattttacaaataaatgtcttcgttcaacctta

SEQ ID NO: 24036 - protein, 288 aa, Artificial Sequence
  derived and/or modified sequence
MLVLNCSTKLLILEKMLKSCFPESLKVYGAVMNINRGNPFQKEVVLDSWPDFKAVITRRQREAETDNLDHYTNAYAVFYKDVRAYRQLLEECDVFNWDQVFQIQGLQSELYDVSKAVANSKQLNIKLTSFKAVHFSPVSSLPDTSFLKGPSPRLTYLSVANADLLNRTWSRGGNEQCLRYIANLISCFPSVCVRDEKGNPVSWSITDQFATMCHGYTLPEHRRKGYSRLVALTLARKLQSRGFPSQGNVLDDNTASISLLKSLHAEFLPCRFHRLILTPATFSGLPHL

SEQ ID NO: 24037 - protein, 156 aa, Artificial Sequence
  derived and/or modified sequence
MLVLNCSTKLLILEKMLKSCFPESLKVYGAVMNINRGNPFQKEVVLDSWPDFKAVITRRQREAETDNLDHYTNAYAVFYKDVRAYRQLLEECDVFNWDQVFQIQGLQSELYDVSKAVANSKQLNIKLTSFKAVHFSPVSSLPDTSFLKGPSPRLTY

SEQ ID NO: 24038 - DNA, 867 bp, Artificial Sequence
  derived and/or modified sequence
atgctggtgctgaactgcagcaccaagctgctgatcctggagaagatgctgaagagctgcttccccgagagcctgaaggtgtacggcgccgtgatgaacatcaacagaggcaaccccttccagaaggaggtggtgctggacagctggcccgacttcaaggccgtgatcaccagaagacagagagaggccgagaccgacaacctggaccactacaccaacgcctacgccgtgttctacaaggacgtgagagcctacagacagctgctggaggagtgcgacgtgttcaactgggaccaggtgttccagatccagggcctgcagagcgagctgtacgacgtgagcaaggccgtggccaacagcaagcagctgaacatcaagctgaccagcttcaaggccgtgcacttcagccccgtgagcagcctgcccgacaccagcttcctgaagggccccagccccagactgacctacctgagcgtggccaacgccgacctgctgaacagaacctggagcagaggcggcaacgagcagtgcctgagatacatcgccaacctgatcagctgcttccccagcgtgtgcgtgagagacgagaagggcaaccccgtgagctggagcatcaccgaccagttcgccaccatgtgccacggctacaccctgcccgagcacagaagaaagggctacagcagactggtggccctgaccctggccagaaagctgcagagcagaggcttccccagccagggcaacgtgctggacgacaacaccgccagcatcagcctgctgaagagcctgcacgccgagttcctgccctgcagattccacagactgatcctgacccccgccaccttcagcggcctgccccacctgtag

SEQ ID NO: 24039 - DNA, 471 bp, Artificial Sequence
  derived and/or modified sequence
atgctggtgctgaactgcagcaccaagctgctgatcctggagaagatgctgaagagctgcttccccgagagcctgaaggtgtacggcgccgtgatgaacatcaacagaggcaaccccttccagaaggaggtggtgctggacagctggcccgacttcaaggccgtgatcaccagaagacagagagaggccgagaccgacaacctggaccactacaccaacgcctacgccgtgttctacaaggacgtgagagcctacagacagctgctggaggagtgcgacgtgttcaactgggaccaggtgttccagatccagggcctgcagagcgagctgtacgacgtgagcaaggccgtggccaacagcaagcagctgaacatcaagctgaccagcttcaaggccgtgcacttcagccccgtgagcagcctgcccgacaccagcttcctgaagggccccagccccagactgacctactag

SEQ ID NO: 24040 - DNA, 1113 bp, Artificial Sequence
  derived and/or modified sequence
aagaataaacttaccatttatataaaagggctactggactgatacacagctgaaaaccctcagttctggactgaactcccagcaggtgtggagttgcaagagctctggaaaagatgttggtgctaaactgttctaccaaattactgatactggagaaaatgttgaagagttgctttcctgaatcactcaaggtttacggagcggtgatgaacataaatcgtgggaacccctttcaaaaggaagtggtgttggattcatggccggatttcaaagctgttatcacccgacgacaaagagaggctgagacagataaccttgatcattatactaatgcctatgctgtgttctacaaggatgtcagggcttatcgacagctattggaagaatgtgatgtttttaactgggaccaagtttttcaaatacaagggctgcagagtgagttatatgatgtttccaaagcggttgccaattcaaagcagttgaatataaagctaacttccttcaaggctgttcatttttctcctgtttcatctctgccagataccagtttcctcaaggggccttccccacgactaacctacctgagtgttgccaatgcggatctactcaaccggacttggtcccggggaggcaatgaacaatgtctccggtacatcgccaacctcatctcctgcttccctagtgtgtgtgtccgggatgagaagggaaacccggtctcctggtccatcacagaccagtttgccaccatgtgccatggctacaccctgccagaacatcgcaggaaaggttacagccggctggtggccctcacgctggccaggaagttgcaaagccggggattcccctctcaggggaacgtcctggatgacaacacggcgtctataagcctcctgaagagtctccatgctgagttcttgccttgtcgcttccacaggcttattctcacccctgcgactttctctggcctgcctcacctctagcccagtaaaaaactgcagtggttttattactttccctgagcatacacacactcttggctgccaacgaggggagagttaaaatgggaatcaggggactcttgagttgttggaaagggtctggagaatatataca

SEQ ID NO: 24041 - DNA, 571 bp, Artificial Sequence
  derived and/or modified sequence
ataaaagggctactggactgatacacagctgaaaaccctcagttctggactgaactcccagcagtttctaattaggtgtggagttgcaagagctctggaaaagatgttggtgctaaactgttctaccaaattactgatactggagaaaatgttgaagagttgctttcctgaatcactcaaggtttacggagcggtgatgaacataaatcgtgggaacccctttcaaaaggaagtggtgttggattcatggccggatttcaaagctgttatcacccgacgacaaagagaggctgagacagataaccttgatcattatactaatgcctatgctgtgttctacaaggatgtcagggcttatcgacagctattggaagaatgtgatgtttttaactgggaccaagtttttcaaatacaagggctgcagagtgagttatatgatgtttccaaagcggttgccaattcaaagcagttgaatataaagctaacttccttcaaggctgttcatttttctcctgtttcatctctgccagataccagtttcctcaaggggccttccccacgactaacctac

SEQ ID NO: 24042 - DNA, 867 bp, Artificial Sequence
  derived and/or modified sequence
atgctagtcctgaattgtagcactaaattgttgattctcgagaagatgctgaagtcttgttttccagagagcctcaaggtctatggcgccgtgatgaatataaacaggggtaatccgtttcagaaggaggtcgtgctggacagttggccagacttcaaagcagtcattactcgccggcagcgggaggccgaaacagacaacttggaccactataccaacgcatatgcagtattctataaggacgtcagagcctaccgccagttgctcgaagagtgtgatgtcttcaactgggatcaggtattccaaattcaaggcctgcaatctgagttgtatgatgtgagtaaagcagtagctaacagcaagcagctcaacattaaactgacatccttcaaggctgtgcactttagcccagtttccagtctgcctgacacttcgtttctcaagggacctagtccacgtctcacgtacctgtcagtggcaaatgctgatcttcttaacaggacttggtctagagggggaaacgagcaatgcctcaggtacattgccaacttaatatcgtgtttcccaagtgtctgcgttagagacgagaaaggcaatcccgtgtcttggtcaattacagatcagtttgccactatgtgccatgggtacacactccctgaacatcggaggaaagggtattcgcgcctcgtcgcactaacactagctcgaaaactacaatctcgtggcttccccagccaaggcaatgtacttgacgacaacacggcgtctataagcctgctgaagagtcttcatgccgagtttttaccttgccggttccaccgcctgatccttacgccagcaactttctctggcttgcctcacctttag

SEQ ID NO: 24043 - DNA, 471 bp, Artificial Sequence
  derived and/or modified sequence
atgctcgtgctgaattgcagtaccaaactgctgattctcgagaagatgctcaaaagctgctttcctgaatccttgaaggtgtacggcgctgtgatgaacatcaacagaggcaaccccttccaaaaagaggtggtcctggactcatggcctgactttaaggctgtaatcacacgaagacagagggaggccgagacggataacctcgaccactatactaatgcctatgccgtgttctacaaggacgtgagggcataccgccagctgctagaagaatgtgatgtgtttaattgggatcaggtgttccagatacagggcctccagagcgaactttatgacgttagtaaggcagtcgcgaattctaagcaactgaatatcaagcttactagcttcaaagcggtccacttcagccccgtttcctctctccctgatacatcctttcttaagggtccatcaccaagattgacatattag

SEQ ID NO: 24044 - DNA, 867 bp, Artificial Sequence
  derived and/or modified sequence
atgctggtgctgaactgcagcaccaagctgctgatcctggagaagatgctgaagagctgcttccctgagagcctgaaggtgtatggagctgtgatgaacatcaacagaggcaaccccttccagaaggaggtggtgctggacagctggccagacttcaaggccgtcatcacccggcggcagcgggaggccgagacagacaacctggaccactacaccaatgcctatgctgtgttctacaaggatgtgcgggcctaccggcagctgctggaggagtgtgatgtgttcaactgggaccaggtgttccagatccagggcctgcagagcgagctgtatgatgtgtccaaggctgtggccaacagcaagcagctgaacatcaagctgaccagcttcaaggctgtgcacttcagccctgtgagcagcctgcctgacaccagcttcctgaagggccccagcccccggctgacctacctgtctgtggccaatgctgacctgctgaacagaacctggagccggggcggcaatgagcagtgcctgcgctacatcgccaacctgatcagctgcttccccagcgtgtgtgtgagagatgagaagggcaaccctgtgtcctggagcatcacagaccagtttgccaccatgtgccacggctacaccctgcctgagcacaggaggaagggctacagccggctggtggccctgaccctggccaggaagctgcagagccggggcttccccagccagggcaatgtgctggatgacaacacagccagcatcagcctgctgaagagcctgcatgctgagttcctgccctgccgcttccacaggctcatcctgaccccagccaccttcagcggcctgccccacctgtag

SEQ ID NO: 24045 - DNA, 471 bp, Artificial Sequence
  derived and/or modified sequence
atgctggtgctgaactgcagcaccaagctgctgatcctggagaagatgctgaagagctgcttccctgagagcctgaaggtgtatggagctgtgatgaacatcaacagaggcaaccccttccagaaggaggtggtgctggacagctggccagacttcaaggccgtcatcacccggcggcagcgggaggccgagacagacaacctggaccactacaccaatgcctatgctgtgttctacaaggatgtgcgggcctaccggcagctgctggaggagtgtgatgtgttcaactgggaccaggtgttccagatccagggcctgcagagcgagctgtatgatgtgtccaaggctgtggccaacagcaagcagctgaacatcaagctgaccagcttcaaggctgtgcacttcagccctgtgagcagcctgcctgacaccagcttcctgaagggccccagcccccggctgacctactag

SEQ ID NO: 24046 - DNA, 867 bp, Artificial Sequence
  derived and/or modified sequence
atgctggtgctgaactgcagcaccaagctgctgatcctggagaagatgcttaagtcatgtttcccagaatctcttaaagtatacggggccgtgatgaatatcaatcgaggcaatccatttcagaaagaagtagtgttggactcctggccagattttaaggccgttataacccggcgtcagagggaggccgaaaccgataatttggatcactacaccaatgcctacgctgttttctacaaagacgtacgcgcatacaggcagctgttggaggagtgcgacgtgttcaactgggatcaggtcttccagattcaaggacttcagtcagagctctacgacgtaagcaaagctgttgcaaactccaagcagctgaacattaaacttacatccttcaaggctgtgcacttttcccctgttagctcactcccagacacatctttcctaaaggggcccagtcctcggctgacatacttgtcagttgccaatgccgacttactcaataggacctggagtcggggtggcaacgagcaatgtctccggtatattgcaaacctgattagctgcttcccctcagtgtgcgtgagagatgagaaagggaatcctgtgtcttggagcatcacagatcagtttgctaccatgtgtcatggatatacgcttccagaacataggcggaaaggatatagcaggcttgtggctctgacgctcgctcgaaagctgcagtcacggggcttccctagtcaggggaatgtgctggatgataatactgcaagcatttcacttctgaaatctttacatgccgaattcctgccttgcaggtttcaccgattgatcctgactccagccaccttctcaggtttgccacacctttag

SEQ ID NO: 24047 - DNA, 471 bp, Artificial Sequence
  derived and/or modified sequence
atgctggtgctgaactgcagcaccaagctgctgatcctggagaagatgctgaagtcttgtttccccgaatccttaaaggtgtacggagccgtcatgaatatcaaccgaggtaacccatttcagaaggaggtggtcctggacagctggcctgactttaaggcggtgattaccagacggcaaagggaagcagaaaccgacaacctggatcactacactaacgcatacgcggtgttctataaagacgtaagagcgtacaggcagctgctggaggaatgcgacgtgtttaattgggaccaggtgtttcagattcagggacttcagagtgagctctacgatgtctccaaagcagtggccaacagtaaacaactcaatatcaagctcacaagtttcaaggcagttcatttcagccccgtctcaagcctccccgatacctctttcctgaagggcccaagtcctcggctgacatactag

SEQ ID NO: 24048 - DNA, 867 bp, Artificial Sequence
  derived and/or modified sequence
atgctcgtcctgaactgtagcaccaaactgcttattctggaaaagatgttaaaatcatgcttcccagagtccctcaaggtgtacggagctgttatgaatatcaaccggggtaatccttttcagaaggaagtggtgctggatagctggcccgattttaaggctgtcatcacacgcaggcaaagagaagctgaaacagataatctcgatcattacacgaacgcatatgctgttttttacaaggatgtcagggcctatcggcagcttcttgaggagtgcgatgtctttaattgggatcaggtgttccagatccagggactgcagtcggagctgtacgacgtgagcaaggctgttgccaatagtaagcagctcaacatcaagttaacatcttttaaggctgtccacttttcaccggtgtccagcttgccagacacatccttcctgaaagggccttctccgagattgacatatctgagtgtagccaacgcagatctgttaaatcgcacctggtcccgaggaggaaatgagcagtgtttaagatacatcgcaaaccttatcagctgttttccctcagtatgtgtgcgggacgagaaaggcaaccccgttagctggtcaatcactgatcagtttgccactatgtgccatggctacacgctacctgagcatcgccgtaaggggtactctcgattagttgcgctgaccttggcgagaaagctgcagtctcgcggatttccttcccagggcaatgtcctggatgataacaccgcaagtatctctctgttgaagagtctgcatgcagagtttctgccatgccgttttcaccgattgattctcacacctgctacgttttccgggcttcctcatttgtag

SEQ ID NO: 24049 - DNA, 471 bp, Artificial Sequence
  derived and/or modified sequence
atgcttgtgttgaattgctcaacaaagttactaatcctggagaagatgttgaaatcttgcttccctgagagcctgaaagtgtatggcgcagtgatgaacatcaacagggggaatccttttcagaaagaggttgtgttggactcctggcctgattttaaagcagtaatcactcgccgacagcgggaggccgagaccgataacctcgaccattacacaaacgcatatgccgttttttacaaggacgtccgtgcctatagacagctgcttgaagagtgcgacgtgtttaattgggatcaggtgttccagattcagggcctccagtccgagttatacgacgtttctaaagcggtagccaactccaagcagttgaacatcaagcttacttccttcaaagctgttcatttctcccctgtttcctccctcccggatacttccttcttgaagggaccatctcctcgccttacctactag

SEQ ID NO: 24050 - protein, 796 aa, Artificial Sequence
  derived and/or modified sequence
MAETKDVFGQEPHPVEDDLYKERTRKRRKSDRDQRFRAFPSMEQSALKEYEKLESRTRRVLSNTYQKLIQSVFLDDSIPNGVKYLINRLLALIEKPTVDPIYIALFGSTGAGKSSLINAIIQQAMFLPVSGESICTSCIVQVSSGCCVQYEAKIHLLSDQEWREELKNLTKLLHRTEELSREEADAWNRDEAVEEATWKLQMIYGNGAESKNYEELLRAKPKRKIPTSRVITLKAEEAEELSIKLDPYIRTQRRDWDGEAAEMRIWPLIKHVEVTLPKSDLIPEGVVLVDIPGTGDFNSKRDEMWKKTIDKCSVIWVISDIERVSGGQAHEDLLNESIKACQRGFCRDVALVVTKMDKLHLPEYLREERKGWQAIQSQREAVLERNEMIKLQRTRILKEKLKRKLPADFKVLEASDLVYTVSAQEYWQQALLTEEETEIPKLREYIRKSLLDKKKRTVTKYVTEAFGLLLLTDSFNSTQNLPNEHLHMSVLRRFAEEKVELLEKAIAQCFACMEQPLQEGVRTARTSYRCILRACLVRSKGNQGFHQTLKAVCLKNGIYASRTLARIDLNEALTQPVYDQIDPVFGSIFRTGKPTGSALMPHIDAFKQSLQEKMTEIGIRSGWKYDSCKKNFLIQEISAILGGLEDHILRRKRRIYESLTASVQSDLKLCYEEAAQITGKKACERMKDAIRRGVDRQVAEGMFERAQERMQHQFQQLKTGIVEKVKGSITTMLALASSQGDGLYKELADVGSEYKEMEKLHRSLREVAENARLRKGMQEFLLRASPSKAGPPGTSL

SEQ ID NO: 24051 - protein, 796 aa, Artificial Sequence
  derived and/or modified sequence
MAETKDVFGQEPHPVEDDLYKERTRKRRKSDRDQRFRAFPSMEQSALKEYEKLESRTRRVLSNTYQKLIQSVFLDDSIPNGVKYLINRLLALIEKPTVDPIYIALFGSTGAGKSSLINAIIQQAMFLPVSGESICTSCIVQVSSGCCVQYEAKIHLLSDQEWREELKNLTKLLHRTEELSREEADAWNRDEAVEEATWKLQMIYGNGAESKNYEELLRAKPKRKIPTSRVITLKAEEAEELSIKLDPYIRTQRRDWDGEAAEMRIWPLIKHVEVTLPKSDLIPEGVVLVDIPGTGDFNSKRDEMWKKTIDKCSVIWVISDIERVSGGQAHEDLLNESIKACQRGFCRDVALVVTKMDKLHLPEYLRERKAGNQAIQSQREAVLERNEMIKLQRTRILKEKLKRKLPADFKVLEASDLVYTVSAQEYWQQALLTEEETEIPKLREYIRKSLLDKKKRTVTKYVTEAFGLLLLTDSFNSTQNLPNEHLHMSVLRRFAEEKVELLEKAIAQCFACMEQPLQEGVRTARTSYRCILRACLVRSKGNQGFHQTLKAVCLKNGIYASRTLARIDLNEALTQPVYDQIDPVFGSIFRTGKPTGSALMPHIDAFKQSLQEKMTEIGIRSGWKYDSCKKNFLIQEISAILGGLEDHILRRKRRIYESLTASVQSDLKLCYEEAAQITGKKACERMKDAIRRGVDRQVAEGMFERAQERMQHQFQQLKTGIVEKVKGSITTMLALASSQGDGLYKELADVGSEYKEMEKLHRSLREVAENARLRKGMQEFLLRASPSKAGPPGTSL

SEQ ID NO: 24052 - DNA, 2391 bp, Artificial Sequence
  derived and/or modified sequence
atggcagagacaaaggatgtctttgggcaagagccacacccagtggaggatgacctctacaaggaacggacgcggaagcggaggaaaagcgacagggaccagagatttagagcctttccatccatggagcagtcagctctgaaagagtacgagaagctggaaagccgaacaaggagggtgctgtcaaacacctatcagaaacttatccagagcgtgttcttagatgatagcattccaaacggtgttaagtatctaatcaaccggctccttgcacttatcgaaaaaccgacagtggaccccatttacattgctctgttcgggtcaaccggtgccgggaaaagtagcctgattaacgcaatcatccagcaagccatgtttcttcctgtgagcggtgaatctatatgtacatcttgtatagtgcaggtgtcttctggctgttgcgtccagtatgaggccaaaatccatctgctgagtgatcaggaatggcgggaggagctaaaaaatctgacaaagctcctgcatagaacagaagagctcagcagggaggaggccgacgcttggaatcgagacgaagccgttgaagaggccacatggaaactacagatgatttatgggaatggcgctgaaagtaaaaattacgaagagttactgagggctaaaccaaaaaggaagattccaaccagtcgagttatcacactgaaagcggaggaagccgaagagctttccattaagttagacccatatataaggacacagaggcgggattgggatggcgaggcggccgagatgcgcatctggccacttataaagcatgtcgaggtgacattacctaaaagcgatctgattcccgaaggtgtggtgctagtggacattcctggcactggggacttcaactcaaaaagggatgagatgtggaagaagaccattgataagtgctctgtcatctgggtcatctccgacatcgaacgtgtgtccggcggacaggcccatgaggatctgctgaatgaatctattaaagcttgccagcgggggttctgccgagatgtcgccctcgtcgtcactaaaatggacaaactgcacttgccagagtacttgagggaagaaaggaagggctggcaggctattcaaagccaacgtgaggcggtgctcgaacgtaacgagatgattaagctacagaggacacggattcttaaggagaaactcaaacggaagctcccagcagattttaaagttctcgaggcttccgacctagtgtatacagtatccgcccaggaatactggcaacaggccctgctgaccgaggaagagactgagatccctaagctgcgagaatacataaggaagtccctgcttgacaagaaaaaacgcactgtgaccaaatatgttacagaggcattcggtctgttgttgctcactgattccttcaactccactcagaatcttccgaacgagcatttgcatatgagcgtcctgagacgcttcgccgaggaaaaggtggagctcctggagaaggccatcgcacagtgcttcgcatgcatggaacagcctttacaagaaggagtaagaaccgcacggaccagctacagatgcatccttagagcttgcctcgtcaggtccaagggcaaccaaggcttccatcaaacccttaaagctgtgtgcctgaagaacggtatctacgcttcacggacgcttgcccgcattgacttgaatgaagctctgacccaacctgtttacgatcagatagatccagtgtttggcagtattttcaggactggtaagccaacaggttctgctctaatgccacacatcgatgcttttaagcaatcactccaagagaagatgacagaaataggcattagatccggatggaaatatgattcttgtaaaaagaattttctgatccaggaaatcagcgcaatcctaggaggattagaagaccatatcctccggagaaaaagaaggatctacgagagtttgaccgcaagcgttcagagtgatctgaagctttgctacgaagaagctgcgcagatcactggcaaaaaggcatgcgagcgaatgaaagatgctataaggcggggcgtggatagacaagtggcggaaggaatgtttgagcgcgctcaagagcggatgcaacaccagttccagcagctgaaaaccggcatcgttgagaaagtaaagggaagcatcaccactatgctggcattagcaagtagtcaaggagatggcctatacaaggagttggccgacgttggatctgagtacaaggaaatggaaaaactacaccggagtctgagagaggtcgcggagaatgcacgtctgcgtaaagggatgcaggagttcctgcttagggcctccccatctaaggccggacccccgggcacaagcctttag

SEQ ID NO: 24053 - DNA, 2391 bp, Artificial Sequence
  derived and/or modified sequence
atggctgaaacaaaagacgttttcggtcaggaaccccatcccgtcgaggacgacctctacaaggagagaactcgtaagcgtcggaaaagcgatcgcgatcaaagatttagggctttcccatccatggagcagagtgctcttaaagagtacgaaaagctcgagtcgcggacccgtcgagtgctgtccaatacctatcagaagcttattcagagcgtgttcctggacgattcaatacctaacggtgtcaaatacctcatcaataggcttctggcgctgattgagaaaccaacggtggatcctatatacattgccctgttcggcagcacaggggccggtaaaagcagtctgatcaatgccattatccagcaggcaatgtttttgcccgtgagcggagaaagtatctgcaccagttgtatcgtccaggtcagctccggatgttgcgtccagtacgaagcaaagatccaccttctgagtgaccaggagtggcgagaggaacttaagaacctgactaaacttcttcaccggactgaagaactttcccgagaggaagcagatgcctggaaccgggacgaggcagtggaagaggcgacatggaaattgcagatgatctacggtaacggggcagaaagcaaaaactacgaagaattgctacgcgctaagccgaagcgcaaaattcccacaagccgggtgatcacactcaaagcagaggaggcggaagagctgtcgataaagttggacccatacataagaacgcaaagaagggattgggatggagaagcggcagaaatgcgcatctggccactgattaagcacgtggaggtgaccctgcctaagagtgacctcattccagagggggtggtgctggtggacattccaggaacaggggactttaattcaaaaagggacgagatgtggaagaaaactattgataagtgtagtgtgatctgggtcatatctgacatcgaacgggtcagcgggggccaggcgcacgaggacctgctaaatgaatccattaaagcctgtcaacgcggcttttgcagggatgtggcactcgtggtcacaaagatggacaaactgcatctgcccgagtatcttcgtgaaaggaaagctgggaaccaggcgattcaatcccagcgggaggccgtgctggaaaggaacgagatgattaagttacagcggacccgtattcttaaggaaaagctcaagcgtaagctaccggccgatttcaaggtgctggaagctagcgacctcgtgtacaccgtttccgcgcaagagtattggcaacaggctctcctgaccgaggaggagaccgagataccaaaactgcgggagtacatccggaaaagcctgcttgataagaagaagcgaaccgttacgaagtatgttaccgaggcctttggactcctcttgctgacagactctttcaattctacccagaatctgcccaacgagcatttacacatgtccgtcctcaggagatttgccgaggagaaggtagagctgttggaaaaagctattgcccaatgttttgcttgcatggagcagcccctgcaagagggtgttcggaccgcccgtacctcttaccgctgcatacttagagcatgtctcgtgcgcagcaagggtaatcaagggttccaccagaccctgaaggcagtttgtctcaagaacggcatctacgcaagccgcacgctggctcgcattgacctgaacgaggccctgactcagcctgtgtacgatcagattgacccagtgttcggctctatctttcgaactgggaaacccaccggctccgccctgatgccacacatcgacgcctttaaacagtccttacaggaaaaaatgaccgaaatcggcattcggtctgggtggaagtatgacagttgcaaaaaaaactttcttatccaggaaatctccgccattttggggggactcgaagatcatatccttagaagaaagcgcaggatatacgagtccctgacagcctctgttcagtcggacctaaagctgtgttatgaagaggctgcacagatcactggcaaaaaagcctgcgaacgcatgaaggacgctatcagacgcggtgttgatagacaggttgcggaagggatgtttgagagggctcaggagaggatgcagcaccagtttcagcaactcaagacaggcatcgtcgaaaaggtcaagggaagcattacgaccatgctggctctcgccagcagccagggtgatggactatacaaggaacttgcagacgtgggatcggagtacaaggaaatggagaagctgcataggagcttaagggaagttgctgaaaacgccaggctgcgtaaaggcatgcaagaattcttactgcgcgcctccccatctaaagccggccccccagggacctctctgtag

SEQ ID NO: 24054 - DNA, 2391 bp, Artificial Sequence
  derived and/or modified sequence
atggccgagaccaaggatgtgtttggccaggagccccaccctgtggaggatgacctgtacaaggagaggaccaggaagaggaggaagagtgaccgggaccagcgcttccgggccttccccagcatggagcagagcgccctgaaggagtatgagaagctggagagcaggacccggcgggtgctgagcaacacctaccagaagctgatccagagcgtcttcctggatgacagcatccccaacggggtgaagtacctgatcaaccggctgctggccctgattgagaagcccaccgtggaccccatctacatcgccctgtttggcagcactggagctgggaagagcagcctcatcaatgccatcatccagcaggccatgttcctgcctgtgtctggagagagcatctgcaccagctgcatcgtgcaggtgagcagcggctgctgcgtgcagtatgaggccaagatccacctgctgagtgaccaggagtggagggaggagctgaagaacctgaccaagctgctgcacaggacagaggagctgagccgggaggaggctgatgcctggaacagagatgaggccgtggaggaggccacctggaagctgcagatgatctatggaaatggagctgagagcaagaactatgaggagctgctgcgggccaagcccaagaggaagatccccaccagcagggtcatcaccctgaaggccgaggaggccgaggagctgagcatcaagctggacccctacatccgcacccagaggcgggactgggatggagaggccgctgagatgaggatctggcccctcatcaagcacgtggaggtgaccctgcccaagagtgacctgatccctgagggcgtggtgctggtggacatccctggcaccggggacttcaacagcaagagagatgagatgtggaagaagaccatcgacaagtgcagcgtcatctgggtgatcagtgacatcgagcgggtgtctgggggccaggcccacgaggacctgctgaatgaaagcatcaaggcctgccagaggggcttctgcagagatgtggccctggtggtgaccaagatggacaagctgcacctgcctgagtacctgcgggaggagaggaagggctggcaggccatccagagccagcgggaggccgtgctggagagaaatgagatgatcaagctgcagaggacccgcatcctgaaggagaagctgaagaggaagctgcctgctgacttcaaggtgctggaggccagtgacctggtgtacacagtgtctgcccaggagtactggcagcaggccctgctgacagaggaggagacagagatccccaagctgcgggagtacatcaggaagagcctgctggacaagaagaagaggacagtgaccaagtatgtgacagaggccttcggcctgctgctgctgacagacagcttcaacagcacccagaacctgcccaatgagcacctgcacatgtctgtgctgcggagatttgctgaggagaaggtggagctgctggagaaggccatcgcccagtgctttgcctgcatggagcagcccctgcaggagggcgtgaggacagcccggaccagctaccgctgcatcctgcgggcctgcctggtgcgcagcaagggcaaccagggcttccaccagaccctgaaggctgtgtgcctgaagaatggcatctatgccagcaggaccctggccagaattgacctgaatgaggccctgacccagcctgtgtatgaccagattgatcctgtgtttggcagcatcttcagaacaggcaagcccactggaagtgccctgatgccccacattgatgccttcaagcagagcctgcaggagaagatgacagaaattggcatccgcagcggctggaagtatgacagctgcaagaagaacttcctgatccaggagatcagcgccatcctgggcggcctggaggaccacatcctgcggaggaagaggcgcatctatgagagcctgacagcctctgtgcagagcgacctgaagctgtgctatgaggaggccgcccagatcaccgggaagaaggcctgtgagaggatgaaggatgccatcagaagaggagtggaccggcaggtggccgagggcatgtttgagcgggcccaggagaggatgcagcaccagttccagcagctgaagacaggaattgtggagaaggtgaagggcagcatcaccaccatgctggccctggccagcagccagggagatggcctgtacaaggagctggctgatgtgggcagcgagtacaaggagatggagaagctgcacaggagcctgcgggaggtggctgaaaatgcccggctgaggaagggcatgcaggagttcctgctgcgggccagccccagcaaggccggccccccaggcaccagcctgtag

SEQ ID NO: 24055 - DNA, 2391 bp, Artificial Sequence
  derived and/or modified sequence
atggccgagaccaaggatgtgtttggccaggagccccaccctgtggaggatgacctgtacaaggagaggaccaggaagaggaggaagagtgaccgggaccagcgcttccgggccttccccagcatggagcagagcgccctgaaggagtatgagaagctggagagcaggacccggcgggtgctgagcaacacctaccagaagctgatccagagcgtcttcctggatgacagcatccccaacggggtgaagtacctgatcaaccggctgctggccctgattgagaagcccaccgtggaccccatctacatcgccctgtttggcagcactggagctgggaagagcagcctcatcaatgccatcatccagcaggccatgttcctgcctgtgtctggagagagcatctgcaccagctgcatcgtgcaggtgagcagcggctgctgcgtgcagtatgaggccaagatccacctgctgagtgaccaggagtggagggaggagctgaagaacctgaccaagctgctgcacaggacagaggagctgagccgggaggaggctgatgcctggaacagagatgaggccgtggaggaggccacctggaagctgcagatgatctatggaaatggagctgagagcaagaactatgaggagctgctgcgggccaagcccaagaggaagatccccaccagcagggtcatcaccctgaaggccgaggaggccgaggagctgagcatcaagctggacccctacatccgcacccagaggcgggactgggatggagaggccgctgagatgaggatctggcccctcatcaagcacgtggaggtgaccctgcccaagagtgacctgatccctgagggcgtggtgctggtggacatccctggcaccggggacttcaacagcaagagagatgagatgtggaagaagaccatcgacaagtgcagcgtcatctgggtgatcagtgacatcgagcgggtgtctgggggccaggcccacgaggacctgctgaatgaaagcatcaaggcctgccagaggggcttctgcagagatgtggccctggtggtgaccaagatggacaagctgcacctgcctgagtacctgcgggagaggaaggccggcaaccaggccatccagagccagcgggaggccgtgctggagagaaatgagatgatcaagctgcagaggacccgcatcctgaaggagaagctgaagaggaagctgcctgctgacttcaaggtgctggaggccagtgacctggtgtacacagtgtctgcccaggagtactggcagcaggccctgctgacagaggaggagacagagatccccaagctgcgggagtacatcaggaagagcctgctggacaagaagaagaggacagtgaccaagtatgtgacagaggccttcggcctgctgctgctgacagacagcttcaacagcacccagaacctgcccaatgagcacctgcacatgtctgtgctgcggagatttgctgaggagaaggtggagctgctggagaaggccatcgcccagtgctttgcctgcatggagcagcccctgcaggagggcgtgaggacagcccggaccagctaccgctgcatcctgcgggcctgcctggtgcgcagcaagggcaaccagggcttccaccagaccctgaaggctgtgtgcctgaagaatggcatctatgccagcaggaccctggccagaattgacctgaatgaggccctgacccagcctgtgtatgaccagattgatcctgtgtttggcagcatcttcagaacaggcaagcccactggaagtgccctgatgccccacattgatgccttcaagcagagcctgcaggagaagatgacagaaattggcatccgcagcggctggaagtatgacagctgcaagaagaacttcctgatccaggagatcagcgccatcctgggcggcctggaggaccacatcctgcggaggaagaggcgcatctatgagagcctgacagcctctgtgcagagcgacctgaagctgtgctatgaggaggccgcccagatcaccgggaagaaggcctgtgagaggatgaaggatgccatcagaagaggagtggaccggcaggtggccgagggcatgtttgagcgggcccaggagaggatgcagcaccagttccagcagctgaagacaggaattgtggagaaggtgaagggcagcatcaccaccatgctggccctggccagcagccagggagatggcctgtacaaggagctggctgatgtgggcagcgagtacaaggagatggagaagctgcacaggagcctgcgggaggtggctgaaaatgcccggctgaggaagggcatgcaggagttcctgctgcgggccagccccagcaaggccggccccccaggcaccagcctgtag

SEQ ID NO: 24056 - DNA, 2391 bp, Artificial Sequence
  derived and/or modified sequence
atggccgagaccaaggacgtgttcggccaggagccccaccccgtggaggatgacctgtataaggagagaacacgaaaaagaagaaaatctgatagggaccagcgttttcgcgcttttcccagcatggagcagtcagccctcaaggaatacgagaaactcgagtctcgcactagaagagtgctgagcaatacttatcaaaagctgattcagagcgtctttctcgatgacagcattcccaatggcgtgaagtacctgatcaatcgcctgctggccctgatcgaaaaacccactgtggaccccatctacattgctctttttgggtcaaccggcgccggaaagtccagcctaattaacgctattatacagcaggcaatgtttttgccagtaagcggcgaaagcatctgtacatcgtgcatcgtgcaggtgagctcaggatgctgcgtgcagtacgaagccaagatccacctcctgtcggaccaagagtggagagaagagcttaagaacctaaccaaattattgcataggactgaagaactatccagagaagaggctgatgcttggaaccgagatgaagccgttgaagaagccacttggaagcttcagatgatctacggcaacggggccgaaagcaaaaattatgaggagctgctccgggcaaaacccaagcgcaaaatccccacctccagagtaatcactctgaaagcagaagaggcagaggaattgtctattaaactggacccttatatacggacacagaggcgcgactgggacggggaagccgcggaaatgaggatctggcccctgatcaaacacgtggaggtgaccctgcctaagagcgatctgatccccgagggggtggtgctggtcgacattcccggaactggcgacttcaactcaaaacgcgacgagatgtggaaaaagacaatagacaaatgcagcgtgatttgggtgatcagtgatatagagcgggtaagtggggggcaggcccatgaggatctgctgaacgagagcatcaaggcctgtcagcgggggttctgcagagacgtggctctggttgtaacgaagatggataaactgcaccttcccgagtatctacgcgaggaacgcaagggctggcaggcaattcagtcccagcgcgaagcggtgctggaacgaaatgaaatgattaaactgcagcgtacgagaattctgaaggagaagctgaagcggaaactgcctgcggactttaaagtgctggaggcttccgacctagtttacacggtgtccgcacaggaatactggcagcaggcccttttgacagaggaggagaccgaaatccctaagctccgcgagtatattcgtaaaagccttctagataagaaaaagagaacagtgaccaagtacgtaactgaagcgttcgggcttctcctcctcacagatagctttaattctactcaaaacctgcccaacgaacatcttcatatgtccgtgctgcgacgcttcgccgaagagaaggttgagctgctggaaaaagcaatcgcccagtgctttgcttgcatggagcagcctctgcaggagggcgtgcgcacagcaaggacttcctaccggtgcattctgcgggcatgtctcgtgcggtcaaagggcaatcagggcttccaccagacactgaaggccgtgtgcctaaaaaacggcatttatgcctctaggactttggcgagaattgacctcaatgaagccctaacgcaaccggtatacgatcagattgaccctgtattcggatccatcttccggaccggcaaaccaaccggcagcgccttgatgccccatatagatgcctttaagcaatcgctgcaggaaaaaatgacagaaatcggaatcaggagcggatggaagtacgacagttgtaagaagaattttctcattcaggagattagcgccatcttaggtggattggaggatcatatcctaagacggaaacggagaatctacgagtctctgactgcgagcgtgcagtccgatctgaagctgtgctatgaggaggccgcccagattacggggaagaaagcatgtgagcggatgaaagatgccatccggagaggcgtggacaggcaggtggcagagggaatgtttgagcgcgctcaggaaaggatgcaacaccagtttcagcaactcaagactggtattgtggagaaggtgaaaggcagcatcactacgatgctggcactggcaagttctcagggtgacggtttatataaggaactagccgatgtagggagcgagtacaaagaaatggagaagctgcacagaagtctccgagaagtcgcggaaaatgcgcgcctcaggaaaggcatgcaggaattcctcctgagggcatccccttcgaaagccggacctccaggcacctccttgtag

SEQ ID NO: 24057 - DNA, 2391 bp, Artificial Sequence
  derived and/or modified sequence
atggccgagaccaaggacgtgttcggccaggagccccaccccgtggaggacgacctctacaaagagcggacccgtaagagacgcaagagcgatcgggatcagagatttagagcttttccgtcgatggaacagtcagcattgaaggagtacgagaagctcgagtcacgaactcgccgggttttaagcaacacctatcagaaactcatccagagcgttttcctggatgattccattcctaacggcgtcaagtacctgattaacaggttgctcgctttgattgaaaaacctacggttgaccctatttacattgcactattcggctcaaccggggctggtaagtccagccttatcaacgctatcatccaacaggctatgtttctgccagtgagcggggaatccatatgcacttcatgcatcgttcaggtctcttccggttgttgcgtgcagtacgaggccaaaatacatttgctctccgaccaggaatggagggaggagctcaagaatctgacaaagctcctgcacaggactgaagagctcagccgcgaagaggccgatgcttggaatcgggatgaggccgtggaggaagcaacatggaagctgcaaatgatctacgggaatggtgcggaaagcaaaaactatgaggagcttctcagagccaagccgaaacggaaaatccctacttcaagagtgatcacgctcaaggctgaggaagccgaggagttgagtattaagctggacccctacatcagaactcagcgcagagactgggacggagaggctgccgaaatgaggatctggcctctgattaaacacgtggaagtcacgttacctaagtctgaccttatcccagaaggagtggtgctggtcgatatccccggcacaggtgactttaactctaaacgagacgagatgtggaaaaagactatcgacaaatgctccgtgatctgggtgatctccgatatcgagagggtgtctggcggccaggcacatgaagacctactgaacgagagcattaaggcttgccagcgcggattttgccgtgatgtcgccctggtggtgacaaagatggacaagctacacctccccgaatacttaagagagagaaaagctggcaaccaggctatccaatcccagagggaagcagttttggagaggaatgagatgattaagcttcaaaggacccgcatccttaaggaaaaactgaagaggaaacttcctgcggattttaaagtgctcgaagcttccgatctcgtctacactgtcagtgctcaggaatattggcagcaggctctgctgactgaagaggaaacagagattcccaagctgcgggaatatattcggaaatcactgcttgacaagaagaaacggaccgtcaccaaatatgttactgaggcttttggtttgttgttgttgactgactcttttaattctactcagaacttacctaacgaacacttacacatgtctgtgctgcggcgatttgcggaagaaaaggtagagctcctggaaaaggcaatcgcccagtgtttcgcctgcatggagcagccgttacaagagggagttcggaccgcccgtaccagttatcgatgcattctaagagcctgcctagtgcgctcaaagggcaatcagggctttcaccagactctaaaggcagtctgtctgaaaaatggcatttatgcctctcggactctcgctagaatagatctgaacgaggctctgacgcaacctgtgtatgaccaaatcgacccagtattcgggtccatctttcgtacaggcaaacctactggctcagccctgatgccacatattgatgcgtttaaacagagtctccaggaaaagatgaccgaaattggaatccgcagcggatggaagtacgattcctgcaagaagaacttccttattcaggagatctctgccattctggggggcctcgaggaccatatcctgcgacgcaagaggcgcatctatgagtccttaactgcatctgtgcagtctgatctgaagctttgttatgaagaggctgcgcagatcacaggtaaaaaagcttgtgagaggatgaaggacgccataagacggggtgtcgatcggcaggtggccgagggtatgtttgagcgggctcaggaacgtatgcagcaccagttccagcagctgaaaaccgggatcgtagagaaagtgaagggctctattaccaccatgctcgcccttgcttcttcacagggagacggactgtataaggaactggctgatgtcggttcagaatacaaagagatggaaaagctgcaccggtcgctgcgtgaggtggctgaaaatgcccgcctgcgcaaaggcatgcaggagtttctgctacgagcctctccgtccaaggccggccctccgggaacatcactttag

SEQ ID NO: 24058 - DNA, 2391 bp, Artificial Sequence
  derived and/or modified sequence
atggccgagaccaaagacgtgtttggccaggaaccccaccccgtggaggatgacctttacaaagagagaaccaggaaaagacgcaaatccgacagggaccaacgcttccgtgcctttccatctatggagcagtcagccctgaaagaatacgagaagttagagagtcgtaccaggcgcgtgcttagcaatacataccagaaactgatccagagcgtcttcctcgacgattccatccctaacggggtaaaataccttattaacaggctcctggccctaattgaaaaacccacagtcgacccaatctacattgctctgtttgggtcgacaggcgcaggaaagagctccctcattaatgcaattatccagcaggcgatgttcctacctgtgtcaggcgaatctatctgcacttcctgcatcgtgcaggtgtcctcgggttgctgcgtccagtacgaggccaagatacatctgctgtcagaccaagagtggcgagaagagttgaagaatctgacgaagctcctgcatcggactgaggagctgagcagagaggaggcagacgcctggaatagagatgaggccgtggaagaagcgacctggaaacttcagatgatttacgggaatggtgccgagtccaaaaactatgaagagttacttagggcgaagccgaaaaggaaaattccgacctcccgggtcatcaccctgaaggcagaagaagctgaggaactcagcatcaagctcgacccatatattcgcactcagcgaagggactgggacggtgaagccgctgaaatgcgcatctggcctctaatcaagcacgttgaggttacccttccaaaaagcgatttgataccggaaggagtcgtgctggtcgatatccccggaacgggcgacttcaattcaaagagagatgaaatgtggaagaagactattgacaagtgcagtgtgatctgggtgatatctgacatcgagcgtgtgagtggaggtcaagctcatgaggacctactgaatgagtctattaaggcttgtcagagaggattctgcagagacgtcgctttggtggtgactaaaatggataaactgcatctccctgagtacttgcgagaggagaggaagggttggcaggccattcagtcacaacgcgaggcagtgctggagcgcaacgagatgatcaaactgcagaggacccgcatattaaaagagaagctcaaaagaaagttaccggcagatttcaaggttctggaagcatccgacctcgtgtataccgtgagcgctcaggaatactggcagcaggctctcctcaccgaagaggagaccgagatcccaaagttgagagaatatatccgaaagtctctgctggacaagaagaagcgaacagtcacgaagtacgtgaccgaggcgtttggcttactcctcttgacagattcttttaattcaacccagaacctcccgaatgagcacctgcatatgtccgtcttgcgccgatttgcggaagaaaaagttgagctgcttgaaaaggcgattgcccagtgctttgcatgcatggagcagcctctccaggaaggcgtgagaacagctcgcacatcttatagatgcattctgagggcctgcctggtcaggtctaaagggaaccaagggtttcaccagaccctgaaggctgtttgcctgaaaaatggaatctacgcttcccgcaccttagcaaggattgacttgaatgaagcccttacccaacctgtttatgaccaaattgatcctgtgttcggatctatttttcgcaccggaaaacccactggcagcgctctgatgccccatatagacgcttttaaacagtcgctccaggagaaaatgacggagatcggaatccgatctggctggaaatacgactcttgtaagaaaaatttcttaattcaggagatttctgccatcttggggggactggaggatcacatcttacgtcggaaacggagaatctacgagagtctgaccgcttcagtccaatccgacctgaagctgtgttacgaggaagccgcacagatcaccggaaagaaggcatgtgagcgtatgaaggatgccatacggaggggcgttgatcggcaggtcgccgaaggtatgttcgaacgggctcaggagcgcatgcagcatcagttccagcaactcaagactggtatcgtagaaaaggtaaagggttccatcacaaccatgctggcactcgcctcaagtcagggtgatggtctatataaggaactggctgacgtgggttctgagtacaaggaaatggagaaactgcaccggtcactgagggaagtggctgagaatgccagactgcgcaaagggatgcaggagttcctcttaagggcgagtcctagcaaagccggacccccaggaacttctttatag

SEQ ID NO: 24059 - DNA, 2391 bp, Artificial Sequence
  derived and/or modified sequence
atggctgagactaaagacgtgttcgggcaagaaccccacccagtagaggatgatctgtacaaggagcgcacacgaaaacggcgtaagtctgatagggaccagcgattccgagcattccccagcatggagcagtcagctctgaaagagtacgagaaactggaatcaagaactaggcgtgttctgtctaacacataccagaagctaattcagagtgtgtttctggatgacagtattccaaatggagtgaagtacctcatcaatcgcttacttgccctgattgaaaagcccaccgttgaccccatctacatcgcactctttggaagcacaggcgcaggaaagtctagcctaatcaacgctatcatccagcaggcgatgtttctgccggtgagcggagaaagtatatgtacttcatgcattgtgcaggtttcctcaggatgttgtgtccagtatgaagctaagattcatctgctgagcgaccaggagtggcgggaggagctgaagaacctaactaagctactccaccgcacagaagagctgagtcgcgaggaggctgatgcgtggaacagagacgaagcggtagaagaggctacctggaagctgcagatgatttacgggaacggcgcagaatccaaaaattacgaagagctgctgcgggctaagcctaagcgtaagatacccacatctcgagtgatcacactcaaggcagaggaggctgaggaactgtccattaaattggacccttatattcggactcagcgccgtgactgggatggagaagcagcagagatgagaatttggccactgattaaacatgtggaggtcacattaccgaaatccgatctaatacctgagggagtggtgctggtggatatccctggcaccggtgactttaatagtaaaagggacgaaatgtggaagaagactatcgataagtgctcggttatctgggttatatcagatattgagagggtcagtggtggacaagcccatgaggatcttctgaatgagtcaattaaagcatgccagcggggattttgtcgggatgtggccctagttgtgacgaagatggacaagctgcaccttccagagtacttgcgcgagagaaaagcaggcaaccaggctatccagagccaaagggaggcggttttggagagaaatgagatgattaagctgcagagaacccgaatcctgaaagaaaaactgaagcgaaagctgccagctgacttcaaggtgcttgaggcaagcgatctggtatataccgtcagcgcacaagagtactggcagcaggccttgttaaccgaggaggaaaccgagatccccaaactccgagagtatattaggaaatccctgttagacaagaaaaagagaaccgttacaaagtacgtcaccgaggccttcgggctgctcctcctcaccgactcatttaacagcactcaaaacctgcccaacgagcatctccatatgagtgtgctgcgacgatttgcagaggagaaagtggaactcctggaaaaggccattgcgcagtgtttcgcgtgcatggagcagcctctgcaggagggggtgcgcaccgctcggacctcctacaggtgcatcctgcgtgcctgtctggtgcgttctaaggggaaccaagggtttcatcaaactcttaaggccgtatgcctgaagaatggaatttatgcttctcggaccctggctagaatcgacctgaacgaggccctcactcagcccgtgtatgaccagattgacccagtgtttgggtctatattcaggactggaaaacctacaggctctgcactcatgccacacatagatgcctttaaacagtctctccaagaaaagatgaccgaaatcggaattcgctcaggatggaagtacgacagctgcaagaaaaatttcttaattcaggaaattagcgctattctgggcggactggaagaccacatccttcgacgaaaacggagaatctacgagtccctgacagcctccgtgcagtctgatcttaaattatgctacgaggaggccgcacagataaccggcaagaaagcatgtgaacgcatgaaagacgctatcaggcggggagtagatcgacaagtggccgaaggaatgttcgagcgggcacaagaaaggatgcagcaccagttccagcagttgaagactggtattgttgagaaagtcaaaggcagcataactacgatgcttgccttagcgagcagccagggcgacggcctctataaggaactggctgacgtcgggtctgagtacaaagagatggaaaaactccacagaagtctcagagaagtcgccgagaacgcccgactgagaaaaggaatgcaggaattcctcctcagggcatcaccaagcaaagcaggccctccaggtacatccctgtag

SEQ ID NO: 24060 - DNA, 3885 bp, Artificial Sequence
  derived and/or modified sequence
aaatacctgaaccaaggagaagctgccaccatctcctctgtggactcctgtaaccaaaccagaactttttttttttttttctgttcagtgacatctggctggttctcctgaactgagaagagcaggagttcacgtaacaaggaatggcagaaacgaaggatgtttttggccaggaaccgcatccagttgaagatgatttatataaagaacgaacgagaaaaagaaggaaatcagatcgagaccagcggttccgagcatttccctccatggagcagagtgctcttaaggaatatgaaaaattggaatcacggaccagaagggttttgagcaacacttatcagaaacttattcagtctgtcttcctggatgacagcatccctaatggagtcaagtatctcataaataggcttcttgccttgattgaaaagccgacagtggacccaatctacattgcattatttggaagcactggggctgggaagagctccctgatcaatgccatcatccagcaagcaatgtttctaccagtgtctggagaaagcatatgtacttcctgcattgtacaagtgagctctggctgctgtgtgcagtatgaggccaaaatccaccttctgtctgaccaggagtggagggaggagctgaagaacctgaccaaactcctgcataggacggaggagctgagcagagaagaggcagatgcgtggaacagggatgaggcagtggaggaagccacctggaagctacaaatgatttatggaaatggggcagagagtaagaactatgaggagttactgagggcgaagcccaaaaggaagatccccacctccagagtcatcaccctcaaggcggaagaggcagaagagctgtccatcaagctggacccctacatccgcacacagaggagagattgggatggagaggccgctgagatgcgcatctggcccttgatcaaacatgtggaagtgacacttcccaaatccgacctgatcccagaaggggtcgtgctggtggacatcccaggcacaggcgacttcaacagcaagagggacgagatgtggaaaaagaccattgacaagtgctcagtgatctgggtgatcagcgacatagagcgagtttctggggggcaagcccacgaagaccttctgaatgagagcatcaaagcctgccagcggggcttctgtagggacgtggccctggtggtcaccaagatggacaaactccacttgccagaatacctaagggaggaaagaaaaggctggcaagctattcagagtcagcgagaggctgttttagaaagaaatgaaatgataaaactacaaaggactagaattctcaaggaaaaactgaagagaaaactgccagctgacttcaaggttctggaagcctcagatctggtgtatacagtcagcgcccaggagtactggcagcaggctctcctcaccgaggaggaaacggaaatccctaagttaagagaatacatcaggaagagcctcttggacaagaagaagaggacagtgaccaagtatgtgactgaagcctttggcctgttgctcctcacagatagtttcaactccacgcaaaacctgccgaatgaacacttgcacatgagtgtcctgcggagatttgcggaagagaaggttgagctgctggagaaggccatcgcacagtgcttcgcctgcatggagcagcctctgcaagaaggggtcaggaccgccaggacttcttaccgctgcatcctcagagcatgcttggtgaggagtaaaggaaaccaaggttttcatcagaccctgaaagctgtttgcctgaaaaatggcatctatgcctccaggactctggcgagaattgatctaaatgaagccctcactcagcccgtctatgaccagatcgaccctgtttttggaagcatttttaggacggggaagcccactggttcagctctgatgcctcacatagatgcttttaagcagtccctgcaggagaaaatgacagaaattgggataagaagtggctggaaatatgatagctgcaaaaaaaatttcctgatccaggagataagtgccatcctcgggggcctggaggaccacatcctcagaaggaagaggaggatctacgagtccctcactgcctctgtccagagtgacctgaagctctgttacgaagaggcagctcagatcacgggcaaaaaagcgtgtgagcggatgaaagatgccatcagaagaggagtggaccggcaggtggctgagggcatgtttgaaagggcccaggaaaggatgcagcaccagtttcagcagctgaagactggaatcgtggagaaggtgaagggcagcatcaccactatgctggcccttgcttcgtcccagggggatggcctctacaaggagcttgcagatgtcgggagtgaatacaaggagatggagaagctgcacagaagcctgagggaggtcgcggagaatgcacggctgaggaagggcatgcaagaattcctcctaagggcatcccccagcaaggctggcccccccgggacatcactgtaactcctggggcttagtcccaatggatgaaaaatcagcccagagccagagaattagaattactttttttgttcttaagagacaagatctatctacctctgttgcccaggctggagtgcagtggcaccatcacagctcactgcagcctcgaactcctaggctcaagcgatcctccagcctcagcctccagagcagctggggctacaggtacaggccaccacacctgggtaatttttttttttttttttttgagacagagtctcgctgtgtcacccaggctggaatgcagtggtgcaatctcggctcactgcaacctccacctcctgggttcaagaaattctctgcctcagcctcccaagtagctgggattataggcgactgccaccacacccggttaatttttatatttttagtagagacggggtttcatcatcttggccaggctggtcctgaactcctgacctcgtgatccacccatctctgcctcccaaagtgctgggattacgggcatgagccaccgtgcccggcccatacctgggtaattttttaattttttgtggagatggcatcttgctctgttgcccagggtggtctcaaactcctggcctcaagtgattctctcccacctcagtctcttgtgctaggattgcaggcatgagccattgtgcctggctcagaattctttctgttttgtgaaatctaatagaggacatttctcaactatttggactttgcatgcaatataaaactagtatgtttactgcattttattttatagccccaaagagtcatcttcaatacctaatggagttctaaagctttagggcaagaaacttttgcttccgcaaaaacatctaaacatcgctgggcatggtggctcactcccgtaatcccagcactttgggaggctgaggcgggcggatcatgaggtcaggagattgagaccatcctggctaacacagtgaaaccccatctctactaaaaatacaaaaaattagccaggcgtggtagcatgtgcctatagtcccagctacttgggaggctgaggcaggagaatcgcttgaacccaggaggcataggttgcagtgagccaaggtcgcgccactgcactccagcctggacgacggagtgagactatgtctcaaaaaaaaaaaaaaaaaaagaaaaagaaaaaaatatatatatatacacacacacacccatacataaaaaaacttaaacattatagaaaaaacattgcacgatataaaacaagccataaaaagaaattcatccttcaataaagaaaaatatctaaacgttgaaaaacttaagtattatggaaaacattgcaaaataaagcttttaggaatcc

SEQ ID NO: 24061 - DNA, 3887 bp, Artificial Sequence
  derived and/or modified sequence
aaatacctgaaccaaggagaagctgccaccatctcctctgtggactcctgtaaccaaaccagaactttttttttttttttctgttcagtgacatctggctggttctcctgaactgagaagagcaggagttcacgtaacaaggaatggcagaaacgaaggatgtttttggccaggaaccgcatccagttgaagatgatttatataaagaacgaacgagaaaaagaaggaaatcagatcgagaccagcggttccgagcatttccctccatggagcagagtgctcttaaggaatatgaaaaattggaatcacggaccagaagggttttgagcaacacttatcagaaacttattcagtctgtcttcctggatgacagcatccctaatggagtcaagtatctcataaataggcttcttgccttgattgaaaagccgacagtggacccaatctacattgcattatttggaagcactggggctgggaagagctccctgatcaatgccatcatccagcaagcaatgtttctaccagtgtctggagaaagcatatgtacttcctgcattgtacaagtgagctctggctgctgtgtgcagtatgaggccaaaatccaccttctgtctgaccaggagtggagggaggagctgaagaacctgaccaaactcctgcataggacggaggagctgagcagagaagaggcagatgcgtggaacagggatgaggcagtggaggaagccacctggaagctacaaatgatttatggaaatggggcagagagtaagaactatgaggagttactgagggcgaagcccaaaaggaagatccccacctccagagtcatcaccctcaaggcggaagaggcagaagagctgtccatcaagctggacccctacatccgcacacagaggagagattgggatggagaggccgctgagatgcgcatctggcccttgatcaaacatgtggaagtgacacttcccaaatccgacctgatcccagaaggggtcgtgctggtggacatcccaggcacaggcgacttcaacagcaagagggacgagatgtggaaaaagaccattgacaagtgctcagtgatctgggtgatcagcgacatagagcgagtttctggggggcaagcccacgaagaccttctgaatgagagcatcaaagcctgccagcggggcttctgtagggacgtggccctggtggtcaccaagatggacaaactccacttgccagaatacctaagggaaagaaaggcaggaaatcaagctattcagagtcagcgagaggctgttttagaaagaaatgaaatgataaaactacaaaggactagaattctcaaggaaaaactgaagagaaaactgccagctgacttcaaggttctggaagcctcagatctggtgtatacagtcagcgcccaggagtactggcagcaggctctcctcaccgaggaggaaacggaaatccctaagttaagagaatacatcaggaagagcctcttggacaagaagaagaggacagtgaccaagtatgtgactgaagcctttggcctgttgctcctcacagatagtttcaactccacgcaaaacctgccgaatgaacacttgcacatgagtgtcctgcggagatttgcggaagagaaggttgagctgctggagaaggccatcgcacagtgcttcgcctgcatggagcagcctctgcaagaaggggtcaggaccgccaggacttcttaccgctgcatcctcagagcatgcttggtgaggagtaaaggaaaccaaggttttcatcagaccctgaaagctgtttgcctgaaaaatggcatctatgcctccaggactctggcgagaattgatctaaatgaagccctcactcagcccgtctatgaccagatcgaccctgtttttggaagcatttttaggacggggaagcccactggttcagctctgatgcctcacatagatgcttttaagcagtccctgcaggagaaaatgacagaaattgggataagaagtggctggaaatatgatagctgcaaaaaaaatttcctgatccaggagataagtgccatcctcgggggcctggaggaccacatcctcagaaggaagaggaggatctacgagtccctcactgcctctgtccagagtgacctgaagctctgttacgaagaggcagctcagatcacgggcaaaaaagcgtgtgagcggatgaaagatgccatcagaagaggagtggaccggcaggtggctgagggcatgtttgaaagggcccaggaaaggatgcagcaccagtttcagcagctgaagactggaatcgtggagaaggtgaagggcagcatcaccactatgctggcccttgcttcgtcccagggggatggcctctacaaggagcttgcagatgtcgggagtgaatacaaggagatggagaagctgcacagaagcctgagggaggtcgcggagaatgcacggctgaggaagggcatgcaagaattcctcctaagggcatcccccagcaaggctggcccccccgggacatcactgtaactcctggggcttagtcccaatggatgaaaaatcagcccagagccagagaattagaattactttttttgttcttaagagacaagatctatctacctctgttgcccaggctggagtgcagtggcaccatcacagctcactgcagcctcgaactcctaggctcaagcgatcctccagcctcagcctccagagcagctggggctacaggtacaggccaccacacctgggtaatttttttttttttttttttgagacagagtctcgctgtgtcacccaggctggaatgcagtggtgcaatctcggctcactgcaacctccacctcctgggttcaagaaattctctgcctcagcctcccaagtagctgggattataggcgactgccaccacacccggttaatttttatatttttagtagagacggggtttcatcatcttggccaggctggtcctgaactcctgacctcgtgatccacccatctctgcctcccaaagtgctgggattacgggcatgagccaccgtgcccggcccatacctgggtaattttttaattttttgtggagatggcatcttgctctgttgcccagggtggtctcaaactcctggcctcaagtgattctctcccacctcagtctcttgtgctaggattgcaggcatgagccattgtgcctggctcagaattctttctgttttgtgaaatctaatagaggacatttctcaactatttggactttgcatgcaatataaaactagtatgtttactgcattttattttatagccccaaagagtcatcttcaatacctaatggagttctaaagctttagggcaagaaacttttgcttccgcaaaaacatctaaacatcgctgggcatggtggctcactcccgtaatcccagcactttgggaggctgaggcgggcggatcatgaggtcaggagattgagaccatcctggctaacacagtgaaaccccatctctactaaaaatacaaaaaattagccaggcgtggtagcatgtgcctatagtcccagctacttgggaggctgaggcaggagaatcgcttgaacccaggaggcataggttgcagtgagccaaggtcgcgccactgcactccagcctggacgacggagtgagactatgtctcaaaaaaaaaaaaaaaaaaagaaaaagaaaaaaatatatatatatacacacacacacccatacataaaaaaacttaaacattatagaaaaaacattgcacgatataaaacaagccataaaaagaaattcatccttcaataaagaaaaatatctaaacgttgaaaaacttaagtattatggaaaacattgcaaaataaagcttttaggaatccaa

SEQ ID NO: 24062 - DNA, 2391 bp, Artificial Sequence
  derived and/or modified sequence
atggccgagaccaaggacgtgttcggccaggagccccaccccgtggaggacgacctgtacaaggagagaaccagaaagagaagaaagagcgacagagaccagagattcagagccttccccagcatggagcagagcgccctgaaggagtacgagaagctggagagcagaaccagaagagtgctgagcaacacctaccagaagctgatccagagcgtgttcctggacgacagcatccccaacggcgtgaagtacctgatcaacagactgctggccctgatcgagaagcccaccgtggaccccatctacatcgccctgttcggcagcaccggcgccggcaagagcagcctgatcaacgccatcatccagcaggccatgttcctgcccgtgagcggcgagagcatctgcaccagctgcatcgtgcaggtgagcagcggctgctgcgtgcagtacgaggccaagatccacctgctgagcgaccaggagtggagagaggagctgaagaacctgaccaagctgctgcacagaaccgaggagctgagcagagaggaggccgacgcctggaacagagacgaggccgtggaggaggccacctggaagctgcagatgatctacggcaacggcgccgagagcaagaactacgaggagctgctgagagccaagcccaagagaaagatccccaccagcagagtgatcaccctgaaggccgaggaggccgaggagctgagcatcaagctggacccctacatcagaacccagagaagagactgggacggcgaggccgccgagatgagaatctggcccctgatcaagcacgtggaggtgaccctgcccaagagcgacctgatccccgagggcgtggtgctggtggacatccccggcaccggcgacttcaacagcaagagagacgagatgtggaagaagaccatcgacaagtgcagcgtgatctgggtgatcagcgacatcgagagagtgagcggcggccaggcccacgaggacctgctgaacgagagcatcaaggcctgccagagaggcttctgcagagacgtggccctggtggtgaccaagatggacaagctgcacctgcccgagtacctgagagaggagagaaagggctggcaggccatccagagccagagagaggccgtgctggagagaaacgagatgatcaagctgcagagaaccagaatcctgaaggagaagctgaagagaaagctgcccgccgacttcaaggtgctggaggccagcgacctggtgtacaccgtgagcgcccaggagtactggcagcaggccctgctgaccgaggaggagaccgagatccccaagctgagagagtacatcagaaagagcctgctggacaagaagaagagaaccgtgaccaagtacgtgaccgaggccttcggcctgctgctgctgaccgacagcttcaacagcacccagaacctgcccaacgagcacctgcacatgagcgtgctgagaagattcgccgaggagaaggtggagctgctggagaaggccatcgcccagtgcttcgcctgcatggagcagcccctgcaggagggcgtgagaaccgccagaaccagctacagatgcatcctgagagcctgcctggtgagaagcaagggcaaccagggcttccaccagaccctgaaggccgtgtgcctgaagaacggcatctacgccagcagaaccctggccagaatcgacctgaacgaggccctgacccagcccgtgtacgaccagatcgaccccgtgttcggcagcatcttcagaaccggcaagcccaccggcagcgccctgatgccccacatcgacgccttcaagcagagcctgcaggagaagatgaccgagatcggcatcagaagcggctggaagtacgacagctgcaagaagaacttcctgatccaggagatcagcgccatcctgggcggcctggaggaccacatcctgagaagaaagagaagaatctacgagagcctgaccgccagcgtgcagagcgacctgaagctgtgctacgaggaggccgcccagatcaccggcaagaaggcctgcgagagaatgaaggacgccatcagaagaggcgtggacagacaggtggccgagggcatgttcgagagagcccaggagagaatgcagcaccagttccagcagctgaagaccggcatcgtggagaaggtgaagggcagcatcaccaccatgctggccctggccagcagccagggcgacggcctgtacaaggagctggccgacgtgggcagcgagtacaaggagatggagaagctgcacagaagcctgagagaggtggccgagaacgccagactgagaaagggcatgcaggagttcctgctgagagccagccccagcaaggccggcccccccggcaccagcctgtag

SEQ ID NO: 24063 - DNA, 2391 bp, Artificial Sequence
  derived and/or modified sequence
atggccgagaccaaggacgtgttcggccaggagccccaccccgtggaggacgacctgtacaaggagagaaccagaaagagaagaaagagcgacagagaccagagattcagagccttccccagcatggagcagagcgccctgaaggagtacgagaagctggagagcagaaccagaagagtgctgagcaacacctaccagaagctgatccagagcgtgttcctggacgacagcatccccaacggcgtgaagtacctgatcaacagactgctggccctgatcgagaagcccaccgtggaccccatctacatcgccctgttcggcagcaccggcgccggcaagagcagcctgatcaacgccatcatccagcaggccatgttcctgcccgtgagcggcgagagcatctgcaccagctgcatcgtgcaggtgagcagcggctgctgcgtgcagtacgaggccaagatccacctgctgagcgaccaggagtggagagaggagctgaagaacctgaccaagctgctgcacagaaccgaggagctgagcagagaggaggccgacgcctggaacagagacgaggccgtggaggaggccacctggaagctgcagatgatctacggcaacggcgccgagagcaagaactacgaggagctgctgagagccaagcccaagagaaagatccccaccagcagagtgatcaccctgaaggccgaggaggccgaggagctgagcatcaagctggacccctacatcagaacccagagaagagactgggacggcgaggccgccgagatgagaatctggcccctgatcaagcacgtggaggtgaccctgcccaagagcgacctgatccccgagggcgtggtgctggtggacatccccggcaccggcgacttcaacagcaagagagacgagatgtggaagaagaccatcgacaagtgcagcgtgatctgggtgatcagcgacatcgagagagtgagcggcggccaggcccacgaggacctgctgaacgagagcatcaaggcctgccagagaggcttctgcagagacgtggccctggtggtgaccaagatggacaagctgcacctgcccgagtacctgagagagagaaaggccggcaaccaggccatccagagccagagagaggccgtgctggagagaaacgagatgatcaagctgcagagaaccagaatcctgaaggagaagctgaagagaaagctgcccgccgacttcaaggtgctggaggccagcgacctggtgtacaccgtgagcgcccaggagtactggcagcaggccctgctgaccgaggaggagaccgagatccccaagctgagagagtacatcagaaagagcctgctggacaagaagaagagaaccgtgaccaagtacgtgaccgaggccttcggcctgctgctgctgaccgacagcttcaacagcacccagaacctgcccaacgagcacctgcacatgagcgtgctgagaagattcgccgaggagaaggtggagctgctggagaaggccatcgcccagtgcttcgcctgcatggagcagcccctgcaggagggcgtgagaaccgccagaaccagctacagatgcatcctgagagcctgcctggtgagaagcaagggcaaccagggcttccaccagaccctgaaggccgtgtgcctgaagaacggcatctacgccagcagaaccctggccagaatcgacctgaacgaggccctgacccagcccgtgtacgaccagatcgaccccgtgttcggcagcatcttcagaaccggcaagcccaccggcagcgccctgatgccccacatcgacgccttcaagcagagcctgcaggagaagatgaccgagatcggcatcagaagcggctggaagtacgacagctgcaagaagaacttcctgatccaggagatcagcgccatcctgggcggcctggaggaccacatcctgagaagaaagagaagaatctacgagagcctgaccgccagcgtgcagagcgacctgaagctgtgctacgaggaggccgcccagatcaccggcaagaaggcctgcgagagaatgaaggacgccatcagaagaggcgtggacagacaggtggccgagggcatgttcgagagagcccaggagagaatgcagcaccagttccagcagctgaagaccggcatcgtggagaaggtgaagggcagcatcaccaccatgctggccctggccagcagccagggcgacggcctgtacaaggagctggccgacgtgggcagcgagtacaaggagatggagaagctgcacagaagcctgagagaggtggccgagaacgccagactgagaaagggcatgcaggagttcctgctgagagccagccccagcaaggccggcccccccggcaccagcctgtag

SEQ ID NO: 24064 - protein, 255 aa, Artificial Sequence
  derived and/or modified sequence
MVLLLVILIPVLVSSAGTSAHYEMLGTCRMVCDPYGGTKAPSTAATPDRGLMQSLPTFIQGPKGEAGRPGKAGPRGPPGEPGPPGPMGPPGEKGEPGRQGLPGPPGAPGLNAAGAISAATYSTVPKIAFYAGLKRQHEGYEVLKFDDVVTNLGNHYDPTTGKFTCSIPGIYFFTYHVLMRGGDGTSMWADLCKNNQVRASAIAQDADQNYDYASNSVVLHLEPGDEVYIKLDGGKAHGGNNNKYSTFSGFIIYAD

SEQ ID NO: 24065 - protein, 232 aa, Artificial Sequence
  derived and/or modified sequence
MVLLLVILIPVLVSSAGTSAHYEMLGTCRMVCDPYGGTKAPSTAATPDRGLMQSLPTFIQGPPMGPPGEKGEPGRQGLPGPPGAPGLNAAGAISAATYSTVPKIAFYAGLKRQHEGYEVLKFDDVVTNLGNHYDPTTGKFTCSIPGIYFFTYHVLMRGGDGTSMWADLCKNNQVRASAIAQDADQNYDYASNSVVLHLEPGDEVYIKLDGGKAHGGNNNKYSTFSGFIIYAD

SEQ ID NO: 24066 - DNA, 768 bp, Artificial Sequence
  derived and/or modified sequence
atggtgcttttgctcgtgatcttgattccagtcttggtgagcagcgcgggtacttctgcacattatgagatgctcggcacctgtcggatggtttgcgacccttacggaggaaccaaggcgccaagtaccgccgctacaccggacagaggtctgatgcagagcctgcctacatttatacagggccctaagggcgaagccggtcgcccagggaaagccggtcctcgcggtcctcctggagaacctggccctccagggcctatggggccacccggtgaaaagggtgaacctggcaggcagggcctccctggaccaccaggggcacccggactgaacgccgctggggcaatatctgcagccacgtattcaacagtgccaaaaattgccttttatgccggtctgaagaggcaacatgagggttatgaggtcctgaagttcgacgacgtagtaaccaacctggggaatcactacgacccaactactggtaaattcacgtgttcgatccctgggatctatttctttacctaccacgtgctgatgcggggtggtgatggtacaagcatgtgggcagacctgtgcaaaaacaaccaggtgcgtgccagtgccattgcccaggacgcggaccagaactacgattatgcgtccaacagcgtggtgcttcatcttgagccaggggacgaagtgtacatcaagcttgacggagggaaagctcacgggggaaacaacaataagtactcaaccttctcaggtttcataatatacgcagattag

SEQ ID NO: 24067 - DNA, 699 bp, Artificial Sequence
  derived and/or modified sequence
atggtactgttgctcgtgattctcatccctgtgcttgtgtctagcgccggaacgtccgcgcactacgaaatgctggggacatgcagaatggtctgcgacccctatggcggtacgaaagctccatctacagctgcaacaccagatcgtggcctcatgcaaagtttgccaaccttcattcagggcccaccaatgggcccacccggtgagaaaggcgagccgggaagacagggattgccagggcctcccggagccccagggctgaatgcagctggcgctattagtgccgctacatattctaccgtgcctaaaatcgcattttatgctggtctgaagaggcagcacgagggatatgaagtgctgaagttcgatgacgtcgttaccaatctgggtaaccactatgaccctacgactggaaagttcacatgctctatcccaggtatttacttttttacctatcatgtgctaatgagaggaggagacggcaccagcatgtgggccgacctctgcaagaacaaccaggtgcgcgcaagtgcaatcgcacaggatgctgatcaaaattacgactatgcaagcaactccgtcgttctacacttagagcctggcgatgaggtttatattaaattggacggtggcaaagcacacggcggtaacaataataagtatagcactttcagcgggttcatcatctacgccgattag

SEQ ID NO: 24068 - DNA, 768 bp, Artificial Sequence
  derived and/or modified sequence
atggtgcttttattggtcatcctgattcccgtgttggtcagttcagctggcacctccgcccactatgaaatgctcggaacatgcagaatggtgtgtgatccttatggtgggaccaaagcgcctagcacagctgccacccccgacagggggctcatgcagtccctgccaacgtttatccaagggccgaaaggcgaggctggtagacctggtaaggctggacctcgcggcccccccggagagccgggcccacctggaccgatgggcccccccggcgagaaaggcgaacctggaaggcaggggctgcctggacctcccggagcacctggactgaatgctgcaggggctattagcgctgccacatactcaaccgtgcccaagatcgctttttacgccggtctgaagagacagcacgaaggctacgaggtcctgaagtttgatgatgtagtgacaaatctaggaaatcactatgacccgacaactgggaagttcacctgttctattcccggcatttactttttcacgtatcacgttctgatgcgaggaggtgatgggacatcaatgtgggctgatctttgtaaaaataaccaagtacgcgccagcgccatcgcgcaggacgccgaccaaaactatgattatgcaagcaactccgtggtgttacacctggaacccggtgatgaggtgtatatcaagctggatggagggaaagcccatggaggcaataacaataagtacagtacattttcaggttttattatctacgcagattag

SEQ ID NO: 24069 - DNA, 699 bp, Artificial Sequence
  derived and/or modified sequence
atggtgctccttctggtaattctgatacctgtgcttgtgtcatctgccggcactagtgcacactatgaaatgcttggtacctgcagaatggtgtgcgacccttacggtggaaccaaggcaccttcgacggcagctaccccagatcggggcctaatgcagagcctcccgacctttatacaaggcccacccatgggccccccaggcgagaaaggagaacccggacgtcaaggactccccggacctcccggagcgcctggtctgaacgcggccggcgccattagcgccgcaacttacagcacagttcccaaaatcgcgttttacgccggattgaagagacagcacgaaggctacgaagtcctgaagtttgatgatgttgtaaccaatctggggaatcattatgatcccaccaccggcaaatttacttgttctattcctggcatctattttttcacataccacgtgctgatgcggggtggtgatggcactagcatgtgggccgatctttgtaaaaacaaccaggtgagggcttctgccatcgcgcaagatgcagaccaaaattatgattatgctagcaacagtgtggtgttacatttggaacctggcgatgaggtgtacattaaactcgacggagggaaagctcatggcggcaacaacaataagtacagtactttctctggtttcatcatctatgcagattag

SEQ ID NO: 24070 - DNA, 768 bp, Artificial Sequence
  derived and/or modified sequence
atggttctcttgttggtcatactcatacccgttcttgtctccagtgcaggaactagcgcccattatgagatgctgggtacttgccgaatggtgtgcgatccgtacggtggaaccaaagctccttctactgccgccacacccgatcgggggctgatgcaaagcctgcccacctttattcaggggcccaaaggagaagccggccgccccggaaaagctggcccccgcggcccacccggcgagcccggaccgcccggccccatgggaccgccaggcgagaaaggcgagccaggacggcagggactgcctgggccgcccggtgcccctggcctcaacgctgctggcgcaatctccgccgccacgtactcgactgtccccaaaatcgctttttatgcaggcctaaagcgtcaacacgagggctacgaagttcttaaatttgacgatgtagtcaccaacctgggaaatcattatgacccaaccactgggaaatttacgtgctcaattccaggcatttacttttttacttatcatgttctgatgcggggaggagatggaacctccatgtgggctgatctttgtaagaacaaccaagtgcgtgcctcagctattgctcaggacgccgaccagaactatgactatgcatctaactctgtggtccttcacctggaaccaggcgatgaggtgtacattaagcttgacggaggcaaggcccatggagggaataacaataagtacagcacgttttcaggattcatcatctacgccgactag

SEQ ID NO: 24071 - DNA, 1484 bp, Artificial Sequence
  derived and/or modified sequence
atggtgctgctgctggtgatcctcatcccggtgctggtgagctcggccggcacgtcggcgcactacgagatgctgggcacctgccgcatggtctgcgacccctacgggggcaccaaggcgcccagcaccgctgccacgcccgaccgcggcctcatgcagtccctgcccaccttcatccagggcccccccatggggcccccgggcgagaagggcgagccgggccgccaaggcctgccgggcccgcccggggcgcccggcctgaacgcggccggggccatcagcgccgccacctacagcacggtgcccaagatcgccttctacgccggcctcaagcggcagcatgaaggctacgaggtgctcaagttcgacgacgtggtcaccaacctcggaaaccactacgaccccaccaccggcaagttcacctgctccatcccgggcatctacttcttcacctaccacgtcctgatgcgcggaggggacggcaccagcatgtgggctgatctctgcaaaaacaaccaggtgcgtgctagtgcaattgcccaagatgctgatcagaattacgactatgccagtaacagtgtggttcttcatttggagccgggagatgaagtctatatcaaattagatggcgggaaagcccatggaggaaacaacaacaaatacagcacgttttctggatttattatttatgctgactgataatgcagaaactaagcttattattctgagtttgaacactggattcgtatggctaacgtcagtgaatcaaggatcccaggggatgccaatggcagggcacctcagttgtgtatatgtggggaaatcaaatgctacctgactcacatctgtatcactcagaaacattatgtaaaaaatatcaaagcaagataagcagatgtgtgatccactaccgccaaagcaaatactccttatcgttagtgtccatgtgaatgaagtcctatatagatcacaaatttttatagacaaatctaagacattgaattatttcttctatatatatgatactttggtgtactgtgatcttgctgcttttatccatatgtcagctttggttcttgtgagtttacctgcttattatgatacttggagtccattcatagtgtggggaagaatgatttttgccctgcaggagaaggtctaattgaaataatgctgcttgtccccaaagaaattgtttgccttgtactcttgttaaccttagagctagacctgggaatgattcaacttcaagccttaacctggaattttctggatttgagggaattcccaagcctatgatctttttcacattttctttttcttatatgaattttcttttctctcttttctggtgatagtctttaaaaatagagattgacagtgtatcataggattaccctctaagtgtgaaaatgtgtaattatgtacggtatttagaaaaagcccttatgtgtccattttgtcaactgaatacatttagattc

SEQ ID NO: 24072 - DNA, 699 bp, Artificial Sequence
  derived and/or modified sequence
atggtgctcctgcttgtaattctcatacctgtgctggtatcttctgctggcactagcgcccactacgaaatgttgggcacatgcagaatggtttgcgacccatatggcggcaccaaggcaccttctacagccgcgacccctgatcgaggtctgatgcaatccctcccaacatttattcagggacctccgatgggcccacctggagaaaagggcgagccaggaaggcagggactcccaggcccccccggtgcaccgggccttaacgccgccggcgccatctccgccgccacatacagtacagtccctaagatcgctttttacgctggactgaaacggcagcatgagggatatgaagtgctcaaattcgacgatgttgtcaccaaccttggcaaccactacgatcccacaaccggaaagttcacatgtagtatacccgggatatatttttttacataccacgttttaatgagaggaggtgatggtacgagtatgtgggctgatctgtgtaaaaataatcaagttagagcgagcgccatagcacaggacgcggaccaaaactacgattatgcgagcaacagcgtagtcttgcacctggagcccggcgacgaggtttatatcaaattagatggcggcaaagcccacggcggcaacaataacaaatacagcactttttccggcttcattatctacgcagattag

SEQ ID NO: 24073 - DNA, 2493 bp, Artificial Sequence
  derived and/or modified sequence
tcagagtaatgccaaactctctctgagtgggatgagcagagcagatgctgcaatgagatgccaaagcggctccccttcctctgtgccttgggtgcctataaattgctccggcgcgcgtttgtcagcctcctcttctcctggcaggtggtacccaggcagaattctgccttcagtctctctctcgctccgctcccggccgtgaggcgctcgccgctgctcgctcgctcctccgccccagctctgagcctcgccgtgccgaccgtgcccgccgccgccgccgctgggcgcacccgggggacgcccgggcccacgcggggctttggggtgcgcgtctattcgagttgtggtggtggcaaaggaggaagagagaaaggaggcaataaaaaaaaaaggcagcggacgggcgaactgagcgagcgaaagaagaggaggaggaggcagaaaaaggcaacttcagacggaaagttggtgcgaacaggcgcagtctgcaaaaacggaaaagtcgatcgcaggcggcggcggcataaaagtgtgagctgcccgggcgagctcaggaggcggcggctggctctgccctcccggtggccgcgccggcgccggctgcagccacaggtgcgaaggagctcgcggggggcgagggcgccccgcgcacccctcccccggcccccaccccgggctcgggacttcggctcaagtcactgggcgcccgcgctccctccccagccgcagcctccgcggggggagcaggagtcggcagcagcggccggcgcacgcacgcccaggggagttggggttcgcagggggttgttttcggctctgaagaggtccccgcccaaccttcaaaattctgtccaaaagcagacaagaggatcgccccgcgctgagccggctggtgggcagcaggaggcgcctgatcgccgccggggcgctgggggtggtgatggtgctgctgctggtgatcctcatcccggtgctggtgagctcggccggcacgtcggcgcactacgagatgctgggcacctgccgcatggtctgcgacccctacgggggcaccaaggcgcccagcaccgctgccacgcccgaccgcggcctcatgcagtccctgcccaccttcatccagggccccaaaggcgaggccggcaggcccgggaaggcgggtccgcgcgggccccccggagagcccgggccacccggccccatggggcccccgggcgagaagggcgagccgggccgccaaggcctgccgggcccgcccggggcgcccggcctgaacgcggccggggccatcagcgccgccacctacagcacggtgcccaagatcgccttctacgccggcctcaagcggcagcatgaaggctacgaggtgctcaagttcgacgacgtggtcaccaacctcggaaaccactacgaccccaccaccggcaagttcacctgctccatcccgggcatctacttcttcacctaccacgtcctgatgcgcggaggggacggcaccagcatgtgggctgatctctgcaaaaacaaccaggtgcgtgctagtgcaattgcccaagatgctgatcagaattacgactatgccagtaacagtgtggttcttcatttggagccgggagatgaagtctatatcaaattagatggcgggaaagcccatggaggaaacaacaacaaatacagcacgttttctggatttattatttatgctgactgataatgcagaaactaagcttattattctgagtttgaacactggattcgtatggctaacgtcagtgaatcaaggatcccaggggatgccaatggcagggcacctcagttgtgtatatgtggggaaatcaaatgctacctgactcacatctgtatcactcagaaacattatgtaaaaaatatcaaagcaagataagcagatgtgtgatccactaccgccaaagcaaatactccttatcgttagtgtccatgtgaatgaagtcctatatagatcacaaatttttatagacaaatctaagacattgaattatttcttctatatatatgatactttggtgtactgtgatcttgctgcttttatccatatgtcagctttggttcttgtgagtttacctgcttattatgatacttggagtccattcatagtgtggggaagaatgatttttgccctgcaggagaaggtctaattgaaataatgctgcttgtccccaaagaaattgtttgccttgtactcttgttaaccttagagctagacctgggaatgattcaacttcaagccttaacctggaattttctggatttgagggaattcccaagcctatgatctttttcacattttctttttcttatatgaattttcttttctctcttttctggtgatagtctttaaaaatagagattgacagtgtatcataggattaccctctaagtgtgaaaatgtgtaattatgtacggtatttagaaaaagcccttatgtgtccattttgtcaactgaatacatttagattc

SEQ ID NO: 24074 - DNA, 768 bp, Artificial Sequence
  derived and/or modified sequence
atggtgctgctgctggtgatcctgatccccgtgctggtgagcagcgccggcaccagcgcccactacgagatgctgggcacctgcagaatggtgtgcgacccctacggcggcaccaaggcccccagcaccgccgccacccccgacagaggcctgatgcagagcctgcccaccttcatccagggccccaagggcgaggccggcagacccggcaaggccggccccagaggcccccccggcgagcccggcccccccggccccatgggcccccccggcgagaagggcgagcccggcagacagggcctgcccggcccccccggcgcccccggcctgaacgccgccggcgccatcagcgccgccacctacagcaccgtgcccaagatcgccttctacgccggcctgaagagacagcacgagggctacgaggtgctgaagttcgacgacgtggtgaccaacctgggcaaccactacgaccccaccaccggcaagttcacctgcagcatccccggcatctacttcttcacctaccacgtgctgatgagaggcggcgacggcaccagcatgtgggccgacctgtgcaagaacaaccaggtgagagccagcgccatcgcccaggacgccgaccagaactacgactacgccagcaacagcgtggtgctgcacctggagcccggcgacgaggtgtacatcaagctggacggcggcaaggcccacggcggcaacaacaacaagtacagcaccttcagcggcttcatcatctacgccgactag

SEQ ID NO: 24075 - DNA, 699 bp, Artificial Sequence
  derived and/or modified sequence
atggtgctgctgctggtgatcctgatccccgtgctggtgagcagcgccggcaccagcgcccactacgagatgctgggcacctgcagaatggtgtgcgacccctacggcggcaccaaggcccccagcaccgccgccacccccgacagaggcctgatgcagagcctgcccaccttcatccagggcccccccatgggcccccccggcgagaagggcgagcccggcagacagggcctgcccggcccccccggcgcccccggcctgaacgccgccggcgccatcagcgccgccacctacagcaccgtgcccaagatcgccttctacgccggcctgaagagacagcacgagggctacgaggtgctgaagttcgacgacgtggtgaccaacctgggcaaccactacgaccccaccaccggcaagttcacctgcagcatccccggcatctacttcttcacctaccacgtgctgatgagaggcggcgacggcaccagcatgtgggccgacctgtgcaagaacaaccaggtgagagccagcgccatcgcccaggacgccgaccagaactacgactacgccagcaacagcgtggtgctgcacctggagcccggcgacgaggtgtacatcaagctggacggcggcaaggcccacggcggcaacaacaacaagtacagcaccttcagcggcttcatcatctacgccgactag

SEQ ID NO: 24076 - DNA, 768 bp, Artificial Sequence
  derived and/or modified sequence
atggtgctgctgctagtaatccttattccagtactcgtgtcgtccgccggaacatcagcccactacgagatgctgggtacatgccgcatggtgtgtgacccctacggggggaccaaggccccaagcaccgcagctacacctgatagagggctgatgcagagtttgcccacgttcatccagggccctaaaggcgaagctggccggcccggaaaggcagggccaagaggacctccgggcgagcccggccctcccgggcccatggggccaccaggtgaaaagggcgagccaggtcgtcaaggcctgcctggccctccaggcgcccctggactcaacgcagccggcgcaatctcagctgccacctactccaccgtgcctaagatcgccttctatgctggtctcaaaagacagcatgaagggtacgaagtgctgaaattcgatgatgttgttaccaacttgggcaaccattacgatcctacgacaggcaaatttacatgctcaatccccggaatttatttctttacataccatgtcctgatgcgggggggcgatggaacgagtatgtgggccgatctttgcaagaacaaccaagttagagcatccgcaatcgcgcaggatgccgaccagaattacgactacgcctccaattcagtggtgcttcatcttgagccaggcgacgaggtgtatattaaacttgatggaggtaaggctcatgggggcaataacaataaatacagcaccttcagcggttttataatttatgcagactag

SEQ ID NO: 24077 - DNA, 699 bp, Artificial Sequence
  derived and/or modified sequence
atggtcctgcttttagtgattctgatccctgttttagtgtcttctgctgggacaagtgcacactatgaaatgctgggtacttgtcgcatggtgtgtgacccctacggcggtacaaaagccccttccactgccgctacaccagatcgtggcctgatgcagagtttgcccaccttcatacaaggtcctccaatgggcccccctggagaaaaaggagagccaggtagacagggactgccaggcccacctggagccccaggattgaatgctgcaggtgcgattagtgccgccacctactccacagtccctaaaattgccttttacgccggccttaagagacagcatgaggggtacgaggtacttaaatttgacgatgtggtgaccaacctgggaaatcattatgacccaaccactggaaagttcacatgttctatccccggcatttacttcttcacttatcacgtattgatgagaggaggtgacggcacttctatgtgggccgacctgtgtaaaaacaatcaggtgagagccagcgctattgcccaggatgcagatcaaaattacgattatgcctccaacagcgtcgtgcttcatctcgagccaggcgacgaagtatacattaagctggacggcggcaaggcccatggggggaataataacaagtactctaccttttccggcttcatcatctatgctgattag

SEQ ID NO: 24078 - DNA, 768 bp, Artificial Sequence
  derived and/or modified sequence
atggtgctgctgctggtgatcctgatccctgtgctggtgtcctctgctggcaccagcgcccactatgagatgctgggcacctgcaggatggtgtgtgacccctatggaggcaccaaggcccccagcacagctgccaccccagaccggggcctgatgcagagcctgcccaccttcatccagggccccaagggggaggccggccggcctgggaaggccggcccccggggccccccaggagagcccggccccccaggccccatgggccccccaggagagaagggggagcccggccggcagggcctgcccggccccccaggggcccctggcctgaatgctgctggggccatctctgctgccacctacagcacagtgcccaagatcgccttctacgccggcctgaagaggcagcacgagggctatgaggtgctgaagtttgatgatgtggtgaccaacctgggcaaccactatgaccccaccaccgggaagttcacctgcagcatccctggcatctacttcttcacctaccacgtgctgatgagaggaggagatggcacctccatgtgggccgacctgtgcaagaacaaccaggtgcgggccagcgccatcgcccaggatgctgaccagaactatgactatgccagcaacagcgtggtgctgcacctggagcctggagatgaggtgtacatcaagctggatggcggcaaggcccatggaggcaacaacaacaagtacagcaccttcagcggcttcatcatctatgctgactag

SEQ ID NO: 24079 - DNA, 699 bp, Artificial Sequence
  derived and/or modified sequence
atggtgctgctgctggtgatcctgatccctgtgctggtgtcctctgctggcaccagcgcccactatgagatgctgggcacctgcaggatggtgtgtgacccctatggaggcaccaaggcccccagcacagctgccaccccagaccggggcctgatgcagagcctgcccaccttcatccagggcccccccatgggccccccaggagagaagggggagcccggccggcagggcctgcccggccccccaggggcccctggcctgaatgctgctggggccatctctgctgccacctacagcacagtgcccaagatcgccttctacgccggcctgaagaggcagcacgagggctatgaggtgctgaagtttgatgatgtggtgaccaacctgggcaaccactatgaccccaccaccgggaagttcacctgcagcatccctggcatctacttcttcacctaccacgtgctgatgagaggaggagatggcacctccatgtgggccgacctgtgcaagaacaaccaggtgcgggccagcgccatcgcccaggatgctgaccagaactatgactatgccagcaacagcgtggtgctgcacctggagcctggagatgaggtgtacatcaagctggatggcggcaaggcccacggcggcaacaacaacaagtacagcaccttcagcggcttcatcatctatgctgactag

SEQ ID NO: 24080 - DNA, 768 bp, Artificial Sequence
  derived and/or modified sequence
atggtgctgctgctggtgatcctgatccccgtgctggtgagcagcgctggtacatccgcccactacgaaatgctcggcacatgtcgaatggtatgcgacccctatggcgggaccaaggctccatctaccgcagctacccccgacagagggcttatgcaatctctgccgacatttatccaggggccgaaaggggaagctggaagacccggaaaagccggcccgaggggccctccaggagaacccggccccccaggtccaatgggaccacccggggagaaaggtgaaccaggccgccagggtctgcctgggccaccaggcgcgccggggctcaacgcagcaggagccatcagcgcagccacgtatagcacggtccctaaaatcgccttctatgcaggcctgaaaagacagcacgagggatatgaggtactcaaattcgatgacgtagtgaccaacctgggaaatcattacgatcccactacagggaagtttacctgtagcattccaggcatttatttctttacataccacgtactgatgcgcggaggcgacggcaccagcatgtgggccgacttatgcaagaataatcaggtccgcgccagcgctatagcccaggacgcagaccagaactatgactacgctagcaactctgttgtgctgcatctggagccaggggacgaagtgtacattaaactagatggcggtaaagctcacggaggtaacaacaacaagtactcaacattcagcggctttataatttatgctgactag

SEQ ID NO: 24081 - DNA, 699 bp, Artificial Sequence
  derived and/or modified sequence
atggtgctgctgctggtgatcctgatccccgtgctggtgagcagcgccgggaccagcgcccactacgagatgttgggtacctgccgcatggtgtgtgatccttacggaggcacgaaagccccgagtacggctgccacccctgacagagggctcatgcaatcccttccaactttcattcagggacccccaatgggacccccaggggaaaagggcgagcctggacggcagggactcccagggccccccggagcccccggccttaatgcggcgggagccatctctgccgccacatactctactgtaccaaagattgccttttatgcaggcctgaaaagacagcacgagggctacgaagtgctcaagttcgatgacgtcgttacgaacctgggcaatcactacgaccctacgaccggtaagttcacgtgctcgatccccggaatatatttttttacctatcacgtacttatgcgcggcggagacggtacatcaatgtgggctgacctctgcaagaataaccaggtgcgagcctcggcaattgcccaagatgccgatcagaactacgattatgccagcaacagcgtcgtgctccaccttgagcccggagatgaggtgtatatcaagctggacggcggcaaggcccatggtggaaataataacaagtacagcacattctctggatttatcatctacgctgattag

SEQ ID NO: 24082 - RNA, 768 nt, Artificial Sequence
  derived and/or modified sequence
auggugcuuuuauuggucauccugauucccguguuggucaguucagcuggcaccuccgcccacuaugaaaugcucggaacaugcagaauggugugugauccuuauggugggaccaaagcgccuagcacagcugccacccccgacagggggcucaugcagucccugccaacguuuauccaagggccgaaaggcgaggcugguagaccugguaaggcuggaccucgcggcccccccggagagccgggcccaccuggaccgaugggcccccccggcgagaaaggcgaaccuggaaggcaggggcugccuggaccucccggagcaccuggacugaaugcugcaggggcuauuagcgcugccacauacucaaccgugcccaagaucgcuuuuuacgccggucugaagagacagcacgaaggcuacgagguccugaaguuugaugauguagugacaaaucuaggaaaucacuaugacccgacaacugggaaguucaccuguucuauucccggcauuuacuuuuucacguaucacguucugaugcgaggaggugaugggacaucaaugugggcugaucuuuguaaaaauaaccaaguacgcgccagcgccaucgcgcaggacgccgaccaaaacuaugauuaugcaagcaacuccgugguguuacaccuggaacccggugaugagguguauaucaagcuggauggagggaaagcccauggaggcaauaacaauaaguacaguacauuuucagguuuuauuaucuacgcagauuag

SEQ ID NO: 24083 - RNA, 699 nt, Artificial Sequence
  derived and/or modified sequence
auggugcuccuucugguaauucugauaccugugcuugugucaucugccggcacuagugcacacuaugaaaugcuugguaccugcagaauggugugcgacccuuacgguggaaccaaggcaccuucgacggcagcuaccccagaucggggccuaaugcagagccucccgaccuuuauacaaggcccacccaugggccccccaggcgagaaaggagaacccggacgucaaggacuccccggaccucccggagcgccuggucugaacgcggccggcgccauuagcgccgcaacuuacagcacaguucccaaaaucgcguuuuacgccggauugaagagacagcacgaaggcuacgaaguccugaaguuugaugauguuguaaccaaucuggggaaucauuaugaucccaccaccggcaaauuuacuuguucuauuccuggcaucuauuuuuucacauaccacgugcugaugcgggguggugauggcacuagcaugugggccgaucuuuguaaaaacaaccaggugagggcuucugccaucgcgcaagaugcagaccaaaauuaugauuaugcuagcaacagugugguguuacauuuggaaccuggcgaugagguguacauuaaacucgacggagggaaagcucauggcggcaacaacaauaaguacaguacuuucucugguuucaucaucuaugcagauuag

SEQ ID NO: 24084 - RNA, 768 nt, Artificial Sequence
  derived and/or modified sequence
augguucucuuguuggucauacucauacccguucuugucuccagugcaggaacuagcgcccauuaugagaugcuggguacuugccgaauggugugcgauccguacgguggaaccaaagcuccuucuacugccgccacacccgaucgggggcugaugcaaagccugcccaccuuuauucaggggcccaaaggagaagccggccgccccggaaaagcuggcccccgcggcccacccggcgagcccggaccgcccggccccaugggaccgccaggcgagaaaggcgagccaggacggcagggacugccugggccgcccggugccccuggccucaacgcugcuggcgcaaucuccgccgccacguacucgacuguccccaaaaucgcuuuuuaugcaggccuaaagcgucaacacgagggcuacgaaguucuuaaauuugacgauguagucaccaaccugggaaaucauuaugacccaaccacugggaaauuuacgugcucaauuccaggcauuuacuuuuuuacuuaucauguucugaugcggggaggagauggaaccuccaugugggcugaucuuuguaagaacaaccaagugcgugccucagcuauugcucaggacgccgaccagaacuaugacuaugcaucuaacucugugguccuucaccuggaaccaggcgaugagguguacauuaagcuugacggaggcaaggcccauggagggaauaacaauaaguacagcacguuuucaggauucaucaucuacgccgacuag

SEQ ID NO: 24085 - RNA, 699 nt, Artificial Sequence
  derived and/or modified sequence
auggugcuccugcuuguaauucucauaccugugcugguaucuucugcuggcacuagcgcccacuacgaaauguugggcacaugcagaaugguuugcgacccauauggcggcaccaaggcaccuucuacagccgcgaccccugaucgaggucugaugcaaucccucccaacauuuauucagggaccuccgaugggcccaccuggagaaaagggcgagccaggaaggcagggacucccaggcccccccggugcaccgggccuuaacgccgccggcgccaucuccgccgccacauacaguacagucccuaagaucgcuuuuuacgcuggacugaaacggcagcaugagggauaugaagugcucaaauucgacgauguugucaccaaccuuggcaaccacuacgaucccacaaccggaaaguucacauguaguauacccgggauauauuuuuuuacauaccacguuuuaaugagaggaggugaugguacgaguaugugggcugaucuguguaaaaauaaucaaguuagagcgagcgccauagcacaggacgcggaccaaaacuacgauuaugcgagcaacagcguagucuugcaccuggagcccggcgacgagguuuauaucaaauuagauggcggcaaagcccacggcggcaacaauaacaaauacagcacuuuuuccggcuucauuaucuacgcagauuag

SEQ ID NO: 24086 - protein, 566 aa, Artificial Sequence
  derived and/or modified sequence
MKMQKGNVLLMFGLLLHLEAATNSNETSTSANTGSSVISSGASTATNSGSSVTSSGVSTATISGSSVTSNGVSIVTNSEFHTTSSGISTATNSEFSTVSSGISIATNSESSTTSSGASTATNSESSTPSSGASTATNSDSSTTSSGASTATNSDSSTTSSEASTATNSESSTTSSGASTATNSESSTVSSRASTATNSESSTTSSGASTATNSESRTTSNGAGTATNSESSTTSSGASTATNSESSTPSSGAGTATNSESSTTSSGAGTATNSESSTVSSGISTVTNSESSTPSSGANTATNSESSTTSSGANTATNSDSSTTSSGASTATNSESSTTSSGASTATNSESSTTSSGASTATNSGSSTTSSGTSTATNSESSTVSSGASTATTSESSTTSSGASTATNSESSTVSSGASTATNSESSTTSSGANTATNSGSSVTSAGSGTAALTGMHTTSHSASTAVSEAKPGGSLVPWEIFLITLVSVVAAVGLFAGLFFCVRNSLSLRNTFNTAVYHPHGLNHGLGPGPGGNHGAPHRPRWSPNWFWRRPVSSIAMEMSGRNSGP

SEQ ID NO: 24087 - protein, 566 aa, Artificial Sequence
  derived and/or modified sequence
MKMQKGNVLLMFGLLLHLEAATNSNETSTSANTGSSVISSGASTATNSGSSVTSSGVSTATISGSSVTSNGVSIVTNSEFHTTSSGISTATNSEFSTASSGISIATNSESSTTSSGASTATNSESSTPSSGASTATNSDSSTTSSGASTATNSDSSTTSSEASTATNSESSTTSSGASTATNSESSTVSSRASTATNSESSTTSSGASTATNSESRTTSNGAGTATNSESSTTSSGASTATNSESSTPSSGAGTATNSESSTTSSGAGTATNSESSTVSSGISTVTNSESSTPSSGANTATNSESSTTSSGANTATNSDSSTTSSGASTATNSESSTTSSGASTATNSESSTTSSGASTATNSGSSTTSSGTSTATNSESSTVSSGASTATTSESSTTSSGASTATNSESSTVSSGASTATNSESSTTSSGANTATNSGSSVTSAGSGTAALTGMHTTSHSASTAVSEAKPGGSLVPWEIFLITLVSVVAAVGLFAGLFFCVRNSLSLRNTFNTAVYHPHGLNHGLGPGPGGNHGAPHRPRWSPNWFWRRPVSSIAMEMSGRNSGP

SEQ ID NO: 24088 - protein, 566 aa, Artificial Sequence
  derived and/or modified sequence
MKMQKGNVLLMFGLLLHLEAATNSNETSTSANTGSSVISSGASTATNSGSSVTSSGVSTATISGSSVTSNGVSIVTNSEFHTTSSGISTATNSEFSTVSSGISIATNSESSTTSSGASTATNSESSTPSSGASTATNSDSSTTSSGASTATNSDSSTTSSEASTATNSESSTTSSGASTVTNSESSTVSSRASTATNSESSTTSSGASTATNSESRTTSNGAGTATNSESSTTSSGASTATNSESSTPSSGAGTATNSESSTTSSGAGTATNSESSTVSSGISTVTNSESSTPSSGANTATNSESSTTSSGANTATNSDSSTTSSGASTATNSESSTTSSGASTATNSESSTTSSGASTATNSGSSTTSSGTSTATNSESSTVSSGASTATTSESSTTSSGASTATNSESSTVSSGASTATNSESSTTSSGANTATNSGSSVTSAGSGTAALTGMHTTSHSASTAVSEAKPGGSLVPWEIFLITLVSVVAAVGLFAGLFFCVRNSLSLRNTFNTAVYHPHGLNHGLGPGPGGNHGAPHRPRWSPNWFWRRPVSSIAMEMSGRNSGP

SEQ ID NO: 24089 - DNA, 1701 bp, Artificial Sequence
  derived and/or modified sequence
atgaagatgcagaagggcaacgtgctgctgatgttcggcctgctgctgcacctggaggccgccaccaacagcaacgagaccagcaccagcgccaacaccggcagcagcgtgatcagcagcggcgccagcaccgccaccaacagcggcagcagcgtgaccagcagcggcgtgagcaccgccaccatcagcggcagcagcgtgaccagcaacggcgtgagcatcgtgaccaacagcgagttccacaccaccagcagcggcatcagcaccgccaccaacagcgagttcagcaccgtgagcagcggcatcagcatcgccaccaacagcgagagcagcaccaccagcagcggcgccagcaccgccaccaacagcgagagcagcacccccagcagcggcgccagcaccgccaccaacagcgacagcagcaccaccagcagcggcgccagcaccgccaccaacagcgacagcagcaccaccagcagcgaggccagcaccgccaccaacagcgagagcagcaccaccagcagcggcgccagcaccgccaccaacagcgagagcagcaccgtgagcagcagagccagcaccgccaccaacagcgagagcagcaccaccagcagcggcgccagcaccgccaccaacagcgagagcagaaccaccagcaacggcgccggcaccgccaccaacagcgagagcagcaccaccagcagcggcgccagcaccgccaccaacagcgagagcagcacccccagcagcggcgccggcaccgccaccaacagcgagagcagcaccaccagcagcggcgccggcaccgccaccaacagcgagagcagcaccgtgagcagcggcatcagcaccgtgaccaacagcgagagcagcacccccagcagcggcgccaacaccgccaccaacagcgagagcagcaccaccagcagcggcgccaacaccgccaccaacagcgacagcagcaccaccagcagcggcgccagcaccgccaccaacagcgagagcagcaccaccagcagcggcgccagcaccgccaccaacagcgagagcagcaccaccagcagcggcgccagcaccgccaccaacagcggcagcagcaccaccagcagcggcaccagcaccgccaccaacagcgagagcagcaccgtgagcagcggcgccagcaccgccaccaccagcgagagcagcaccaccagcagcggcgccagcaccgccaccaacagcgagagcagcaccgtgagcagcggcgccagcaccgccaccaacagcgagagcagcaccaccagcagcggcgccaacaccgccaccaacagcggcagcagcgtgaccagcgccggcagcggcaccgccgccctgaccggcatgcacaccaccagccacagcgccagcaccgccgtgagcgaggccaagcccggcggcagcctggtgccctgggagatcttcctgatcaccctggtgagcgtggtggccgccgtgggcctgttcgccggcctgttcttctgcgtgagaaacagcctgagcctgagaaacaccttcaacaccgccgtgtaccacccccacggcctgaaccacggcctgggccccggccccggcggcaaccacggcgccccccacagacccagatggagccccaactggttctggagaagacccgtgagcagcatcgccatggagatgagcggcagaaacagcggcccctag

SEQ ID NO: 24090 - DNA, 1251 bp, Artificial Sequence
  derived and/or modified sequence
atgaagatgcagaagggcaacgtgctgctgatgttcggcctgctgctgcacctggaggccgccaccaacagcaacgagaccagcaccagcgccaacaccggcagcagcgtgatcagcagcggcgccagcaccgccaccaacagcggcagcagcgtgaccagcagcggcgtgagcaccgccaccatcagcggcagcagcgtgaccagcaacggcgtgagcatcgtgaccaacagcgagttccacaccaccagcagcggcatcagcaccgccaccaacagcgagttcagcaccgtgagcagcggcatcagcatcgccaccaacagcgagagcagcaccaccagcagcggcgccagcaccgccaccaacagcgagagcagcacccccagcagcggcgccagcaccgccaccaacagcgacagcagcaccaccagcagcggcgccagcaccgccaccaacagcgacagcagcaccaccagcagcgaggccagcaccgccaccaacagcgagagcagcaccaccagcagcggcgccagcaccgccaccaacagcgagagcagcaccaccagcagcggcgccagcaccgccaccaacagcgagagcagcaccaccagcagcggcgccagcaccgccaccaacagcggcagcagcaccaccagcagcggcaccagcaccgccaccaacagcgagagcagcaccgtgagcagcggcgccagcaccgccaccaccagcgagagcagcaccaccagcagcggcgccagcaccgccaccaacagcgagagcagcaccgtgagcagcggcgccagcaccgccaccaacagcgagagcagcaccaccagcagcggcgccaacaccgccaccaacagcggcagcagcgtgaccagcgccggcagcggcaccgccgccctgaccggcatgcacaccaccagccacagcgccagcaccgccgtgagcgaggccaagcccggcggcagcctggtgccctgggagatcttcctgatcaccctggtgagcgtggtggccgccgtgggcctgttcgccggcctgttcttctgcgtgagaaacagcctgagcctgagaaacaccttcaacaccgccgtgtaccacccccacggcctgaaccacggcctgggccccggccccggcggcaaccacggcgccccccacagacccagatggagccccaactggttctggagaagacccgtgagcagcatcgccatggagatgagcggcagaaacagcggcccctag

SEQ ID NO: 24091 - DNA, 1701 bp, Artificial Sequence
  derived and/or modified sequence
atgaaaatgcagaaagggaacgtattgctcatgttcggccttctgctgcaccttgaggctgctacaaacagtaacgaaacttcaacttccgccaatactggctcgagtgtgatcagctcaggggcttccactgccaccaattctggctccagcgtgaccagctccggtgtatctacagctaccattagtggctccagcgttacttctaatggtgtaagcatcgttacgaactccgagttccatactacctcaagcgggatctccacggctacaaattctgaattctcaacagtgagcagtggcatctctatcgcgacaaactctgaaagctctacaacctcaagtggcgctagtactgccactaatagcgaatcctcaacccctagctcgggagccagtacagccaccaattcggattcttcaacgaccagttcgggggcttctactgctacgaattcggattcctcgaccacttccagcgaagcctccaccgcaaccaatagtgagtcttcaaccacaagtagtggagcatctacggcgacgaactccgagtcctccacggtgtcatccagagcttctaccgccactaacagcgagagttccactacatcgtcaggtgcctctactgctactaacagtgagagcagaactacatctaacggggcaggcacggctacaaatagcgagtcgagtactacaagtagtggagcaagcactgctactaacagtgaaagttcaactccatcatccggggccgggacagctaccaatagtgaatctagcacaacatcgtccggcgcaggtaccgccacgaacagcgaaagttccaccgtatccagtggaatttctactgttacaaatagtgagagtagtacacccagttccggggccaacacagctaccaattcggaatcgtccactacgtcatctggtgcaaataccgcaaccaattctgactccagcacgacatctagcggggcaagcacagcaacaaattctgaatcttcaacaaccagtagcggcgcctctaccgcaaccaactcagaatcttctacaacctcttcaggggcttctacggctactaacagcggctcgtctacaaccagcagcgggaccagtaccgccacaaatagtgagtctagtacagtgagcagtggcgcgtccaccgctactaccagtgaaagttccactacatcttcaggggcgagcaccgctaccaattctgaatcatctaccgtctccagcggggcttccacagccaccaattcagagagttctacaaccagtagcggtgctaatacagccaccaactctggaagtagcgtgacctcggctggatcgggtacggcagccctaacgggaatgcatacgacttcccattccgccagtacagccgtgagcgaagccaaacctggtgggtcccttgtaccttgggagatctttctgattaccctggttagcgtggtggcggctgtgggactctttgccggcctattcttttgtgtgcggaattctctgagtctgagaaatacttttaatacagcggtctaccatccacacggccttaatcacgggctgggacccggacctggcggcaaccatggcgcccctcatcggccgcggtggtcaccaaactggttctggagacggcccgtttcctcgatcgccatggagatgagtgggcgtaactccggcccgtag

SEQ ID NO: 24092 - DNA, 1251 bp, Artificial Sequence
  derived and/or modified sequence
atgaagatgcagaaagggaatgtgctgctcatgttcggcctcttgctccatctcgaagctgctaccaattcaaacgagacttctacttcggctaacacaggttcctctgtgatttcaagcggggctagcacagcaactaactcagggtcttccgtgactagctcaggagtcagcactgcaacgatcagtggaagctcagttacttcaaacggtgtttccattgtcacgaatagtgagtttcataccactagtagcggcatctctactgctacaaactccgaatttagcactgtgtcctctggaatctctatcgcgaccaattctgagagctcgacaacgtcatcgggcgccagcactgccacaaacagtgaatcttcaacgccttcctctggtgcctccaccgccactaacagtgactcatcaacaacatcctcaggcgcatccactgccacgaattccgatagttccacaacgtcgtcagaggcttctacagccaccaatagcgagtcatcgaccacgtccagcggtgcttcaactgcaactaattcagagtcgtctaccaccagctccggtgcatcgactgccaccaacagcgaatcatccactacgagttcaggcgcctccaccgctacgaacagtggatcaagtacaacttcctctgggaccagcacggccacaaactccgagtctagcacggtgagctccggggccagcacagctacaacaagcgaatcttccacaacttctagtggcgcttctactgccacgaatagtgagagttccacagtctctagcggtgcatccacggccaccaatagtgaatcctcaacaacatcctcaggtgctaacactgcaacaaattcagggtccagcgtaacttccgcgggttcaggcacggctgcccttaccggcatgcacaccacaagtcactccgcgagcacagccgtcagcgaggcaaagcccgggggaagcctagtgccgtgggaaatctttcttatcacactggtctctgtggtggccgcggtgggactgttcgctgggttgtttttctgcgtccggaactccctctcgctcagaaacacttttaataccgccgtttaccatcctcacggccttaaccacggcctcgggcccggtcccggcggtaatcatggagctccccaccgacctcggtggagtcctaattggttttggagacgacctgtgtcgtcaatagcgatggagatgtccgggcggaactcaggcccatag

SEQ ID NO: 24093 - DNA, 1701 bp, Artificial Sequence
  derived and/or modified sequence
atgaagatgcagaagggaaatgtgctgctgatgtttggcctgctgctgcacctggaggccgccaccaacagcaatgagaccagcaccagcgccaacacaggcagcagcgtcatcagcagcggggccagcacagccaccaacagcggcagctctgtgaccagcagtggagtgtccacagccaccatcagcggcagctctgtgaccagcaatggagtgtccatcgtgaccaacagcgagttccacaccaccagcagcggcatcagcacagccaccaacagcgagttcagcacagtgagcagcggcatcagcatcgccaccaacagcgagagcagcaccaccagcagcggggccagcacagccaccaacagcgagagcagcacccccagcagcggggccagcacagccaccaacagcgacagcagcaccaccagcagcggggccagcacagccaccaacagcgacagcagcaccaccagcagcgaggccagcacagccaccaacagcgagagcagcaccaccagcagcggggccagcacagccaccaacagcgagagcagcacagtgagcagccgggccagcacagccaccaacagcgagagcagcaccaccagcagcggggccagcacagccaccaacagcgagagcaggaccaccagcaatggagctggaacagccaccaacagcgagagcagcaccaccagcagcggggccagcacagccaccaacagcgagagcagcacccccagcagcggggccggcacagccaccaacagcgagagcagcaccaccagcagtggagctggaacagccaccaacagcgagagcagcacagtgagcagcggcatcagcacagtgaccaacagcgagagcagcacccccagcagcggggccaacacagccaccaacagcgagagcagcaccaccagcagcggggccaacacagccaccaacagcgacagcagcaccaccagcagcggggccagcacagccaccaacagcgagagcagcaccaccagcagcggggccagcacagccaccaacagcgagagcagcaccaccagcagcggggccagcacagccaccaacagcggcagcagcaccaccagcagcggcaccagcacagccaccaacagcgagagcagcacagtgtcctctggggccagcacagccaccaccagcgagagcagcaccaccagcagcggggccagcacagccaccaacagcgagagcagcacagtgtcctctggggccagcacagccaccaacagcgagagcagcaccaccagcagcggggccaacacagccaccaacagcggcagctctgtgaccagcgctggcagcggcacagctgccctgaccggcatgcacaccaccagccacagcgccagcacagctgtgtctgaggccaagccaggcggcagcctggtgccctgggagatcttcctgatcaccctggtgtctgtggtggccgctgtgggcctgtttgctggcctcttcttctgtgtgaggaacagcctgagcctgaggaacaccttcaacacagctgtgtaccacccccacggcctgaaccacggcctgggccctggccctgggggcaaccacggggccccccaccggccccgctggagccccaactggttctggaggaggcctgtgagcagcatcgccatggagatgagcggcaggaacagcggcccctag

SEQ ID NO: 24094 - DNA, 1251 bp, Artificial Sequence
  derived and/or modified sequence
atgaagatgcagaagggaaatgtgctgctgatgtttggcctgctgctgcacctggaggccgccaccaacagcaatgagaccagcaccagcgccaacacaggcagcagcgtcatcagcagcggggccagcacagccaccaacagcggcagctctgtgaccagcagtggagtgtccacagccaccatcagcggcagctctgtgaccagcaatggagtgtccatcgtgaccaacagcgagttccacaccaccagcagcggcatcagcacagccaccaacagcgagttcagcacagtgagcagcggcatcagcatcgccaccaacagcgagagcagcaccaccagcagcggggccagcacagccaccaacagcgagagcagcacccccagcagcggggccagcacagccaccaacagcgacagcagcaccaccagcagcggggccagcacagccaccaacagcgacagcagcaccaccagcagcgaggccagcacagccaccaacagcgagagcagcaccaccagcagcggggccagcacagccaccaacagcgagagcagcaccaccagcagcggggccagcacagccaccaacagcgagagcagcaccaccagcagcggggccagcacagccaccaacagcggcagcagcaccaccagcagcggcaccagcacagccaccaacagcgagagcagcacagtgtcctctggggccagcacagccaccaccagcgagagcagcaccaccagcagcggggccagcacagccaccaacagcgagagcagcacagtgtcctctggggccagcacagccaccaacagcgagagcagcaccaccagcagcggggccaacacagccaccaacagcggcagctctgtgaccagcgctggcagcggcacagctgccctgaccggcatgcacaccaccagccacagcgccagcacagctgtgtctgaggccaagccaggcggcagcctggtgccctgggagatcttcctgatcaccctggtgtctgtggtggccgctgtgggcctgtttgctggcctcttcttctgtgtgaggaacagcctgagcctgaggaacaccttcaacacagctgtgtaccacccccacggcctgaaccacggcctgggccctggccctgggggcaaccacggggccccccaccggccccgctggagccccaactggttctggaggaggcctgtgagcagcatcgccatggagatgagcggcaggaacagcggcccctag

SEQ ID NO: 24095 - DNA, 3651 bp, Artificial Sequence
  derived and/or modified sequence
agagaaagaggcaactacattgcctggaggaagcctaaggaacccaggcatccagctgcccacgcctgagtccaagattcttcccaggaacacaaacgtaggagacccacgctcctggaagcaccagcctttatctcttcaccttcaagtcccctttctcaagaatcctctgttctttgccctctaaagtcttggtacatctaggacccaggcatcttgctttccagccacaaagagacagatgaagatgcagaaaggaaatgttctccttatgtttggtctactattgcatttagaagctgcaacaaattccaatgagactagcacctctgccaacactggatccagtgtgatctccagtggagccagcacagccaccaactctgggtccagtgtgacctccagtggggtcagcacagccaccatctcagggtccagcgtgacctccaatggggtcagcatagtcaccaactctgagttccatacaacctccagtgggatcagcacagccaccaactctgagttcagcacagtgtccagtgggatcagcatagccaccaactctgagtccagcacaacctccagtggggccagcacagccaccaactctgagtccagcacaccctccagtggggccagcacagccaccaactctgactccagcacaacctccagtggggctagcacagccaccaactctgactccagcacaacctccagtgaggccagcacagccaccaactctgagtccagcacaacctccagtggggccagcacagccaccaactctgagtccagcacagtgtccagtagggccagcactgccaccaactctgagtccagcacaacctccagtggggccagcacagccaccaactctgagtccagaacgacctccaatggggctggcacagccaccaactctgagtccagcacgacctccagtggggccagcacagccaccaactctgagtccagcacaccctccagtggggccggcacagccaccaactctgagtccagcacgacctccagtggggccggcacagccaccaactctgagtccagcacagtgtccagtgggatcagcacagtcaccaattctgagtccagcacaccctccagtggggccaacacagccaccaactctgagtccagtacgacctccagtggggccaacacagccaccaactctgactccagcacaacctccagtggggccagcacagccaccaactctgagtccagcacgacctccagtggggccagcacagccaccaactctgagtccagcacaacctccagtggggccagcacagccaccaactctgggtccagcacgacctccagtgggaccagcacagccaccaactctgagtccagcacagtgtccagtggggccagcacagccaccacctctgagtccagcacgacctccagtggggccagcacagccaccaactctgagtccagcacagtgtccagtggggccagcactgccaccaattctgagtccagcacaacctccagtggggccaacacagccaccaactctgggtccagtgtgacctctgcaggctctggaacagcagctctgactggaatgcacacaacttcccatagtgcatctactgcagtgagtgaggcgaagcctggtgggtccctggtgccgtgggaaatcttcctcatcaccctggtctcggttgtggcggccgtggggctctttgctgggctcttcttctgtgtgagaaacagcctgtccctgagaaacacctttaacacagctgtctaccaccctcatggcctcaaccatggccttggtccaggccctggagggaatcatggagccccccacaggcccaggtggagtcctaactggttctggaggagaccagtatcctcgatagccatggagatgagcgggaggaacagcgggccctgagcagccccggaagcaagtgccgcattcttcaggaaggaagagacctgggcacccaagacctggtttcctttcattcatcccaggagacccctcccagctttgtttgagatcctgaaaatcttgaagaaggtattcctcacctttcttgcctttaccagacactggaaagagaatactatattgctcatttagctaagaaataaatacatctcatctaacacacacgacaaagagaagctgtgcgtgccccggggtgggtatctagctctgagatgaactcagttataggagaaaacctccatgctggactccatctggcattcaaaatctccacagtaaaatccaaagacctcattcttatctgtgtgtctgcattttctaatcctttttgccccaggcaaggtccctgtatctctgagacaccccgattggctggagaattgacttgggagagataaggagggagggcgggtgccagcatgctatgggctcctgcgtgaggcctgtggtacacagagattaggttgtgatacatgaagagccaagagcaggatgaggtggaggcgttacaactacctgctctgtgtgtggggggggaggggggaggggggtacgcatattcacttgaagtcgaggttcccagggcatttccatgtgctccaggcctgactacccatcagggtggaggagctggtgacactcatctccctgagtgctccctggtttcccaagggaaagactttctggcctgctgaggtcgaatcttccaagaggctcttgcaaagacccgagattctcataaatccccgcccagaagagctgcacgtatccctttcatgagtccagggaagagggtcctccaggtcttggaagacagaggggagctgctttagaggctaagttgctttgagcccacaaggtaatggagggctcctacttgggacagagccctcagcagagaattagcagtctgttggtgggttcaccccaactcacagcagtagaaactgctccatcttccaccacttattgggtttctccagtgtcagcaaaccaaagaattggatcttaccaatgcggctataggaaaacagcctgttgcatggtaagagtgataccatcttgaagtgaaaccaccacaatggccattttttttttagatggagttttgcagtggtgcaatcatagctcattgcagccttcaattcctgggctcaggcaatcctcctgcctcagcctcctgagtagctgggactacagtttcgtgtgccaccatgcctggctaatttttagaattttttgtagggacagggcctcactctgttgcacaagctggtcttgaactcctggcctccttgaactcctcctgccttggcctcccaaaatgctgagattacaggtgtgagccactgcacctcgccagatgtccaatgtctgactcctgcataccaaggtgttctgtatcaagggctttaaaacaatgcctgtagcgtaattaacctctcacaaagatgcttatctaacctccccagcagtcatgggtttcagcaagaaagtctgtgatgtgaccagttgcacatgttttcccctaaaagcttactctagaaaggatattttttggagagggagtgtgggaatccaccatcttgtggccacctcagacatcacttctctttggaagactccattaaatatttctctgtgagaaa

SEQ ID NO: 24096 - DNA, 3206 bp, Artificial Sequence
  derived and/or modified sequence
ctttcacaacagagaaagaggcaactacattgcctggaggaagcctaaggaacccaggcatccagctgcccacgcctgagtccaagattcttcccaggaacacaaacgtaggagacccacgctcctggaagcaccagcctttatctcttcaccttcaagtcccctttctcaagaatcctctgttctttgccctctaaagtcttggtacatctaggacccaggcatcttgctttccagccacaaagagacagatgaagatgcagaaaggaaatgttctccttatgtttggtctactattgcatttagaagctgcaacaaattccaatgagactagcacctctgccaacactggatccagtgtgatctccagtggagccagcacagccaccaactctgggtccagtgtgacctccagtggggtcagcacagccaccatctcagggtccagcgtgacctccaatggggtcagcatagtcaccaactctgagttccatacaacctccagtgggatcagcacagccaccaactctgagttcagcacagtgtccagtgggatcagcatagccaccaactctgagtccagcacaacctccagtggggccagcacagccaccaactctgagtccagcacaccctccagtggggccagcacagccaccaactctgactccagcacaacctccagtggggctagcacagccaccaactctgactccagcacaacctccagtgaggccagcacagccaccaactctgagtccagcacaacctccagtggggccagcacagccaccaactctgagtccagcacgacctccagtggggccagcacagccaccaactctgagtccagcacaacctccagtggggccagcacagccaccaactctgggtccagcacgacctccagtgggaccagcacagccaccaactctgagtccagcacagtgtccagtggggccagcacagccaccacctctgagtccagcacgacctccagtggggccagcacagccaccaactctgagtccagcacagtgtccagtggggccagcactgccaccaattctgagtccagcacaacctccagtggggccaacacagccaccaactctgggtccagtgtgacctctgcaggctctggaacagcagctctgactggaatgcacacaacttcccatagtgcatctactgcagtgagtgaggcgaagcctggtgggtccctggtgccgtgggaaatcttcctcatcaccctggtctcggttgtggcggccgtggggctctttgctgggctcttcttctgtgtgagaaacagcctgtccctgagaaacacctttaacacagctgtctaccaccctcatggcctcaaccatggccttggtccaggccctggagggaatcatggagccccccacaggcccaggtggagtcctaactggttctggaggagaccagtatcctcgatagccatggagatgagcgggaggaacagcgggccctgagcagccccggaagcaagtgccgcattcttcaggaaggaagagacctgggcacccaagacctggtttcctttcattcatcccaggagacccctcccagctttgtttgagatcctgaaaatcttgaagaaggtattcctcacctttcttgcctttaccagacactggaaagagaatactatattgctcatttagctaagaaataaatacatctcatctaacacacacgacaaagagaagctgtgcgtgccccggggtgggtatctagctctgagatgaactcagttataggagaaaacctccatgctggactccatctggcattcaaaatctccacagtaaaatccaaagacctcattcttatctgtgtgtctgcattttctaatcctttttgccccaggcaaggtccctgtatctctgagacaccccgattggctggagaattgacttgggagagataaggagggagggcgggtgccagcatgctatgggctcctgcgtgaggcctgtggtacacagagattaggttgtgatacatgaagagccaagagcaggatgaggtggaggcgttacaactacctgctctgtgtgtggggggggaggggggaggggggtacgcatattcacttgaagtcgaggttcccagggcatttccatgtgctccaggcctgactacccatcagggtggaggagctggtgacactcatctccctgagtgctccctggtttcccaagggaaagactttctggcctgctgaggtcgaatcttccaagaggctcttgcaaagacccgagattctcataaatccccgcccagaagagctgcacgtatccctttcatgagtccagggaagagggtcctccaggtcttggaagacagaggggagctgctttagaggctaagttgctttgagcccacaaggtaatggagggctcctacttgggacagagccctcagcagagaattagcagtctgttggtgggttcaccccaactcacagcagtagaaactgctccatcttccaccacttattgggtttctccagtgtcagcaaaccaaagaattggatcttaccaatgcggctataggaaaacagcctgttgcatggtaagagtgataccatcttgaagtgaaaccaccacaatggccattttttttttagatggagttttgcagtggtgcaatcatagctcattgcagccttcaattcctgggctcaggcaatcctcctgcctcagcctcctgagtagctgggactacagtttcgtgtgccaccatgcctggctaatttttagaattttttgtagggacagggcctcactctgttgcacaagctggtcttgaactcctggcctccttgaactcctcctgccttggcctcccaaaatgctgagattacaggtgtgagccactgcacctcgccagatgtccaatgtctgactcctgcataccaaggtgttctgtatcaagggctttaaaacaatgcctgtagcgtaattaacctctcacaaagatgcttatctaacctccccagcagtcatgggtttcagcaagaaagtctgtgatgtgaccagttgcacatgttttcccctaaaagcttactctagaaaggatattttttggagagggagtgtgggaatccaccatcttgtggccacctcagacatcacttctctttggaagactccattaaatatttctctgtg

SEQ ID NO: 24097 - DNA, 1701 bp, Artificial Sequence
  derived and/or modified sequence
atgaagatgcagaagggcaacgtgctgctgatgttcggcctgctgctacacttggaggctgccaccaactctaatgagacaagcacgtcggctaacactgggtcttcggtgatctcaagcggagcctctactgcaaccaattcgggcagctcagttacatccagcggagtgtccacggcgaccatctctgggagcagcgttaccagtaacggcgtgagcattgtgacaaattcggaattccacaccacaagttctggcatcagcaccgccaccaattctgagtttagtactgtgagttcaggcatatcaattgcaaccaatagtgaaagtagcaccacttcgtcgggcgcaagcaccgccacaaactcggaatcttctaccccatcaagcggagccagcactgccaccaactctgattcatccacgacctcctccggagcttctaccgcaactaactcagacagcagtacaacttcaagtgaagccagcaccgcaacaaactccgaatcttctacgactagttccggggcctctaccgcgactaacagtgaaagttctactgtgagcagtcgtgcatctacggccactaacagtgagtcctccactacgtcttcaggagcttccacagctaccaatagcgaaagcagaaccaccagtaatggggcagggaccgccaccaattcagaatccagcacaacttctagtggcgcttcaactgcgacaaactccgagagtagtacgccctcaagcggcgccggtactgcaaccaacagtgaatcctctacaacatctagtggagctggaaccgctacgaactccgagagctcaacagtttctagcgggatttcaaccgtaactaacagcgagtcctccaccccatctagtggtgctaacacagctactaacagcgagtccagtaccacatcgagcggcgccaacacagcaacgaactccgatagctcgacaacctcgtctggtgcttcaactgccacaaactccgagagctccactacctcctcaggcgcaagtacagccactaactcagagagctccactacgtcctcaggcgcctccaccgctaccaattccggaagctccacaacttcttctggaacatcaacagcgaccaacagcgagagttctacagtcagcagcggggcttccactgctaccacatcagagtcttctacaacatcaagcggagctagtactgccaccaatagcgagtcgtcgactgtgtcatccggggcatccaccgctactaacagtgaaagctccactacctcttcgggcgctaataccgccactaattctgggagcagcgtaacatccgcggggtcaggaacagcagccttaacaggcatgcacaccacctcccattctgcgtcaacagcggtgagcgaggcaaagcctggcggctcccttgttccttgggagatattcctcattaccttggttagcgtggtagccgccgtcggcctgtttgccggcttgttcttctgtgttcgaaattccctgtctctgcgcaacacattcaataccgcagtctaccacccacacgggttgaatcacggtctgggccccggtcctgggggtaatcacggcgctcctcacagacctaggtggtctcccaattggttctggcggcgccctgtcagcagcatagcaatggaaatgtccgggagaaacagtgggccctag

SEQ ID NO: 24098 - DNA, 1251 bp, Artificial Sequence
  derived and/or modified sequence
atgaagatgcagaagggcaacgtgctgctgatgttcggcctgctgctgcatctagaggctgctaccaatagcaacgagacctcgacatctgcaaatacgggctcctccgtgatctcaagtggcgcaagcaccgctacaaattctggatcctcggttacttccagtggcgtgtcaactgctaccatctccggctctagcgtgacgtcaaacggcgtgtccattgtgacaaactctgagtttcacacgacctcaagcgggatctccaccgctacaaatagtgaattctctacggtctcgtcgggcatttcaatagccaccaacagcgagtcttccaccacgtccagtggtgcatccacagccaccaacagcgagagctctactccctctagcggagccagcactgctactaacagcgattcctctactacaagctctggagcatccaccgcgacaaatagcgatagctctacaacgagtagcgaggcttccacagcaaccaattcggagtcttccactacttcgtctggcgctagtactgctaccaactcggagagcagcacgacctcctccggagcctccaccgctacgaatagcgagagcagcaccactagttcaggggccagcaccgccactaactccggatcttcaaccacatcctccggtacatctacggcaaccaacagcgagtcatctactgtcagctctggggcgtccactgcgactactagcgagtcatccactacatcctctggagctagcaccgctactaactccgagagcagtacggttagcagcggggcgtctaccgctacaaacagtgagagctccacgacaagcagtggggctaacacagcaacaaactccgggagcagcgtaaccagtgccggctcaggtacagctgccttgaccgggatgcacacaacctcacacagcgcctcaaccgcagtgtcggaagctaagcctggagggtctttagttccctgggaaattttcctcatcaccctggtgtccgtagttgctgccgtgggcctgttcgccggccttttcttttgtgtgcgcaattccttgagccttaggaacacatttaacaccgctgtgtaccacccccatggtttgaatcatggcctcggacctgggccaggagggaaccacggtgcaccgcatagacccagatggtcacctaattggttttggcgccggcccgtgtcctcgattgccatggaaatgtctggccgcaacagcggaccttag

SEQ ID NO: 24099 - DNA, 1701 bp, Artificial Sequence
  derived and/or modified sequence
atgaagatgcagaaaggaaatgtgctcctgatgttcggactgctgctccacctcgaggccgctaccaacagtaatgagacctctacgagcgccaataccggatcctcagtcatttcctccggcgcatctaccgctaccaattcgggaagctctgtgaccagctcaggggtttcaacagcaacaatttctggaagttcagtgacgtccaacggagtctcgattgtgactaactcagagtttcacaccacatcgtcaggaattagcacagctactaactcggaattttccaccgtgtcatccggtatctcaattgccactaactcagagtcctccacaacgtcgagtggggcatctacagctaccaactctgagtcttccaccccttccagcggcgcttccaccgccacaaattccgattccagtactacatcctcaggtgctagcacagcgacaaacagcgatagtagtacgacaagtagcgaggctagtaccgctactaacagcgagtcatctacaaccagctccggtgccagtaccgcaaccaactctgaatcgtcaaccgtgagcagtcgggcaagcactgcaaccaatagcgagtcttcaactactagcagtggggcttcaaccgctaccaatagcgaatctagaaccacatcaaacggcgcagggaccgcaacaaattccgagagttctaccaccagctcaggggcttctactgctacaaacagtgagagcagcaccccttccagcggtgctggtacagcgaccaactccgaaagcagtactacgtctagtggcgctggtacagccaccaattctgagtcgagtactgtatcttcgggaattagtacggtcacgaacagcgagtctagcacaccgagctcaggggcaaataccgccacaaattcagaaagcagcaccacatccagcggggctaacaccgctacaaattccgatagtagcacaaccagtagcggggcttccacagccacgaacagcgaaagttccacgacgagctctggtgctagcacagccacaaatagcgaatccagcaccaccagttcgggggcttccacagcaactaattccggctcaagcacaacaagttccgggaccagcacagccaccaactcagagtcctccactgtctcaagcggcgcaagcactgcaaccacctcagaatcaagcaccacatcaagcggcgcttcaaccgccactaactccgagagttcaaccgtgtctagcggggcttcgactgcaacgaactctgagtccagcactaccagcagcggagccaatacagctactaactccggtagttctgtgaccagtgctggctccggtacagccgctttgaccggtatgcacactacatctcacagcgcctccaccgctgttagtgaggctaagcctggcggttctttggtcccatgggagattttccttattactctggtgtcagtagtcgcagcagttggactgtttgcaggactgtttttctgcgtgcgcaactccctgagccttcgcaacacatttaataccgctgtttaccaccctcatggactgaatcatgggctaggaccaggcccagggggaaatcatggcgcaccccatcgacctagatggtctccaaattggttttggcgccgtcccgtgagctcgatcgcaatggagatgtccggtcggaactcaggcccttag

SEQ ID NO: 24100 - DNA, 1251 bp, Artificial Sequence
  derived and/or modified sequence
atgaaaatgcagaagggcaatgtcctgctgatgttcggacttttactacatctcgaggccgctacaaacagtaacgaaaccagcacgagcgccaacaccggctcttcagtgatatctagtggggcatctacagccacaaactccgggtctagtgtaacctccagcggcgtgagtactgccacaatcagcggaagctcggtaacctccaatggcgtatccatcgtgactaatagtgaattccataccacttctagcgggatctccactgccaccaactcagagttctccacggtttcatctggcatatccatagcgactaattcagaatcgagcaccacgagcagcggagccagtacggccaccaatagtgaatccagtactccatcttcaggtgccagtaccgccacaaacagcgactcttcaaccaccagttcaggggcaagtacggcgacaaactctgattctagtaccacttcctccgaagcttcaactgccaccaatagcgaatcatctactactagttccggtgcaagtacagctacgaacagtgagtcatcgactacctccagtggtgctagcactgcaaccaactcagagagtagcactacctcatctggcgcaagcacggccactaacagcggaagcagtaccacctccagcggaactagcactgccacaaactctgaaagtagtacggtgagctcaggcgcaagtactgccactacaagcgaatcatcgaccacctcctcaggcgcttctacagccaccaacagcgagtcgagtaccgtgagcagcggcgcatccaccgcaaccaacagcgagtctagtaccacatcctcaggcgctaataccgcaacgaacagcggctcctcagtgaccagcgcgggatcaggcacagcagctctgacaggtatgcacaccacatcccactcagcaagcactgccgtgagcgaagccaagcccggtggttctctggtgccctgggagattttcctcataaccctggtgagtgtggtggcagccgtgggactgttcgctgggttgttcttctgcgtgagaaattccctgagccttcgaaatacgtttaatacggccgtgtaccatccacatggcctaaatcacgggctgggtcccggacctggaggtaaccacggcgctccgcaccggcctcgatggtcccctaattggttctggcgcaggcctgtgagtagtatcgcaatggaaatgtccggacgcaactcgggcccttag

SEQ ID NO: 24101 - DNA, 1701 bp, Artificial Sequence
  derived and/or modified sequence
atgaagatgcagaagggcaacgtgctgctgatgttcggcctgctgctgcacctggaggccgccaccaacagcaacgagaccagcaccagcgccaacaccggcagcagcgtgatcagcagcggcgccagcaccgccaccaacagcggcagcagcgtgaccagcagcggcgtgagcaccgccaccatcagcggcagcagcgtgaccagcaacggcgtgagcatcgtgaccaacagcgagttccacaccaccagcagcggcatcagcaccgccaccaacagcgagttcagcaccgccagcagcggcatcagcatcgccaccaacagcgagagcagcaccaccagcagcggcgccagcaccgccaccaacagcgagagcagcacccccagcagcggcgccagcaccgccaccaacagcgacagcagcaccaccagcagcggcgccagcaccgccaccaacagcgacagcagcaccaccagcagcgaggccagcaccgccaccaacagcgagagcagcaccaccagcagcggcgccagcaccgccaccaacagcgagagcagcaccgtgagcagcagagccagcaccgccaccaacagcgagagcagcaccaccagcagcggcgccagcaccgccaccaacagcgagagcagaaccaccagcaacggcgccggcaccgccaccaacagcgagagcagcaccaccagcagcggcgccagcaccgccaccaacagcgagagcagcacccccagcagcggcgccggcaccgccaccaacagcgagagcagcaccaccagcagcggcgccggcaccgccaccaacagcgagagcagcaccgtgagcagcggcatcagcaccgtgaccaacagcgagagcagcacccccagcagcggcgccaacaccgccaccaacagcgagagcagcaccaccagcagcggcgccaacaccgccaccaacagcgacagcagcaccaccagcagcggcgccagcaccgccaccaacagcgagagcagcaccaccagcagcggcgccagcaccgccaccaacagcgagagcagcaccaccagcagcggcgccagcaccgccaccaacagcggcagcagcaccaccagcagcggcaccagcaccgccaccaacagcgagagcagcaccgtgagcagcggcgccagcaccgccaccaccagcgagagcagcaccaccagcagcggcgccagcaccgccaccaacagcgagagcagcaccgtgagcagcggcgccagcaccgccaccaacagcgagagcagcaccaccagcagcggcgccaacaccgccaccaacagcggcagcagcgtgaccagcgccggcagcggcaccgccgccctgaccggcatgcacaccaccagccacagcgccagcaccgccgtgagcgaggccaagcccggcggcagcctggtgccctgggagatcttcctgatcaccctggtgagcgtggtggccgccgtgggcctgttcgccggcctgttcttctgcgtgagaaacagcctgagcctgagaaacaccttcaacaccgccgtgtaccacccccacggcctgaaccacggcctgggccccggccccggcggcaaccacggcgccccccacagacccagatggagccccaactggttctggagaagacccgtgagcagcatcgccatggagatgagcggcagaaacagcggcccctag

SEQ ID NO: 24102 - DNA, 1251 bp, Artificial Sequence
  derived and/or modified sequence
atgaagatgcagaagggcaacgtgctgctgatgttcggcctgctgctgcacctggaggccgccaccaacagcaacgagaccagcaccagcgccaacaccggcagcagcgtgatcagcagcggcgccagcaccgccaccaacagcggcagcagcgtgaccagcagcggcgtgagcaccgccaccatcagcggcagcagcgtgaccagcaacggcgtgagcatcgtgaccaacagcgagttccacaccaccagcagcggcatcagcaccgccaccaacagcgagttcagcaccgccagcagcggcatcagcatcgccaccaacagcgagagcagcaccaccagcagcggcgccagcaccgccaccaacagcgagagcagcacccccagcagcggcgccagcaccgccaccaacagcgacagcagcaccaccagcagcggcgccagcaccgccaccaacagcgacagcagcaccaccagcagcgaggccagcaccgccaccaacagcgagagcagcaccaccagcagcggcgccagcaccgccaccaacagcgagagcagcaccaccagcagcggcgccagcaccgccaccaacagcgagagcagcaccaccagcagcggcgccagcaccgccaccaacagcggcagcagcaccaccagcagcggcaccagcaccgccaccaacagcgagagcagcaccgtgagcagcggcgccagcaccgccaccaccagcgagagcagcaccaccagcagcggcgccagcaccgccaccaacagcgagagcagcaccgtgagcagcggcgccagcaccgccaccaacagcgagagcagcaccaccagcagcggcgccaacaccgccaccaacagcggcagcagcgtgaccagcgccggcagcggcaccgccgccctgaccggcatgcacaccaccagccacagcgccagcaccgccgtgagcgaggccaagcccggcggcagcctggtgccctgggagatcttcctgatcaccctggtgagcgtggtggccgccgtgggcctgttcgccggcctgttcttctgcgtgagaaacagcctgagcctgagaaacaccttcaacaccgccgtgtaccacccccacggcctgaaccacggcctgggccccggccccggcggcaaccacggcgccccccacagacccagatggagccccaactggttctggagaagacccgtgagcagcatcgccatggagatgagcggcagaaacagcggcccctag

SEQ ID NO: 24103 - DNA, 1701 bp, Artificial Sequence
  derived and/or modified sequence
atgaagatgcagaagggcaacgtgctgctgatgttcggcctgctgctgcacctggaggccgccaccaacagcaacgagaccagcaccagcgccaacaccggcagcagcgtgatcagcagcggcgccagcaccgccaccaacagcggcagcagcgtgaccagcagcggcgtgagcaccgccaccatcagcggcagcagcgtgaccagcaacggcgtgagcatcgtgaccaacagcgagttccacaccaccagcagcggcatcagcaccgccaccaacagcgagttcagcaccgtgagcagcggcatcagcatcgccaccaacagcgagagcagcaccaccagcagcggcgccagcaccgccaccaacagcgagagcagcacccccagcagcggcgccagcaccgccaccaacagcgacagcagcaccaccagcagcggcgccagcaccgccaccaacagcgacagcagcaccaccagcagcgaggccagcaccgccaccaacagcgagagcagcaccaccagcagcggcgccagcaccgtgaccaacagcgagagcagcaccgtgagcagcagagccagcaccgccaccaacagcgagagcagcaccaccagcagcggcgccagcaccgccaccaacagcgagagcagaaccaccagcaacggcgccggcaccgccaccaacagcgagagcagcaccaccagcagcggcgccagcaccgccaccaacagcgagagcagcacccccagcagcggcgccggcaccgccaccaacagcgagagcagcaccaccagcagcggcgccggcaccgccaccaacagcgagagcagcaccgtgagcagcggcatcagcaccgtgaccaacagcgagagcagcacccccagcagcggcgccaacaccgccaccaacagcgagagcagcaccaccagcagcggcgccaacaccgccaccaacagcgacagcagcaccaccagcagcggcgccagcaccgccaccaacagcgagagcagcaccaccagcagcggcgccagcaccgccaccaacagcgagagcagcaccaccagcagcggcgccagcaccgccaccaacagcggcagcagcaccaccagcagcggcaccagcaccgccaccaacagcgagagcagcaccgtgagcagcggcgccagcaccgccaccaccagcgagagcagcaccaccagcagcggcgccagcaccgccaccaacagcgagagcagcaccgtgagcagcggcgccagcaccgccaccaacagcgagagcagcaccaccagcagcggcgccaacaccgccaccaacagcggcagcagcgtgaccagcgccggcagcggcaccgccgccctgaccggcatgcacaccaccagccacagcgccagcaccgccgtgagcgaggccaagcccggcggcagcctggtgccctgggagatcttcctgatcaccctggtgagcgtggtggccgccgtgggcctgttcgccggcctgttcttctgcgtgagaaacagcctgagcctgagaaacaccttcaacaccgccgtgtaccacccccacggcctgaaccacggcctgggccccggccccggcggcaaccacggcgccccccacagacccagatggagccccaactggttctggagaagacccgtgagcagcatcgccatggagatgagcggcagaaacagcggcccctag

SEQ ID NO: 24104 - DNA, 1881 bp, Artificial Sequence
  derived and/or modified sequence
atgaagatgcagaagggcaacgtgctgctgatgttcggcctgctgctgcacctggaggccgccaccaacagcaacgagaccagcaccagcgccaacaccggcagcagcgtgatcagcagcggcgccagcaccgccaccaacagcggcagcagcgtgaccagcagcggcgtgagcaccgccaccatcagcggcagcagcgtgaccagcaacggcgtgagcatcgtgaccaacagcgagttccacaccaccagcagcggcatcagcaccgccaccaacagcgagttcagcaccgccagcagcggcatcagcatcgccaccaacagcgagagcagcaccaccagcagcggcgccagcaccgccaccaacagcgagagcagcacccccagcagcggcgccagcaccgtgaccaacagcggcagcagcgtgaccagcagcggcgccagcaccgccaccaacagcgagagcagcaccgtgagcagcagagccagcaccgccaccaacagcgagagcagcaccctgagcagcggcgccagcaccgccaccaacagcgacagcagcaccaccagcagcggcgccagcaccgccaccaacagcgagagcagcaccaccagcagcggcgccagcaccgccaccaacagcgagagcagcaccgtgagcagcagagccagcaccgccaccaacagcgagagcagcaccaccagcagcggcgccagcaccgccaccaacagcgagagcagaaccaccagcaacggcgccggcaccgccaccaacagcgagagcagcaccaccagcagcggcgccagcaccgccaccaacagcgacagcagcaccgtgagcagcggcgccagcaccgccaccaacagcgagagcagcaccaccagcagcggcgccagcaccgccaccaacagcgacagcagcaccaccagcagcggcgccggcaccgccaccaacagcgagagcagcaccaccagcagcggcgccagcaccgccaccaacagcgagagcagcaccaccagcagcggcgccagcaccgccaccaacagcgacagcagcaccaccagcagcggcgccggcaccgccaccaacagcgagagcagcaccgtgagcagcggcatcagcaccgtgaccaacagcgagagcagcacccccagcagcggcgccaacaccgccaccaacagcgagagcagcaccaccagcagcggcgccaacaccgccaccaacagcgagagcagcaccgtgagcagcggcgccagcaccgccaccaacagcgagagcagcaccaccagcagcggcgtgagcaccgccaccaacagcgagagcagcaccaccagcagcggcgccagcaccgccaccaacagcgacagcagcaccaccagcagcgaggccagcaccgccaccaacagcgagagcagcaccgtgagcagcggcatcagcaccgtgaccaacagcgagagcagcaccaccagcagcggcgccaacaccgccaccaacagcggcagcagcgtgaccagcgccggcagcggcaccgccgccctgaccggcatgcacaccaccagccacagcgccagcaccgccgtgagcgaggccaagcccggcggcagcctggtgccctgggagatcttcctgatcaccctggtgagcgtggtggccgccgtgggcctgttcgccggcctgttcttctgcgtgagaaacagcctgagcctgagaaacaccttcaacaccgccgtgtaccacccccacggcctgaaccacggcctgggccccggccccggcggcaaccacggcgccccccacagacccagatggagccccaactggttctggagaagacccgtgagcagcatcgccatggagatgagcggcagaaacagcggcccctag

SEQ ID NO: 24105 - DNA, 1791 bp, Artificial Sequence
  derived and/or modified sequence
atgaagatgcagaagggcaacgtgctgctgatgttcggcctgctgctgcacctggaggccgccaccaacagcaacgagaccagcaccagcgccaacaccggcagcagcgtgatcagcagcggcgccagcaccgccaccaacagcggcagcagcgtgaccagcagcggcgtgagcaccgccaccatcagcggcagcagcgtgaccagcaacggcgtgagcatcgtgaccaacagcgagttccacaccaccagcagcggcatcagcaccgccaccaacagcgagttcagcaccgccagcagcggcatcagcatcgccaccaacagcgagagcagcaccaccagcagcggcgccagcaccgccaccaacagcgagagcagcacccccagcagcggcgccagcaccgtgaccaacagcggcagcagcgtgaccagcagcggcgccagcaccgccaccaacagcgagagcagcaccgtgagcagcagagccagcaccgccaccaacagcgagagcagcaccctgagcagcggcgccagcaccgccaccaacagcgacagcagcaccaccagcagcggcgccagcaccgccaccaacagcgagagcagcaccaccagcagcggcgccagcaccgccaccaacagcgagagcagcaccgtgagcagcagagccagcaccgccaccaacagcgagagcagcaccaccagcagcggcgccagcaccgccaccaacagcgagagcagaaccaccagcaacggcgccggcaccgccaccaacagcgagagcagcaccaccagcagcggcgccagcaccgccaccaacagcgacagcagcaccgtgagcagcggcgccagcaccgccaccaacagcgagagcagcaccaccagcagcggcgccagcaccgccaccaacagcgagagcagcaccaccagcagcggcgccagcaccgccaccaacagcgacagcagcaccaccagcagcggcgccggcaccgccaccaacagcgagagcagcaccgtgagcagcggcatcagcaccgtgaccaacagcgagagcagcacccccagcagcggcgccaacaccgccaccaacagcgagagcagcaccaccagcagcggcgccaacaccgccaccaacagcgagagcagcaccgtgagcagcggcgccagcaccgccaccaacagcgagagcagcaccaccagcagcggcgtgagcaccgccaccaacagcgagagcagcaccaccagcagcggcgccagcaccgccaccaacagcgacagcagcaccaccagcagcgaggccagcaccgccaccaacagcgagagcagcaccgtgagcagcggcatcagcaccgtgaccaacagcgagagcagcaccaccagcagcggcgccaacaccgccaccaacagcggcagcagcgtgaccagcgccggcagcggcaccgccgccctgaccggcatgcacaccaccagccacagcgccagcaccgccgtgagcgaggccaagcccggcggcagcctggtgccctgggagatcttcctgatcaccctggtgagcgtggtggccgccgtgggcctgttcgccggcctgttcttctgcgtgagaaacagcctgagcctgagaaacaccttcaacaccgccgtgtaccacccccacggcctgaaccacggcctgggccccggccccggcggcaaccacggcgccccccacagacccagatggagccccaactggttctggagaagacccgtgagcagcatcgccatggagatgagcggcagaaacagcggcccctag

SEQ ID NO: 24106 - DNA, 1701 bp, Artificial Sequence
  derived and/or modified sequence
atgaagatgcagaagggcaacgtgctgctgatgttcggcctgctgctgcacctggaggccgccaccaacagcaacgagaccagcaccagcgccaacaccggcagcagcgtgatcagcagcggcgccagcaccgccaccaacagcggcagcagcgtgaccagcagcggcgtgagcaccgccaccatcagcggcagcagcgtgaccagcaacggcgtgagcatcgtgaccaacagcgagttccacaccaccagcagcggcatcagcaccgccaccaacagcgagttcagcaccgccagcagcggcatcagcatcgccaccaacagcgagagcagcaccaccagcagcggcgccagcaccgccaccaacagcgagagcagcacccccagcagcggcgccagcaccgccaccaacagcgagagcagcaccctgagcagcggcgccagcaccgccaccaacagcgacagcagcaccaccagcagcggcgccagcaccgccaccaacagcgagagcagcaccaccagcagcggcgccagcaccgccaccaacagcgagagcagcaccgtgagcagcagagccagcaccgccaccaacagcgagagcagcaccaccagcagcggcgccagcaccgccaccaacagcgagagcagaaccaccagcaacggcgccggcaccgccaccaacagcgagagcagcaccaccagcagcggcgccagcaccgccaccaacagcgacagcagcaccgtgagcagcggcgccagcaccgccaccaacagcgagagcagcaccaccagcagcggcgccagcaccgccaccaacagcgagagcagcaccaccagcagcggcgccagcaccgccaccaacagcgacagcagcaccaccagcagcggcgccggcaccgccaccaacagcgagagcagcaccgtgagcagcggcatcagcaccgtgaccaacagcgagagcagcacccccagcagcggcgccaacaccgccaccaacagcgagagcagcaccaccagcagcggcgccaacaccgccaccaacagcgagagcagcaccgtgagcagcggcgccagcaccgccaccaacagcgagagcagcaccaccagcagcggcgtgagcaccgccaccaacagcgagagcagcaccaccagcagcggcgccagcaccgccaccaacagcgacagcagcaccaccagcagcgaggccagcaccgccaccaacagcgagagcagcaccgtgagcagcggcatcagcaccgtgaccaacagcgagagcagcaccaccagcagcggcgccaacaccgccaccaacagcggcagcagcgtgaccagcgccggcagcggcaccgccgccctgaccggcatgcacaccaccagccacagcgccagcaccgccgtgagcgaggccaagcccggcggcagcctggtgccctgggagatcttcctgatcaccctggtgagcgtggtggccgccgtgggcctgttcgccggcctgttcttctgcgtgagaaacagcctgagcctgagaaacaccttcaacaccgccgtgtaccacccccacggcctgaaccacggcctgggccccggccccggcggcaaccacggcgccccccacagacccagatggagccccaactggttctggagaagacccgtgagcagcatcgccatggagatgagcggcagaaacagcggcccctag

SEQ ID NO: 24107 - DNA, 1701 bp, Artificial Sequence
  derived and/or modified sequence
atgaagatgcagaagggcaacgtgctgctgatgttcggcctgctgctgcacctggaggccgccaccaacagcaacgagaccagcaccagcgccaacaccggcagcagcgtgatcagcagcggcgccagcaccgccaccaacagcggcagcagcgtgaccagcagcggcgtgagcaccgccaccatcagcggcagcagcgtgaccagcaacggcgtgagcatcgtgaccaacagcgagttccacaccaccagcagcggcatcagcaccgccaccaacagcgagttcagcaccgccagcagcggcatcagcatcgccaccaacagcgagagcagcaccaccagcagcggcgccagcaccgccaccaacagcgagagcagcacccccagcagcggcgccagcaccgccaccaacagcgagagcagcaccctgagcagcggcgccagcaccgccaccaacagcgacagcagcaccaccagcagcggcgccagcaccgccaccaacagcgagagcagcaccaccagcagcggcgccagcaccgccaccaacagcgagagcagcaccgtgagcagcagagccagcaccgccaccaacagcgagagcagcaccaccagcagcggcgccagcaccgccaccaacagcgagagcagaaccaccagcaacggcgccggcaccgccaccaacagcgagagcagcaccaccagcagcggcgccagcaccgccaccaacagcgacagcagcaccaccagcagcggcgccggcaccgccaccaacagcgagagcagcaccaccagcagcggcgccagcaccgccaccaacagcgagagcagcaccaccagcagcggcgccagcaccgccaccaacagcgacagcagcaccaccagcagcggcgccggcaccgccaccaacagcgagagcagcaccgtgagcagcggcatcagcaccgtgaccaacagcgagagcagcacccccagcagcggcgccaacaccgccaccaacagcgagagcagcaccaccagcagcggcgccaacaccgccaccaacagcgagagcagcaccgtgagcagcggcgccagcaccgccaccaacagcgagagcagcaccaccagcagcggcgtgagcaccgccaccaacagcgagagcagcaccaccagcagcggcgccagcaccgccaccaacagcgacagcagcaccaccagcagcgaggccagcaccgccaccaacagcgagagcagcaccgtgagcagcggcatcagcaccgtgaccaacagcgagagcagcaccaccagcagcggcgccaacaccgccaccaacagcggcagcagcgtgaccagcgccggcagcggcaccgccgccctgaccggcatgcacaccaccagccacagcgccagcaccgccgtgagcgaggccaagcccggcggcagcctggtgccctgggagatcttcctgatcaccctggtgagcgtggtggccgccgtgggcctgttcgccggcctgttcttctgcgtgagaaacagcctgagcctgagaaacaccttcaacaccgccgtgtaccacccccacggcctgaaccacggcctgggccccggccccggcggcaaccacggcgccccccacagacccagatggagccccaactggttctggagaagacccgtgagcagcatcgccatggagatgagcggcagaaacagcggcccctag

SEQ ID NO: 24108 - DNA, 1701 bp, Artificial Sequence
  derived and/or modified sequence
atgaaaatgcagaaaggaaacgtgttgcttatgtttggccttctgctgcatttagaggcagccaccaattctaacgaaactagcacatcggcaaacactggttcatccgttattagttctggcgctagcactgccacaaattctgggtcctccgttacttcctccggcgtctcaactgccactatttcaggctccagtgtcacttcgaacggagtgagcatcgttacgaactctgaattccacaccacttcctcaggcatctcaacagccaccaacagcgagtttagcacggccagtagcggcattagcattgctactaactcagagtcgtcaaccacttctagtggtgccagcaccgccacgaatagcgaaagtagtacccctagttctggcgcatcaactgctacgaactcagacagtagcactacaagcagtggcgcgtcgacagccaccaacagcgacagctctaccacttcgagcgaggcctccaccgccactaattcggaatcttctaccacctccagtggggctagtacagctactaacagcgaatcctcaactgtgtctagcagagcctctaccgcaaccaattcagaatcttctaccacttcttccggggcctccactgcaacaaattctgagtctagaacaacaagcaatggagccgggactgccactaattctgaatccagtaccacatcctccggagcttcgacagccactaactctgagagcagtaccccatcctccggggcaggaaccgctactaactcagagagttcaacgacaagttctggagccggaaccgctacgaactctgaaagttctacagtttccagcgggatctctaccgtcacgaattctgaatcctccacacctagtagtggggcgaataccgctacaaatagcgaatcatctacgacatcatccggcgccaacactgctactaattcggacagctctactacctcctccggagcttccaccgccactaactccgagtcttccactacctcatctggggccagtacggccacaaacagcgagtcgagcaccacctctagcggcgccagtacagcaactaactccggctcctcaactacctccagtgggacatccacagcgacgaactcagagagcagtacagtgtcctcaggcgccagcaccgcaacaacgagtgagtcttctaccacgagcagcggggcatctaccgccacaaatagcgagtcctctaccgtgtcctctggtgcctcaactgcaacgaatagtgagtcaagtactacttccagcggggcaaacaccgccactaatagcggaagctctgtgacatctgccgggtccggaaccgccgctctcacaggcatgcacacgacaagccacagcgcttctaccgccgtgagtgaagccaagccaggaggctcgcttgttccctgggaaattttcctgataactctggtcagcgtggtggctgctgtaggactctttgcaggcctcttcttctgtgtaaggaactccctgtccctccggaatacgtttaatacggcagtctatcaccctcatggactgaaccatggcctcgggccagggccaggaggcaatcatggcgcaccccataggcctcgctggtctcctaactggttttggcgcagacccgtttcgtcaattgctatggaaatgtccggacgcaacagcggcccatag

SEQ ID NO: 24109 - DNA, 1701 bp, Artificial Sequence
  derived and/or modified sequence
atgaagatgcagaaagggaacgtcctgctcatgttcggcctcctcctccacctggaggcggcgacgaattccaatgagactagcacctctgccaataccgggtcctctgttatctcttccggcgcctccacagccaccaattctgggtcaagcgtcactagctcaggcgtcagcaccgccaccatctctgggagtagcgtgaccagcaacggtgttagcattgtcaccaatagcgagtttcacacgacatcatccgggatttccaccgcaactaatagtgaattcagtactgctagcagtggcatctcaatcgccacaaacagcgaatctagcaccactagctcaggggctagtaccgctactaactccgagagtagtactccaagctcaggggctagtaccgccacaaacagcgatagttcaaccacctcgagcggggcctcaaccgctacgaatagtgactctagtactacatccagcgaggcctccaccgctaccaacagtgagtcctcaacaacatcctcaggagcatctaccgctactaactccgagtcttccaccgtttcttcaagggcgtcaaccgctaccaactcagaaagcagcaccacctcctccggcgcttccaccgccaccaactctgagagtcgcaccacttcgaacggggccggcactgctacaaactctgagagttcaaccacaagttccggtgcttctacagcgaccaacagcgagtcctctacccccagttcaggagcagggaccgcgacaaatagtgagtcctcgaccaccagctcgggagcaggaacagcaactaatagcgaaagcagcactgtgagcagcggaatcagcactgtcaccaatagcgagagtagcaccccatccagcggagcgaacaccgctacgaacagcgagtctagcaccacgtccagtggagccaatacagctacaaacagtgactctagcactaccagcagcggagccagtaccgctaccaatagcgagagctcaacgacgagcagtggcgcttcgacagctacgaactccgagagctccaccacaagctccggcgccagcacagccacaaactccggctcatctaccacttcttcaggcaccagcacagccacaaacagcgagtctagtactgtttcctctggcgccagcaccgccaccacaagcgaatcatctacaacctctagtggtgcctctactgccactaatagcgagagtagtacagtgagttctggagcaagcaccgcaaccaactctgagagcagtactacaagttccggcgcgaatactgctacaaacagtggctcgagcgttacctctgcaggatccggcaccgccgcgcttaccggaatgcacacaacgagtcacagcgctagtaccgccgtgagcgaggccaaaccaggtggcagccttgtgccatgggaaatcttccttattacactggtgagcgtagtagctgcagtgggtctgttcgctggcttattcttttgcgtgaggaacagcctgagcctccgtaatacctttaacacagccgtctatcacccacacggactgaatcacggcctgggccctgggcctggggggaaccatggcgcgccccataggccaagatggtctccaaattggttctggaggcgaccggtctcttccattgcaatggagatgagtggacgaaattcaggcccttag

SEQ ID NO: 24110 - DNA, 1701 bp, Artificial Sequence
  derived and/or modified sequence
atgaagatgcagaagggcaacgtgcttttgatgttcggcttactcctgcatctggaggccgccaccaactccaacgaaaccagcaccagcgctaataccgggagctctgtcatatccagcggtgcaagtacagctaccaattccggtagttccgtgaccagctccggagtgtccactgccacgattagtggatccagcgtcaccagtaacggagtgtccattgtgactaactccgagtttcataccacctcctcagggatatccaccgcaactaactcggagttcagcacagccagctctgggatctcaatcgcaaccaattctgaatcctcaactacaagttctggcgcatctactgccaccaactctgagtcaagcacaccctcctctggcgcatcaaccgctacaaattcggactcgtcaactacttcatccggagctagtaccgctactaattctgacagcagcactacatcctcagaggcctccaccgccacaaattctgaaagcagtacaacgtcctcaggcgcaagtaccgctacaaactcagagtctagtactgtgagctctagagcttccaccgcgactaactccgagagctcaactacctcatcgggggctagtaccgccacaaattctgaaagccggactacgagcaatggcgcagggactgctacaaactctgagtcgtccacaacaagtagtggggcgagcactgccactaactcagaaagtagtacaccaagttccggggccggaaccgcgacaaattccgaatcatcaacaacctcatctggggcagggactgccactaactcagaaagctctaccgtgagctccgggataagtacggtcacaaatagcgaatcttccaccccatctagtggggcaaacacagcaactaactccgagtcatctactacgagctccggcgccaacaccgccaccaacagtgatagttcaaccaccagtagcggtgcctcaacagctaccaactctgagtcatccaccacatcatcaggagctagcacagccacaaactctgagtcgagcaccacctcctccggagcatccactgccaccaactcaggttcatcaacaactagctctgggactagcacagctacaaatagtgagtcttccacagtgtcaagcggggccagcacagcaaccaccagcgagtcctctacaacttctagcggtgcgagtaccgctacaaatagcgaatccagtacagtgagttcgggagctagcaccgcaaccaactccgagtcttccaccacttcctctggcgccaacactgccacaaattctggcagcagcgttacctccgcgggcagcggcacagctgctttaaccggaatgcacaccacaagtcacagtgcttctaccgctgtgtcagaagcgaaacctggaggttccctcgtgccatgggagatcttcctgattacactggtctctgtggtcgctgccgtgggcttattcgccgggttatttttttgcgtccgtaactctctgtcactgcgcaacacatttaatactgctgtgtatcacccccacggtctgaaccatggcctgggcccaggcccaggcggcaaccacggggccccacatcggcctagatggtctccaaactggttctggagaaggcccgtgtcaagcatcgccatggaaatgtccgggaggaactctggcccgtag

SEQ ID NO: 24111 - DNA, 1251 bp, Artificial Sequence
  derived and/or modified sequence
atgaagatgcagaaaggaaatgtcctactgatgttcgggctgctgttgcacctagaagcggcgaccaattccaatgaaacatctacatcagctaacacaggatctagcgttatcagctcgggggcttctacagctacaaattccggtagttccgttacttcatccggcgtatcgactgcaaccataagcggctcttccgtgacatccaatggtgtctcaatcgtgaccaactccgagtttcataccactagctcagggatctcaacagcaactaactccgaattcagtaccgcttccagcggtattagcatcgccaccaactctgagagctccactacatcctcgggcgccagtactgcaactaactctgagtcaagtaccccctcttcaggtgccagcacagctacaaatagtgactcgtccactacctcgagcggcgcgtctacagcaaccaactcagattcctcgaccacctcttctgaggcttctacagctacaaatagtgaatcgtccacaacctcctccggagcaagcactgccacaaactccgaaagctcaacaacctcgagcggcgcgagtactgccaccaatagcgagtcttctactacttcgagcggtgcaagcactgccaccaactctgggtcctctacaacaagttctggcactagcaccgccaccaattccgaatccagcacggtcagttccggggcttcgaccgcaacaacctctgagtcaagcaccacatccagcggcgcttctaccgctaccaactccgagtcttcaaccgtatcctctggtgccagcactgctaccaatagcgaatcttccacaaccagctctggagctaacacagctacgaatagcgggtcaagcgtgacaagcgccgggagcgggaccgctgcactcacaggaatgcacacgactagccacagtgcatctacagcagtgtcagaagccaagccaggcggcagcctggtgccatgggagatatttctgataactctcgtatccgtggtggcagcagtggggttattcgctggactcttcttttgtgtcaggaactctctctcccttaggaacacattcaacactgcagtttaccacccgcatgggctgaatcacggcctgggcccggggcctggaggtaatcatggggccccgcatcgcccgaggtggtctccgaattggttttggcgcagaccagtctccagcatcgcaatggagatgagtgggcgtaactctggtccatag

SEQ ID NO: 24112 - DNA, 1251 bp, Artificial Sequence
  derived and/or modified sequence
atgaagatgcaaaagggaaacgtactgcttatgtttggactgctgctgcatctagaggctgcaaccaactccaatgaaaccagtacgtcggctaataccggatcttccgtaatctccagtggcgcttctaccgcaactaattcggggtcatctgttacctcttccggcgtgagtacagccactatcagtggaagttctgtgacctcaaatggtgtaagcatcgtgaccaacagcgaatttcataccacttcttctggcatttccactgcaacgaatagcgagtttagcaccgcctcaagcggcatcagcatcgccacaaactctgagagcagtacgacgtccagtggagcttcgactgcgaccaactccgagtccagcacaccctcgtccggtgcatcaaccgccaccaactccgactctagtacaacttcttccggtgcttcaaccgcgaccaacagcgacagttcaactacatccagcgaggccagcactgccacgaactccgaatcatccaccacttccagcggggcttccactgctaccaacagcgaatccagtacgacaagcagcggcgcctccactgccacaaattccgagagtagcacaacatccagcggagctagcacagcgacaaacagtggcagctctaccacatcatccggcaccagcactgctaccaattctgaatccagcacggtctcaagcggcgcctctaccgccacaacatctgagtcttccactactagcagtggggcttcaactgctacaaatagcgaatcttctacagtgtcctccggggccagcacagcgacaaactcagaaagtagtaccacttcttcgggcgcgaacactgccaccaatagtggatcctcagtcacgtcagctggttcaggcacggctgctttaaccggtatgcacacaaccagccatagcgcctccacggcggtgagtgaggctaaacctggagggagtctagtcccctgggaaattttcttgattacactcgtcagcgtggtggctgctgtcggtctttttgcaggcctgtttttttgcgtgcgaaattccttgagtctgagaaacaccttcaacactgctgtgtatcacccccatgggctcaaccatgggctggggccaggaccaggcggtaatcatggagctccccatcggccacgttggtccccaaactggttttggcggcggccagtgagcagcattgcaatggagatgagcgggcgcaactctggcccctag

SEQ ID NO: 24113 - DNA, 1251 bp, Artificial Sequence
  derived and/or modified sequence
atgaagatgcagaaaggaaacgtactgcttatgtttgggcttttgttacatctggaggccgccacgaacagtaacgagaccagcacgtccgcaaatactggttctagcgtgatctctagtggggctagcaccgcgaccaacagcgggagcagcgtgacttcctctggtgtctccacggccactatcagtgggagttctgttacatctaacggcgtgagtattgtgacaaatagcgaatttcacacaacatccagtgggatcagcactgcaacaaacagtgagtttagtactgcctcctcaggcatttccattgccaccaactccgaaagttctacgacatcaagcggggccagcaccgcaacaaacagcgagtcctccaccccctccagcggcgcatcgacagccacgaactccgatagcagtaccacatcctccggggcgtccacagcaactaatagtgacagcagcactaccagctccgaggcctccaccgccaccaacagcgagtcctcaactacttcctccggagcatcgacggctactaactcagagtccagtacaacctcctctggagcatctaccgcaacaaattccgaaagcagcaccacttcatccggggcatctacagcaacaaattctggctcctccacgacctccagcggcacaagcacagccacaaattccgaatcatcaactgtcagttctggagccagtactgccacgactagcgaatcctctacaacatcctccggtgcatccactgccacaaactcagagtcaagcaccgtgtcaagcggagcttctactgctaccaactctgagtccagcactacctcaagcggcgctaacaccgccactaactcaggctcctcagttacctcagcaggcagcggcaccgcggctctgaccgggatgcacacaaccagccattccgcgtccaccgccgtatcagaggccaagcccggcggctctctcgtcccgtgggaaattttcttgataacccttgtgagcgtcgtcgccgctgtggggctctttgcagggcttttcttctgtgtccgcaattctctgagtctgcgaaacacttttaacacagcagtataccatccccatggcctaaaccacgggctgggccctgggccaggcgggaaccacggggcaccccaccgccccagatggtctcccaattggttttggaggaggcctgtctcctcaatagcgatggagatgtctgggcgtaacagcggaccatag

SEQ ID NO: 24114 - DNA, 1701 bp, Artificial Sequence
  derived and/or modified sequence
atgaaaatgcaaaaagggaatgtgctcctcatgtttggtctgcttctgcatctggaggctgcgacgaatagtaatgagacgtctacttcagctaatacaggatctagtgtgatctcaagtggggcgtccactgccacaaacagcgggagctcagtgacttcatctggagtttcaaccgctacaatctctgggtcttccgttaccagcaacggagtttccatcgtgacaaacagcgaattccacacgacttccagcggcatctctaccgcaacaaactctgagttcagcactgtgtcttccggtatttcaattgcaactaactccgaaagcagcactacctcgtctggcgcctccaccgcaacgaattccgaaagctccactccgagcagcggcgcaagcacggccactaactctgactcaagcactaccagttcaggcgcaagcaccgccaccaatagcgatagctctacaacctcatcagaagcttcaactgccaccaatagcgagtcttctacaacttcttccggtgcttcaacagtaactaactctgaatcttccaccgtgagtagcagggcttctacagccacaaattccgagagttcgactacctcgtctggggcatccacagctactaattctgagtcacgtaccaccagtaacggcgccggtaccgcaacaaacagtgagagttctaccacctctagcggagccagcacggcgaccaatagcgagtcctcgacacccagtagcggcgccggtaccgctaccaattctgaaagctccactacctcttccggcgcgggcactgctaccaactccgagtcctcgactgtctcatcgggtatttctacagttaccaacagcgaatcgtccaccccatcaagtggcgcgaatacggccactaactctgaaagtagcacaaccagctccggcgccaacaccgcaaccaattctgattccagtactaccagtagcggagcaagcaccgccaccaactctgaatcttcaacaacttcctctggggcttctactgcaaccaacagtgagtcatcgacaacaagctccggtgcctccacggccactaattccgggtcaagcaccacttcttccggcacaagcaccgcaacaaatagtgagagttccaccgtgtcatcaggggcttccacagccacgacttccgagagttctaccaccagctctggggcttcgacagctaccaacagcgagagttcaaccgtctctagcggggcaagtaccgccactaacagcgaaagcagcaccacaagctccggggccaacacagcaaccaacagcggcagctcagtgacctctgcaggatctggaacagcggcactcacaggcatgcacaccacgtcacactcggccagcaccgcagtgtccgaggcaaagcctggcggtagtctggtaccctgggagattttccttatcacgctagtttcggtggtcgcagcagtgggcctgttcgccgggttgtttttctgcgtcaggaacagcctttccttaaggaacacattcaatacagccgtctatcatccccacggcctgaaccacggccttgggcctgggcccggcggcaaccatggggctccccacaggcctagatggtcaccgaactggttctggcgaagacccgtttcttccatcgcgatggagatgagcggacgaaacagcggtccctag

SEQ ID NO: 24115 - DNA, 1251 bp, Artificial Sequence
  derived and/or modified sequence
atgaagatgcagaagggtaatgtgctgctgatgtttggtcttcttctacatttggaagctgccaccaattcgaacgagacaagtacctcagcaaacaccgggagctcggtaattagctctggcgccagtaccgccaccaactctggcagctcagtaacgtcctcaggggtcagtacggccacaatatcaggtagttccgtgacttccaacggggtcagtatcgtcacaaacagcgagtttcacacaacttcttccggtatctctaccgctaccaacagtgagttcagcactgttagctcggggatatctatagctacaaactctgagtcctccactacaagttccggcgcctcaacggcaacaaattctgagagctcaacaccaagtagtggcgcctccacagctaccaattctgattcctccaccaccagcagtggagcatctactgctacaaacagcgattcgtcaactacaagctcagaggctagcacagccactaactcagaatcgtcaaccacaagctctggcgcctctaccgcaacgaatagcgagtcctcaactacatccagcggtgcatctacggcaacgaacagcgaatctagtacgacctcttccggggcctccacagctacgaatagcggatccagcacaacgtccagcggcacttctaccgccaccaattctgaatcttccacagtatccagtggagcaagcactgctactacctctgagagctctaccacctcctctggggcttctacagcaaccaactccgagtccagcactgtttcttcgggggcatccaccgcaacaaatagtgaaagtagtacaacctcttctggcgccaacacagccacaaactcaggatcatccgtgacgtctgccggctctgggaccgctgcactgactggcatgcatacaaccagccatagcgcttcaactgccgtgtctgaggctaagccaggcggttcactggtaccctgggagattttcctcatcacactcgtgagcgttgtcgccgcagtcggactgttcgccggccttttcttttgcgtgaggaactcactgagtctccgcaacacatttaatacagctgtgtatcatccgcatggtctgaatcatggtttgggcccagggcctgggggtaatcacggagccccacatcggcctcgttggagcccgaattggttctggcgcagaccagtgagctctatcgcaatggaaatgagcggacggaacagcggaccttag

SEQ ID NO: 24116 - DNA, 1881 bp, Artificial Sequence
  derived and/or modified sequence
atgaagatgcaaaagggcaacgttctgcttatgtttggcctactgctgcacttggaagccgccaccaatagcaatgagacgtccacctccgccaacactgggtcttctgtcatttccagtggtgcgtcaacggctacaaattcaggctcttctgttaccagctccggcgtctccaccgccaccattagtgggtctagcgtcacaagcaacggggtgagcatcgtgacaaactccgaattccacaccacatcctctggaatcagcacggcgaccaacagcgagtttagcaccgcttcttcaggcatttcgatcgcaaccaacagcgagagttcaacgacttctagcggcgcctcaaccgcaactaattctgagagtagtacacccagctccggagcttctaccgtgaccaacagtggctcatctgtgacatcatctggcgcttccaccgctacaaattctgaatcctctaccgtgagctcccgtgcaagcacggccaccaacagcgagtccagtactctttctagtggagcctcaacagccacgaattccgattcaagcactactagctctggtgcaagtactgccaccaattctgagtcgtccacgaccagcagtggcgcgtccacagctacaaacagcgaatcatcaacagtgtcatctagagcatctaccgcaacaaactcagagtcctccacgacgagtagcggtgcctcaaccgcaacaaactccgagtctcggacgacaagcaatggagcaggtaccgctactaactcggagtcctctacaacgtctagtggagcatcgacagctacaaatagcgatagtagtactgttagctccggtgccagcacggctacaaatagcgaaagcagcacaacctccagtggagcttccacagcaactaactctgattcctctaccacctcaagcggcgcaggtaccgccaccaattcagagtctagtactaccagctctggagctagtaccgccacaaatagtgagtcctctaccaccagctccggggcgtctacagccactaactccgattccagcacaacttcgagcggagctgggacggctaccaatagtgaatcgagtaccgtgagtagcggaatatctacggtgacaaactctgagagttccaccccttcttccggggcaaatacagccacaaactctgagagcagcacaactagcagtggcgcaaatacagccaccaatagcgagtcgtctactgtgtccagcggagcgtctacagcgacaaattccgagtcatctactacctcctccggagtatccacagctacgaactctgaatcgtcgaccacatcctccggcgcaagcactgctactaactctgactcttctactacatctagcgaggccagcacagctaccaactccgagagctctacggtttctagcggtatcagcaccgtgactaattctgaatcctccacaacttcctccggcgcgaacactgctactaactcaggaagctccgtcacctccgcaggaagtggaaccgcagccctgaccggaatgcatacaacctcgcattctgcctccactgcagtgtctgaagccaagccaggcggtagtcttgtgccatgggagatctttttgattacactagtctcagttgtggccgctgtgggattgttcgcaggtttatttttttgtgtccgcaactcgctttctctgaggaacacctttaacacggccgtctatcacccacatgggttgaaccatggcctgggacccggaccaggtgggaaccacggtgccccccatcgtccaaggtggagtcccaactggttttggcggcggcccgtctccagtattgcgatggagatgagcggcaggaactccggtccatag

SEQ ID NO: 24117 - DNA, 1791 bp, Artificial Sequence
  derived and/or modified sequence
atgaaaatgcaaaagggaaacgtgctcctgatgttcggtctgttactgcacctcgaggccgcaaccaattcgaacgaaacatctacttcagccaataccggtagtagcgtcatcagcagtggagcctctacagcaacaaactcagggagttccgtcacttcttccggggtgtccactgctacaattagcggctctagtgtcaccagtaacggtgtctctatagtaactaattcggaattccataccacttcaagcggcatttctacagcaaccaactctgaattcagtacggcgtcctccggcatctcgattgctaccaattcagagagcagtacaacaagcagtggggcctccaccgctacaaatagcgagagtagcacaccatccagcggtgcttctactgtgaccaattctggcagttcagtaaccagtagcggcgcctccactgcgactaatagcgaaagctcaacagtatcaagccgtgccagtaccgcgaccaactccgaaagtagcacactgtcctccggcgctagcaccgccactaactctgactcctccaccacatcttccggcgcgagtactgccaccaattctgaaagcagcaccactagttccggggccagcaccgcaacaaattcagagagctctacagtcagttcccgagcctccacagccaccaacagtgagtcctctactacttcctccggagcgagcacagccacaaactccgagtctcggactacgtctaacggggccggcaccgccaccaattctgagtcatcaacaacatcctctggagccagcacagcaacgaatagcgacagtagcacagtttcatcaggggcttccaccgccacaaattccgagagtagcacgacgagtagcggagcttctaccgctaccaattctgagtcctccacgacttccagcggtgctagcaccgccactaatagtgactcctctaccacctcctcgggcgctggaaccgccacgaacagtgaatccagtactgtctccagcggcatttctaccgtcacgaattccgaatccagcacaccttcttccggggcaaacaccgcgacgaactctgagagtagcaccacgtcctcgggagctaatactgcaactaacagtgaaagcagcacagtctcaagtggcgctagtacggccactaattcagagtctagcaccacctcatctggcgtgtctacggctacgaattccgagtcctctacaacctcttccggagcgtctacggcaacaaattctgactcaagtaccacatctagcgaggcctcaactgccacaaacagcgagtcctccacagtctcatccggaatttctacagtgacgaactctgaaagttctaccaccagttccggtgccaacactgctaccaatagcgggtctagtgtgacatccgccggatctggcacggccgccctcaccggaatgcatactacatcgcattccgccagcacagcggtgtccgaggccaagcctggtggctctcttgtgccctgggaaatcttcctcataacattagtgtctgtggtggctgcagtaggcctcttcgctggtcttttcttttgcgtccgaaacagcctctccttacggaatacctttaacacagcggtttatcaccctcacggcctcaaccacggcttgggacccggccccgggggtaatcacggggcccctcataggccccggtggtctccgaactggttttggagaagaccagtttctagcatcgccatggagatgtcgggtcgcaactcaggcccatag

SEQ ID NO: 24118 - DNA, 1701 bp, Artificial Sequence
  derived and/or modified sequence
atgaagatgcagaaagggaacgtgctgctgatgtttggacttctgctccatctcgaagctgcaaccaactccaatgaaacatcaacaagcgctaatactggctcatctgtgatttcctcgggagccagtactgccacaaactctggaagttcagtcacgtcaagcggagtgagcacagcgacaatctccggatcctccgtaacgagcaacggggtgtccatcgtgacaaattccgaatttcatactacttccagcggcatttccaccgctacaaactcagaattcagcacagcctcttctggcatttccattgcaacaaatagtgagagctcaactacctcaagcggagcctctaccgctacaaacagtgaatcctcaacacctagtagcggcgcttctaccgcaaccaatagtgagtcttccaccctgtcaagcggtgccagtacagccaccaattcagattcatcaaccacttcatctggcgcttcgacagccactaacagtgaaagctccaccacctcatctggagcgagtacagctacgaacagcgaatccagcaccgtgagttcgcgtgcctccacagccactaatagcgagagcagcacaaccagtagcggcgcaagtaccgccacgaactcagaaagcaggactaccagtaacggggccgggaccgccacgaactcagagtcctcaactacatccagcggggcaagtactgcaaccaatagcgactcatcaactgtaagcagtggagcctcaaccgctacaaatagcgagtcttccaccacttcttctggtgcatcaacagccaccaactctgaatctagcacaacctcgtcaggagcctccacggccaccaactctgacagtagtaccaccagctcaggggcaggtactgccacaaatagcgagagttctaccgtgtcatcggggataagtacagtcaccaatagcgagagttccacccccagctctggcgcgaatactgcgactaacagcgagagtagtactacatctagcggcgcgaacacagccaccaactccgaaagcagtacagtttcttccggcgcaagtacagctactaactcagagtcttcaaccactagctctggggtatcaaccgcaacgaactccgaatcctcaacaacatcatccggggcttctactgctactaactctgattcgagtactacaagctcagaggcaagtacggccacaaactccgaatccagtaccgtgagcagcgggatatcgactgtgaccaacagcgagagctccacgacatccagcggggctaacaccgcgactaatagtggaagcagtgttacgtcagctgggagtggaacagcagccctcactggtatgcacaccacgtcccactccgcaagcactgccgtatccgaagctaagccaggaggctcgctggtaccctgggagattttcctgattacactcgtctccgtcgtggctgctgtgggcttgttcgctggactgtttttctgtgtgaggaatagcctgagcttgaggaacacatttaataccgctgtttatcatcctcacggactgaaccatgggctggggccaggtccaggaggaaatcatggtgcgccccaccggccaaggtggtccccgaactggttttggaggagaccagtgagttctatcgctatggagatgtcaggacggaattcgggcccatag

SEQ ID NO: 24119 - DNA, 1701 bp, Artificial Sequence
  derived and/or modified sequence
atgaaaatgcagaaaggtaatgtgctactgatgtttggtctactgctgcacctcgaggccgcgaccaactcaaacgaaacatcaacttccgccaatacagggagttccgttatatcctccggagcttccacagcaaccaatagtggcagcagtgtaacttcttcaggcgttagcaccgctactatcagtggcagtagtgtgacatccaacggggttagcatagtgacgaattccgagtttcacactacctcatctggtataagtaccgcgactaattcggagttttccacggcctctagtgggataagcattgctacaaactcagagagctctaccacgtccagcggcgcctccaccgcaaccaattccgagagttctacccctagcagcggagccagcacagccacgaactctgagagctccactctcagttcaggtgcgagcactgcaacaaatagtgactcttccacaacctccagtggcgccagtactgccacaaactccgaaagtagcaccaccagtagcggcgcaagcacagctaccaactcagagtcttccacagtatccagtcgggcatccacagccaccaattccgagtcatctacaaccagttctggcgctagtactgcaacaaattcagagtctcggacaacatccaatggtgcaggtactgccaccaatagtgagtcctccacaacgagcagcggcgcctcaaccgccacaaacagtgactcatcgacgacatctagcggagctgggaccgctacaaacagtgaaagcagcactacctcatccggcgcaagtaccgcgactaactctgagagtagtacaacaagctccggcgcgtcaacagccactaacagtgacagctcaacaaccagtagtggtgcaggaaccgccaccaatagcgaatcatctactgtgtcttctggcatcagcactgtgaccaacagcgagagcagtacgcctagttccggggcgaataccgcgactaatagtgagtccagtactacgagttcaggggctaataccgccacaaactcagaatcatccacagtgagtagcggggcatctacagccaccaacagtgagagtagcaccacaagtagcggcgtctcgacggccaccaacagcgaaagctcaaccacttcgtccggggcatccaccgccactaactcagatagttctactacttcatcagaggcatctaccgccaccaattccgagagctctaccgtgtcaagcgggatcagcactgtgacaaatagtgaatcctccacaacatcatccggggcaaatacagctaccaactccgggagcagtgtaaccagtgcaggtagcgggaccgcagctctgactggcatgcataccacctctcactcagcctccaccgcggttagtgaggctaagcctggggggtcattggtgccctgggaaatttttctgatcacacttgtgtcagttgtggccgcagttgggctgtttgctggactgtttttctgtgttcgcaactctctctccctcaggaacaccttcaatacagctgtctatcacccccacggcctgaaccatgggctcggcccaggccctggcgggaatcacggtgcgccacaccggcctcggtggtcccctaattggttctggcgaagaccggtttcctcgatcgctatggagatgagcggcaggaattctgggccttag

SEQ ID NO: 24120 - DNA, 1701 bp, Artificial Sequence
  derived and/or modified sequence
atgaagatgcagaagggaaatgtgctgctgatgtttggcctgctgctgcacctggaggccgccaccaacagcaatgagaccagcaccagcgccaacacaggcagcagcgtcatcagcagcggggccagcacagccaccaacagcggcagctctgtgaccagcagtggagtgtccacagccaccatcagcggcagctctgtgaccagcaatggagtgtccatcgtgaccaacagcgagttccacaccaccagcagcggcatcagcacagccaccaacagcgagttcagcacagccagcagcggcatcagcatcgccaccaacagcgagagcagcaccaccagcagcggggccagcacagccaccaacagcgagagcagcacccccagcagcggggccagcacagccaccaacagcgacagcagcaccaccagcagcggggccagcacagccaccaacagcgacagcagcaccaccagcagcgaggccagcacagccaccaacagcgagagcagcaccaccagcagcggggccagcacagccaccaacagcgagagcagcacagtgagcagccgggccagcacagccaccaacagcgagagcagcaccaccagcagcggggccagcacagccaccaacagcgagagcaggaccaccagcaatggagctggaacagccaccaacagcgagagcagcaccaccagcagcggggccagcacagccaccaacagcgagagcagcacccccagcagcggggccggcacagccaccaacagcgagagcagcaccaccagcagtggagctggaacagccaccaacagcgagagcagcacagtgagcagcggcatcagcacagtgaccaacagcgagagcagcacccccagcagcggggccaacacagccaccaacagcgagagcagcaccaccagcagcggggccaacacagccaccaacagcgacagcagcaccaccagcagcggggccagcacagccaccaacagcgagagcagcaccaccagcagcggggccagcacagccaccaacagcgagagcagcaccaccagcagcggggccagcacagccaccaacagcggcagcagcaccaccagcagcggcaccagcacagccaccaacagcgagagcagcacagtgtcctctggggccagcacagccaccaccagcgagagcagcaccaccagcagcggggccagcacagccaccaacagcgagagcagcacagtgtcctctggggccagcacagccaccaacagcgagagcagcaccaccagcagcggggccaacacagccaccaacagcggcagctctgtgaccagcgctggcagcggcacagctgccctgaccggcatgcacaccaccagccacagcgccagcacagctgtgtctgaggccaagccaggcggcagcctggtgccctgggagatcttcctgatcaccctggtgtctgtggtggccgctgtgggcctgtttgctggcctcttcttctgtgtgaggaacagcctgagcctgaggaacaccttcaacacagctgtgtaccacccccacggcctgaaccacggcctgggccctggccctgggggcaaccacggggccccccaccggccccgctggagccccaactggttctggaggaggcctgtgagcagcatcgccatggagatgagcggcaggaacagcggcccctag

SEQ ID NO: 24121 - DNA, 1251 bp, Artificial Sequence
  derived and/or modified sequence
atgaagatgcagaagggaaatgtgctgctgatgtttggcctgctgctgcacctggaggccgccaccaacagcaatgagaccagcaccagcgccaacacaggcagcagcgtcatcagcagcggggccagcacagccaccaacagcggcagctctgtgaccagcagtggagtgtccacagccaccatcagcggcagctctgtgaccagcaatggagtgtccatcgtgaccaacagcgagttccacaccaccagcagcggcatcagcacagccaccaacagcgagttcagcacagccagcagcggcatcagcatcgccaccaacagcgagagcagcaccaccagcagcggggccagcacagccaccaacagcgagagcagcacccccagcagcggggccagcacagccaccaacagcgacagcagcaccaccagcagcggggccagcacagccaccaacagcgacagcagcaccaccagcagcgaggccagcacagccaccaacagcgagagcagcaccaccagcagcggggccagcacagccaccaacagcgagagcagcaccaccagcagcggggccagcacagccaccaacagcgagagcagcaccaccagcagcggggccagcacagccaccaacagcggcagcagcaccaccagcagcggcaccagcacagccaccaacagcgagagcagcacagtgtcctctggggccagcacagccaccaccagcgagagcagcaccaccagcagcggggccagcacagccaccaacagcgagagcagcacagtgtcctctggggccagcacagccaccaacagcgagagcagcaccaccagcagcggggccaacacagccaccaacagcggcagctctgtgaccagcgctggcagcggcacagctgccctgaccggcatgcacaccaccagccacagcgccagcacagctgtgtctgaggccaagccaggcggcagcctggtgccctgggagatcttcctgatcaccctggtgtctgtggtggccgctgtgggcctgtttgctggcctcttcttctgtgtgaggaacagcctgagcctgaggaacaccttcaacacagctgtgtaccacccccacggcctgaaccacggcctgggccctggccctgggggcaaccacggggccccccaccggccccgctggagccccaactggttctggaggaggcctgtgagcagcatcgccatggagatgagcggcaggaacagcggcccctag

SEQ ID NO: 24122 - DNA, 1701 bp, Artificial Sequence
  derived and/or modified sequence
atgaagatgcagaagggaaatgtgctgctgatgtttggcctgctgctgcacctggaggccgccaccaacagcaatgagaccagcaccagcgccaacacaggcagcagcgtcatcagcagcggggccagcacagccaccaacagcggcagctctgtgaccagcagtggagtgtccacagccaccatcagcggcagctctgtgaccagcaatggagtgtccatcgtgaccaacagcgagttccacaccaccagcagcggcatcagcacagccaccaacagcgagttcagcacagtgagcagcggcatcagcatcgccaccaacagcgagagcagcaccaccagcagcggggccagcacagccaccaacagcgagagcagcacccccagcagcggggccagcacagccaccaacagcgacagcagcaccaccagcagcggggccagcacagccaccaacagcgacagcagcaccaccagcagcgaggccagcacagccaccaacagcgagagcagcaccaccagcagcggggccagcacagtgaccaacagcgagagcagcacagtgagcagccgggccagcacagccaccaacagcgagagcagcaccaccagcagcggggccagcacagccaccaacagcgagagcaggaccaccagcaatggagctggaacagccaccaacagcgagagcagcaccaccagcagcggggccagcacagccaccaacagcgagagcagcacccccagcagcggggccggcacagccaccaacagcgagagcagcaccaccagcagtggagctggaacagccaccaacagcgagagcagcacagtgagcagcggcatcagcacagtgaccaacagcgagagcagcacccccagcagcggggccaacacagccaccaacagcgagagcagcaccaccagcagcggggccaacacagccaccaacagcgacagcagcaccaccagcagcggggccagcacagccaccaacagcgagagcagcaccaccagcagcggggccagcacagccaccaacagcgagagcagcaccaccagcagcggggccagcacagccaccaacagcggcagcagcaccaccagcagcggcaccagcacagccaccaacagcgagagcagcacagtgtcctctggggccagcacagccaccaccagcgagagcagcaccaccagcagcggggccagcacagccaccaacagcgagagcagcacagtgtcctctggggccagcacagccaccaacagcgagagcagcaccaccagcagcggggccaacacagccaccaacagcggcagctctgtgaccagcgctggcagcggcacagctgccctgaccggcatgcacaccaccagccacagcgccagcacagctgtgtctgaggccaagccaggcggcagcctggtgccctgggagatcttcctgatcaccctggtgtctgtggtggccgctgtgggcctgtttgctggcctcttcttctgtgtgaggaacagcctgagcctgaggaacaccttcaacacagctgtgtaccacccccacggcctgaaccacggcctgggccctggccctgggggcaaccacggggccccccaccggccccgctggagccccaactggttctggaggaggcctgtgagcagcatcgccatggagatgagcggcaggaacagcggcccctag

SEQ ID NO: 24123 - DNA, 1881 bp, Artificial Sequence
  derived and/or modified sequence
atgaagatgcagaagggaaatgtgctgctgatgtttggcctgctgctgcacctggaggccgccaccaacagcaatgagaccagcaccagcgccaacacaggcagcagcgtcatcagcagcggggccagcacagccaccaacagcggcagctctgtgaccagcagtggagtgtccacagccaccatcagcggcagctctgtgaccagcaatggagtgtccatcgtgaccaacagcgagttccacaccaccagcagcggcatcagcacagccaccaacagcgagttcagcacagccagcagcggcatcagcatcgccaccaacagcgagagcagcaccaccagcagcggggccagcacagccaccaacagcgagagcagcacccccagcagcggggccagcacagtgaccaacagcggcagctctgtgaccagcagcggggccagcacagccaccaacagcgagagcagcacagtgagcagccgggccagcacagccaccaacagcgagagcagcaccctgagcagcggggccagcacagccaccaacagcgacagcagcaccaccagcagcggggccagcacagccaccaacagcgagagcagcaccaccagcagcggggccagcacagccaccaacagcgagagcagcacagtgagcagccgggccagcacagccaccaacagcgagagcagcaccaccagcagcggggccagcacagccaccaacagcgagagcaggaccaccagcaatggagctggaacagccaccaacagcgagagcagcaccaccagcagcggggccagcacagccaccaacagcgacagcagcacagtgagcagcggggccagcacagccaccaacagcgagagcagcaccaccagcagcggggccagcacagccaccaacagcgacagcagcaccaccagcagcggggccggcacagccaccaacagcgagagcagcaccaccagcagcggggccagcacagccaccaacagcgagagcagcaccaccagcagcggggccagcacagccaccaacagcgacagcagcaccaccagcagtggagctggaacagccaccaacagcgagagcagcacagtgagcagcggcatcagcacagtgaccaacagcgagagcagcacccccagcagcggggccaacacagccaccaacagcgagagcagcaccaccagcagcggggccaacacagccaccaacagcgagagcagcacagtgtcctctggggccagcacagccaccaacagcgagagcagcaccaccagcagcggcgtgtccacagccaccaacagcgagagcagcaccaccagcagcggggccagcacagccaccaacagcgacagcagcaccaccagcagcgaggccagcacagccaccaacagcgagagcagcacagtgagcagcggcatcagcacagtgaccaacagcgagagcagcaccaccagcagcggggccaacacagccaccaacagcggcagctctgtgaccagcgctggcagcggcacagctgccctgaccggcatgcacaccaccagccacagcgccagcacagctgtgtctgaggccaagccaggcggcagcctggtgccctgggagatcttcctgatcaccctggtgtctgtggtggccgctgtgggcctgtttgctggcctcttcttctgtgtgaggaacagcctgagcctgaggaacaccttcaacacagctgtgtaccacccccacggcctgaaccacggcctgggccctggccctgggggcaaccacggggccccccaccggccccgctggagccccaactggttctggaggaggcctgtgagcagcatcgccatggagatgagcggcaggaacagcggcccctag

SEQ ID NO: 24124 - DNA, 1791 bp, Artificial Sequence
  derived and/or modified sequence
atgaagatgcagaagggaaatgtgctgctgatgtttggcctgctgctgcacctggaggccgccaccaacagcaatgagaccagcaccagcgccaacacaggcagcagcgtcatcagcagcggggccagcacagccaccaacagcggcagctctgtgaccagcagtggagtgtccacagccaccatcagcggcagctctgtgaccagcaatggagtgtccatcgtgaccaacagcgagttccacaccaccagcagcggcatcagcacagccaccaacagcgagttcagcacagccagcagcggcatcagcatcgccaccaacagcgagagcagcaccaccagcagcggggccagcacagccaccaacagcgagagcagcacccccagcagcggggccagcacagtgaccaacagcggcagctctgtgaccagcagcggggccagcacagccaccaacagcgagagcagcacagtgagcagccgggccagcacagccaccaacagcgagagcagcaccctgagcagcggggccagcacagccaccaacagcgacagcagcaccaccagcagcggggccagcacagccaccaacagcgagagcagcaccaccagcagcggggccagcacagccaccaacagcgagagcagcacagtgagcagccgggccagcacagccaccaacagcgagagcagcaccaccagcagcggggccagcacagccaccaacagcgagagcaggaccaccagcaatggagctggaacagccaccaacagcgagagcagcaccaccagcagcggggccagcacagccaccaacagcgacagcagcacagtgagcagcggggccagcacagccaccaacagcgagagcagcaccaccagcagcggggccagcacagccaccaacagcgagagcagcaccaccagcagcggggccagcacagccaccaacagcgacagcagcaccaccagcagtggagctggaacagccaccaacagcgagagcagcacagtgagcagcggcatcagcacagtgaccaacagcgagagcagcacccccagcagcggggccaacacagccaccaacagcgagagcagcaccaccagcagcggggccaacacagccaccaacagcgagagcagcacagtgtcctctggggccagcacagccaccaacagcgagagcagcaccaccagcagcggcgtgtccacagccaccaacagcgagagcagcaccaccagcagcggggccagcacagccaccaacagcgacagcagcaccaccagcagcgaggccagcacagccaccaacagcgagagcagcacagtgagcagcggcatcagcacagtgaccaacagcgagagcagcaccaccagcagcggggccaacacagccaccaacagcggcagctctgtgaccagcgctggcagcggcacagctgccctgaccggcatgcacaccaccagccacagcgccagcacagctgtgtctgaggccaagccaggcggcagcctggtgccctgggagatcttcctgatcaccctggtgtctgtggtggccgctgtgggcctgtttgctggcctcttcttctgtgtgaggaacagcctgagcctgaggaacaccttcaacacagctgtgtaccacccccacggcctgaaccacggcctgggccctggccctgggggcaaccacggggccccccaccggccccgctggagccccaactggttctggaggaggcctgtgagcagcatcgccatggagatgagcggcaggaacagcggcccctag

SEQ ID NO: 24125 - DNA, 1701 bp, Artificial Sequence
  derived and/or modified sequence
atgaagatgcagaagggaaatgtgctgctgatgtttggcctgctgctgcacctggaggccgccaccaacagcaatgagaccagcaccagcgccaacacaggcagcagcgtcatcagcagcggggccagcacagccaccaacagcggcagctctgtgaccagcagtggagtgtccacagccaccatcagcggcagctctgtgaccagcaatggagtgtccatcgtgaccaacagcgagttccacaccaccagcagcggcatcagcacagccaccaacagcgagttcagcacagccagcagcggcatcagcatcgccaccaacagcgagagcagcaccaccagcagcggggccagcacagccaccaacagcgagagcagcacccccagcagcggggccagcacagccaccaacagcgagagcagcaccctgagcagcggggccagcacagccaccaacagcgacagcagcaccaccagcagcggggccagcacagccaccaacagcgagagcagcaccaccagcagcggggccagcacagccaccaacagcgagagcagcacagtgagcagccgggccagcacagccaccaacagcgagagcagcaccaccagcagcggggccagcacagccaccaacagcgagagcaggaccaccagcaatggagctggaacagccaccaacagcgagagcagcaccaccagcagcggggccagcacagccaccaacagcgacagcagcacagtgagcagcggggccagcacagccaccaacagcgagagcagcaccaccagcagcggggccagcacagccaccaacagcgagagcagcaccaccagcagcggggccagcacagccaccaacagcgacagcagcaccaccagcagtggagctggaacagccaccaacagcgagagcagcacagtgagcagcggcatcagcacagtgaccaacagcgagagcagcacccccagcagcggggccaacacagccaccaacagcgagagcagcaccaccagcagcggggccaacacagccaccaacagcgagagcagcacagtgtcctctggggccagcacagccaccaacagcgagagcagcaccaccagcagcggcgtgtccacagccaccaacagcgagagcagcaccaccagcagcggggccagcacagccaccaacagcgacagcagcaccaccagcagcgaggccagcacagccaccaacagcgagagcagcacagtgagcagcggcatcagcacagtgaccaacagcgagagcagcaccaccagcagcggggccaacacagccaccaacagcggcagctctgtgaccagcgctggcagcggcacagctgccctgaccggcatgcacaccaccagccacagcgccagcacagctgtgtctgaggccaagccaggcggcagcctggtgccctgggagatcttcctgatcaccctggtgtctgtggtggccgctgtgggcctgtttgctggcctcttcttctgtgtgaggaacagcctgagcctgaggaacaccttcaacacagctgtgtaccacccccacggcctgaaccacggcctgggccctggccctgggggcaaccacggggccccccaccggccccgctggagccccaactggttctggaggaggcctgtgagcagcatcgccatggagatgagcggcaggaacagcggcccctag

SEQ ID NO: 24126 - DNA, 1701 bp, Artificial Sequence
  derived and/or modified sequence
atgaagatgcagaagggaaatgtgctgctgatgtttggcctgctgctgcacctggaggccgccaccaacagcaatgagaccagcaccagcgccaacacaggcagcagcgtcatcagcagcggggccagcacagccaccaacagcggcagctctgtgaccagcagtggagtgtccacagccaccatcagcggcagctctgtgaccagcaatggagtgtccatcgtgaccaacagcgagttccacaccaccagcagcggcatcagcacagccaccaacagcgagttcagcacagccagcagcggcatcagcatcgccaccaacagcgagagcagcaccaccagcagcggggccagcacagccaccaacagcgagagcagcacccccagcagcggggccagcacagccaccaacagcgagagcagcaccctgagcagcggggccagcacagccaccaacagcgacagcagcaccaccagcagcggggccagcacagccaccaacagcgagagcagcaccaccagcagcggggccagcacagccaccaacagcgagagcagcacagtgagcagccgggccagcacagccaccaacagcgagagcagcaccaccagcagcggggccagcacagccaccaacagcgagagcaggaccaccagcaatggagctggaacagccaccaacagcgagagcagcaccaccagcagcggggccagcacagccaccaacagcgacagcagcaccaccagcagcggggccggcacagccaccaacagcgagagcagcaccaccagcagcggggccagcacagccaccaacagcgagagcagcaccaccagcagcggggccagcacagccaccaacagcgacagcagcaccaccagcagtggagctggaacagccaccaacagcgagagcagcacagtgagcagcggcatcagcacagtgaccaacagcgagagcagcacccccagcagcggggccaacacagccaccaacagcgagagcagcaccaccagcagcggggccaacacagccaccaacagcgagagcagcacagtgtcctctggggccagcacagccaccaacagcgagagcagcaccaccagcagcggcgtgtccacagccaccaacagcgagagcagcaccaccagcagcggggccagcacagccaccaacagcgacagcagcaccaccagcagcgaggccagcacagccaccaacagcgagagcagcacagtgagcagcggcatcagcacagtgaccaacagcgagagcagcaccaccagcagcggggccaacacagccaccaacagcggcagctctgtgaccagcgctggcagcggcacagctgccctgaccggcatgcacaccaccagccacagcgccagcacagctgtgtctgaggccaagccaggcggcagcctggtgccctgggagatcttcctgatcaccctggtgtctgtggtggccgctgtgggcctgtttgctggcctcttcttctgtgtgaggaacagcctgagcctgaggaacaccttcaacacagctgtgtaccacccccacggcctgaaccacggcctgggccctggccctgggggcaaccacggggccccccaccggccccgctggagccccaactggttctggaggaggcctgtgagcagcatcgccatggagatgagcggcaggaacagcggcccctag

SEQ ID NO: 24127 - DNA, 1701 bp, Artificial Sequence
  derived and/or modified sequence
atgaagatgcagaagggcaacgtgctgctgatgttcggcctgctgcttcatctcgaggcagctacaaacagcaatgagacaagtacctcagccaatacaggatcttcagtgatttcctccggggcctctacagcaaccaattccgggagcagcgtgacatcatccggagtgtctacagccacaatttccggctccagcgtgaccagcaacggagtctcaattgtaaccaactctgagtttcataccactagcagcggaatatccacagctacaaattcagagtttagtactgcgtcttctgggataagcatcgccaccaacagtgagagctcaaccacttcttccggagcttccacggcgactaactcggagtcgtctaccccaagttctggcgcatcaacggccaccaactctgacagttccacaacgagcagtggggcttcgacagccacaaactcagacagctccacgaccagctcagaggcatctacagctactaatagcgagagtagtaccacctcctcaggcgctagcacagctaccaactcagagtcttcgaccgtgtcgagccgtgcgagcacagcaacaaacagcgagagctcgaccaccagcagcggcgcatctacggcgacgaactctgagtctcgaacaaccagcaatggggcaggcacggccacaaattctgaatcaagtacaaccagctcaggcgcatcaacagctaccaactccgaaagctccacaccttctagcggagccgggacagccactaatagtgagtcctctaccacatcatcgggtgcaggaaccgcaacaaacagtgagtcttcgactgtttcttctggaatatctactgtaactaacagtgaatcatcaaccccatcctccggagcgaataccgccaccaattccgagagctcaacaacctcttctggtgccaataccgccacaaattccgattcctccactacttccagcggagcctctacggcaacaaacagcgaatcaagcacgacctcatcaggcgccagcacagccacgaactccgaatcaagtacaacctcctcaggagcgagtactgcaacgaactcaggatctagcacaacatccagcggaacgagcaccgctacaaattctgaaagttccactgtctcctccggggcaagtactgccactactagtgaaagttctactacttcttcgggggcatcaactgcaaccaattctgagtccagcactgttagttcaggggcaagtacagcaactaattctgaatccagcaccacatcctccggagctaacacagctacaaattccggaagctcagtgacaagcgcgggcagtggaaccgctgcgctgacgggaatgcacactacgagtcactcggcctcaaccgccgtgtctgaagccaagcccggtgggtcactggtgccttgggaaatctttctcatcacacttgtgagcgtcgtagctgctgtaggtttgtttgcagggctcttcttttgcgtgcggaactccttgtctttacgaaatactttcaacaccgccgtctaccatccacacgggctcaaccacggcctgggccctggaccagggggaaaccacggggcaccccatcgccctagatggtccccaaactggttttggaggcgccctgtgagttcaatcgcaatggagatgagcgggcgaaattccgggccgtag

SEQ ID NO: 24128 - DNA, 1701 bp, Artificial Sequence
  derived and/or modified sequence
atgaagatgcagaagggcaacgtgctgctgatgttcggcctgctgctacatctcgaggccgccacaaactctaatgaaacctcgacatcggctaatactggcagcagtgtgatttcctccggtgcatccaccgccacaaattctggcagtagcgtgactagttctggtgtcagtacagccaccatctccgggagctccgtgaccagtaatggagtgtcaatcgtgacaaattctgagttccacacaacctcaagtggcattagcaccgctacgaactctgagttttctacagcgtccagtggcattagtattgcgaccaactctgagtcttcgacaacctctagcggtgcaagtacagctaccaattcagagtccagtactccttcctctggcgcaagtactgcaaccaattcagattcttctacaacctcttcgggagcttccaccgcaaccaatagtgatagctctaccacttccagtgaggccagtaccgcgacgaactccgaaagctcaactacttcttcgggtgcttccaccgctacaaacagcgagtcttccactgtaagctcccgggcctccactgccaccaactctgagtcaagtaccacatcatctggcgcttctacagctaccaactctgaaagtcggaccacatcaaacggtgcaggaacagccacaaatagcgaatcaagcaccacaagctctggtgcgtccaccgcaactaatagcgaaagttctaccccttctagcggcgcaggtactgcgacgaactccgagagctctactacttcctcaggggccgggaccgcaacaaattctgaatcatctaccgtaagctccggcatttcaaccgtcaccaatagcgagtcctcaaccccctcttctggggcgaatactgctacaaacagcgagtcgagtactaccagctctggcgctaacactgccacaaactcagactcttctacaaccagctctggggccagcaccgcaacaaattctgaatcgtccaccacaagcagtggagcctcgacagccaccaactctgaaagctccactactagctctggtgccagtacagccactaattccggaagttctacgacaagttccggcactagcactgctacaaactccgagagttccacagtgtcgtctggcgcctccacggcaacgacgtctgaatcctctacgacaagcagcggggcaagcacagctacgaattctgagtcctccacggttagttccggggccagtaccgctacaaattccgaatccagtacgacgtccagtggggccaacaccgcgaccaactccggtagctcagtgaccagcgccggctctggcactgccgccctgactggaatgcacaccacgtcccactcggcctctaccgccgtaagtgaagccaaaccaggaggctccctagtcccatgggagatctttctcattaccctggtttctgttgtagcagcggtgggtcttttcgctggacttttcttttgcgtgagaaatagtctgtcgctgcgcaacaccttcaacaccgccgtctatcacccccatggacttaatcatggcctgggcccaggccctgggggtaatcatggcgctcctcacaggccaagatggtccccgaattggttctggcggcggccagtcagcagcattgccatggagatgtccggcagaaatagcggaccctag

SEQ ID NO: 24129 - DNA, 1701 bp, Artificial Sequence
  derived and/or modified sequence
atgaagatgcagaagggcaacgtgctgctgatgttcggcctgctgcttcacctcgaggctgccacaaactcaaatgaaacttcaacaagcgcgaataccgggagttccgtgatctcttccggtgcctccaccgcaacgaactctggctcttccgtgacctcatctggcgtttccaccgcgaccatctcaggaagcagcgtgacgtcaaatggggtctcaattgtcaccaattccgagttccatactacttccagcggcatcagcaccgccaccaactcagagttttcaacggcttcgagcggaatttcaatcgccaccaacagtgagagtagcactacatccagcggcgcatctacagccacaaattcggagtcatctactccctctagtggtgcctcaactgcaacaaattccgacagctcaaccacatcaagtggtgcttccacagcaactaatagtgacagctccacgacaagttccgaggctagtacagcaaccaacagcgaaagttctactacctcgtcaggcgcatccacagccacaaattccgaatcgagcaccgtctcttcgcgtgcgagtaccgccaccaactcagaatcatccaccacgagcagcggagcctcaacagcaacaaattccgaaagcaggacgacctccaacggagctgggaccgctaccaattccgaatcgagcactaccagcagcggtgcctctactgccacaaattccgagagcagcacaccaagctccggtgcaggcaccgctacaaattctgagagttccaccacaagctccggagctggtacggcaaccaatagcgagtcctctacggtgtctagtggcatctctactgttaccaattctgagagttcaaccccttcatccggagccaatacagccactaactctgagtcttccaccacatccagtggtgcaaacacggctactaacagcgattcctctaccacaagtagcggcgcaagtacagccacaaactctgagagctctaccacaagctcgggggcaagtacagcaactaactcagagtcttcaaccacctcaagtggggccagtaccgccaccaactcaggttccagcactacttcaagcggaacgtcgaccgccaccaatagcgaaagcagtaccgtatcctctggggccagtacagctactacaagcgaatccagtacaacctcctctggggcttcaactgccactaattcggagtcgtccaccgtgagcagtggagcctctaccgctaccaattccgaatcctccacgacttcttccggggcgaatactgccacaaacagcggcagtagtgtaacttccgcgggttccggtaccgctgctctgacagggatgcacaccacctcccattcagcttccactgctgtttccgaggctaagccgggggggtctctggtgccatgggagatttttctcatcactttagtgtccgtggtggcggctgtgggtctcttcgccggtctcttcttttgcgtgagaaattctctgtccctcagaaatacttttaatactgcagtgtatcacccccacgggctgaaccatggtcttggccctgggccagggggcaatcacggcgcaccccatcgccctcggtggtccccaaactggttctggcgcagaccggtgtctagcattgcaatggagatgtcaggaagaaacagtggtccttag

SEQ ID NO: 24130 - DNA, 1251 bp, Artificial Sequence
  derived and/or modified sequence
atgaagatgcagaagggcaacgtgctgctgatgttcggcctgctgcttcatctggaggccgccacaaactccaacgagacatccacctcagccaacaccggatcctctgtgatctcttcgggagcaagcacagccactaactccggatcttctgtgacctcctcgggagtttccacggcaacaatctccggttcctccgtgacctccaatggtgtgagtatcgtgacaaattccgagttccatacgacctcaagtggaatttcaacggctaccaattcggagttcagtactgcctcttccggtatttctatagccaccaactctgagtcctcgaccacctcttccggtgcgagcaccgccacaaattcagagtcctcaacacccagtagtggagcttccacagctaccaactctgactcaagtaccacatcttctggagcctctactgcaaccaacagcgactcgtccacgactagttccgaggcctccactgctacaaacagtgagtcttcaaccacgtccagcggagcttcaacagccaccaactcagaatccagcactaccagctctggagcttctaccgccaccaacagcgaatcctccaccacatcgagcggggcttccaccgccaccaactccggaagttcaaccacatcgagcggcaccagcactgccacgaacagcgaatcctcgactgtgagctctggagcttcaaccgctacaacgagcgaaagctccaccacttcctcgggggccagcaccgctactaattcggagtccagtaccgtaagcagtggcgccagtacagccactaactctgagtctagtaccacttcaagcggcgcaaacaccgccacgaactctggaagcagcgtgacatctgccggaagtgggacagcagcgttaacaggtatgcacaccaccagccacagtgcatccacagctgtcagcgaggcaaaacccggcggaagtctcgtgccatgggagatatttctgatcacccttgtgtctgtggtagctgcggtgggactgtttgctggcctgtttttttgcgtcaggaactcactctccttgcggaatacctttaatacggctgtctaccatcctcatggcctgaaccatggcctggggccaggtccaggaggtaatcatggcgctcctcatcggccgcggtggtcccctaactggttttggaggcgaccagtcagttctatcgcaatggaaatgagcggaaggaactctggaccatag

SEQ ID NO: 24131 - DNA, 1251 bp, Artificial Sequence
  derived and/or modified sequence
atgaagatgcagaagggcaacgtgctgctgatgttcggcctgctgctgcacctggaagctgcaacgaactccaacgagactagtacctccgcaaataccggatcatcagtgatcagttcgggtgcctcaaccgccaccaactctggctcgtctgtgacttcaagtggggtatcgacagctaccattagtggtagttccgtcacatcaaacggggtcagcatagttactaattccgaattccatacaacctcatcgggcatctcgaccgccacaaattctgaattcagtactgcctcttcagggatcagtatcgcaaccaactctgagtcaagtaccacaagttctggcgcttctaccgctactaacagcgagtctagcacgccgtctagcggggcaagcaccgccaccaatagcgatagctccacgacatcttctggagcttctacagccactaacagcgattcttctaccacatcttccgaggcttccacagccacaaactccgaaagtagcacgacctcttccggggcctccactgccacaaatagtgaatcttccacgacatccagtggcgccagtacagcaacgaatagtgagagctctacgactagttccggagcatcaactgcaacaaattcaggctctagcaccacttcaagtggaactagtaccgctacgaactccgaatcatctaccgtttcatccggcgcaagcaccgctacaacatctgagtccagcacaacctccagtggggcttcaaccgccacaaacagcgaaagcagcaccgtctctagtggagcttcaaccgccactaactccgagagcagtacaacttcaagtggggctaacacagccaccaattcagggtctagcgtgacgtccgccggctcaggaactgcggccctgaccggaatgcataccaccagtcattctgctagtaccgcagtcagtgaagcaaagcctggtggatcactcgtcccgtgggagatcttcttgattacgctagtgagcgtggtggcggccgtggggctgtttgccggactcttcttctgtgtaagaaatagtctaagtctccggaatacctttaataccgccgtgtaccatccacacgggctgaaccacggtcttggccctgggcctggcggaaaccacggtgcccctcatagacctcgctggtctcccaattggttctggaggcgacctgtttcctcaatagccatggagatgtccggtcggaactctggcccgtag

SEQ ID NO: 24132 - DNA, 1251 bp, Artificial Sequence
  derived and/or modified sequence
atgaagatgcagaagggcaacgtgctgctgatgttcggcctgctgttgcatctggaggctgctactaatagtaacgagacctccacaagcgctaacacagggtccagcgtgatcagctcaggcgcttccacagccacaaatagtggcagcagtgtcaccagtagcggcgtgtctaccgccacaattagtggcagctccgtcaccagcaacggggtcagtatcgtcaccaattccgagtttcacacaacatccagcggcatttccactgctacaaattcagaattctccaccgcgtcctccggcatcagtatcgccacgaatagtgaaagttctaccacttcatctggagcctctaccgcaactaatagcgagtcctctactccatcatctggtgcgagcactgccacaaactctgattcatctacgactagtagcggagcgagtaccgctaccaactccgacagctcaaccacctcttctgaggcgtcgacagccacgaacagcgagagttctaccacatcttccggtgcgagtacagccacgaattcggagtcatcaaccacttctagtggagcttctacagcgacaaactccgaaagcagtaccactagcagcggggcatcgacagcaacaaatagtggatccagcaccacaagctccggcacctctactgcgacaaactctgaaagcagcacagttagtagcggcgcctctaccgctacaacttccgaatctagcacaacaagttctggtgctagcacagcgacgaacagcgaatcctctactgtaagctcaggtgcctctaccgcgactaattcggagagcagtacaacgagtagtggcgccaacacggcgactaacagtggttcctctgtgacttctgcgggctctggaacggctgccctgaccggcatgcatactacatctcacagcgcaagcacggccgtctctgaagcaaagcctggaggatctctggtcccttgggagatcttcctcattaccctcgttagtgtggtggcagccgtaggactgtttgccgggctcttcttctgtgtgaggaactccctctcactgaggaatacatttaacacagcagtataccacccccatggtctcaaccacggcctgggccccggtccgggcggaaatcatggtgctccccaccgtccccgctggtcacccaactggttttggaggagacccgtgtcaagcattgcaatggagatgagcggtcggaacagtggcccctag

SEQ ID NO: 24133 - DNA, 1701 bp, Artificial Sequence
  derived and/or modified sequence
atgaagatgcagaagggcaacgtgctgctgatgttcggcctgctgcttcacctcgaagccgccactaacagtaatgaaacttcaaccagcgccaacacaggatcttccgtgatctctagtggtgccagcacagctaccaactccggttcctctgtaaccagcagtggagtgtcaacagcgacaatcagcggaagctctgtgactagcaacggagtgtccattgtcacaaattctgagttccacaccacttcctctggcatctctactgccacaaattccgaattctctacagtgtcctccggaatctctatcgcaaccaactctgagtcatcaaccacgtcctcgggagcttcgaccgctaccaattcagaatcaagtactccctcatctggcgcatccactgccacaaatagcgatagttctacaacctcgagtggagcttctaccgccactaattcagacagctctacaaccagtagcgaggcctccacagccactaactcagagagttccaccacgagtagtggcgcaagtaccgtgactaacagcgaatcatccacagtgtcctcccgcgctagcacagcaaccaattcagaatcctccactacaagttcaggtgccagcactgccaccaattccgaaagtcgcacaaccagtaatggcgccggcaccgcaactaatagcgagagttctacaacgagctccggggcctctaccgcaacgaactccgagagcagcacaccgtccagtggtgccggaactgcaactaactcagaatcatcaacgacaagctctggagccggaacagccaccaatagcgagagttccacagtgtcatccgggatcagcacggtgaccaacagcgagtccagtacacccagcagtggagccaatacggcaactaattcggaaagcagcactacctcctctggggccaatacggcgacaaattctgactctagcaccactagctcaggcgcgtccactgctaccaacagcgagtcgtctacgactagcagtggcgcctcgacagccactaactccgaaagcagcacaacatcctcgggcgctagtactgccaccaacagcggctcgtcaacaacatcctccggcacctcaacagccaccaattccgagtcttcaacggttagttcaggcgcaagtacagctactacaagtgaatcgagcacgacttcatccggagctagcactgcaactaacagcgagtcatccactgtctcttccggggcgtctactgccacaaacagcgagtcctctactactagctctggggccaacaccgcaacaaattctggatcatcggtgacatcagctggctcaggtactgccgcactcacaggcatgcacaccacttcacatagcgcatccacagccgtgagtgaagcgaagcctggcggatctctggtgccatgggaaatctttctgataactcttgtatctgtggttgcagccgtgggactgttcgccgggctgtttttctgtgtcaggaactctctaagtctgaggaacacctttaatacagcggtctaccatccccatgggctaaaccatggattaggcccgggccccggaggcaatcacggggcaccacacaggccgaggtggagtccaaactggttttggagacgacctgtttcatccatcgccatggagatgtctggacgcaacagcggaccctag

SEQ ID NO: 24134 - DNA, 1251 bp, Artificial Sequence
  derived and/or modified sequence
atgaagatgcagaagggcaacgtgctgctgatgttcggcctgctgttgcacttagaggccgccacaaactccaacgagacgagcacatcagccaacactggaagttccgtgatcagcagcggcgccagcaccgccactaactcaggatcctccgtgacctcttcaggggtgtctacagccactatctccggaagttccgtcacaagtaatggagtctccatcgtcacaaattccgagttccatactacatcctctggcatcagcacagcaacaaattccgaattttctaccgtgagcagcggaatatccatcgcaactaattccgagtcctccacaacaagcagtggagcaagtaccgcaactaacagtgagtcatctactccatctagcggggcatcaacagctacgaattctgatagttctaccaccagcagcggggcttctactgcgacaaactccgactcctctacaaccagcagtgaggccagcacagcaactaactctgaaagttcaaccacgagttccggagcaagcactgccactaattccgaaagcagcactacttcaagcggggcttcaaccgctactaactccgagtcctctactacctcatctggggccagcactgctaccaattcaggtagttctactacttcttcaggaacatcaacagcgaccaactccgagagctccactgtgagctcaggggcctctaccgccaccacaagcgagtcctctacgaccagctcaggggcatccaccgccaccaatagcgaaagttctaccgtgtcttctggtgcgtccactgcgacgaattcagaatctagcacaaccagcagtggcgcaaacacagccacgaatagtggatcttctgtaactagcgccggttccggtacagctgccttgacgggtatgcacactaccagccattctgcaagcacggcagtgtcggaggccaagccaggaggcagcttggtgccctgggagatcttcctgatcaccctggtgtctgtggtggctgcagtggggctgtttgctggcctgtttttttgtgtcaggaatagcctcagcttgagaaacaccttcaacacggccgtgtatcatcctcatgggctgaatcacggcctcgggccaggccccgggggtaaccacggggcccctcataggccacggtggagtccaaactggttctggaggcggccagtttcctctatcgctatggagatgagtggacggaattcaggtccatag

SEQ ID NO: 24135 - DNA, 3651 bp, Artificial Sequence
  derived and/or modified sequence
agagaaagaggcaactacattgcctggaggaagcctaaggaacccaggcatccagctgcccacgcctgagtccaagattcttcccaggaacacaaacgtaggagacccacgctcctggaagcaccagcctttatctcttcaccttcaagtcccctttctcaagaatcctctgttctttgccctctaaagtcttggtacatctaggacccaggcatcttgctttccagccacaaagagacagatgaagatgcagaaaggaaatgttctccttatgtttggtctactattgcatttagaagctgcaacaaattccaatgagactagcacctctgccaacactggatccagtgtgatctccagtggagccagcacagccaccaactctgggtccagtgtgacctccagtggggtcagcacagccaccatctcagggtccagcgtgacctccaatggggtcagcatagtcaccaactctgagttccatacaacctccagtgggatcagcacagccaccaactctgagttcagcacagcgtccagtgggatcagcatagccaccaactctgagtccagcacaacctccagtggggccagcacagccaccaactctgagtccagcacaccctccagtggggccagcacagccaccaactctgactccagcacaacctccagtggggctagcacagccaccaactctgactccagcacaacctccagtgaggccagcacagccaccaactctgagtccagcacaacctccagtggggccagcacagccaccaactctgagtccagcacagtgtccagtagggccagcactgccaccaactctgagtccagcacaacctccagtggggccagcacagccaccaactctgagtccagaacgacctccaatggggctggcacagccaccaactctgagtccagcacgacctccagtggggccagcacagccaccaactctgagtccagcacaccctccagtggggccggcacagccaccaactctgagtccagcacgacctccagtggggccggcacagccaccaactctgagtccagcacagtgtccagtgggatcagcacagtcaccaattctgagtccagcacaccctccagtggggccaacacagccaccaactctgagtccagtacgacctccagtggggccaacacagccaccaactctgactccagcacaacctccagtggggccagcacagccaccaactctgagtccagcacgacctccagtggggccagcacagccaccaactctgagtccagcacaacctccagtggggccagcacagccaccaactctgggtccagcacgacctccagtgggaccagcacagccaccaactctgagtccagcacagtgtccagtggggccagcacagccaccacctctgagtccagcacgacctccagtggggccagcacagccaccaactctgagtccagcacagtgtccagtggggccagcactgccaccaattctgagtccagcacaacctccagtggggccaacacagccaccaactctgggtccagtgtgacctctgcaggctctggaacagcagctctgactggaatgcacacaacttcccatagtgcatctactgcagtgagtgaggcgaagcctggtgggtccctggtgccgtgggaaatcttcctcatcaccctggtctcggttgtggcggccgtggggctctttgctgggctcttcttctgtgtgagaaacagcctgtccctgagaaacacctttaacacagctgtctaccaccctcatggcctcaaccatggccttggtccaggccctggagggaatcatggagccccccacaggcccaggtggagtcctaactggttctggaggagaccagtatcctcgatagccatggagatgagcgggaggaacagcgggccctgagcagccccggaagcaagtgccgcattcttcaggaaggaagagacctgggcacccaagacctggtttcctttcattcatcccaggagacccctcccagctttgtttgagatcctgaaaatcttgaagaaggtattcctcacctttcttgcctttaccagacactggaaagagaatactatattgctcatttagctaagaaataaatacatctcatctaacacacacgacaaagagaagctgtgcgtgccccggggtgggtatctagctctgagatgaactcagttataggagaaaacctccatgctggactccatctggcattcaaaatctccacagtaaaatccaaagacctcattcttatctgtgtgtctgcattttctaatcctttttgccccaggcaaggtccctgtatctctgagacaccccgattggctggagaattgacttgggagagataaggagggagggcgggtgccagcatgctatgggctcctgcgtgaggcctgtggtacacagagattaggttgtgatacatgaagagccaagagcaggatgaggtggaggcgttacaactacctgctctgtgtgtggggggggaggggggaggggggtacgcatattcacttgaagtcgaggttcccagggcatttccatgtgctccaggcctgactacccatcagggtggaggagctggtgacactcatctccctgagtgctccctggtttcccaagggaaagactttctggcctgctgaggtcgaatcttccaagaggctcttgcaaagacccgagattctcataaatccccgcccagaagagctgcacgtatccctttcatgagtccagggaagagggtcctccaggtcttggaagacagaggggagctgctttagaggctaagttgctttgagcccacaaggtaatggagggctcctacttgggacagagccctcagcagagaattagcagtctgttggtgggttcaccccaactcacagcagtagaaactgctccatcttccaccacttattgggtttctccagtgtcagcaaaccaaagaattggatcttaccaatgcggctataggaaaacagcctgttgcatggtaagagtgataccatcttgaagtgaaaccaccacaatggccattttttttttagatggagttttgcagtggtgcaatcatagctcattgcagccttcaattcctgggctcaggcaatcctcctgcctcagcctcctgagtagctgggactacagtttcgtgtgccaccatgcctggctaatttttagaattttttgtagggacagggcctcactctgttgcacaagctggtcttgaactcctggcctccttgaactcctcctgccttggcctcccaaaatgctgagattacaggtgtgagccactgcacctcgccagatgtccaatgtctgactcctgcataccaaggtgttctgtatcaagggctttaaaacaatgcctgtagcgtaattaacctctcacaaagatgcttatctaacctccccagcagtcatgggtttcagcaagaaagtctgtgatgtgaccagttgcacatgttttcccctaaaagcttactctagaaaggatattttttggagagggagtgtgggaatccaccatcttgtggccacctcagacatcacttctctttggaagactccattaaatatttctctgtgagaaa

SEQ ID NO: 24136 - DNA, 3651 bp, Artificial Sequence
  derived and/or modified sequence
agagaaagaggcaactacattgcctggaggaagcctaaggaacccaggcatccagctgcccacgcccgagtccaagattcttcccaggaacacaaacgtaggagacccacgctcctggaagcaccagcctttatctcttcaccttcaagtcccctttctcaagaatcctctgttctttgccctctaaagtcttggtacatctaggacccaggcatcttgctttccagccacaaagagacagatgaagatgcagaaaggaaatgttctccttatgtttggtctactattgcatttagaagctgcaacaaattccaatgagactagcacctctgccaacactggatccagtgtgatctccagtggagccagcacagccaccaactctgggtccagtgtgacctccagtggggtcagcacagccaccatctcagggtccagcgtgacctccaatggggtcagcatagtcaccaactctgagttccatacaacctccagtgggatcagcacagccaccaactctgagttcagcacagcgtccagtgggatcagcatagccaccaactctgagtccagcacaacctccagtggggccagcacagccaccaactctgagtccagcacaccctccagtggggccagcacagccaccaactctgactccagcacaacctccagtggggctagcacagccaccaactctgactccagcacaacctccagtgaggccagcacagccaccaactctgagtccagcacaacctccagtggggccagcacagccaccaactctgagtccagcacagtgtccagtagggccagcactgccaccaactctgagtccagcacaacctccagtggggccagcacagccaccaactctgagtccagaacgacctccaatggggctggcacagccaccaactctgagtccagcacgacctccagtggggccagcacagccaccaactctgagtccagcacaccctccagtggggccggcacagccaccaactctgagtccagcacgacctccagtggggccggcacagccaccaactctgagtccagcacagtgtccagtgggatcagcacagtcaccaattctgagtccagcacaccctccagtggggccaacacagccaccaactctgagtccagtacaacctccagtggggccaacacagccaccaactctgactccagcacaacctccagtggggccagcacagccaccaactctgagtccagcacgacctccagtggggccagcacagccaccaactctgagtccagcacaacctccagtggggccagcacagccaccaactctgggtccagcacgacctccagtgggaccagcacagccaccaactctgagtccagcacagtgtccagtggggccagcacagccaccacctctgagtccagcacgacctccagtggggccagcacagccaccaactctgagtccagcacagtgtccagtggggccagcactgccaccaattctgagtccagcacaacctccagtggggccaacacagccaccaactctgggtccagtgtgacctctgcaggctctggaacagcagctctgactggaatgcacacaacttcccatagtgcatctactgcagtgagtgaggcgaagcctggtgggtccctggtgccgtgggaaatcttcctcatcaccctggtctcggttgtggcggccgtggggctctttgctgggctcttcttctgtgtgagaaacagcctgtccctgagaaacacctttaacacagctgtctaccaccctcatggcctcaaccatggccttggtccaggccctggagggaatcatggagccccccacaggcccaggtggagtcctaactggttctggaggagaccagtatcctcgatagccatggagatgagcgggaggaacagcgggccctgagcagccccggaagcaagtgccgcattcttcaggaaggaagagacctgggcacccaagacctggtttcctttcattcatcccaggagacccctcccagctttgtttgagatcctgaaaatcttgaagaaggtattcctcacctttcttgcctttaccagacactggaaagagaatactatattgctcatttagctaagaaataaatacatctcatctaacacacacgacaaagagaagctgtgcgtgccccggggtgggtatctagctctgagatgaactcagttataggagaaaacctccatgctggactccatctggcattcaaaatctccacagtaaaatccaaagacctcattcttatctgtgtgtctgcattttctaatcctttttgccccaggcaaggtccctgtatctctgagacaccccgattggctggagaattgacttgggagagataaggagggagggcgggtgccagcatgctatgggctcctgcgtgaggcctgtggtacacagagattaggttgtgatacatgaagagccaagagcaggatgaggtggaggcgttacaactacctgctctgtgtgtggggggggaggggggaggggggtacgcatattcacttgaagtcgaggttcccagggcatttccatgtgctccaggcctgactacccatcagggtggaggagctggtgacactcatctccctgagtgctccctggtttcccaagggaaagactttctggcctgctgaggtcgaatcttccaagaggctcttgcaaagacccgagattctcataaatccccgcccagaagagctgcacgtatccctttcatgagtccagggaagagggtcctccaggtcttggaagacagaggggagctgctttagaggctaagttgctttgagcccacaaggtaatggagggctcctacttgggacagagccctcagcagagaattagcagtctgttggtgggttcaccccaactcacagcagtagaaactgctccatcttccaccacttattgggtttctccagtgtcagcaaaccaaagaattggatcttaccaatgcggctataggaaaacagcctgttgcatggtaagagtgataccatcttgaagtgaaaccaccacaatggccattttttttttagatggagttttgcagtggtgcaatcatagctcattgcagccttcaattcctgggctcaggcaatcctcctgcctcagcctcctgagtagctgggactacagtttcgtgtgccaccatgcctggctaatttttagaattttttgtagggacagggcctcactctgttgcacaagctggtcttgaactcctggcctccttgaactcctcctgccttggcctcccaaaatgctgagattacaggtgtgagccactgcacctcgccagatgtccaatgtctgactcctgcataccaaggtgttctgtatcaagggctttaaaacaatgcctgtagcgtaattaacctctcacaaagatgcttatctaacctccccagcagtcatgggtttcagcaagaaagtctgtgatgtgaccagttgcacatgttttcccctaaaagcttactctagaaaggatattttttggagagggagtgtgggaatccaccatcctgtggccacctcagacatcacttctctttggaagactccattaaatatttctctgtgagaaa

SEQ ID NO: 24137 - DNA, 3206 bp, Artificial Sequence
  derived and/or modified sequence
ctttcacaacagagaaagaggcaactacattgcctggaggaagcctaaggaacccaggcatccagctgcccacgcctgagtccaagattcttcccaggaacacaaacgtaggagacccacgctcctggaagcaccagcctttatctcttcaccttcaagtcccctttctcaagaatcctctgttctttgccctctaaagtcttggtacatctaggacccaggcatcttgctttccagccacaaagagacagatgaagatgcagaaaggaaatgttctccttatgtttggtctactattgcatttagaagctgcaacaaattccaatgagactagcacctctgccaacactggatccagtgtgatctccagtggagccagcacagccaccaactctgggtccagtgtgacctccagtggggtcagcacagccaccatctcagggtccagcgtgacctccaatggggtcagcatagtcaccaactctgagttccatacaacctccagtgggatcagcacagccaccaactctgagttcagcacagcgtccagtgggatcagcatagccaccaactctgagtccagcacaacctccagtggggccagcacagccaccaactctgagtccagcacaccctccagtggggccagcacagccaccaactctgactccagcacaacctccagtggggctagcacagccaccaactctgactccagcacaacctccagtgaggccagcacagccaccaactctgagtccagcacaacctccagtggggccagcacagccaccaactctgagtccagcacgacctccagtggggccagcacagccaccaactctgagtccagcacaacctccagtggggccagcacagccaccaactctgggtccagcacgacctccagtgggaccagcacagccaccaactctgagtccagcacagtgtccagtggggccagcacagccaccacctctgagtccagcacgacctccagtggggccagcacagccaccaactctgagtccagcacagtgtccagtggggccagcactgccaccaattctgagtccagcacaacctccagtggggccaacacagccaccaactctgggtccagtgtgacctctgcaggctctggaacagcagctctgactggaatgcacacaacttcccatagtgcatctactgcagtgagtgaggcgaagcctggtgggtccctggtgccgtgggaaatcttcctcatcaccctggtctcggttgtggcggccgtggggctctttgctgggctcttcttctgtgtgagaaacagcctgtccctgagaaacacctttaacacagctgtctaccaccctcatggcctcaaccatggccttggtccaggccctggagggaatcatggagccccccacaggcccaggtggagtcctaactggttctggaggagaccagtatcctcgatagccatggagatgagcgggaggaacagcgggccctgagcagccccggaagcaagtgccgcattcttcaggaaggaagagacctgggcacccaagacctggtttcctttcattcatcccaggagacccctcccagctttgtttgagatcctgaaaatcttgaagaaggtattcctcacctttcttgcctttaccagacactggaaagagaatactatattgctcatttagctaagaaataaatacatctcatctaacacacacgacaaagagaagctgtgcgtgccccggggtgggtatctagctctgagatgaactcagttataggagaaaacctccatgctggactccatctggcattcaaaatctccacagtaaaatccaaagacctcattcttatctgtgtgtctgcattttctaatcctttttgccccaggcaaggtccctgtatctctgagacaccccgattggctggagaattgacttgggagagataaggagggagggcgggtgccagcatgctatgggctcctgcgtgaggcctgtggtacacagagattaggttgtgatacatgaagagccaagagcaggatgaggtggaggcgttacaactacctgctctgtgtgtggggggggaggggggaggggggtacgcatattcacttgaagtcgaggttcccagggcatttccatgtgctccaggcctgactacccatcagggtggaggagctggtgacactcatctccctgagtgctccctggtttcccaagggaaagactttctggcctgctgaggtcgaatcttccaagaggctcttgcaaagacccgagattctcataaatccccgcccagaagagctgcacgtatccctttcatgagtccagggaagagggtcctccaggtcttggaagacagaggggagctgctttagaggctaagttgctttgagcccacaaggtaatggagggctcctacttgggacagagccctcagcagagaattagcagtctgttggtgggttcaccccaactcacagcagtagaaactgctccatcttccaccacttattgggtttctccagtgtcagcaaaccaaagaattggatcttaccaatgcggctataggaaaacagcctgttgcatggtaagagtgataccatcttgaagtgaaaccaccacaatggccattttttttttagatggagttttgcagtggtgcaatcatagctcattgcagccttcaattcctgggctcaggcaatcctcctgcctcagcctcctgagtagctgggactacagtttcgtgtgccaccatgcctggctaatttttagaattttttgtagggacagggcctcactctgttgcacaagctggtcttgaactcctggcctccttgaactcctcctgccttggcctcccaaaatgctgagattacaggtgtgagccactgcacctcgccagatgtccaatgtctgactcctgcataccaaggtgttctgtatcaagggctttaaaacaatgcctgtagcgtaattaacctctcacaaagatgcttatctaacctccccagcagtcatgggtttcagcaagaaagtctgtgatgtgaccagttgcacatgttttcccctaaaagcttactctagaaaggatattttttggagagggagtgtgggaatccaccatcttgtggccacctcagacatcacttctctttggaagactccattaaatatttctctgtg

SEQ ID NO: 24138 - DNA, 3206 bp, Artificial Sequence
  derived and/or modified sequence
ctttcacaacagagaaagaggcaactacattgcctggaggaagcctaaggaacccaggcatccagctgcccacgcccgagtccaagattcttcccaggaacacaaacgtaggagacccacgctcctggaagcaccagcctttatctcttcaccttcaagtcccctttctcaagaatcctctgttctttgccctctaaagtcttggtacatctaggacccaggcatcttgctttccagccacaaagagacagatgaagatgcagaaaggaaatgttctccttatgtttggtctactattgcatttagaagctgcaacaaattccaatgagactagcacctctgccaacactggatccagtgtgatctccagtggagccagcacagccaccaactctgggtccagtgtgacctccagtggggtcagcacagccaccatctcagggtccagcgtgacctccaatggggtcagcatagtcaccaactctgagttccatacaacctccagtgggatcagcacagccaccaactctgagttcagcacagcgtccagtgggatcagcatagccaccaactctgagtccagcacaacctccagtggggccagcacagccaccaactctgagtccagcacaccctccagtggggccagcacagccaccaactctgactccagcacaacctccagtggggctagcacagccaccaactctgactccagcacaacctccagtgaggccagcacagccaccaactctgagtccagcacaacctccagtggggccagcacagccaccaactctgagtccagcacgacctccagtggggccagcacagccaccaactctgagtccagcacaacctccagtggggccagcacagccaccaactctgggtccagcacgacctccagtgggaccagcacagccaccaactctgagtccagcacagtgtccagtggggccagcacagccaccacctctgagtccagcacgacctccagtggggccagcacagccaccaactctgagtccagcacagtgtccagtggggccagcactgccaccaattctgagtccagcacaacctccagtggggccaacacagccaccaactctgggtccagtgtgacctctgcaggctctggaacagcagctctgactggaatgcacacaacttcccatagtgcatctactgcagtgagtgaggcgaagcctggtgggtccctggtgccgtgggaaatcttcctcatcaccctggtctcggttgtggcggccgtggggctctttgctgggctcttcttctgtgtgagaaacagcctgtccctgagaaacacctttaacacagctgtctaccaccctcatggcctcaaccatggccttggtccaggccctggagggaatcatggagccccccacaggcccaggtggagtcctaactggttctggaggagaccagtatcctcgatagccatggagatgagcgggaggaacagcgggccctgagcagccccggaagcaagtgccgcattcttcaggaaggaagagacctgggcacccaagacctggtttcctttcattcatcccaggagacccctcccagctttgtttgagatcctgaaaatcttgaagaaggtattcctcacctttcttgcctttaccagacactggaaagagaatactatattgctcatttagctaagaaataaatacatctcatctaacacacacgacaaagagaagctgtgcgtgccccggggtgggtatctagctctgagatgaactcagttataggagaaaacctccatgctggactccatctggcattcaaaatctccacagtaaaatccaaagacctcattcttatctgtgtgtctgcattttctaatcctttttgccccaggcaaggtccctgtatctctgagacaccccgattggctggagaattgacttgggagagataaggagggagggcgggtgccagcatgctatgggctcctgcgtgaggcctgtggtacacagagattaggttgtgatacatgaagagccaagagcaggatgaggtggaggcgttacaactacctgctctgtgtgtggggggggaggggggaggggggtacgcatattcacttgaagtcgaggttcccagggcatttccatgtgctccaggcctgactacccatcagggtggaggagctggtgacactcatctccctgagtgctccctggtttcccaagggaaagactttctggcctgctgaggtcgaatcttccaagaggctcttgcaaagacccgagattctcataaatccccgcccagaagagctgcacgtatccctttcatgagtccagggaagagggtcctccaggtcttggaagacagaggggagctgctttagaggctaagttgctttgagcccacaaggtaatggagggctcctacttgggacagagccctcagcagagaattagcagtctgttggtgggttcaccccaactcacagcagtagaaactgctccatcttccaccacttattgggtttctccagtgtcagcaaaccaaagaattggatcttaccaatgcggctataggaaaacagcctgttgcatggtaagagtgataccatcttgaagtgaaaccaccacaatggccattttttttttagatggagttttgcagtggtgcaatcatagctcattgcagccttcaattcctgggctcaggcaatcctcctgcctcagcctcctgagtagctgggactacagtttcgtgtgccaccatgcctggctaatttttagaattttttgtagggacagggcctcactctgttgcacaagctggtcttgaactcctggcctccttgaactcctcctgccttggcctcccaaaatgctgagattacaggtgtgagccactgcacctcgccagatgtccaatgtctgactcctgcataccaaggtgttctgtatcaagggctttaaaacaatgcctgtagcgtaattaacctctcacaaagatgcttatctaacctccccagcagtcatgggtttcagcaagaaagtctgtgatgtgaccagttgcacatgttttcccctaaaagcttactctagaaaggatattttttggagagggagtgtgggaatccaccatcctgtggccacctcagacatcacttctctttggaagactccattaaatatttctctgtg

SEQ ID NO: 24139 - DNA, 1881 bp, Artificial Sequence
  derived and/or modified sequence
atgaagatgcagaagggcaacgtgctgctgatgttcggcctgctgttacatctcgaggccgcaactaatagtaacgagacctctacctcggccaatacaggcagcagcgtgattagttccggcgcatcgaccgctacaaattccggatcatcagttacatccagtggagtgtctactgcaactatttcaggaagttcagttacttctaatggggtgagtattgtcacgaacagtgagtttcacaccactagcagtgggatatccacggcgaccaatagcgagttttccacagctagctctggaatcagcatagccaccaactctgagagcagcacgacctcttcgggtgcctctacagccacaaatagcgagtctagtacccctagcagtggtgcatctacggttacaaactcaggttcctccgtcacaagttccggcgcaagcaccgccacaaacagtgagagtagcaccgtttctagccgcgcttctaccgcaaccaactcagagagctcgaccctgtcatctggcgcttccaccgctactaattcggattccagtaccacgtcaagcggagcctcaacagctactaactctgaatcaagcactacaagttccggcgcctccaccgctacaaatagtgagtcgtccactgtgtcgagccgcgccagtacagctaccaactctgagtcatccactacttcgtctggagccagcactgcaaccaattcggagtcaaggactaccagcaacggggcaggaaccgccacaaattctgagagctccacgacctcttccggcgcgtctactgcgacaaacagcgattctagcaccgtatccagcggcgcctcaactgccacaaactctgaatcctccaccactagttctggggccagtacagccacaaatagtgattcgagcactacctccagcggagctgggaccgctaccaactctgaatcgtcgactacaagtagcggggcctccaccgctaccaactcagagagttcgacaacctcctccggcgcttctacggctacaaattccgactcaagcactacatcttccggcgccggtacagccacgaactctgagagtagtactgtcagttcggggattagcactgtgactaacagcgaatccagcaccccatcgtctggcgccaatacggcgaccaactctgaaagcagtactacgagctcaggggccaataccgccacgaacagcgagagttccacagtatcttcgggggccagcacagccactaatagcgaatcttcaactacttcctcaggtgtctctaccgcgactaacagcgaatcctcaactactagctccggagcaagcacagcaaccaacagcgatagcagcacaacctcatcagaagccagcaccgcgaccaatagcgagtcatctactgtttcatctgggatcagcacagtcacaaactctgagtcctcgacaactagctccggggccaatactgcaacaaacagcggcagtagcgtgacctcggccggtagcggtacggcagctcttaccgggatgcatactacctcgcactccgcaagtacagccgtttccgaggccaaacctggcgggagcctcgtaccctgggagattttccttattacacttgtgtcggtagtggccgcggtgggtctgtttgccgggctgttcttctgcgtgcgaaactcactctctctaagaaatacattcaacaccgccgtgtatcaccctcacggcctgaatcacggactgggccccggccccggaggcaatcacggcgctccccaccggccaagatggtctcccaattggttttggcggaggccggtttcctctatcgccatggagatgagtggacggaactctggaccttag

SEQ ID NO: 24140 - DNA, 1791 bp, Artificial Sequence
  derived and/or modified sequence
atgaagatgcagaagggcaacgtgctgctgatgttcggcctgctgctgcacctggaggctgcaacaaattcaaatgaaacatccacgagtgctaacaccggcagctctgtcatctcctctggtgccagtaccgcgacaaactcaggctcttctgtcacgagttcaggcgtcagcaccgctacaataagtggttcctccgtcacatcgaacggtgtgagcatcgtcaccaattcggagttccacaccacatctagtggaatcagtacggctactaacagtgagttctccaccgccagctcaggtataagcatcgctactaacagtgaatcaagcaccacatctagcggagcaagcactgccaccaattctgaatcctctaccccatcttccggagcatcgacagtaactaattcaggttcttctgtcacttctagcggtgcctccaccgccaccaacagcgaatcaagcactgtgagtagccgcgccagtacagcgaccaactcagagtccagtaccctatcctccggagcaagcaccgcaacaaattcagattcatccacaacaagctccggggcttcgacggcaaccaactctgagtcatctacaacgtcctccggtgccagtactgctacgaattccgagtcatccaccgtgagtagcagggcgagcactgccactaatagtgaatcatccactacaagctctggagcgagtactgcaaccaatagtgaatctcgaacaacctccaacggtgccggcaccgccacaaattccgagtcttccactacttcaagtggcgcttccaccgccacgaactccgacagctccacagtgagctccggagcctcaacagcaactaattccgaatcaagtacgacctcttctggagcctctactgccacaaactctgagagttccactacaagctctggcgcaagtactgcaaccaacagtgatagcagtacaacgtccagcggcgcaggtactgctactaactcggagagctctaccgtttcctccgggattagcaccgttaccaattctgaatcctcgaccccgtcatctggagctaataccgccaccaactccgaatcctcaacaacttccagcggtgcaaacactgccacgaactcagaaagtagtaccgtgtcctcaggcgccagcacagctaccaattccgaaagctccaccacatctagcggtgtcagtactgccactaattctgaaagttccacgacctcatcaggcgcctccactgctaccaattccgactccagcaccacgtcttctgaggccagtacggccacaaactccgaaagttccacagtgtcctccggcatcagcacagtgacaaacagtgagtcatccacaactagcagtggggctaataccgctacgaatagcggcagctccgtgacctcggccggctccggaacagccgcattgaccggcatgcatacaaccagtcactccgccagtaccgcagtctctgaggctaaacctggcggcagcctggtcccttgggagattttcttaatcaccctcgttagtgtcgtggccgcagtcggcctgtttgccggactgtttttttgtgtgaggaactccctctctctgagaaacacatttaacacagcggtctaccatccccacgggctcaatcacgggcttggccctggtcccggcggcaaccacggagccccccaccgcccccgttggtcccctaattggttttggcgaaggcccgtctctagtatcgcaatggaaatgagcggcaggaactccggaccttag

SEQ ID NO: 24141 - DNA, 1701 bp, Artificial Sequence
  derived and/or modified sequence
atgaagatgcagaagggcaacgtgctgctgatgttcggcctgctgctgcacctcgaagccgccacaaacagcaacgagaccagcacctcagccaacacaggatcttctgttatttccagtggggcttcaactgcgacaaatagtgggtcctccgtgactagctccggagtgtcaaccgctacaataagtgggtcttctgtgactagtaacggtgtgtccatcgttaccaattctgaatttcacacaacaagttcaggcatcagcaccgctacaaactctgagttctccacggccagttccggcatttctatcgcaacgaactctgagtccagcacgacatcctcaggtgcctctactgcaaccaattccgaatctagcactccgtcgtctggagctagtactgcgacgaactcagagtcaagtactctatcttcgggggcttcaacagcaacgaactctgatagtagtaccactagctccggggcatccaccgcgacaaattctgaatcttccaccacttcctctggcgcatctaccgcaaccaattcggaaagcagcacagtaagcagccgggccagcaccgcaacaaatagcgagtcatcaaccaccagcagcggcgcttcaacggccacaaacagcgagagtcgcacaaccagtaatggagcaggcacggccactaactccgaaagcagtaccacaagcagcggggcctctactgctacaaattcagattccagcactgtgtctagtggcgcaagcactgctacgaattccgagtcctccactacttcctccggagcctccactgcaacaaactccgagtcttccaccacatctagtggtgcgagtacagctactaattctgactcctcgacaactagtagtggtgccggaaccgcgacaaattccgaaagttccactgtgtcatccgggatcagcaccgtaaccaacagtgagtcctcaaccccgtccagtggggccaacacggccacaaactctgaaagctctacaacctcttcaggagccaacaccgcaaccaattcagagagttccaccgtgtcctccggagctagcactgcaaccaattccgagagtagtacaacatcgtcaggcgtgagtacagccacgaactcagagtctagcaccacctcctccggagctagtacagccacaaattctgactcttcaaccacatcatctgaagcttctacagctacaaactcagagtcatctaccgttagttccggtatctctacggtgacaaatagcgagtccagtaccacttcaagtggtgcgaatactgctaccaattctggtagttctgttacctccgccgggtccgggacggcggcactcaccgggatgcatacaacaagccattcggcctccacggctgtcagcgaggctaaacctggtggatccttggttccctgggaaattttcttgatcactctagtatccgtggtagcagccgtcgggctttttgcaggtctgtttttctgtgtgagaaattctctatcattaaggaacacctttaacactgccgtctaccatccccatggactgaatcatggtctgggacccgggcccggtgggaatcatggcgctccacatcggccacgctggtcccccaattggttttggagacgccccgtgagcagcatcgccatggagatgtctggacgcaacagtggtccctag

SEQ ID NO: 24142 - DNA, 1701 bp, Artificial Sequence
  derived and/or modified sequence
atgaagatgcagaagggcaacgtgctgctgatgttcggcctgctgctgcacctcgaagccgccactaacagtaatgagacaagtacttcagccaacaccgggagttctgttatttcttcgggcgcctccactgccacaaacagcggtagctccgtcacctcgtctggggtgagtacggcaacaatctcaggatcctcagtaaccagtaacggagtgtcaatcgtcaccaatagcgagtttcacactacatcttctggaattagtacagcaaccaatagcgaattctcaaccgctagttctggtatctctatcgccaccaattctgaatcctcaaccacctcgtctggcgcaagtacagcaactaactccgagagctccactccaagttccggggcaagcacagctactaatagtgaaagttcaacactgagctccggtgcctctaccgccaccaactcagattccagcacaacatcaagcggcgcaagcaccgctacaaatagtgaatcatctactacatcatctggcgcgtcaaccgccacgaactcggaaagctctaccgtaagcagtcgggccagcaccgccactaacagcgagtccagcaccactagtagtggggcttccaccgccactaactctgaatccaggaccacgagcaacggcgcggggacagcgaccaattcagagtcttcgaccaccagcagcggcgcttcaacggccacaaactctgacagctccacaacctccagcggggccgggactgcgactaatagcgagagctcaaccacaagttctggggcgagcaccgccacaaattcggagagctcgactacaagctcaggggccagtacagcgacaaactcggatagctccacaacatctagtggcgcaggaaccgccactaacagcgaaagcagtacagtcagctctgggatctctacagtgactaatagcgagtcttcaacacccagtagtggggccaacaccgctacgaattccgagtcttctactacatcgtcaggagctaatactgccacaaactcagagtcttcaacagtgtcaagcggagcatcaaccgccacaaactctgaatcttctaccacatcttccggggtgagcactgcaacaaacagcgagtcttcaactacatccagcggcgcgagcaccgccaccaatagcgacagttccactacctcttctgaggcgtccaccgccacaaatagtgaaagttcgacagtgagttctgggatcagtactgtgacaaatagcgaaagctctaccacaagctccggggctaacacggctactaacagcggcagtagtgtcaccagcgcgggttctggcactgccgctctgaccggaatgcacaccacgtctcacagcgcctctaccgctgtgagtgaggccaagccgggaggctccctggttccctgggaaatcttcctgatcaccctcgtaagcgtggtcgccgccgtgggtctgttcgccggcctttttttttgcgtgaggaattccttgtcactgcgcaacacattcaatacggctgtgtaccatccccatgggctcaaccacggcttgggcccaggaccaggggggaaccacggggcgcctcacaggccgcgctggtctcctaattggttttggaggcgtcctgtgagctccattgctatggaaatgagcggcagaaattcaggcccttag

SEQ ID NO: 24143 - DNA, 1701 bp, Artificial Sequence
  derived and/or modified sequence
atgaagatgcagaaagggaatgtgttgctcatgtttggactgctgctccatctcgaagccgctacaaactctaacgagacaagtaccagcgccaataccgggagttctgtcatctctagtggcgctagtactgctaccaacagcgggtcctcagttacctccagtggcgtcagcacggccacaatttccggaagctccgtcacaagcaacggtgtgagtatagtgacaaactctgaattccataccacatcctccggcatctctactgcaactaattctgaattcagcacagccagctcgggtatcagcatcgccaccaactctgaaagtagtacaacctcttccggcgctagcactgccaccaattcggaatcatctactccctccagcggcgcttccacggccactaatagcgactcttccacaaccagctccggggcttcaacagctactaactctgactcaagtaccacctcttctgaagcctctactgcaactaactccgaaagctcaaccacttctagtggggcatcaacagctacaaattctgagtcgagcacggtgagcagccgagcctctacagcaacaaacagcgagagctccaccacctcatcaggagcaagcaccgcaactaactcggagagcagaactacctcaaacggagctggcacagccacaaacagtgagtcaagcacaacatcttcaggcgcatcgacagccacaaactctgagtcttccaccccttcttctggcgcagggacagcaaccaattccgagtcttccactacttcatcaggtgctggaacagccaccaactcagaaagcagtacagtaagttctggtatatctactgtaacaaacagcgagtctagcaccccttctagcggagccaacacggctactaattcagaaagttctactacatcttctggcgctaataccgccactaacagcgactcatcaaccacctcttctggggcttctaccgcgaccaatagcgagtcatcaacaacctcttctggggcatccacagccactaatagcgagagcagcaccacatctagcggggctagcaccgcaactaacagtggcagcagcactacctcttcaggtacctccaccgcaaccaacagcgagagctccaccgtcagcagtggagctagcaccgctacaacttcagagagctcaactacaagttccggggcatcaaccgcgactaacagcgagagtagcacagtcagttcaggcgctagtaccgccactaactctgaatcctctacaacaagtagtggtgccaatacggccacaaatagtggctcctctgtgacgagtgcgggttccggaaccgccgcactcacagggatgcacaccacgagccacagcgcatcaacagcggtctccgaagctaagccagggggatccctcgtgccctgggagatttttcttattactctggtgagcgttgtagcagccgtgggtctgttcgcaggactctttttctgcgtgcggaactcactcagtctgcggaacacgtttaacaccgcagtgtaccaccctcatggattaaaccatgggctcgggcctggcccaggcggtaatcatggcgcacctcaccggccaagatggtcccccaactggttttggcgcagacccgtctcttccatcgccatggagatgagtggaaggaactctggcccatag

SEQ ID NO: 24144 - DNA, 1701 bp, Artificial Sequence
  derived and/or modified sequence
atgaagatgcagaaaggtaatgtcctgctcatgtttgggctgctcctccatctggaggcagccaccaactctaatgaaacttccaccagtgccaatacagggagttcagtcatcagtagcggggcaagtacagcaaccaactctgggtcatcggtaaccagctccggcgtgtcaacagcaacaatctcagggtcatccgttacatcaaatggcgtgagcatagtgaccaattcggagttccacacaaccagcagcggcattagtactgctactaatagcgaatttagcaccgctagtagcggtatctccatcgccaccaactcagagtccagtacaacttcatcaggtgccagtacagccacgaacagcgagtcttctactccaagtagtggcgcatctaccgctacaaatagcgatagttccacaacatcatcgggcgcttctaccgcaaccaacagtgatagctcaacgacttctagcgaggcctccactgccacaaacagcgaaagttctaccacctcttccggggcaagtacggcaactaattcggagtcttccacagtctcctctcgggctagcaccgccactaatagcgagagcagtacgacctcttctggagcaagtaccgctacaaatagcgagtctcggacaacgagcaacggtgccggtactgctacaaattccgaaagctccacgacctctagcggagccagcacagctacaaatagtgaaagcagcaccccgtcaagtggagccggaaccgctactaattctgaatctagcaccaccagcagcggggctggtactgctacaaattcggagagtagcacggtgtcctcaggcatttccacagtcacaaacagcgaatcaagcaccccttctagcggcgcaaacacagccacgaactctgagtcctccaccacctctagcggtgcaaacacggccactaactccgatagctcaaccacttcctcgggtgcatctactgctaccaattctgaatcctccaccacttcttctggcgctagtacggcgaccaacagcgaatcctctaccaccagctccggtgctagtaccgctactaacagtggctcgtccaccacctcctccggcacttctactgctaccaacagtgagtcctctactgttagctctggcgctagtaccgccaccacatcagaaagctccacgaccagcagtggggcttctaccgcaaccaactcggaatcaagcacggtgtcatctggagctagcacagccactaattccgaatccagcacaaccagtagtggggcaaacacagctacaaatagtggatccagtgtgactagtgccggttctggtacagcagcattgaccggtatgcacacgacatcccattctgcatccacagcggtctctgaggcaaaacctggcggatcactcgtaccatgggaaattttcctcatcaccctggtgagcgtggtggcagctgtgggactgtttgctggtctgttcttttgtgtcaggaattcactgagtttgagaaatacctttaacacggccgtctaccaccctcacggactcaatcacgggcttggacccggtcctgggggtaatcacggagcacctcaccggccacgttggagtcccaattggttctggcggcgacctgtctcctccatcgcgatggaaatgagcggaagaaattccggaccttag

SEQ ID NO: 24145 - DNA, 1701 bp, Artificial Sequence
  derived and/or modified sequence
atgaagatgcagaagggaaacgtcctgttgatgtttggcctcttattacacctggaagccgcaacaaactcgaatgagacgagcacctctgccaataccgggtcttccgtcatctctagcggtgccagcacggcgactaacagcgggagttctgtgacttcctccggcgttagcacggctacaatctccgggtctagtgtcacttctaatggcgtctctatcgtgaccaatagtgagttccacacgacatccagtggcatttctactgcaaccaacagtgagttttccacagcctcaagtggaatctcaatcgcaaccaactccgagtcttcaacgaccagttcaggcgctagcacagccacaaactccgagtcaagcacaccttcctctggcgcatcgactgcaacaaacagtgacagtagtactacttcctcaggcgctagtaccgccaccaattccgattccagtaccacctctagcgaagccagcactgcaactaacagcgagtcatcaaccacaagtagcggggcttctaccgcaacaaattctgagtcgagtaccgtttcgtctcgtgcatctaccgcaactaactcagagtcttccactacctcgtccggtgcaagcaccgccaccaacagtgagtcccggacaacctccaacggggcaggtaccgccactaacagcgagtccagtaccacatcttctggggcaagcactgcaacaaacagtgagagttccactccctctagtggagcagggacagcaactaacagcgaatcgagcaccacttcgtccggagctggaacagctactaatagcgaatctagtactgttagctccggaatcagtactgtgactaacagtgagtctagcacccctagcagtggcgctaatactgctacgaactccgaaagttcaaccacttcatcaggcgctaatacggcaactaacagcgattccagcaccacatcctcgggggcaagcactgcgactaatagtgaatcatccacaactagcagtggcgcatccaccgccactaattcagaatcttccaccactagctcaggtgcaagcacggcaacgaatagcggatcaagtaccacatctagcggcactagcactgccactaactcggagtcgtctactgtgtcgtctggggcttctaccgctacaacaagcgagtcaagcaccacatcctctggagcaagcacagcaaccaactccgagagttcgaccgtgtcaagcggggcatcgaccgccacgaactctgagtcctccacgacttctagcggggctaataccgctaccaactctggctccagcgttacatcggcagggagcgggactgcagcactgacaggtatgcacacgacctcccactctgcctccacggctgttagtgaagcgaaaccaggcggttccttagtgccatgggaaatattcctgataaccctcgtgtcagtggtggccgcagtgggattgttcgcaggattatttttttgtgtgaggaacagcttgtccctccgaaacactttcaatacagcagtttatcatcctcatggcctgaatcacggcttgggaccaggcccagggggtaaccatggagctccgcaccgcccacggtggtctccaaattggttctggcggagaccagtgtctagcatcgccatggagatgtccggccgtaactcaggaccttag

SEQ ID NO: 24146 - DNA, 1251 bp, Artificial Sequence
  derived and/or modified sequence
atgaagatgcagaaagggaacgtgttgcttatgttcgggctcctactccacctggaagcggctaccaactctaatgagacatccaccagcgctaacacgggttcaagcgtgatttcctccggcgctagtaccgccaccaattctggatcatccgttaccagtagtggcgtctcaactgcaacgatctccggaagctctgtgactagtaatggtgttagcatcgttaccaatagcgaatttcacacaacgagctcaggcatctcaactgccacaaacagtgaatttagcactgcctcatcaggcattagcatcgccacaaactctgagagctctacgaccagcagcggcgcttcaaccgcaactaattcggagtcttccactccttcgtctggggctagcactgctacgaactcagatagcagtacaacatcaagtggcgcatcaactgcaactaattcggattcctccacaacctcttccgaggccagcactgctaccaattctgagagctctacaacatcatctggagccagtacagctactaatagcgagtcttcaacgacttcctcgggcgcttccacagctacaaattccgagagtagtaccacgtcttcaggagcctcaaccgctaccaacagtggatccagtaccacgtctagcggtacgtccacggcaactaacagcgagtcaagcactgtaagcagcggtgcatctaccgccacaacaagtgagagttcaaccacgtcatccggcgcatccactgctacaaacagcgagagctccaccgtgtcttcaggtgcgtcaacagctaccaactcggaatcttctactacgagcagtggggctaacaccgcaacgaacagtgggtctagcgtaacctccgcgggatctggaacagccgcactgacaggcatgcataccacttcccactcagcgtccactgcagtctccgaggcgaagcccggaggcagcctggtgccatgggaaatattcctcatcaccctggtcagtgtggtagccgcagtgggactgtttgccggactcttcttctgcgtgcgcaatagcctcagcctgagaaacacatttaacactgccgtgtaccaccctcacggactgaaccacggtcttggcccaggacctggtggaaatcatggcgcaccacaccgtccccgttggtcccccaactggttttggcgaaggccggtgtcttccatagccatggaaatgtcaggaagaaattccggcccttag

SEQ ID NO: 24147 - DNA, 1251 bp, Artificial Sequence
  derived and/or modified sequence
atgaaaatgcagaagggtaacgtgttattaatgtttggcctgttattgcatctggaggccgctaccaatagcaatgagacctctacatctgccaatactggatctagcgttatctctagcggcgcttctactgccactaattctggatcctcagttacgtcatctggggtgtccacagctactatttcagggtcgtctgtcacatctaacggagtatctatcgtgaccaactctgaattccacacgacaagtagcggcattagtacagccactaattcggagttttccaccgctagctctggtatctctatcgctaccaattctgagtcctccaccaccagttccggagcatcgaccgcaaccaacagcgaatccagcaccccgtccagtggcgctagcaccgccacaaacagcgactcatcgacaactagctctggtgcttccaccgccacaaatagcgacagttcaacaacgtcctcagaggcaagcaccgccaccaattctgagagcagtaccacaagcagcggagcaagtacagcaaccaactccgagtcatctacaaccagctccggcgctagtacggccactaacagcgaatcttccaccacaagtagcggggcttcaacagcaaccaattccggcagctccaccaccagtagtgggacatctaccgccacaaattccgaatcgtcgactgtcagcagcggtgcatcgacagcgaccacctctgaatctagcacaacatcaagcggggcaagtaccgcaaccaatagtgaatctagcactgtaagctcaggggcttccaccgccacaaattccgaatcctccactacatcatccggcgcaaatacagcaacgaactcgggatcaagtgtgaccagcgccggaagcggtaccgccgctttgacgggcatgcacactacatctcactctgcttcgactgccgtttcagaggctaagcctggaggctccctggtgccgtgggaaatctttctcatcacactggtatctgtcgtggccgcagtgggtcttttcgccggattgtttttctgcgtccgaaattctctgtctctgcgcaacacttttaatacagccgtttatcatccacacggcctgaatcatgggctcgggccagggccaggaggcaatcatggagctccacatcgccctaggtggtctccaaactggttctggcgccgtccagtttcttccatcgcaatggagatgagcggcagaaactccggcccatag

SEQ ID NO: 24148 - DNA, 1251 bp, Artificial Sequence
  derived and/or modified sequence
atgaagatgcaaaaaggaaacgtgctgttgatgtttgggctcctcctgcacctggaggcagccacaaacagtaatgaaacgtccacatctgcgaacaccggaagtagtgtcatttcctcaggggcaagtacagcaaccaatagcgggtcatcagtgacatcaagtggcgtgtcaactgcgacaatctctggatcatcggttacctctaacggggtctccattgttactaattcagaatttcatactacaagtagcgggatcagtacagccaccaactccgaatttagcaccgcctcttctggtatcagcattgcaactaacagcgagagttctaccacttcttcaggcgcttcgacagccactaattctgagagttctaccccttctagcggagcctctacagcaacaaactccgatagtagcactacttcatcaggagcatcaaccgctaccaatagcgatagttctactaccagttccgaggcctctacagcaactaatagcgaatccagtactacctcaagtggcgcatccaccgctactaattccgaatccagtactaccagctccggagcatcaacggctaccaattctgagagtagcaccacaagctccggcgcatccacagccaccaacagtgggtctagcacgacttctagtggcaccagcaccgccacgaattcagaatcaagcacagtatcctccggcgcttctaccgcgactacctctgaatccagcacaacttccagtggcgcatccaccgcaacaaactctgaaagcagtaccgtgtcatccggagcatctaccgctacaaacagcgaatcaagcactaccagtagcggcgcaaacaccgctaccaatagcggtagttccgtaaccagtgccggatctggaaccgcagcgcttactggcatgcacacaacctcacattctgcatccaccgcagtctctgaagctaaaccaggtgggtcgctggtgccatgggagatcttcttgattaccctagtctccgtagtggctgccgtgggcttgttcgcaggtctgttcttttgtgtgagaaactccctgagtttgaggaacacatttaacaccgcagtgtatcatcctcacgggctgaatcatggactaggacctgggcctggaggtaatcacggagccccacacaggcccagatggtcccccaactggttctggcggcgacctgtgagctcaattgcgatggagatgagtggtagaaactctggcccatag

SEQ ID NO: 24149 - DNA, 1701 bp, Artificial Sequence
  derived and/or modified sequence
atgaaaatgcaaaagggtaacgtgttgctcatgttcggcctgttgctgcatctagaagccgctacaaattccaacgagacctcgaccagcgccaacacaggcagttccgtaatcagctcaggcgcatcaactgcaaccaactcaggctcttccgtcacctcttccggagtctctactgctacaatcagcggatctagcgttacctccaacggagtttcaatagtcaccaatagcgagttccacacgacctccagtggcataagtaccgctaccaatagcgaattcagtactgtatcctctggaatttctatcgccacaaactctgaaagctccactacatcgagcggagcttctaccgccaccaactccgagtcttcaaccccaagcagtggagcctcaaccgctaccaactccgatagtagcactactagcagtggtgcctctacggccacaaattccgactcgagcacaacatcgagtgaagcttcaacagcaaccaatagtgaaagcagcacaacctctagcggggcttctacagtcaccaatagtgagtcttcgaccgtgtctagccgggcatcaaccgcgactaattccgagagctccacaacttcatctggcgcttctacagcaaccaactctgagagtaggactacaagtaacggcgctggaaccgccaccaactcggaaagctccaccacatcctccggcgcaagcactgccaccaatagtgaaagctccaccccctctagcggcgcaggaacggccacaaacagcgagagctcaactacctcatcgggggctggtactgcaaccaactcagaaagctctaccgttagctccggcataagcaccgttaccaacagtgagtcctcgaccccaagctccggggctaatacagccacaaattccgaatccagtactacctcttctggggctaacactgcgaccaattcggattcttctacaacaagcagcggggcttccaccgctacgaatagtgagagtagcactactagctctggcgcttccacagctactaactccgaaagtagcacgacttcatctggcgcaagtaccgcaaccaattctgggtcctctaccaccagctcggggaccagcaccgcaacgaacagtgaatcatcaacagtctcttccggagctagcaccgccaccacgtcagagtcctccactacgtcatctggggcatccaccgccacaaacagcgagtccagcaccgtgtctagtggtgcaagtaccgccacaaacagcgaatcttcaacgacatcctctggtgccaataccgccaccaatagcgggagctcggtgacttctgccggttcaggtaccgccgcactcacaggaatgcatactactagtcattcagcttccactgcggtgtctgaggcaaagcccggaggctcactcgtgccatgggaaatttttcttatcaccctggtgtcagttgtagccgctgtggggctgttcgccggactttttttttgtgttcggaattcactcagtctgcggaacaccttcaacacagccgtataccacccccacggtcttaatcatggattgggcccaggtcccggtgggaatcacggagccccacatcgacccaggtggtcaccaaattggttttggcggagacctgtgtcttccatcgccatggagatgtctgggaggaactctgggccttag

SEQ ID NO: 24150 - DNA, 1251 bp, Artificial Sequence
  derived and/or modified sequence
atgaaaatgcagaaaggcaatgtcctgcttatgtttgggctgcttctccacttagaagcagctaccaattcgaatgaaacttctaccagcgcaaatacaggttccagcgtgatctcttccggggcttccacagctaccaactccgggagttctgtgacatcttctggagtgtctaccgccactataagtggatcttccgtaacaagcaatggtgtgagcatcgttacaaacagtgagttccacacgacctcctccggcatttcgaccgctaccaatagtgagtttagcactgtgtccagcggcatctcaatcgccaccaacagcgaatcgagtactaccagctcaggtgcctcaaccgccactaactctgagtcctccacccctagctcgggcgctagcaccgctactaacagcgattcatctacaacgagcagtggagcttcaactgctactaacagcgatagcagtaccactagttccgaggctagcactgcgaccaacagtgagtcttcaactacaagcagcggtgcctctactgcgactaactcagagagtagcacaactagctcaggagcgtctaccgccactaacagtgaatcttcaactacctcctccggtgccagcaccgccactaatagtggctcttccacaacgtctagtggaacaagcactgccaccaattctgagtcttccactgtgtccagtggtgcttcgacggctacaacttcagagagtagcacgacatccagtggagcttcgactgcgacaaactcagagtccagtactgtgtcgtcaggagcttccaccgccacgaatagcgagagctccacaacgtcatccggagccaacacagcgacaaatagtgggtcgtcagtcaccagcgctggaagtggcactgctgcattgaccggtatgcacaccacttcgcattccgcatcaacggcagtcagtgaagcaaagcctggaggcagcctggtgccctgggagattttcctgattacgctagtctcggtcgtggccgctgttggtctgtttgccggactttttttctgtgtgcggaatagtctaagcctgagaaacacatttaacaccgctgtttaccatccacacggcttgaatcacgggctaggccctggccctgggggaaaccatggcgcaccccatcgccctcgatggagccctaactggttctggcgtagacctgtgagctcaatagctatggagatgtccggccgaaactccggcccttag

SEQ ID NO: 24151 - DNA, 1881 bp, Artificial Sequence
  derived and/or modified sequence
atgaagatgcaaaagggcaatgtgttattaatgttcggacttttgctccatttggaagctgctactaattccaacgaaacttctaccagtgcgaacacgggctccagcgtgatcagttccggagcctcaacggcgactaacagtggctcaagtgtgacaagctctggagtgagcaccgcgaccatttccggaagttctgtcacctctaacggggtgagcattgtgactaatagcgagtttcacactacttctagcgggatttcaacggctaccaactcggagttcagcactgcgagctctggaattagcattgccacaaattcagagtcatctactacttcatctggcgcttctaccgcaacaaacagtgagtcctccaccccttcctccggcgcaagtacagtgaccaatagcggatcttcagtcactagttctggcgctagtactgctactaactcagagagctcaacagtgtcaagccgggcatcgaccgctaccaacagcgagtcatctacattgagtagcggagcgagcacagcaaccaattctgacagctctaccacgtccagcggtgcctctacagccacaaattcagagtctagcacgacaagtagcggggcttccaccgcgaccaatagcgaatcttccactgtttccagccgtgccagtactgctaccaatagcgaatcatccacaaccagttcaggggctagtactgcaacgaactccgagtcacgtaccacgagcaacggagccggtaccgccacaaattctgagtcgtctaccacatcctccggtgctagtactgcaacaaacagcgacagcagtacggtgagttctggtgccagtacggccacgaattctgaaagcagcaccaccagctcgggggcatcaacggccactaattccgacagctcaacaaccagttcgggggctggtaccgcaaccaattctgagagctccaccacgtccagcggagcctccactgccaccaactccgagtcttccaccacatcatccggagcttctacagccacaaatagcgattcctctaccacttctagcggggcagggacggccaccaactcagaatcatccacagtcagtagtgggataagcactgtaactaattcagagagctcaacaccctctagtggtgccaacactgctacaaactctgagtcttcgaccacttcaagcggggcaaacacagctactaactcagagtcttctaccgttagctctggggcaagtactgcaacgaatagcgagagctcgaccaccagctctggcgtctctactgccaccaattcggaaagctcaaccacttcttccggcgcaagcaccgccacaaactccgattcttcaaccacatcaagcgaagctagcacagcaacaaactccgaaagctccacggtgtcctcaggcatctctacagttactaattctgagtcatccaccacgtcgtccggggctaacactgccacaaattcagggagctctgttaccagcgctggcagcgggaccgccgctctgacagggatgcatacaactagtcattccgcctctaccgctgtaagcgaggcaaagcctgggggaagcttagtaccctgggaaatttttttgatcactctcgtgtccgtggtcgcggctgtggggctctttgctggtttgttcttctgcgtcaggaatagcctgtccttgcgaaacacatttaatactgccgtgtatcatcctcacggtctcaatcacggccttggaccaggccctggcggtaaccatggagctccacaccgccctcgatggtcacctaattggttctggagacggccagtatctagcatagctatggagatgtcaggacgaaattcaggcccatag

SEQ ID NO: 24152 - DNA, 1791 bp, Artificial Sequence
  derived and/or modified sequence
atgaagatgcagaagggcaacgttctgctgatgttcggcctgctgctgcacctggaagctgccacgaactcgaatgagactagcacctctgcgaatactggcagttcggtgattagctctggcgcatctactgcaactaattctggaagcagcgtcaccagttccggggtttctacggcaactatttcaggctcctccgtgacttccaacggggtgtctatcgtaacaaattccgagttccacacaacgtccagtgggatctccaccgctacaaactccgagttcagtacagccagttccggaatttcgatcgctaccaacagcgagtcaagcaccacgagttctggcgcaagcaccgccacaaactcagagagcagtactccttcttccggcgcttctaccgtgactaatagtgggtcaagtgtaacatccagtggtgcctccacggccactaattccgaatcgtctaccgtgtcaagcagggctagcactgctactaatagcgaatctagtacactgtccagtggcgcatcaacagccacgaactccgactccagcacaacgtctagcggtgcctcgactgcaacgaactctgaatcaagcaccacatcctcaggagctagcacagctacaaatagcgaaagcagcacagtttccagcagagcgtccaccgccacaaacagcgagagcagcacgacctcgagcggcgcttctacagccactaattctgagagtcgtacgacgtctaatggagccggaactgccaccaacagcgaaagcagcacaacttcatccggtgcctccacagctactaatagcgattcctccaccgtctcttctggagcctctacagctacaaactccgagagtagtaccacatcgtctggagccagtacggccacgaactcagagtccagcaccactagcagtggcgcaagtacagcaactaattccgactctagtactacaagcagcggggctgggactgctacaaattcagagtcaagcacagtgagctctggaatcagcacggtaaccaacagtgaatcttctacgccaagttctggggcaaacacagcaacaaatagtgagagctcaacaacgagttctggcgctaacacggcgaccaattctgagtcatcaaccgtctcctctggagcctctaccgcaactaattctgagagcagtacaacaagcagtggggtttctaccgcaaccaattcagaatccagtactaccagtagtggagcctccactgcgacaaactctgatagctctaccacgtcatcagaagcttctaccgcaacaaactccgagagttctactgtgtcatcaggcatctcgactgtgacaaactctgaatcgagtaccacctcttctggtgcgaataccgccactaattccggaagcagcgtcacctctgccggaagtggcaccgctgccctgacagggatgcacacaacctcccacagtgccagtacagccgtgagcgaagcgaagcccggtgggtccctagtaccatgggaaatatttcttattactctggtgagcgtagtggcggcagtcggactgttcgccggtctcttcttctgcgtgcgcaattctctaagtctccggaacacgttcaacacagcagtttatcatcctcacgggctaaaccacggcctgggcccaggccctggaggaaaccacggggcaccacaccggcctagatggagtccgaactggttctggcgtcgacccgtctcctccattgcaatggagatgtccggtcggaacagcggcccttag

SEQ ID NO: 24153 - DNA, 1701 bp, Artificial Sequence
  derived and/or modified sequence
atgaagatgcagaaaggcaatgtgctgctcatgttcggtcttctgttacatctagaagccgctacaaacagcaatgaaacctccactagtgcgaataccggatccagtgtaatctccagtggcgcaagtaccgcaacaaattccggctcatctgtgacgtctagcggggtgtccaccgccactatttcgggtagttcggtaacaagcaacggggtgagcatcgtcaccaactcggagtttcacaccacctctagtggcatctccacggccaccaatagtgaattctccacggccagtagcggaattagcatcgccacgaactcggaaagctctaccacctcctccggggcttctacggctaccaactctgagtccagtactcctagctccggcgcaagtactgctacgaactcggagagctctaccctgagctccggcgcatctactgcaaccaactccgacagctccactacaagctctggcgctagtacagccaccaattccgaaagcagcaccacatcatcaggtgcatcaacggccacaaactctgaaagttccaccgtttcatctagggcctcaactgccactaactcagagagctctacgacctctagcggcgcaagcaccgccacaaactctgagtcacgcacgaccagcaacggtgctgggacggcaacgaacagcgagtcatccaccacctccagcggggctagtactgcaacaaactcagacagcagtactgttagctcgggggctagtacagctactaactcagagagttcaacgacctcttccggcgcatccacagcaaccaattccgaaagtagcacaacctcatctggcgcatcaacagctacaaacagcgacagcagcacaacctctagcggggcagggacagccaccaattccgaaagttcaactgtgtccagtggcatctccactgtgaccaactcagaaagtagtacaccctcgtccggcgcaaatactgcaacaaacagcgagagcagcaccaccagttctggggcaaataccgccaccaactcggagtcctcaacggtcagctctggagcctcgaccgctaccaattctgagtcaagtacaacatcatcaggtgtgagcaccgccacaaactccgaatcttcaacaaccagctccggtgcatccactgctactaattccgatagctccaccacctcctccgaggccagcaccgcaaccaattccgaatctagcaccgtgagtagcgggattagtacagtcaccaattctgaatctagcaccacctcctctggagctaacactgctaccaactcaggatctagtgttaccagcgccggttctggcaccgctgctctcactggaatgcacaccaccagtcatagcgcctcaactgccgtgtcggaggccaagcccggtggaagtctggtcccctgggagatcttccttattacacttgtctcagtcgtggctgcggttgggctctttgcgggactgtttttttgtgtgcggaatagtctgagcctgcggaataccttcaacaccgccgtctaccacccacatggcctgaatcatgggcttggtcccggacccggtggaaaccacggcgctccccatcggccacgatggtcccccaattggttttggcggcgacctgtgagttccatcgctatggaaatgagtgggagaaacagtggcccatag

SEQ ID NO: 24154 - DNA, 1701 bp, Artificial Sequence
  derived and/or modified sequence
atgaaaatgcagaaggggaacgtgttactgatgtttgggctgctgctccaccttgaggcagcaactaacagtaatgagacgtcaacaagcgctaacactggaagctccgtcatcagttctggtgcttcaacagcaaccaactccggatcttcggtgactagtagcggcgtgtccacagcaactatctcagggtcctccgtcacctcaaacggcgtgtccatcgtcaccaactctgagtttcataccacttcctctggaattagcactgcaacgaacagcgaatttagtactgcaagtagtggtatttccatcgctacaaattcagaatcgagcaccacatcatccggtgcctcgactgcaacgaactcagagtcctccactccctccagcggagcatctaccgccactaactctgagtcgtcaaccctgagttccggggcttccaccgctacaaactccgattcttccactacaagctcaggggctagcactgctactaacagcgaaagtagcactacatccagcggagcatcaaccgccacgaacagcgaatcatcaactgtttccagcagggcttctaccgcaacaaactccgagtcctcaaccactagttctggcgcatcaaccgccactaattctgaaagtcggaccacctcgaatggggctggaacggctaccaattcggaatcgtcaactacatcgagcggagcctcaaccgcaaccaattccgattcatctacaacctcctcaggcgctgggacagcgacaaatagcgagagtagtaccacctccagcggagcaagcaccgcaaccaattcggagtcaagcaccaccagcagcggtgcatctaccgcaaccaacagcgacagcagtactacgagctcaggtgccggtacagcaacaaatagcgagtcttccaccgtgagctcaggcatcagtaccgtaacgaactcagaatcctccaccccatccagcggggctaataccgctaccaactctgagtcaagcaccacctcctccggggcaaacactgcgactaattcggaatcaagcactgtctcgtcaggcgcatccacagccactaacagcgaatcctcaactacctcgtcgggcgtgagtacagctacaaactcagaaagcagtaccacctccagtggcgctagtaccgcaacaaatagtgactcctcaaccactagctctgaagctagcacagcaacaaatagtgaatccagcactgtatctagcggcataagtacagtgaccaattccgagagctcaactacatcaagtggagctaacacagcaaccaactccggatcctctgttacatccgcgggtagtggaacagcggctctcacagggatgcataccacttcccactcagccagtactgcagtctcagaggcgaaacctggtggttctttggtgccttgggagatcttcctcatcacactggtcagcgtggtggctgccgtgggcctgttcgcaggactctttttttgtgttcggaattccttaagtcttcgtaacacctttaacaccgcagtgtatcaccctcacggcctgaatcacggcctgggcccaggcccaggcggaaaccatggagcccctcatagacctcgttggtcccctaattggttttggcgacgtccggtatcttccattgcaatggagatgagcggaaggaactctggcccatag

SEQ ID NO: 24155 - DNA, 3651 bp, Artificial Sequence
  derived and/or modified sequence
agagaaagaggcaactacattgcctggaggaagcctaaggaacccaggcatccagctgcccacgcctgagtccaagattcttcccaggaacacaaacgtaggagacccacgctcctggaagcaccagcctttatctcttcaccttcaagtcccctttctcaagaatcctctgttctttgccctctaaagtcttggtacatctaggacccaggcatcttgctttccagccacaaagagacagatgaagatgcagaaaggaaatgttctccttatgtttggtctactattgcatttagaagctgcaacaaattccaatgagactagcacctctgccaacactggatccagtgtgatctccagtggagccagcacagccaccaactctgggtccagtgtgacctccagtggggtcagcacagccaccatctcagggtccagcgtgacctccaatggggtcagcatagtcaccaactctgagttccatacaacctccagtgggatcagcacagccaccaactctgagttcagcacagtgtccagtgggatcagcatagccaccaactctgagtccagcacaacctccagtggggccagcacagccaccaactctgagtccagcacaccctccagtggggccagcacagccaccaactctgactccagcacaacctccagtggggctagcacagccaccaactctgactccagcacaacctccagtgaggccagcacagccaccaactctgagtccagcacaacctccagtggggccagcacagtcaccaactctgagtccagcacagtgtccagtagggccagcactgccaccaactctgagtccagcacaacctccagtggggccagcacagccaccaactctgagtccagaacgacctccaatggggctggcacagccaccaactctgagtccagcacgacctccagtggggccagcacagccaccaactctgagtccagcacaccctccagtggggccggcacagccaccaactctgagtccagcacgacctccagtggggccggcacagccaccaactctgagtccagcacagtgtccagtgggatcagcacagtcaccaattctgagtccagcacaccctccagtggggccaacacagccaccaactctgagtccagtacgacctccagtggggccaacacagccaccaactctgactccagcacaacctccagtggggccagcacagccaccaactctgagtccagcacgacctccagtggggccagcacagccaccaactctgagtccagcacaacctccagtggggccagcacagccaccaactctgggtccagcacgacctccagtgggaccagcacagccaccaactctgagtccagcacagtgtccagtggggccagcacagccaccacctctgagtccagcacgacctccagtggggccagcacagccaccaactctgagtccagcacagtgtccagtggggccagcactgccaccaattctgagtccagcacaacctccagtggggccaacacagccaccaactctgggtccagtgtgacctctgcaggctctggaacagcagctctgactggaatgcacacaacttcccatagtgcatctactgcagtgagtgaggcgaagcctggtgggtccctggtgccgtgggaaatcttcctcatcaccctggtctcggttgtggcggccgtggggctctttgctgggctcttcttctgtgtgagaaacagcctgtccctgagaaacacctttaacacagctgtctaccaccctcatggcctcaaccatggccttggtccaggccctggagggaatcatggagccccccacaggcccaggtggagtcctaactggttctggaggagaccagtatcctcgatagccatggagatgagcgggaggaacagcgggccctgagcagccccggaagcaagtgccgcattcttcaggaaggaagagacctgggcacccaagacctggtttcctttcattcatcccaggagacccctcccagctttgtttgagatcctgaaaatcttgaagaaggtattcctcacctttcttgcctttaccagacactggaaagagaatactatattgctcatttagctaagaaataaatacatctcatctaacacacacgacaaagagaagctgtgcgtgccccggggtgggtatctagctctgagatgaactcagttataggagaaaacctccatgctggactccatctggcattcaaaatctccacagtaaaatccaaagacctcattcttatctgtgtgtctgcattttctaatcctttttgccccaggcaaggtccctgtatctctgagacaccccgattggctggagaattgacttgggagagataaggagggagggcgggtgccagcatgctatgggctcctgcgtgaggcctgtggtacacagagattaggttgtgatacatgaagagccaagagcaggatgaggtggaggcgttacaactacctgctctgtgtgtggggggggaggggggaggggggtacgcatattcacttgaagtcgaggttcccagggcatttccatgtgctccaggcctgactacccatcagggtggaggagctggtgacactcatctccctgagtgctccctggtttcccaagggaaagactttctggcctgctgaggtcgaatcttccaagaggctcttgcaaagacccgagattctcataaatccccgcccagaagagctgcacgtatccctttcatgagtccagggaagagggtcctccaggtcttggaagacagaggggagctgctttagaggctaagttgctttgagcccacaaggtaatggagggctcctacttgggacagagccctcagcagagaattagcagtctgttggtgggttcaccccaactcacagcagtagaaactgctccatcttccaccacttattgggtttctccagtgtcagcaaaccaaagaattggatcttaccaatgcggctataggaaaacagcctgttgcatggtaagagtgataccatcttgaagtgaaaccaccacaatggccattttttttttagatggagttttgcagtggtgcaatcatagctcattgcagccttcaattcctgggctcaggcaatcctcctgcctcagcctcctgagtagctgggactacagtttcgtgtgccaccatgcctggctaatttttagaattttttgtagggacagggcctcactctgttgcacaagctggtcttgaactcctggcctccttgaactcctcctgccttggcctcccaaaatgctgagattacaggtgtgagccactgcacctcgccagatgtccaatgtctgactcctgcataccaaggtgttctgtatcaagggctttaaaacaatgcctgtagcgtaattaacctctcacaaagatgcttatctaacctccccagcagtcatgggtttcagcaagaaagtctgtgatgtgaccagttgcacatgttttcccctaaaagcttactctagaaaggatattttttggagagggagtgtgggaatccaccatcttgtggccacctcagacatcacttctctttggaagactccattaaatatttctctgtgagaaa

SEQ ID NO: 24156 - DNA, 3831 bp, Artificial Sequence
  derived and/or modified sequence
agagaaagaggcaactacattgcctggaggaagcctaaggaacccaggcatccagctgcccacgcctgagtccaagattcttcccaggaacacaaacgtaggagacccacgctcctggaagcaccagcctttatctcttcaccttcaagtcccctttctcaagaatcctctgttctttgccctctaaagtcttggtacatctaggacccaggcatcttgctttccagccacaaagagacagatgaagatgcagaaaggaaatgttctccttatgtttggtctactattgcatttagaagctgcaacaaattccaatgagactagcacctctgccaacactggatccagtgtgatctccagtggagccagcacagccaccaactctgggtccagtgtgacctccagtggggtcagcacagccaccatctcagggtccagcgtgacctccaatggggtcagcatagtcaccaactctgagttccatacaacctccagtgggatcagcacagccaccaactctgagttcagcacagcgtccagtgggatcagcatagccaccaactctgagtccagcacaacctccagtggggccagcacagccaccaactctgagtccagcacaccctccagtggggccagcacagtcaccaactctgggtccagtgtgacctccagtggagccagcactgccaccaactctgagtccagcacagtgtccagtagggccagcactgccaccaactctgagtctagcacactctccagtggggccagcacagccaccaactctgactccagcacaacctccagtggggctagcacagccaccaactctgagtccagcacaacctccagtggggccagcacagccaccaactctgagtccagcacagtgtccagtagggccagcactgccaccaactctgagtccagcacaacctccagtggggccagcacagccaccaactctgagtccagaacgacctccaatggggctggcacagccaccaactctgagtccagcacgacctccagtggggccagcacagccaccaactctgactccagcacagtgtccagtggggccagcactgccaccaactctgagtccagcacgacctccagtggggctagcacagccaccaactctgactccagcacaacctccagtggggccggcacagccaccaactctgagtccagcacgacctccagtggggccagcacagccaccaactctgagtccagcacgacctccagtggggctagcacagccaccaactctgactccagcacaacctccagtggggccggcacagccaccaactctgagtccagcacagtgtccagtgggatcagcacagtcaccaattctgagtccagcacaccctccagtggggccaacacagccaccaactctgagtccagtacgacctccagtggggccaacacagccaccaactctgagtccagcacagtgtccagtggggccagcactgccaccaactctgagtccagcacaacctccagtggggtcagcacagccaccaactctgagtccagcacaacctccagtggggctagcacagccaccaactctgactccagcacaacctccagtgaggccagcacagccaccaactctgagtctagcacagtgtccagtgggatcagcacagtcaccaattctgagtccagcacaacctccagtggggccaacacagccaccaactctgggtccagtgtgacctctgcaggctctggaacagcagctctgactggaatgcacacaacttcccatagtgcatctactgcagtgagtgaggcaaagcctggtgggtccctggtgccgtgggaaatcttcctcatcaccctggtctcggttgtggcggccgtggggctctttgctgggctcttcttctgtgtgagaaacagcctgtccctgagaaacacctttaacacagctgtctaccaccctcatggcctcaaccatggccttggtccaggccctggagggaatcatggagccccccacaggcccaggtggagtcctaactggttctggaggagaccagtatcatcgatagccatggagatgagcgggaggaacagcgggccctgagcagccccggaagcaagtgccgcattcttcaggaaggaagagacctgggcacccaagacctggtttcctttcattcatcccaggagacccctcccagctttgtttgagatcctgaaaatcttgaagaaggtattcctcacctttcttgcctttaccagacactggaaagagaatactatattgctcatttagctaagaaataaatacatctcatctaacacacacgacaaagagaagctgtgcttgccccggggtgggtatctagctctgagatgaactcagttataggagaaaacctccatgctggactccatctggcattcaaaatctccacagtaaaatccaaagacctcattcttatctgtgtgtctgcattttctaatcctttttgccccaggcaaggtccctgtatctctgagacaccccgattggctggagaattgacttgggagagataaggagggagggcgggtgccagcatgctatgggctcctgcgtgaggcctgtggtacacagagattaggttgtgatacatgaagagccaagagcaggatgaggtggaggcgttacaactacctgctctgtgtgtggggggggagtggggaggggggtacgcatattcacttgaagtcgaggttcccagggcatttccatgtgctccaggcctgactacccatcagggtggaggagctggtgacactcatctccctgagtgctccctggtttcccaagggaaagactttctggcctgctgaggtcgaatcttccaagaggctcttgcaaagacccgagattctcataaatccctgcccagaagagctgcacgtatccctttcatgagtccagggaagagggtcctccaggtcttggaagacagaggggagctgctttagaggctaagttgctttgagcccacaaggtaatggagggctcctacttgggacagagccctcagcagagaattagcagtctgttggtgggttcaccccaactcacagcagtagaaactgctccatcttccaccacttattgggtttctccagtgtcagcaaaccaaagaattggatcttaccaatgcggctataggaaaacagcctgttgcatggtaagagtgataccatcttgaagtgaaaccaccacaatggccattttttttttagatggagttttgcagtggtgcaatcatagctcattgcagccttcaattcctgggctcaggcaatcctcctgcctcagcctcctgagtagctgggactacagtttcgtgtgccaccatgcctggctaatttttagaattttttgtagggacagggcctcactctgttgcacaagctggtcttgaactcctggcctccttgaactcctcctgccttcgcctcccaaagtgctgagattacaggtgtgagccactgcacctcgccagatgtccaatgtctgactcctgcataccaaggtgttctgtatcaagggctttaaaacaatgcctgtagcgtaattaacctctcacaaagatgcttatctaacctccccagcagtcatgggtttcagcaagaaagtctgtgatgtgaccagttgcacatgttttcccctaaaagcttactctagaaaggatattttttggagagggagtgtgggaatccaccatcttgtggccacctcagacatcacttctctttggaagactccattaaatatttctctgtgagaaa

SEQ ID NO: 24157 - DNA, 3741 bp, Artificial Sequence
  derived and/or modified sequence
agagaaagaggcaactacattgcctggaggaagcctaaggaacccaggcatccagctgcccacgcctgagtccaagattcttcccaggaacacaaacgtaggagacccacgctcctggaagcaccagcctttatctcttcaccttcaagtcccctttctcaagaatcctctgttctttgccctctaaagtcttggtacatctaggacccaggcatcttgctttccagccacaaagagacagatgaagatgcagaaaggaaatgttctccttatgtttggtctactattgcatttagaagctgcaacaaattccaatgagactagcacctctgccaacactggatccagtgtgatctccagtggagccagcacagccaccaactctgggtccagtgtgacctccagtggggtcagcacagccaccatctcagggtccagcgtgacctccaatggggtcagcatagtcaccaactctgagttccatacaacctccagtgggatcagcacagccaccaactctgagttcagcacagcgtccagtgggatcagcatagccaccaactctgagtccagcacaacctccagtggggccagcacagccaccaactctgagtccagcacaccctccagtggggccagcacagtcaccaactctgggtccagtgtgacctccagtggagccagcactgccaccaactctgagtccagcacagtgtccagtagggccagcactgccaccaactctgagtctagcacactctccagtggggccagcacagccaccaactctgactccagcacaacctccagtggggctagcacagccaccaactctgagtccagcacaacctccagtggggccagcacagccaccaactctgagtccagcacagtgtccagtagggccagcactgccaccaactctgagtccagcacaacctccagtggggccagcacagccaccaactctgagtccagaacgacctccaatggggctggcacagccaccaactctgagtccagcacgacctccagtggggccagcacagccaccaactctgactccagcacagtgtccagtggggccagcactgccaccaactctgagtccagcacgacctccagtggggccagcacagccaccaactctgagtccagcacgacctccagtggggctagcacagccaccaactctgactccagcacaacctccagtggggccggcacagccaccaactctgagtccagcacagtgtccagtgggatcagcacagtcaccaattctgagtccagcacaccctccagtggggccaacacagccaccaactctgagtccagtacgacctccagtggggccaacacagccaccaactctgagtccagcacagtgtccagtggggccagcactgccaccaactctgagtccagcacaacctccagtggggtcagcacagccaccaactctgagtccagcacaacctccagtggggctagcacagccaccaactctgactccagcacaacctccagtgaggccagcacagccaccaactctgagtctagcacagtgtccagtgggatcagcacagtcaccaattctgagtccagcacaacctccagtggggccaacacagccaccaactctgggtccagtgtgacctctgcaggctctggaacagcagctctgactggaatgcacacaacttcccatagtgcatctactgcagtgagtgaggcaaagcctggtgggtccctggtgccgtgggaaatcttcctcatcaccctggtctcggttgtggcggccgtggggctctttgctgggctcttcttctgtgtgagaaacagcctgtccctgagaaacacctttaacacagctgtctaccaccctcatggcctcaaccatggccttggtccaggccctggagggaatcatggagccccccacaggcccaggtggagtcctaactggttctggaggagaccagtatcatcgatagccatggagatgagcgggaggaacagcgggccctgagcagccccggaagcaagtgccgcattcttcaggaaggaagagacctgggcacccaagacctggtttcctttcattcatcccaggagacccctcccagctttgtttgagatcctgaaaatcttgaagaaggtattcctcacctttcttgcctttaccagacactggaaagagaatactatattgctcatttagctaagaaataaatacatctcatctaacacacacgacaaagagaagctgtgcttgccccggggtgggtatctagctctgagatgaactcagttataggagaaaacctccatgctggactccatctggcattcaaaatctccacagtaaaatccaaagacctcattcttatctgtgtgtctgcattttctaatcctttttgccccaggcaaggtccctgtatctctgagacaccccgattggctggagaattgacttgggagagataaggagggagggcgggtgccagcatgctatgggctcctgcgtgaggcctgtggtacacagagattaggttgtgatacatgaagagccaagagcaggatgaggtggaggcgttacaactacctgctctgtgtgtggggggggaggggggaggggggtacgcatattcacttgaagtcgaggttcccagggcatttccatgtgctccaggcctgactacccatcagggtggaggagctggtgacactcatctccctgagtgctccctggtttcccaagggaaagactttctggcctgctgaggtcgaatcttccaagaggctcttgcaaagacccgagattctcataaatccctgcccagaagagctgcacgtatccctttcatgagtccagggaagagggtcctccaggtcttggaagacagaggggagctgctttagaggctaagttgctttgagcccacaaggtaatggagggctcctacttgggacagagccctcagcagagaattagcagtctgttggtgggttcaccccaactcacagcagtagaaactgctccatcttccaccacttattgggtttctccagtgtcagcaaaccaaagaattggatcttaccaatgcggctataggaaaacagcctgttgcatggtaagagtgataccatcttgaagtgaaaccaccacaatggccattttttttttagatggagttttgcagtggtgcaatcatagctcattgcagccttcaattcctgggctcaggcaatcctcctgcctcagcctcctgagtagctgggactacagtttcgtgtgccaccatgcctggctaatttttagaattttttgtagggacagggcctcactctgttgcacaagctggtcttgaactcctggcctccttgaactcctcctgccttcgcctcccaaagtgctgagattacaggtgtgagccactgcacctcgccagatgtccaatgtctgactcctgcataccaaggtgttctgtatcaagggctttaaaacaatgcctgtagcgtaattaacctctcacaaagatgcttatctaacctccccagcagtcatgggtttcagcaagaaagtctgtgatgtgaccagttgcacatgttttcccctaaaagcttactctagaaaggatattttttggagagggagtgtgggaatccaccatcttgtggccacctcagacatcacttctctttggaagactccattaaatatttctctgtgagaaa

SEQ ID NO: 24158 - DNA, 3656 bp, Artificial Sequence
  derived and/or modified sequence
ctttcacaacagagaaagaggcaactacattgcctggaggaagcctaaggaacccaggcatccagctgcccacgcctgagtccaagattcttcccaggaacacaaacgtaggagacccacgctcctggaagcaccagcctttatctcttcaccttcaagtcccctttctcaagaatcctctgttctttgccctctaaagtcttggtacatctaggacccaggcatcttgctttccagccacaaagagacagatgaagatgcagaaaggaaatgttctccttatgtttggtctactattgcatttagaagctgcaacaaattccaatgagactagcacctctgccaacactggatccagtgtgatctccagtggagccagcacagccaccaactctgggtccagtgtgacctccagtggggtcagcacagccaccatctcagggtccagcgtgacctccaatggggtcagcatagtcaccaactctgagttccatacaacctccagtgggatcagcacagccaccaactctgagttcagcacagcgtccagtgggatcagcatagccaccaactctgagtccagcacaacctccagtggggccagcacagccaccaactctgagtccagcacaccctccagtggggccagcactgccaccaactctgagtctagcacactctccagtggggccagcacagccaccaactctgactccagcacaacctccagtggggctagcacagccaccaactctgagtccagcacaacctccagtggggccagcacagccaccaactctgagtccagcacagtgtccagtagggccagcactgccaccaactctgagtccagcacaacctccagtggggccagcacagccaccaactctgagtccagaacgacctccaatggggctggcacagccaccaactctgagtccagcacgacctccagtggggccagcacagccaccaactctgactccagcacagtgtccagtggggccagcactgccaccaactctgagtccagcacgacctccagtggggccagcacagccaccaactctgagtccagcacgacctccagtggggctagcacagccaccaactctgactccagcacaacctccagtggggccggcacagccaccaactctgagtccagcacagtgtccagtgggatcagcacagtcaccaattctgagtccagcacaccctccagtggggccaacacagccaccaactctgagtccagtacgacctccagtggggccaacacagccaccaactctgagtccagcacagtgtccagtggggccagcactgccaccaactctgagtccagcacaacctccagtggggtcagcacagccaccaactctgagtccagcacaacctccagtggggctagcacagccaccaactctgactccagcacaacctccagtgaggccagcacagccaccaactctgagtctagcacagtgtccagtgggatcagcacagtcaccaattctgagtccagcacaacctccagtggggccaacacagccaccaactctgggtccagtgtgacctctgcaggctctggaacagcagctctgactggaatgcacacaacttcccatagtgcatctactgcagtgagtgaggcaaagcctggtgggtccctggtgccgtgggaaatcttcctcatcaccctggtctcggttgtggcggccgtggggctctttgctgggctcttcttctgtgtgagaaacagcctgtccctgagaaacacctttaacacagctgtctaccaccctcatggcctcaaccatggccttggtccaggccctggagggaatcatggagccccccacaggcccaggtggagtcctaactggttctggaggagaccagtatcatcgatagccatggagatgagcgggaggaacagcgggccctgagcagccccggaagcaagtgccgcattcttcaggaaggaagagacctgggcacccaagacctggtttcctttcattcatcccaggagacccctcccagctttgtttgagatcctgaaaatcttgaagaaggtattcctcacctttcttgcctttaccagacactggaaagagaatactatattgctcatttagctaagaaataaatacatctcatctaacacacacgacaaagagaagctgtgcttgccccggggtgggtatctagctctgagatgaactcagttataggagaaaacctccatgctggactccatctggcattcaaaatctccacagtaaaatccaaagacctcattcttatctgtgtgtctgcattttctaatcctttttgccccaggcaaggtccctgtatctctgagacaccccgattggctggagaattgacttgggagagataaggagggagggcgggtgccagcatgctatgggctcctgcgtgaggcctgtggtacacagagattaggttgtgatacatgaagagccaagagcaggatgaggtggaggcgttacaactacctgctctgtgtgtggggggggaggggggaggggggtacgcatattcacttgaagtcgaggttcccagggcatttccatgtgctccaggcctgactacccatcagggtggaggagctggtgacactcatctccctgagtgctccctggtttcccaagggaaagactttctggcctgctgaggtcgaatcttccaagaggctcttgcaaagacccgagattctcataaatccctgcccagaagagctgcacgtatccctttcatgagtccagggaagagggtcctccaggtcttggaagacagaggggagctgctttagaggctaagttgctttgagcccacaaggtaatggagggctcctacttgggacagagccctcagcagagaattagcagtctgttggtgggttcaccccaactcacagcagtagaaactgctccatcttccaccacttattgggtttctccagtgtcagcaaaccaaagaattggatcttaccaatgcggctataggaaaacagcctgttgcatggtaagagtgataccatcttgaagtgaaaccaccacaatggccattttttttttagatggagttttgcagtggtgcaatcatagctcattgcagccttcaattcctgggctcaggcaatcctcctgcctcagcctcctgagtagctgggactacagtttcgtgtgccaccatgcctggctaatttttagaattttttgtagggacagggcctcactctgttgcacaagctggtcttgaactcctggcctccttgaactcctcctgccttcgcctcccaaagtgctgagattacaggtgtgagccactgcacctcgccagatgtccaatgtctgactcctgcataccaaggtgttctgtatcaagggctttaaaacaatgcctgtagcgtaattaacctctcacaaagatgcttatctaacctccccagcagtcatgggtttcagcaagaaagtctgtgatgtgaccagttgcacatgttttcccctaaaagcttactctagaaaggatattttttggagagggagtgtgggaatccaccatcttgtggccacctcagacatcacttctctttggaagactccattaaatatttctctgtg

SEQ ID NO: 24159 - DNA, 3656 bp, Artificial Sequence
  derived and/or modified sequence
ctttcacaacagagaaagaggcaactacattgcctggaggaagcctaaggaacccaggcatccagctgcccacgcctgagtccaagattcttcccaggaacacaaacgtaggagacccacgctcctggaagcaccagcctttatctcttcaccttcaagtcccctttctcaagaatcctctgttctttgccctctaaagtcttggtacatctaggacccaggcatcttgctttccagccacaaagagacagatgaagatgcagaaaggaaatgttctccttatgtttggtctactattgcatttagaagctgcaacaaattccaatgagactagcacctctgccaacactggatccagtgtgatctccagtggagccagcacagccaccaactctgggtccagtgtgacctccagtggggtcagcacagccaccatctcagggtccagcgtgacctccaatggggtcagcatagtcaccaactctgagttccatacaacctccagtgggatcagcacagccaccaactctgagttcagcacagcgtccagtgggatcagcatagccaccaactctgagtccagcacaacctccagtggggccagcacagccaccaactctgagtccagcacaccctccagtggggccagcactgccaccaactctgagtctagcacactctccagtggggccagcacagccaccaactctgactccagcacaacctccagtggggctagcacagccaccaactctgagtccagcacaacctccagtggggccagcacagccaccaactctgagtccagcacagtgtccagtagggccagcactgccaccaactctgagtccagcacaacctccagtggggccagcacagccaccaactctgagtccagaacgacctccaatggggctggcacagccaccaactctgagtccagcacgacctccagtggggccagcacagccaccaactctgactccagcacaacctccagtggggccggcacagccaccaactctgagtccagcacgacctccagtggggccagcacagccaccaactctgagtccagcacgacctccagtggggctagcacagccaccaactctgactccagcacaacctccagtggggccggcacagccaccaactctgagtccagcacagtgtccagtgggatcagcacagtcaccaattctgagtccagcacaccctccagtggggccaacacagccaccaactctgagtccagtacgacctccagtggggccaacacagccaccaactctgagtccagcacagtgtccagtggggccagcactgccaccaactctgagtccagcacaacctccagtggggtcagcacagccaccaactctgagtccagcacaacctccagtggggctagcacagccaccaactctgactccagcacaacctccagtgaggccagcacagccaccaactctgagtctagcacagtgtccagtgggatcagcacagtcaccaattctgagtccagcacaacctccagtggggccaacacagccaccaactctgggtccagtgtgacctctgcaggctctggaacagcagctctgactggaatgcacacaacttcccatagtgcatctactgcagtgagtgaggcaaagcctggtgggtccctggtgccgtgggaaatcttcctcatcaccctggtctcggttgtggcggccgtggggctctttgctgggctcttcttctgtgtgagaaacagcctgtccctgagaaacacctttaacacagctgtctaccaccctcatggcctcaaccatggccttggtccaggccctggagggaatcatggagccccccacaggcccaggtggagtcctaactggttctggaggagaccagtatcatcgatagccatggagatgagcgggaggaacagcgggccctgagcagccccggaagcaagtgccgcattcttcaggaaggaagagacctgggcacccaagacctggtttcctttcattcatcccaggagacccctcccagctttgtttgagatcctgaaaatcttgaagaaggtattcctcacctttcttgcctttaccagacactggaaagagaatactatattgctcatttagctaagaaataaatacatctcatctaacacacacgacaaagagaagctgtgcttgccccggggtgggtatctagctctgagatgaactcagttataggagaaaacctccatgctggactccatctggcattcaaaatctccacagtaaaatccaaagacctcattcttatctgtgtgtctgcattttctaatcctttttgccccaggcaaggtccctgtatctctgagacaccccgattggctggagaattgacttgggagagataaggagggagggcgggtgccagcatgctatgggctcctgcgtgaggcctgtggtacacagagattaggttgtgatacatgaagagccaagagcaggatgaggtggaggcgttacaactacctgctctgtgtgtggggggggagtggggaggggggtacgcatattcacttgaagtcgaggttcccagggcatttccatgtgctccaggcctgactacccatcagggtggaggagctggtgacactcatctccctgagtgctccctggtttcccaagggaaagactttctggcctgctgaggtcgaatcttccaagaggctcttgcaaagacccgagattctcataaatccctgcccagaagagctgcacgtatccctttcatgagtccagggaagagggtcctccaggtcttggaagacagaggggagctgctttagaggctaagttgctttgagcccacaaggtaatggagggctcctacttgggacagagccctcagcagagaattagcagtctgttggtgggttcaccccaactcacagcagtagaaactgctccatcttccaccacttattgggtttctccagtgtcagcaaaccaaagaattggatcttaccaatgcggctataggaaaacagcctgttgcatggtaagagtgataccatcttgaagtgaaaccaccacaatggccattttttttttagatggagttttgcagtggtgcaatcatagctcattgcagccttcaattcctgggctcaggcaatcctcctgcctcagcctcctgagtagctgggactacagtttcgtgtgccaccatgcctggctaatttttagaattttttgtagggacagggcctcactctgttgcacaagctggtcttgaactcctggcctccttgaactcctcctgccttcgcctcccaaagtgctgagattacaggtgtgagccactgcacctcgccagatgtccaatgtctgactcctgcataccaaggtgttctgtatcaagggctttaaaacaatgcctgtagcgtaattaacctctcacaaagatgcttatctaacctccccagcagtcatgggtttcagcaagaaagtctgtgatgtgaccagttgcacatgttttcccctaaaagcttactctagaaaggatattttttggagagggagtgtgggaatccaccatcttgtggccacctcagacatcacttctctttggaagactccattaaatatttctctgtg

SEQ ID NO: 24160 - protein, 232 aa, Artificial Sequence
  derived and/or modified sequence
MGPLALPAWLQPRYRKNAYLFIYYLIQFCGHSWIFTNMTVRFFSFGKDSMVDTFYAIGLVMRLCQSVSLLELLHIYVGIESNHLLPRFLQLTERIIILFVVITSQEEVQEKYVVCVLFVFWNLLDMVRYTYSMLSVIGISYAVLTWLSQTLWMPIYPLCVLAEAFAIYQSLPYFESFGTYSTKLPFDLSIYFPYVLKIYLMMLFIGMYFTYSHLYSERRDILGIFPIKKKKM

SEQ ID NO: 24161 - DNA, 699 bp, Artificial Sequence
  derived and/or modified sequence
atgggccccctggccctgcccgcctggctgcagcccagatacagaaagaacgcctacctgttcatctactacctgatccagttctgcggccacagctggatcttcaccaacatgaccgtgagattcttcagcttcggcaaggacagcatggtggacaccttctacgccatcggcctggtgatgagactgtgccagagcgtgagcctgctggagctgctgcacatctacgtgggcatcgagagcaaccacctgctgcccagattcctgcagctgaccgagagaatcatcatcctgttcgtggtgatcaccagccaggaggaggtgcaggagaagtacgtggtgtgcgtgctgttcgtgttctggaacctgctggacatggtgagatacacctacagcatgctgagcgtgatcggcatcagctacgccgtgctgacctggctgagccagaccctgtggatgcccatctaccccctgtgcgtgctggccgaggccttcgccatctaccagagcctgccctacttcgagagcttcggcacctacagcaccaagctgcccttcgacctgagcatctacttcccctacgtgctgaagatctacctgatgatgctgttcatcggcatgtacttcacctacagccacctgtacagcgagagaagagacatcctgggcatcttccccatcaagaagaagaagatgtag

SEQ ID NO: 24162 - DNA, 699 bp, Artificial Sequence
  derived and/or modified sequence
atgggacctcttgctttacccgcttggctgcaaccacgatatcggaaaaacgcctaccttttcatttactacttaatccagttttgcggccacagctggattttcactaatatgaccgtccggttctttagcttcgggaaggattcaatggtggatactttctatgccatcggcctggtaatgcgtctttgccaatccgtgagcctgttagaactactgcacatctacgtgggtatcgagagcaaccaccttctcccacgctttctgcagttgaccgagagaattatcatactcttcgtcgtaatcacgtcccaggaagaggtacaggagaagtacgtggtttgtgtgctgttcgttttctggaacctcctagatatggtacggtacacgtacagtatgctatccgttattgggatttcctacgccgttctcacttggctctcgcagaccctatggatgccgatctaccccctttgcgtgcttgctgaagcgtttgctatctaccagtcactgccatatttcgagtccttcggtacctacagcacaaagctaccttttgacctatcgatatatttcccatacgtgctgaaaatatacctaatgatgctttttataggaatgtactttacctactcccacctgtatagcgaacgcagggacattttagggatctttcctataaagaagaagaagatgtag

SEQ ID NO: 24163 - DNA, 699 bp, Artificial Sequence
  derived and/or modified sequence
atgggccccctggccctgcctgcctggcttcagcctagataccggaagaacgcctacctgtttatctattaccttatccagttttgcggacattcttggatcttcacaaatatgaccgttcgcttcttctcctttggcaaggactcaatggtcgacacattctacgccatcgggttggttatgagattatgccagtctgtatccttacttgagcttctccatatatacgtcgggatcgagagcaaccacctgctgcctcgcttcctgcagcttactgagagaatcatcatcctttttgtggtgattacctcacaggaggaagtacaggaaaaatatgtcgtttgtgtcctatttgtgttttggaatcttttagatatggtacgttacacttatagtatgctgagtgttatcggcatttcatatgcggtcctgacctggctctcccagacactctggatgccaatctaccccctgtgcgtgttggccgaagcatttgctatctaccagagcctcccttactttgagagttttggcacatacagcactaaattgccattcgacctctctatctactttccttacgtgctcaagatttacctgatgatgcttttcatcggcatgtacttcacttacagtcatctgtacagtgagcgtagggacatcctgggtatttttccaatcaaaaaaaagaaaatgtag

SEQ ID NO: 24164 - DNA, 699 bp, Artificial Sequence
  derived and/or modified sequence
atgggccccctggccctgcctgcctggctgcagccccgctacaggaagaatgcctacctgttcatctactacctgatccagttctgtggccacagctggatcttcaccaacatgacagtgcgcttcttctcctttgggaaggacagcatggtggacaccttctacgccatcggcctggtgatgaggctgtgccagagcgtgtccctgctggagctgctgcacatctacgtgggcatcgagagcaaccacctgctgccccgcttcctgcagctgacagagcgcatcatcatcctgtttgtggtgatcaccagccaggaggaggtgcaggagaagtatgtggtgtgtgtgctgtttgtgttctggaacctgctggacatggtgcgctacacctacagcatgctgtctgtgattggcatctcctatgctgtgctgacctggctgagccagaccctgtggatgcccatctaccccctgtgtgtgctggccgaggcctttgccatctaccagagcctgccctactttgagagctttggcacctacagcaccaagctgccctttgacctgagcatctacttcccctacgtgctgaagatctacctgatgatgctgttcatcggcatgtacttcacctacagccacctgtacagcgagcggcgggacatcctgggcatcttccccatcaagaagaagaagatgtag

SEQ ID NO: 24165 - DNA, 699 bp, Artificial Sequence
  derived and/or modified sequence
atgggccccctggccctgcccgcctggctgcagccccggtaccggaagaatgcctatttgttcatttactacctcatccagttctgcgggcactcttggatctttaccaatatgaccgtccgcttcttcagcttcggcaaggactccatggtcgacaccttctacgcaatcggactggtcatgcggttgtgtcaatctgtaagtttactggagctgctacatatatacgttggcattgaatctaatcacctcttaccgcgattcctgcagttgactgagcgtatcatcatcctgtttgtggtgatcactagccaagaagaagtgcaggagaagtacgttgtgtgtgtgctattcgtgttctggaaccttctagatatggtgcgctatacatattccatgttgagtgtgataggaatctcatatgccgtccttacctggctaagccaaaccctgtggatgcccatttatcctctttgcgtgctggccgaagctttcgccatctaccagagcctgccctatttcgagtctttcggcacctacagcacaaaactcccattcgacctcagcatttacttcccctatgtgctaaaaatctacctcatgatgctctttattggcatgtatttcacatattctcatctgtattccgaacgtcgcgacattcttggcattttccctattaagaaaaagaagatgtag

SEQ ID NO: 24166 - DNA, 699 bp, Artificial Sequence
  derived and/or modified sequence
atgggccccctggccctgcccgcctggctgcagccccggtaccggaagaatgcgtacttgttcatctactatctgatccaattttgcggacattcctggattttcaccaacatgacggtgaggttcttttcgttcggcaaggatagtatggtggataccttctatgccatagggcttgtcatgcgattgtgtcagtcagtcagcctcttagagctcttgcacatatatgtaggaatcgaaagcaaccatctcctcccacggttcctacagcttactgaacggattattatcctgttcgtggtaatcactagccaggaagaagtacaggaaaaatatgtcgtgtgtgtgctcttcgttttctggaacctactagacatggtaagatatacatattcgatgctctctgtgatcggaatatcttacgccgtgctgacctggttgtctcagaccctgtggatgcctatatatcctttgtgcgttttggccgaggcctttgccatttatcagtctctgccttatttcgaatcattcggaacatattcaacaaaattgccattcgatctgtccatctacttcccttacgtcctaaaaatctacctgatgatgctgttcattgggatgtatttcacttacagtcacctctattccgagcggcgcgacatattgggtattttccctatcaaaaagaaaaagatgtag

SEQ ID NO: 24167 - DNA, 4161 bp, Artificial Sequence
  derived and/or modified sequence
ggtactccttcctggaccgcgctggaagccctggcggcggcggcccatggggcccttggcgctgcccgcctggctgcagcccaggtataggaagaatgcgtatcttttcatctattacttaatccagttctgtggccactcttggatatttacaaatatgacagtcagattcttttcatttggaaaagattcaatggttgacactttttatgctattggacttgtgatgcgactttgccaatccgtatctctcctggaactgctgcacatatatgttggcattgagtcaaaccatcttctcccaaggtttttgcagctcacagaaagaataatcatcctttttgtggtgatcaccagtcaagaggaagtccaagagaaatatgtggtgtgtgttttattcgtcttttggaatctattggatatggttaggtacacttatagcatgttatcagtcataggaatatcctatgctgtcttgacatggctcagtcaaacactatggatgccaatttatcctttgtgtgttcttgctgaagcatttgccatctatcaatcgctgccttattttgaatcatttggcacttattccaccaagctgccctttgacttatccatctatttcccatatgtgctgaaaatatatctcatgatgctctttataggtatgtattttacctacagtcatctatactcagaaagaagagacatcctcggaatctttcccattaaaaaaaagaagatgtgaagtacagcattccagtgtgacacgagaaaagacaggctgtggattcagtgcagtaaataaaacacaggaagtattctggtggaaaaataccttgtatttgataaaaatccattacatgaaataactgcacatacccccaaaactctagacataacaggctatgtttttcacacattgtatttttaagacatatatattctccataccctgcttcaccaaaattcctgcttcatttggattttatacaagttatacttacattgtatgaagtctgattattttcctgtaagtttaatgagaaataggagattagctgcaatagattcaattaaattaagaaaccaaacttgataacctaaattacatgtattctttttcacttccaagttcccaaatagatctgtaggagaagagggatggaaaatatattccacagttgcctagaataacatatttcatagacagatgtctgtcttcagatctaataatactcaccctaaacattagatatgtttagaaaattaaatatctttccaagccctatgtcttagctcaggttgctataatagaacaccataaaccgaatggcttaaacaacagcaaacgcttctcacagttctggaggctgggaattccgctcaggatcaaggcatcagctaatgcagtttctggtgagggccctcttcccagtttgcagatagatgtccttctttgtcctcacatgagagagagatcaactctcttatgtctcttataatggcactaaccccattcatgagggctctaccctcatgatctaattacctcccaatggccccacctccaaataccatcatattggaggttagggcttaacacatgaattttgggggaacacaaagattcactccatagcattctgtacctggtcctacaaaattcatgtcctcctcacatgcaaaatacatacattccatctcgacagcctcaaaagtcttaactcattcctgcatcaactctaaagtccaaagtctcgtctaaatcagatgtgggtgagattcaaggtagaattcatcctgaggtaaaattcctttccagctttgaacttgtgaaatgaaacaagttatgtgcttccacagtacaatggtgggacacacaaagggtggacattcctattcccaaagcaagaaacaggaaaaaaggaaggtgtaatgggtccccagcaagtccaaaacctagcaaggcaaacaccatgagatcttcagtcttagtaataatcctctttggcctgatactctggcttcaggacccagtgaggcagaggtattgcccccaggactatgttggaggaggatgacccccatatcaccaggcggaagctgtcaggcctgttgaaaccaaggcaatgactgccccttttgaaactgagaaggtaccactgatgttctctgaatcattgttccgggtcagtttctccttttcttgaagaatagtgtacattcacagctgaatagctctatggtcccaaattcaagaagtccaacagtcttccctcattctgtcccatctccattcctttcaatacaaactagcagtgttcctgctggggtggctgattaggtctgtggttcacacccacataaatctaattggatgacttgtctgctacactcttagtgttctctaccaaacgtgttttcttatctttttgtaatgcagacagactgataatttcccacatcttttaagttctggttccgtttttgttaagaattctgtcttcattttttgtcacattttactttaagcagtcaagataaaccgaggcactccttcaacactggttggagatctcttcagttcaatatctaatttcatggctcacaattttactttccacaaaacactagaacatgaacacaatcatccaagttctttggcatattataacaaagatcacctttcttccagtttcccataacaggttcctcattttcatttgagacttcatcagaatggcctttattgtccatgtctaccaacattatcttcatggtgatttacgtgttctctatgaagatggaggctttctctcccaccctcttctctttgagccctcaccaaaatcacctctatcaatcccttcatggcaatactggctttttctagcaaaaaaactagtacctcaaaactcttccagtactcttccaggtactctagtacctcaaaactcttccagcttctatctgttacctaacgtcaaagctgcttccacatctttatatattggttatagcatcaccacacttcttggtactaattgctgtcttagcttggctgctataacaaaataccataaactgggtggcttagacaacaaatatatttctcacagttctggaggcagggaagtccaagataaaggtgctagacaattaagttcctgatgaggttccaaggtgctagctgattcttcttcatggtttgcagatgaatgccttcttgctatatgttcacatggtggagggagaaaccatctctcccttatttcttattgtaaaggtactaatcccatttatgaaggttccagcttcaaatgccatcacactggagattagattttcaacatgtgaatttaatgggggacaccagcattcagtccctagtgctctgatagagtattcattaatgtcatgtatttgttaacatcttgtaagttatttgggctttgatgccttaaaagaagaccctggccaggcatgctggctcatacctgtaatcctagcactatgagaggctgaggtgggcagatcagttgaggtcaggagttcaagaccagcctggccaacatggtgaaaccccatttctactaaaaatacaaaaattagccaggcatggtggcgcatgcctgtaatcccagctacacgggaggctgggggcatgagaatcgcttgagcccaggagatggaggttgcagtgagcagagattgagccactgcactccagcctgggtgacagagtgagactctatctcaaaagagaagaccctaatgaaaatagtaaacctttagcaaatacacaaatgatgccccattctgtattctttttaattttaaaaataatgacacacacatacaggaagataaaaggtataaaaatatactaagtactttttaaaaaggaaaattcatgttttggattattactgaattgttgctaattactgtaatgtaagtcatatgtccttacatagttttgaaaaatgctttctttgaaaatctaaaaaaagtgtgaataactgatagtcattgctgtatcattgatgtatcactcaatttttggtaaagaattataaagatcttacctagaaactatgtaaaaaggtattaaatatattgtgatgtaagaataggataataaaaatgtaattttaaaaa

SEQ ID NO: 24168 - DNA, 2131 bp, Artificial Sequence
  derived and/or modified sequence
gccctggcggcggcggcccatggggcccttggcgctgcccgcctggctgcagcccaggtataggaagaatgcgtatcttttcatctattacttaatccagttctgtggccactcttggatatttacaaatatgacagtcagattcttttcatttggaaaagattcaatggttgacactttttatgctattggacttgtgatgcgactttgccaatccgtatctctcctggaactgctgcacatatatgttggcattgagtcaaaccatcttctcccaaggtttttgcagctcacagaaagaataatcatcctttttgtggtgatcaccagtcaagaggaagtccaagagaaatatgtggtgtgtgttttattcgtcttttggaatctattggatatggttaggtacacttatagcatgttatcagtcataggaatatcctatgctgtcttgacatggctcagtcaaacactatggatgccaatttatcctttgtgtgttcttgctgaagcatttgccatctatcaatcgctgccttattttgaatcatttggcacttattccaccaagctgccctttgacttatccatctatttcccatatgtgctgaaaatatatctcatgatgctctttataggtatgtattttacctacagtcatctatactcagaaagaagagacatcctcggaatctttcccattaaaaaaaagaagatgtgaagtacagcattccagtgtgacacgagaaaagacaggctgtggattcagtgcagtaaataaaacacaggaagtattctggtggaaaaataccttgtatttgataaaaatccattacatgaaataactgcacatacccccaaaactctagacataacaggctatgtttttcacacattgtatttttaagacatatatattctccataccctgcttcaccaaaattcctgcttcatttggattttatacaagttatacttacattgtatgaagtctgattattttcctgtaagtttaatgagaaataggagattagctgcaatagattcaattaaattaagaaaccaaacttgataacctaaattacatgtattctttttcacttccaagttcccaaatagatctgtaggagaagagggatggaaaatatattccacagttgcctagaataacatatttcatagacagatgtctgtcttcagatctaataatactcaccctaaacattagatatgtttagaaaattaaatatctttccaagccctatgtcttagctcaggttgctataatagaacaccataaaccgaatggcttaaacaacagcaaacgcttctcacagttctggaggctgggaattccgctcaggatcaaggcatcagctaatgcagtttctggacccagtgaggcagaggtattgcccccaggactatgttggaggaggatgacccccatatcaccaggcggaagctgtcaggcctgttgaaaccaaggcaatgactgccccttttgaaactgagaagcagggagaagataatatcttcaagctttcacaaagaaaatctccacattgaactcaagccaaataaagaaaatccaagttcctgtttcagtctcaactggcccgggtactaaagcaatgcactcctctcttaggaggcatgtgtcaagctgtcagtgatgtggccatcttttcatgacccttaactctctgcatcatgtctcagcaataccaggcatgaattctgaaaaacttcttccacttatatggttttcctcatccagctgagaatgctgctggttactgcaaaactgttcaccaaccatatgctctggtccatacagctttcttcttaaactctgggagaactctcaaggacagcagggtggctaaggggacaaaatataggtatggctgcatttgaaaaggtcattttgatcaaaaaggtgtcagaacagaatttgtctttttctcacttggctaatgttcaagactagggagttccatcgatattttggcaggattttaatggcagaaaaccatttataaatgttggggggaaagttgtttttttttttttttttaagttaccctgcaatcagttaatgggaaattctgcagaattaaaatgaaagctg

SEQ ID NO: 24169 - DNA, 699 bp, Artificial Sequence
  derived and/or modified sequence
atgggaccattggcccttccagcttggctgcagccacgataccgcaagaacgcctatctgtttatctattacctgattcaattctgcggtcactcctggatatttactaacatgacagtcaggtttttctcattcggcaaggactcaatggttgacacattttatgcgataggtctggtcatgcgactgtgccagtctgttagccttctggagttgctacacatctatgtggggatcgaaagtaatcacctgctcccacgcttcctgcagctgaccgagagaatcataatcttgtttgtggtgatcacaagccaggaagaggtccaggagaaatacgttgtctgcgtactcttcgtgttctggaatctccttgacatggtgcgctacacgtattcaatgctgagtgtaattggcataagctatgccgtgctgacatggttgtctcagacgctctggatgccaatttaccccctctgcgtgctggcggaggcctttgccatctatcagtctctgccctactttgagtccttcggaacctatagcaccaagctgccttttgacctgagcatctatttcccttacgtactgaagatttatctgatgatgctgttcatcggaatgtattttacctactcccatctgtactcagaacggcgagacatccttgggatttttcctattaagaaaaagaagatgtag

SEQ ID NO: 24170 - DNA, 699 bp, Artificial Sequence
  derived and/or modified sequence
atgggacccctcgccctgcccgcatggttgcagcctagatacagaaagaatgcatatctgttcatctactatctgattcagttttgcgggcatagctggatctttactaacatgaccgtgcgcttcttctcttttggcaaagactccatggtcgatactttctatgccattggtttagtgatgaggttatgccaatccgtttctttgctagagctgcttcacatctacgtgggcattgagtcaaaccacctgctgcccaggttcctgcagcttaccgagcggatcatcattctgttcgtcgtgatcacctcacaggaggaagtccaggagaagtatgttgtctgtgtactgttcgttttttggaatctcctggatatggtccgatacacctactcgatgctttcagtcatcgggatatcatacgccgtgctgacctggttatctcagacattgtggatgcccatctatccactgtgtgtgctagccgaagcgtttgcaatctaccagagccttccatatttcgagtctttcggcacctactcaactaagcttccctttgatctaagtatatacttcccatatgtgctcaagatttatctcatgatgctgtttattgggatgtactttacgtatagccatttgtatagtgagagacgtgacatcctgggaattttccccataaagaaaaaaaagatgtag

SEQ ID NO: 24171 - protein, 641 aa, Artificial Sequence
  derived and/or modified sequence
MALSLEEFVHSLDLRTLPRVLEIQAGIYLEGSIYEMFGNECCFSTGEVIKITGLKVKKIIAEICEQIEGCESLQPFELPMNFPGLFKIVADKTPYLTMEEITRTIHIGPSRLGHPCFYHQKDIKLENLIIKQGEQIMLNSVEEIDGEIMVSCAVARNHQTHSFNLPLSQEGEFYECEDERIYTLKEIVEWKIPKNRTRTVNLTDFSNKWDSTNPFPKDFYGTLILKPVYEIQGVMKFRKDIIRILPSLDVEVKDITDSYDANWFLQLLSTEDLFEMTSKEFPIVTEVIEAPEGNHLPQSILQPGKTIVIHKKYQASRILASEIRSNFPKRHFLIPTSYKGKFKRRPREFPTAYDLEIAKSEKEPLHVVATKAFHSPHDKLSSVSVGDQFLVHQSETTEVLCEGIKKVVNVLACEKILKKSYEAALLPLYMEGGFVEVIHDKKQYPISELCKQFRLPFNVKVSVRDLSIEEDVLAATPGLQLEEDITDSYLLISDFANPTECWEIPVGRLNMTVQLVSNFSRDAEPFLVRTLVEEITEEQYYMMRRYESSASHPPPRPPKHPSVEETKLTLLTLAEERTVDLPKSPKRHHVDITKKLHPNQAGLDSKVLIGSQNDLVDEEKERSNRGATAIAETFKNEKHQK

SEQ ID NO: 24172 - protein, 562 aa, Artificial Sequence
  derived and/or modified sequence
MNFPGLFKIVADKTPYLTMEEITRTIHIGPSRLGHPCFYHQKDIKLENLIIKQGEQIMLNSVEEIDGEIMVSCAVARNHQTHSFNLPLSQEGEFYECEDERIYTLKEIVEWKIPKNRTRTVNLTDFSNKWDSTNPFPKDFYGTLILKPVYEIQGVMKFRKDIIRILPSLDVEVKDITDSYDANWFLQLLSTEDLFEMTSKEFPIVTEVIEAPEGNHLPQSILQPGKTIVIHKKYQASRILASEIRSNFPKRHFLIPTSYKGKFKRRPREFPTAYDLEIAKSEKEPLHVVATKAFHSPHDKLSSVSVGDQFLVHQSETTEVLCEGIKKVVNVLACEKILKKSYEAALLPLYMEGGFVEVIHDKKQYPISELCKQFRLPFNVKVSVRDLSIEEDVLAATPGLQLEEDITDSYLLISDFANPTECWEIPVGRLNMTVQLVSNFSRDAEPFLVRTLVEEITEEQYYMMRRYESSASHPPPRPPKHPSVEETKLTLLTLAEERTVDLPKSPKRHHVDITKKLHPNQAGLDSKVLIGSQNDLVDEEKERSNRGATAIAETFKNEKHQK

SEQ ID NO: 24173 - protein, 606 aa, Artificial Sequence
  derived and/or modified sequence
MFGNECCFSTGEVIKITGLKVKKIIAEICEQIEGCESLQPFELPMNFPGLFKIVADKTPYLTMEEITRTIHIGPSRLGHPCFYHQKDIKLENLIIKQGEQIMLNSVEEIDGEIMVSCAVARNHQTHSFNLPLSQEGEFYECEDERIYTLKEIVEWKIPKNRTRTVNLTDFSNKWDSTNPFPKDFYGTLILKPVYEIQGVMKFRKDIIRILPSLDVEVKDITDSYDANWFLQLLSTEDLFEMTSKEFPIVTEVIEAPEGNHLPQSILQPGKTIVIHKKYQASRILASEIRSNFPKRHFLIPTSYKGKFKRRPREFPTAYDLEIAKSEKEPLHVVATKAFHSPHDKLSSVSVGDQFLVHQSETTEVLCEGIKKVVNVLACEKILKKSYEAALLPLYMEGGFVEVIHDKKQYPISELCKQFRLPFNVKVSVRDLSIEEDVLAATPGLQLEEDITDSYLLISDFANPTECWEIPVGRLNMTVQLVSNFSRDAEPFLVRTLVEEITEEQYYMMRRYESSASHPPPRPPKHPSVEETKLTLLTLAEERTVDLPKSPKRHHVDITKKLHPNQAGLDSKVLIGSQNDLVDEEKERSNRGATAIAETFKNEKHQK

SEQ ID NO: 24174 - DNA, 1926 bp, Artificial Sequence
  derived and/or modified sequence
atggccctgagcctggaggagttcgtgcacagcctggacctgagaaccctgcccagagtgctggagatccaggccggcatctacctggagggcagcatctacgagatgttcggcaacgagtgctgcttcagcaccggcgaggtgatcaagatcaccggcctgaaggtgaagaagatcatcgccgagatctgcgagcagatcgagggctgcgagagcctgcagcccttcgagctgcccatgaacttccccggcctgttcaagatcgtggccgacaagaccccctacctgaccatggaggagatcaccagaaccatccacatcggccccagcagactgggccacccctgcttctaccaccagaaggacatcaagctggagaacctgatcatcaagcagggcgagcagatcatgctgaacagcgtggaggagatcgacggcgagatcatggtgagctgcgccgtggccagaaaccaccagacccacagcttcaacctgcccctgagccaggagggcgagttctacgagtgcgaggacgagagaatctacaccctgaaggagatcgtggagtggaagatccccaagaacagaaccagaaccgtgaacctgaccgacttcagcaacaagtgggacagcaccaaccccttccccaaggacttctacggcaccctgatcctgaagcccgtgtacgagatccagggcgtgatgaagttcagaaaggacatcatcagaatcctgcccagcctggacgtggaggtgaaggacatcaccgacagctacgacgccaactggttcctgcagctgctgagcaccgaggacctgttcgagatgaccagcaaggagttccccatcgtgaccgaggtgatcgaggcccccgagggcaaccacctgccccagagcatcctgcagcccggcaagaccatcgtgatccacaagaagtaccaggccagcagaatcctggccagcgagatcagaagcaacttccccaagagacacttcctgatccccaccagctacaagggcaagttcaagagaagacccagagagttccccaccgcctacgacctggagatcgccaagagcgagaaggagcccctgcacgtggtggccaccaaggccttccacagcccccacgacaagctgagcagcgtgagcgtgggcgaccagttcctggtgcaccagagcgagaccaccgaggtgctgtgcgagggcatcaagaaggtggtgaacgtgctggcctgcgagaagatcctgaagaagagctacgaggccgccctgctgcccctgtacatggagggcggcttcgtggaggtgatccacgacaagaagcagtaccccatcagcgagctgtgcaagcagttcagactgcccttcaacgtgaaggtgagcgtgagagacctgagcatcgaggaggacgtgctggccgccacccccggcctgcagctggaggaggacatcaccgacagctacctgctgatcagcgacttcgccaaccccaccgagtgctgggagatccccgtgggcagactgaacatgaccgtgcagctggtgagcaacttcagcagagacgccgagcccttcctggtgagaaccctggtggaggagatcaccgaggagcagtactacatgatgagaagatacgagagcagcgccagccaccccccccccagaccccccaagcaccccagcgtggaggagaccaagctgaccctgctgaccctggccgaggagagaaccgtggacctgcccaagagccccaagagacaccacgtggacatcaccaagaagctgcaccccaaccaggccggcctggacagcaaggtgctgatcggcagccagaacgacctggtggacgaggagaaggagagaagcaacagaggcgccaccgccatcgccgagaccttcaagaacgagaagcaccagaagtag

SEQ ID NO: 24175 - DNA, 1689 bp, Artificial Sequence
  derived and/or modified sequence
atgaacttccccggcctgttcaagatcgtggccgacaagaccccctacctgaccatggaggagatcaccagaaccatccacatcggccccagcagactgggccacccctgcttctaccaccagaaggacatcaagctggagaacctgatcatcaagcagggcgagcagatcatgctgaacagcgtggaggagatcgacggcgagatcatggtgagctgcgccgtggccagaaaccaccagacccacagcttcaacctgcccctgagccaggagggcgagttctacgagtgcgaggacgagagaatctacaccctgaaggagatcgtggagtggaagatccccaagaacagaaccagaaccgtgaacctgaccgacttcagcaacaagtgggacagcaccaaccccttccccaaggacttctacggcaccctgatcctgaagcccgtgtacgagatccagggcgtgatgaagttcagaaaggacatcatcagaatcctgcccagcctggacgtggaggtgaaggacatcaccgacagctacgacgccaactggttcctgcagctgctgagcaccgaggacctgttcgagatgaccagcaaggagttccccatcgtgaccgaggtgatcgaggcccccgagggcaaccacctgccccagagcatcctgcagcccggcaagaccatcgtgatccacaagaagtaccaggccagcagaatcctggccagcgagatcagaagcaacttccccaagagacacttcctgatccccaccagctacaagggcaagttcaagagaagacccagagagttccccaccgcctacgacctggagatcgccaagagcgagaaggagcccctgcacgtggtggccaccaaggccttccacagcccccacgacaagctgagcagcgtgagcgtgggcgaccagttcctggtgcaccagagcgagaccaccgaggtgctgtgcgagggcatcaagaaggtggtgaacgtgctggcctgcgagaagatcctgaagaagagctacgaggccgccctgctgcccctgtacatggagggcggcttcgtggaggtgatccacgacaagaagcagtaccccatcagcgagctgtgcaagcagttcagactgcccttcaacgtgaaggtgagcgtgagagacctgagcatcgaggaggacgtgctggccgccacccccggcctgcagctggaggaggacatcaccgacagctacctgctgatcagcgacttcgccaaccccaccgagtgctgggagatccccgtgggcagactgaacatgaccgtgcagctggtgagcaacttcagcagagacgccgagcccttcctggtgagaaccctggtggaggagatcaccgaggagcagtactacatgatgagaagatacgagagcagcgccagccaccccccccccagaccccccaagcaccccagcgtggaggagaccaagctgaccctgctgaccctggccgaggagagaaccgtggacctgcccaagagccccaagagacaccacgtggacatcaccaagaagctgcaccccaaccaggccggcctggacagcaaggtgctgatcggcagccagaacgacctggtggacgaggagaaggagagaagcaacagaggcgccaccgccatcgccgagaccttcaagaacgagaagcaccagaagtag

SEQ ID NO: 24176 - DNA, 1821 bp, Artificial Sequence
  derived and/or modified sequence
atgttcggcaacgagtgctgcttcagcaccggcgaggtgatcaagatcaccggcctgaaggtgaagaagatcatcgccgagatctgcgagcagatcgagggctgcgagagcctgcagcccttcgagctgcccatgaacttccccggcctgttcaagatcgtggccgacaagaccccctacctgaccatggaggagatcaccagaaccatccacatcggccccagcagactgggccacccctgcttctaccaccagaaggacatcaagctggagaacctgatcatcaagcagggcgagcagatcatgctgaacagcgtggaggagatcgacggcgagatcatggtgagctgcgccgtggccagaaaccaccagacccacagcttcaacctgcccctgagccaggagggcgagttctacgagtgcgaggacgagagaatctacaccctgaaggagatcgtggagtggaagatccccaagaacagaaccagaaccgtgaacctgaccgacttcagcaacaagtgggacagcaccaaccccttccccaaggacttctacggcaccctgatcctgaagcccgtgtacgagatccagggcgtgatgaagttcagaaaggacatcatcagaatcctgcccagcctggacgtggaggtgaaggacatcaccgacagctacgacgccaactggttcctgcagctgctgagcaccgaggacctgttcgagatgaccagcaaggagttccccatcgtgaccgaggtgatcgaggcccccgagggcaaccacctgccccagagcatcctgcagcccggcaagaccatcgtgatccacaagaagtaccaggccagcagaatcctggccagcgagatcagaagcaacttccccaagagacacttcctgatccccaccagctacaagggcaagttcaagagaagacccagagagttccccaccgcctacgacctggagatcgccaagagcgagaaggagcccctgcacgtggtggccaccaaggccttccacagcccccacgacaagctgagcagcgtgagcgtgggcgaccagttcctggtgcaccagagcgagaccaccgaggtgctgtgcgagggcatcaagaaggtggtgaacgtgctggcctgcgagaagatcctgaagaagagctacgaggccgccctgctgcccctgtacatggagggcggcttcgtggaggtgatccacgacaagaagcagtaccccatcagcgagctgtgcaagcagttcagactgcccttcaacgtgaaggtgagcgtgagagacctgagcatcgaggaggacgtgctggccgccacccccggcctgcagctggaggaggacatcaccgacagctacctgctgatcagcgacttcgccaaccccaccgagtgctgggagatccccgtgggcagactgaacatgaccgtgcagctggtgagcaacttcagcagagacgccgagcccttcctggtgagaaccctggtggaggagatcaccgaggagcagtactacatgatgagaagatacgagagcagcgccagccaccccccccccagaccccccaagcaccccagcgtggaggagaccaagctgaccctgctgaccctggccgaggagagaaccgtggacctgcccaagagccccaagagacaccacgtggacatcaccaagaagctgcaccccaaccaggccggcctggacagcaaggtgctgatcggcagccagaacgacctggtggacgaggagaaggagagaagcaacagaggcgccaccgccatcgccgagaccttcaagaacgagaagcaccagaagtag

SEQ ID NO: 24177 - DNA, 1926 bp, Artificial Sequence
  derived and/or modified sequence
atggccctaagcctggaagagttcgtgcactctcttgatttgcgtactctgccacgcgtgttagagattcaagcaggcatctacctcgaaggatccatttatgaaatgttcgggaacgaatgctgcttttcaaccggggaagtcattaaaatcactggactgaaagttaagaaaattattgccgaaatctgtgaacagatagaaggttgtgaatctttgcagccgtttgaactgccaatgaactttcctggactgtttaaaatcgtggcggataaaaccccttacctgactatggaagaaattacgaggaccattcacattggcccatccaggctcgggcatccgtgcttttaccatcagaaagatatcaagcttgagaaccttatcattaaacagggagagcagatcatgcttaacagcgtggaggaaattgatggggagatcatggtatcttgtgcggtggccaggaaccaccagacacacagttttaacctgccactatcccaggaaggcgaattctacgagtgcgaagatgaaaggatttatacactcaaggagattgtagagtggaaaattcctaagaacagaacaagaaccgtgaaccttacagatttcagtaataagtgggattctactaacccgttcccaaaggacttttacggcacactgatcctaaagcctgtatatgagattcagggcgtcatgaaattcaggaaagacattatcagaatcttaccatccctggatgtcgaggttaaggacattacagacagctacgatgctaactggttcctccagctgctgtccacggaagacctcttcgagatgacctcaaaggaatttcctatcgtgaccgaggtgatcgaggccccagaaggaaaccatctacctcaatctatcctccaacccggtaagaccatcgttattcacaagaagtatcaagcttctagaattctggccagcgaaattagaagcaactttcccaagagacacttcttaattccaacatcctataaaggcaagtttaagcgcaggccccgggaattccctaccgcttatgaccttgaaatcgctaaatccgagaaagagccacttcacgtagtggcaaccaaagcctttcacagccctcacgataaactatcaagtgtttccgtgggagatcagttcctggtccaccagtcagagactactgaggtcctttgcgagggcatcaaaaaagtggtcaacgtactggcttgcgagaaaatactcaaaaagtcatatgaggcagcactcctgcccctgtacatggaaggtgggttcgttgaggtgatccatgacaagaagcagtatcctatttcagaactgtgcaagcaatttcgcctacctttcaacgtgaaagtctcggtacgtgatctgagtatcgaggaggacgtgctggccgctactcctgggctgcagctggaggaagatatcaccgactcctacctgctgatctcagactttgccaacccaactgagtgttgggagattccagtaggcagacttaacatgacggttcagctagtatccaatttcagtagagatgcagaaccatttttagtcaggacactcgtcgaggagatcacagaagagcagtactatatgatgagaaggtatgagagcagcgcctcacacccgccccccagaccaccaaaacatccctccgttgaagaaaccaagctgacgcttctgactttggcagaggagagaacggtcgacctacctaagtcccccaaaagacatcacgtggacatcaccaaaaagctgcatcccaatcaggctggactcgatagcaaagtgcttataggctcccagaacgatctggtcgatgaggaaaaagagcggtccaacagaggagccaccgctatcgctgagacattcaagaatgaaaagcatcagaagtag

SEQ ID NO: 24178 - DNA, 1689 bp, Artificial Sequence
  derived and/or modified sequence
atgaacttcccaggtctgttcaaaatcgtggctgataagacaccttacctcacaatggaagaaataactaggacaattcatatcggaccatctcgtctgggccacccctgtttctaccatcagaaagacatcaagctggagaatttgatcatcaaacaaggcgagcagatcatgcttaactctgtcgaggaaatagacggtgaaatcatggtttcctgtgctgtcgcccggaaccatcagacgcattccttcaatctgcccctgagtcaggagggggaattttatgagtgtgaggatgaaaggatatatactctgaaagagatagttgaatggaagatcccaaagaaccggacgagaacagtaaacctgaccgacttcagtaacaagtgggacagcaccaacccatttcctaaagatttttatggaacactgatacttaaacctgtttatgagatacagggggtcatgaagtttaggaaagacatcattcgcattttacctagtttggacgttgaggtcaaagacataactgattcctatgatgcaaactggttcctccagcttctctcaaccgaggatctgttcgagatgacatctaaagaatttcctatagtgaccgaggtgattgaagcgccagaaggaaaccatctgcctcagtccattctccagcccggaaaaacaatcgtgatccataagaaatatcaggctagcagaattctcgcttccgagatccgcagcaactttccgaaacgacactttctaatcccaacttcttacaaaggtaagttcaagcgacggccacgagagtttccaactgcgtacgatcttgaaatcgctaaaagtgaaaaagaacctctgcatgtcgtcgctaccaaagcctttcactctccccatgacaagctctcaagtgtgtccgtcggggaccaatttctggtccatcagtcagaaaccacggaggtgctgtgcgaaggtattaagaaagtcgttaacgtgttagcgtgtgagaagattcttaaaaagtcttatgaagcggctctgctccctttgtacatggaaggtggattcgtcgaggtgattcacgataaaaagcagtaccccatcagtgagctgtgtaaacagtttcgcctcccatttaatgtcaaggtgtccgtgagagacctatcgattgaagaggacgtcctcgccgctacccctggcctacaactcgaggaagacataaccgattcgtatcttcttatttccgattttgccaacccgaccgagtgctgggagatcccggtgggaagactgaacatgaccgtgcagctggtaagcaatttcagtcgagatgcagagccttttctagtgcgcacgttggttgaggagatcacggaggagcagtattacatgatgaggcgatacgaaagctccgccagccaccctccacctagacccccgaagcatccaagcgtcgaggagaccaagcttacattacttactctggccgaagagcggacagtcgacttgccaaagagcccaaagcgacaccacgtggacatcaccaaaaaattgcatcctaaccaggccggcctggactcgaaagtccttataggctctcagaacgacctcgttgatgaggagaaagaaagaagtaaccggggagcaactgccatcgcggaaaccttcaagaatgaaaagcatcagaagtag

SEQ ID NO: 24179 - DNA, 1821 bp, Artificial Sequence
  derived and/or modified sequence
atgttcggcaatgagtgctgtttcagtactggcgaggtaatcaaaataactgggctcaaggtgaaaaagattatcgcagagatttgtgaacagatcgaggggtgcgagtcactacagcccttcgagctccctatgaactttcctggcttatttaagattgtcgccgataagaccccctatctgacgatggaagaaattacacggacaatccatattggcccctcacggttggggcacccctgtttttatcatcagaaggacatcaaattggagaacttgattattaagcagggtgaacaaatcatgttgaatagtgtcgaggagatagatggtgagatcatggttagttgcgccgttgcacggaaccatcagacccactcttttaatctccccttatcccaggagggcgaattctatgaatgtgaagacgaacggatctatactctgaaagagatcgtcgagtggaaaatccccaaaaatcgcacacggactgtgaatttgaccgacttttctaataagtgggactccaccaatccatttccaaaggacttttacggaacactgatccttaaaccggtgtacgagatccaaggtgtgatgaagttccggaaagatatcattcggatcttgcccagtctggatgtggaggtgaaggatattaccgactcatacgatgctaattggtttttgcaactcctgtccacggaggacctgttcgagatgacctctaaagagtttcctatagttacagaagtaatagaggctcccgaaggcaaccacctgccccagtcgatcttgcagcctggaaaaactattgtaatccacaagaaatatcaggcctcacggattctggctagtgagatccgatccaatttcccaaaacggcactttctgatccctacatcttataaaggaaaattcaaacgccgccccagagaattccctaccgcctacgaccttgaaatagcaaagtccgagaaagaacctcttcacgtagttgccaccaaggcttttcacagcccacacgacaaattgagttccgtgtctgtgggcgaccagttcttagttcaccaatcagagactacagaagttctctgtgaggggataaaaaaggtcgtgaacgtgttggcctgtgagaaaatcctgaaaaagagctatgaggcagctctgctgcctctctatatggaggggggatttgtcgaagttattcacgacaaaaagcaataccctatatccgaactgtgtaaacagttccggctaccttttaacgttaaagtttcggtccgagacttgagcattgaggaggatgtgctggctgcgacccccggactccagctggaagaagatattacggattcctacctccttatctcagatttcgcgaatccgactgagtgctgggagatccccgtggggcgcctgaatatgactgtgcagctggtatctaacttttcgcgggatgcggagcctttcctggtgaggaccctggttgaagagatcacagaggagcaatattacatgatgagacgatatgagtcttcagcttcccatcctcctcctcgccctccaaaacacccttccgtggaagaaacgaagctcaccctcctcaccctcgccgaggaacgtacagtggacctgcccaagagccctaaacggcatcatgttgacattacaaaaaaacttcatccaaaccaggcgggcctggattccaaagtcttaattgggagccaaaatgacctggtcgatgaggaaaaagagcgaagcaacaggggagccactgcgattgctgaaacatttaagaatgagaagcatcagaagtag

SEQ ID NO: 24180 - DNA, 1926 bp, Artificial Sequence
  derived and/or modified sequence
atggccctgagcctggaggagtttgtgcacagcctggacctgcggaccctgccccgggtgctggagatccaggccggcatctacctggagggcagcatctatgagatgtttggaaatgaatgctgcttcagcactggagaggtgatcaagatcaccggcctgaaggtgaagaagatcatcgccgagatctgtgagcagatcgagggctgtgagagcctgcagccctttgagctgcccatgaacttccctggcctcttcaagatcgtggccgacaagaccccctacctgaccatggaggagatcaccaggaccatccacatcggccccagccggctgggccacccctgcttctaccaccagaaggacatcaagctggagaacctgatcatcaagcagggcgagcagatcatgctgaacagcgtggaggagattgatggagagatcatggtgtcctgtgctgtggccaggaaccaccagacccacagcttcaacctgcccctgagccaggagggggagttctatgaatgtgaagatgagcgcatctacaccctgaaggagatcgtggagtggaagatccccaagaacagaaccaggacagtgaacctgacagacttcagcaacaagtgggacagcaccaaccccttccccaaggacttctacggcaccctcatcctgaagcctgtgtatgagatccagggcgtgatgaagttcaggaaggacatcatccgcatcctgcccagcctggatgtggaggtgaaggacatcacagacagctatgatgccaactggttcctgcagctgctgagcacagaggacctgtttgagatgaccagcaaggagttccccatcgtgacagaggtgattgaggcccctgagggcaaccacctgccccagagcatcctgcagcccgggaagaccatcgtcatccacaagaagtaccaggccagccgcatcctggccagcgagatccgcagcaacttccccaagaggcacttcctgatccccaccagctacaagggcaagttcaagaggcggccccgggagttccccacagcctatgacctggagatcgccaagtctgagaaggagcccctgcacgtggtggccaccaaggccttccacagcccccatgacaagctgagctctgtgtctgtgggggaccagttcctggtgcaccagagcgagaccacagaggtgctgtgtgagggcatcaagaaggtggtgaatgtgctggcctgtgagaagatcctgaagaagagctatgaagctgccctgctgcccctgtacatggagggcggctttgtggaggtgattcatgacaagaagcagtaccccatcagcgagctgtgcaagcagttccggctgcccttcaacgtgaaggtgtctgtgcgggacctgagcattgaggaggatgtgctggccgccaccccaggcctgcagctggaggaggacatcacagacagctacctgctgatcagtgactttgccaaccccacagagtgctgggagatccctgtgggccgcctgaacatgacagtgcagctggtgagcaacttcagcagagatgctgagcccttcctggtgaggaccctggtggaggagatcacagaggagcagtactacatgatgagaagatatgagagcagcgccagccaccccccacccaggcctcccaagcaccccagcgtggaggagaccaagctgaccctgctgaccctggccgaggagaggacagtggacctgcccaagagccccaagaggcaccacgtggacatcaccaagaagctgcaccccaaccaggccggcctggacagcaaggtgctgattggcagccagaatgacctggtggatgaggagaaggagaggagcaacagaggagccacagccatcgccgagaccttcaagaatgagaagcaccagaagtag

SEQ ID NO: 24181 - DNA, 1689 bp, Artificial Sequence
  derived and/or modified sequence
atgaacttccctggcctcttcaagatcgtggccgacaagaccccctacctgaccatggaggagatcaccaggaccatccacatcggccccagccggctgggccacccctgcttctaccaccagaaggacatcaagctggagaacctgatcatcaagcagggcgagcagatcatgctgaacagcgtggaggagattgatggagagatcatggtgtcctgtgctgtggccaggaaccaccagacccacagcttcaacctgcccctgagccaggagggggagttctatgaatgtgaagatgagcgcatctacaccctgaaggagatcgtggagtggaagatccccaagaacagaaccaggacagtgaacctgacagacttcagcaacaagtgggacagcaccaaccccttccccaaggacttctacggcaccctcatcctgaagcctgtgtatgagatccagggcgtgatgaagttcaggaaggacatcatccgcatcctgcccagcctggatgtggaggtgaaggacatcacagacagctatgatgccaactggttcctgcagctgctgagcacagaggacctgtttgagatgaccagcaaggagttccccatcgtgacagaggtgattgaggcccctgagggcaaccacctgccccagagcatcctgcagcccgggaagaccatcgtcatccacaagaagtaccaggccagccgcatcctggccagcgagatccgcagcaacttccccaagaggcacttcctgatccccaccagctacaagggcaagttcaagagaagaccccgggagttccccacagcctatgacctggagatcgccaagtctgagaaggagcccctgcacgtggtggccaccaaggccttccacagcccccatgacaagctgagctctgtgtctgtgggggaccagttcctggtgcaccagagcgagaccacagaggtgctgtgtgagggcatcaagaaggtggtgaatgtgctggcctgtgagaagatcctgaagaagagctatgaggccgccctgctgcccctgtacatggagggcggctttgtggaggtgattcatgacaagaagcagtaccccatcagcgagctgtgcaagcagttccggctgcccttcaacgtgaaggtgtctgtgcgggacctgagcattgaagaagatgtgctggccgccaccccaggcctgcagctggaggaggacatcacagacagctacctgctgatcagtgactttgccaaccccacagagtgctgggagatccctgtgggccgcctgaacatgacagtgcagctggtgagcaacttcagcagagatgctgagcccttcctggtgaggaccctggtggaggagatcacagaggagcagtactacatgatgagaagatatgagagcagcgccagccaccccccaccccggccccccaagcaccccagcgtggaggagaccaagctgaccctgctgaccctggccgaggagaggacagtggacctgcccaagagccccaagaggcaccacgtggacatcaccaagaagctgcaccccaaccaggccggcctggacagcaaggtgctgattggcagccagaatgacctggtggatgaggagaaggagaggagcaacagaggagccacagccatcgccgagaccttcaagaatgagaagcaccagaagtag

SEQ ID NO: 24182 - DNA, 1821 bp, Artificial Sequence
  derived and/or modified sequence
atgtttggaaatgaatgctgcttcagcactggagaggtgatcaagatcaccggcctgaaggtgaagaagatcatcgccgagatctgtgagcagatcgagggctgtgagagcctgcagccctttgagctgcccatgaacttccctggcctcttcaagatcgtggccgacaagaccccctacctgaccatggaggagatcaccaggaccatccacatcggccccagccggctgggccacccctgcttctaccaccagaaggacatcaagctggagaacctgatcatcaagcagggcgagcagatcatgctgaacagcgtggaggagattgatggagagatcatggtgtcctgtgctgtggccaggaaccaccagacccacagcttcaacctgcccctgagccaggagggggagttctatgaatgtgaagatgagcgcatctacaccctgaaggagatcgtggagtggaagatccccaagaacagaaccaggacagtgaacctgacagacttcagcaacaagtgggacagcaccaaccccttccccaaggacttctacggcaccctcatcctgaagcctgtgtatgagatccagggcgtgatgaagttcaggaaggacatcatccgcatcctgcccagcctggatgtggaggtgaaggacatcacagacagctatgatgccaactggttcctgcagctgctgagcacagaggacctgtttgagatgaccagcaaggagttccccatcgtgacagaggtgattgaggcccctgagggcaaccacctgccccagagcatcctgcagcccgggaagaccatcgtcatccacaagaagtaccaggccagccgcatcctggccagcgagatccgcagcaacttccccaagaggcacttcctgatccccaccagctacaagggcaagttcaagagaagaccccgggagttccccacagcctatgacctggagatcgccaagtctgagaaggagcccctgcacgtggtggccaccaaggccttccacagcccccatgacaagctgagctctgtgtctgtgggggaccagttcctggtgcaccagagcgagaccacagaggtgctgtgtgagggcatcaagaaggtggtgaatgtgctggcctgtgagaagatcctgaagaagagctatgaggccgccctgctgcccctgtacatggagggcggctttgtggaggtgattcatgacaagaagcagtaccccatcagcgagctgtgcaagcagttccggctgcccttcaacgtgaaggtgtctgtgcgggacctgagcattgaagaagatgtgctggccgccaccccaggcctgcagctggaggaggacatcacagacagctacctgctgatcagtgactttgccaaccccacagagtgctgggagatccctgtgggccgcctgaacatgacagtgcagctggtgagcaacttcagcagagatgctgagcccttcctggtgaggaccctggtggaggagatcacagaggagcagtactacatgatgagaagatatgagagcagcgccagccaccccccaccccggccccccaagcaccccagcgtggaggagaccaagctgaccctgctgaccctggccgaggagaggacagtggacctgcccaagagccccaagaggcaccacgtggacatcaccaagaagctgcaccccaaccaggccggcctggacagcaaggtgctgattggcagccagaatgacctggtggatgaggagaaggagaggagcaacagaggagccacagccatcgccgagaccttcaagaatgagaagcaccagaagtag

SEQ ID NO: 24183 - DNA, 1926 bp, Artificial Sequence
  derived and/or modified sequence
atggccctgagcctggaggagttcgtgcacagcctggacctgcggaccttaccaagggtcctcgagatccaggccgggatctacctggagggatcaatctacgaaatgtttggaaatgagtgttgtttctccaccggtgaggtgatcaaaatcacgggccttaaggtgaagaaaatcatcgctgagatttgcgaacagattgagggctgtgagagcctgcagccctttgagctgccgatgaatttcccgggtcttttcaagatcgtcgcagacaaaactccctatctgacaatggaggaaataaccaggacaattcacattggaccaagcaggctcggtcacccctgtttttaccatcagaaggatataaaactcgaaaatttgattatcaagcaaggagagcagatcatgttaaactccgtcgaggaaatcgatggtgagattatggtgtcttgcgctgttgcccgcaatcatcagacccacagcttcaatcttcccttgtcccaggagggcgagttctacgagtgtgaggacgagcgaatttacaccctgaaggaaattgtagagtggaaaatcccgaagaaccggacgaggaccgtgaatctaacagatttctccaacaagtgggattccacaaaccccttccccaaggacttttacggaaccctgatcttaaaacctgtgtacgaaatccagggggtgatgaagtttagaaaagacatcatccgcattctcccctctctggatgtggaggtgaaagatataacagattcttatgacgcaaattggttcctgcagctgctttcaaccgaggacctgttcgagatgacttccaaggagttccccatagttaccgaggtgatcgaggcaccggagggcaatcatcttccccagagtattcttcagcccggtaaaactatcgttattcacaagaaataccaggcatccagaatactggcctctgaaattaggtcaaactttcccaaacggcactttttgataccaacctcttacaaaggtaagtttaagagacgcccgagagagtttccgacagcatacgatctggaaatcgccaagtccgaaaaagagcccctgcatgttgtcgctacaaaggcctttcactcaccacatgataaactttccagcgtctctgtgggcgaccagttcttggttcaccagagtgaaactacagaggtcctgtgcgaaggcatcaaaaaggtcgttaatgtgctggcgtgtgagaaaatactgaagaaaagctatgaggccgccctgctccccttatatatggaaggggggttcgtggaagtaatccacgataaaaagcagtaccccatttctgaactctgcaaacagtttcgactccccttcaatgttaaagtgtctgtccgggatctgagcatcgaggaggacgttctagcagccactcccggactccagctcgaggaggacattacagactcttatttgctcattagcgatttcgcgaacccaactgaatgctgggagatcccggtgggccgccttaatatgaccgtgcaacttgtgtctaacttctctcgggacgcggaaccatttctggtgcgcactttggtcgaggaaataacggaagaacagtattacatgatgaggcggtatgagagttctgcttcacatccacctcctagacctcccaagcacccctccgtagaagagacaaagctgacattgctgacactcgctgaggaaaggaccgtagatcttccaaagagccccaagcggcaccacgttgacataaccaaaaaattgcaccccaatcaagcgggactggactcgaaggttttaatcggttctcagaacgatttagtggacgaagagaaagagcggagcaatcggggcgctacagcaatcgccgagacatttaaaaatgagaaacatcagaagtag

SEQ ID NO: 24184 - DNA, 1689 bp, Artificial Sequence
  derived and/or modified sequence
atgaacttccccggcctgttcaagatcgtggccgacaagaccccctacctgacaatggaggaaattactcggacaatccacattggtccctcacgtctgggtcatccttgcttctaccaccaaaaagacattaaactggagaatctgattatcaaacagggcgagcagattatgttgaattctgtggaagagattgacggcgagattatggtgtcttgcgccgtcgccaggaaccaccagactcacagctttaatcttccactcagtcaagaaggtgaattttacgagtgtgaggacgagagaatttacactctgaaggaaatagttgagtggaaaatccccaaaaaccgtacaaggacagttaaccttacagatttcagcaacaagtgggattcaaccaacccgttccctaaagacttctatggtacactgattttaaagcctgtctacgaaattcagggggtgatgaaatttcgcaaggatatcatcagaatcttaccatcactagacgtggaagtgaaagacatcacggatagttatgacgcaaattggttcttacaattactgagcaccgaagacctgtttgaaatgacgagcaaggaatttcccatcgttactgaggtcatcgaggcccccgaggggaatcatctcccacaaagtattttgcagccgggaaaaaccatcgtcattcacaagaaataccaggcctcacgtattttagcatcagagatccgctctaactttcctaaaaggcattttcttatccccacttcctacaaaggcaagtttaagaggcgtccacgggaatttcccacggcgtatgacctggaaatcgcaaagtccgagaaggaacctttgcacgttgtggccactaaagcctttcactcccctcatgataagcttagctctgtttctgttggggatcagttcctggttcaccaaagtgaaactacagaagtcttgtgcgaagggattaagaaagttgtaaacgtcttggcatgtgaaaaaatcctaaaaaaaagctatgaagccgccctcttacccctttacatggaaggcgggtttgtggaagtgatccacgacaagaaacagtacccaatatctgagctatgcaagcaattccgactgccgtttaacgtgaaggtgtcagtgcgcgacttatcaattgaagaggatgtcttggccgccacaccaggcttgcaattagaggaagatattactgatagctatctcctcataagcgacttcgcgaatcccaccgagtgctgggagatcccagtgggcaggctaaacatgacggtgcagttggtgtcgaatttttcgcgagacgctgaaccctttctcgtacgcaccttggtcgaggagatcacagaggaacaatactacatgatgcgacgctatgaatcgtccgcttctcacccacctccacgaccaccaaaacacccatccgtggaggaaaccaagcttacactgctcaccctggctgaggaaaggactgtggacctacctaaatccccaaagcgtcatcatgtggacatcaccaagaagttgcatccaaatcaggccggcttggactcgaaagtgttaatcggctcacagaatgacctggtagacgaggagaaagaacgatccaatcgcggtgccacagccattgctgagacctttaagaacgaaaagcatcaaaagtag

SEQ ID NO: 24185 - DNA, 1821 bp, Artificial Sequence
  derived and/or modified sequence
atgttcggcaacgagtgctgcttcagcaccggcgaggtgatcaagatcacgggacttaaagtcaagaaaattattgccgaaatatgcgagcaaatcgaaggatgtgaatctttgcaaccattcgaattgcctatgaacttcccaggcctgtttaaaatagttgctgataaaactccatatctcaccatggaggaaattactaggactatccatattggccccagccggctaggacacccgtgtttctaccatcaaaaggatataaaactcgaaaacttgattattaaacagggcgagcagattatgctcaacagtgtagaagagatcgatggcgagatcatggtctcctgtgcagtggcgagaaatcatcagacgcacagttttaacctacctttgagccaagagggtgagttttacgagtgtgaagatgagcgtatttacacactcaaggagattgtggaatggaagattcctaaaaatcgaacccgtacagtgaacctcacagatttttcaaacaagtgggatagcaccaatccttttccaaaggatttttatggcaccctcatactcaagccagtctatgaaatccaaggagtgatgaagttccgcaaggatatcattagaattctgccaagcctggatgtggaggtgaaggacattacggatagttacgacgcaaactggttcctgcaactgctgtctacagaagacctgtttgagatgacatcaaaggaattcccgattgtcacagaggtgatagaggccccagagggcaaccatttgccgcagagtattttgcaaccgggaaagactattgttatccacaaaaaatatcaggccagtagaatcctggcctccgagattaggtcgaattttcccaagcgtcacttcctaatcccgacaagctataaggggaaattcaaacgcaggccaagagaattccccaccgcctacgatttggaaattgcgaaatcagagaaggagcctctccacgtcgtggcgaccaaagcatttcactccccccatgataagctgtcgagcgtgtccgtgggagaccagtttctggttcaccaatccgaaaccactgaagtcttgtgtgagggaatcaagaaggtggtcaatgtgctggcctgcgaaaaaattctaaaaaagagctacgaggctgctctactgccgctctacatggagggcgggttcgtggaagtgatccatgacaagaagcagtatccgatatctgaactatgcaagcagtttaggctgccctttaatgtgaaggtgtctgtacgcgatctgagcatcgaagaggacgtgctggcagccactcctggtcttcaactagaagaagatattactgattcttacctgctaatttccgacttcgccaatcccaccgaatgttgggagattcccgtggggcgacttaatatgacagtgcaattagtgtctaactttagtcgggatgcagaaccgtttcttgtgaggaccctcgtggaggagatcacggaagaacagtattatatgatgcggagatatgaaagctctgctagccacccccctcccaggccgcccaaacatccttcagtagaggagacaaagctgaccttactcactttggccgaagagcgcacagtggaccttccgaagtccccaaagcggcaccacgtggacatcactaaaaagctgcaccccaatcaggccggattagacagtaaggtgctcattgggagccagaacgacctagtcgatgaagagaaagagagatctaaccgcggggccaccgctattgccgaaacgttcaaaaacgaaaagcatcagaagtag

SEQ ID NO: 24186 - DNA, 1926 bp, Artificial Sequence
  derived and/or modified sequence
atggccttgagcctggaagaattcgtacacagtctcgatctccgcacattgccgagggttcttgagatacaggccggtatttatcttgaaggcagcatttatgaaatgtttggtaacgagtgttgtttttccactggtgaagttattaaaataactggcttgaaagtgaagaagattatcgcagaaatttgcgagcagatagaagggtgcgagtccctccagccttttgaactccccatgaatttcccgggtttgttcaagatagtcgccgacaaaacaccttacctgacaatggaagaaatcacaagaacgatccacattggcccttctaggctcggacacccatgtttctatcaccaaaaagacatcaagcttgaaaatctcatcattaaacagggtgaacagatcatgctgaacagcgttgaggaaatcgacggggagataatggttagttgcgcagttgcacgcaatcaccagacacactccttcaacctgcccctttcgcaggagggcgagttctacgagtgtgaggacgaaaggatctacactcttaaagagattgtcgagtggaaaatcccaaagaatcgtactcgtacggtcaacctgaccgacttttcaaacaagtgggactccacaaatccatttccaaaagatttctatgggaccttgatcctgaaacctgtgtacgagatacagggagtgatgaaattcaggaaagacataattaggattctgcccagcctagatgtagaagtcaaagatatcactgatagttacgacgccaattggtttctgcagctgcttagcacagaagatttgtttgagatgacaagcaaggagtttcccattgtgactgaggtgatcgaggctcctgagggtaatcacctcccgcagtcaattttacaacccggaaaaaccatcgtgatacacaaaaaatatcaggcctctcggatcctggccagcgagattagatctaactttccaaagcgacatttcttgattcctacctcatacaagggtaagttcaagcgcagacctcgtgagtttccaaccgcatatgacttagagatagcgaaatccgaaaaggaaccactccacgtcgttgccactaaagcctttcacagtccacatgataagctctctagcgtgagtgtgggggatcagttcctggtgcaccagtccgaaaccacagaagtgctttgcgagggcatcaaaaaggtggttaatgtcctggcatgtgaaaagatcctgaaaaagagctatgaggcggcactcttacctctctatatggagggtggatttgtggaggttattcacgacaaaaaacagtatcccattagtgaattgtgtaagcaattcagactcccgttcaatgtgaaagtcagcgtaagggacctgagtattgaggaagatgtgttggctgccacccccggacttcagctggaggaagatattactgacagctatctgctcatttccgactttgcaaatcctactgagtgttgggaaatccctgtcgggagattaaacatgactgtacagcttgtgtcaaacttcagccgtgacgcagagccgttcctcgtgcgtacactggtcgaagagatcacagaggagcagtactacatgatgaggcggtatgaatcgtccgcctcccatccacctccgagacctcccaagcacccttccgttgaagaaactaagctgactcttcttaccctggctgaagagcgaacagtggacttacctaagtcccctaagcgacaccatgtcgacatcaccaaaaagctgcaccccaaccaggccggattagacagtaaagtactgatagggtcacagaacgatctggtcgatgaggagaaggaacggtctaatagaggagctacagcaatagccgaaacctttaagaacgagaaacatcagaagtag

SEQ ID NO: 24187 - DNA, 1689 bp, Artificial Sequence
  derived and/or modified sequence
atgaattttcctggcctattcaaaattgtggcagataaaaccccatatttaacaatggaggagatcaccagaactatacatatcggaccatcccgtctagggcatccgtgtttctatcatcagaaagacattaagctagagaatcttataattaaacagggagagcagattatgctgaacagcgttgaagagatcgatggcgagatcatggtctcctgtgccgtcgccaggaaccaccagacacactccttcaacctcccactgagccaggaaggagagttctacgagtgcgaagatgagcgcatctacaccctgaaggagattgtcgaatggaaaattcctaagaaccgcacccgaacagttaacctgacagacttttcaaacaagtgggacagtactaacccattccctaaggacttttacggtacacttatcctgaagccagtgtacgagattcagggggtgatgaagttcaggaaagacatcataaggatactaccttccctggatgttgaagtgaaggatatcacagattcatatgatgcgaattggttcctccaactgctcagcaccgaagacctgtttgagatgacctccaaagagttccccattgtcactgaggtgatcgaggcccctgaagggaaccacttaccacagtcaatactgcaacccggaaagacaatcgttattcacaaaaaataccaggcatctcgcatcctggcctctgaaatccgctccaactttcccaaacgtcactttctgataccaactagctacaaaggcaagtttaagcggaggcctcgtgaatttccaactgcctacgatctggagatcgcgaagagcgagaaggagccacttcatgtggttgccaccaaggcttttcattctccacacgacaagctgtcttcggtctcggtcggagatcagttcctggtgcatcaatcggagaccaccgaagtgctctgcgaagggattaaaaaggtggtgaatgtgctggcttgcgagaaaattctgaagaagagctatgaggctgccctgctccctctgtatatggaggggggtttcgtagaggtcatacatgataagaagcaatatcccatctccgagctgtgcaagcagttccgattaccattcaacgtgaaagttagcgtccgcgatttgagcatagaggaggacgtgctcgccgcaactccagggctgcagcttgaagaggatattacagattcctacctgcttatctcagacttcgccaatcctacagagtgctgggagattcccgttgggagactgaacatgaccgttcagctggtcagcaatttctcgagggacgcagagcctttcctggtgcgaactctcgtggaagagatcactgaagagcaatactacatgatgcggaggtacgaatctagcgcatcacaccccccacctaggcctcccaaacacccatccgttgaggagacaaaacttaccctgcttaccctggccgaagagaggactgtggatctacccaaatcacctaaacgtcaccatgttgatattaccaagaagttacaccccaatcaagccggactagattccaaggtgctgattggctctcaaaatgacctcgtggacgaggagaaagaacggtctaaccgcggagccacagctatcgccgagaccttcaaaaacgagaaacaccagaaatag

SEQ ID NO: 24188 - DNA, 1821 bp, Artificial Sequence
  derived and/or modified sequence
atgttcgggaatgagtgttgcttctctacgggggaggtcatcaagataacagggctgaaggtcaagaagatcattgccgagatctgtgagcagattgaggggtgcgagagtctgcaaccattcgaattgcccatgaactttcccggactctttaagatcgttgcagataaaacgccatatctgactatggaggagataaccaggaccatccacataggcccttcgaggctagggcacccctgcttctatcatcaaaaggacatcaaactcgagaacctgattattaagcagggagaacagatcatgctcaacagcgtggaggagatcgatggagaaattatggtttcctgcgcagttgcccgtaaccaccaaactcattccttcaatcttccactctcccaggagggagagttttatgaatgcgaggacgagcggatctacacccttaaggagattgtggagtggaagatccctaaaaacagaaccagaaccgtaaaccttaccgatttctcaaacaagtgggattccactaatccctttccaaaagacttttacgggaccctgatactcaagccggtatatgaaatccagggggtcatgaagtttagaaaggatattatccgcattctgccatccctggacgtcgaggttaaggacattactgactcttacgacgctaattggttccttcagcttctctctaccgaggatctctttgaaatgactagcaaagagtttcctatagtaactgaggtaatcgaggcgcctgaggggaaccatctgccccagagtattcttcagcccggtaagactatcgtgatccataaaaaatatcaggccagtagaatcctcgctagcgagatcagaagcaactttccgaagaggcacttcttaattcctacgtcatacaaaggaaagtttaaacgacggcctcgcgagttcccaaccgcatacgatctggagattgctaaaagcgagaaggagcccctacacgtagtggctaccaaggcttttcacagtccccacgacaagctcagctccgtctccgtaggcgaccaatttctggtgcaccaatctgaaactactgaagtgttgtgcgaaggtattaaaaaagtggtcaacgtcttagcttgtgagaagattttaaaaaagtcgtatgaagcagctcttctgcccttgtatatggagggagggttcgtagaagtgatccatgataaaaaacaatatcccatttctgagttgtgcaaacagttccggctgccgtttaacgtcaaagtgagtgtgcgggatttgtccatcgaggaggatgtgctggccgctactcctggcttgcagctcgaggaggacatcaccgacagctatcttctcatctccgatttcgccaaccccactgagtgttgggagatccccgtcggccgactcaatatgaccgtgcaacttgtttccaactttagtagagatgccgaaccatttttagtccggaccttagtcgaagaaattacagaagagcaatactacatgatgagacgatatgagtcctctgccagtcatccgccaccacgccctcctaagcacccctcagttgaggagaccaagttaacactactgactctggcggaggaaaggactgtggacctgcctaagtctccgaagagacatcacgtggacattacgaaaaagctgcatcctaatcaggccggtctagacagtaaagttttaattggatcccagaacgaccttgtggacgaggagaaagagcgtagcaaccggggagcaacggccattgccgaaaccttcaagaacgaaaaacaccaaaaatag

SEQ ID NO: 24189 - DNA, 3866 bp, Artificial Sequence
  derived and/or modified sequence
agctactccaccccactctggctgtagtgtgacattcctgcctgcctgaggaagaaatggtgagcaggggctgcaattgcagacaagtgtcacccagaagccacaagtttctgtgagcaccaggtctacaaactacccaaggcatagcaatggcattatcactggaagaattcgtccactcccttgacctcaggaccctacccagggttctagaaatccaggcaggcatctatcttgaaggctctatttatgaaatgtttggaaatgaatgctgtttttcaacaggagaagtgattaaaattactggtctcaaagttaagaagatcatagctgaaatttgtgagcagattgaaggttgtgagtctctacagccatttgaactgcctatgaattttccaggtctttttaagattgtggctgataaaactccataccttactatggaagaaatcacaaggaccattcatattggaccaagtagactagggcatccttgcttctatcatcagaaggatataaaactagagaacctcatcataaagcagggtgagcaaatcatgctcaactcagttgaagagattgatggagaaataatggtgagctgtgcagtagcaaggaatcatcaaactcactcatttaatttgcctttgtcacaagaaggagaattctacgagtgtgaagatgaacgtatttacactctaaaggagattgttgaatggaagattcctaagaacagaacaagaactgtaaaccttacagatttttcaaataagtgggactcaacgaatccatttcctaaagacttttatggtaccctgattctcaagcctgtttatgaaattcaaggtgtgatgaaatttcgaaaagatataatccgcatcctccccagtctagatgtcgaagtcaaagacatcactgattcttacgatgctaactggtttcttcagctgttatcaacagaagatctttttgaaatgactagtaaagagttccccatagtgactgaagtcatagaagcacctgaaggaaaccacctgccccaaagcattttacagcctgggaaaaccattgtgatccacaaaaagtaccaggcatcaagaatcttagcttcagaaattagaagcaattttcctaaaagacacttcttgatccccactagctataaaggcaagttcaagcggcgaccgagggagttcccaacggcctatgacctagagatcgctaagagtgaaaaggagcctcttcacgtggtggccaccaaagcgtttcattcccctcatgacaagctgtcatccgtatctgttggggaccagtttctggtgcatcagtcagagacgactgaagtcctctgtgagggaataaaaaaagtggtgaatgttctggcctgtgaaaaaatcctcaaaaagtcctatgaggctgcgctgctccctttgtacatggaaggaggttttgtagaggtgattcatgataagaaacagtacccgatttctgagctctgtaaacagttccgtttgcccttcaatgtgaaggtgtctgtcagggatctttccattgaagaggacgtgttggctgccacaccaggactgcagttggaggaggacattacagactcttacctactcataagtgactttgccaaccccacggagtgctgggaaattcctgtgggccgcttgaatatgactgttcagttagttagtaatttctctagggatgcagaaccatttctagtcaggactctggtagaagagatcactgaagagcaatattacatgatgcggagatatgaaagctcagcctcacatcccccacctcgccctccgaaacacccctcagtagaggaaacaaagttaaccctgctaaccttagcagaagaaaggacggtagacctgcccaagtctcccaagcgtcatcacgtagacataaccaagaaacttcacccaaatcaagctggcctggattcaaaagtactgattggtagtcagaatgatttggtggatgaagagaaagaaaggagcaaccgtggggccacagcaatagcagaaacattcaaaaatgaaaaacatcaaaaataacaagatgtgacagaagccacttaggcagcaaacataaatgttgcagtgaaaaaagaagctagccttctagctgaaaaacgagtattccccaatggactccagaagaaacttgattcatcgctgcaaaggaaagaacaaccttaaaacttttaacagataaaacttacagaaacctatgatatagaattcatatagtctattctgttgtgtctaaatctgtaggcattgtgttgttgttctttaggacgtatttatttaacttgcacattttttcagattcttatttctactaccaacaactaagtaattgggaaataattctgtatttcagtttctgagtaaaaccagtctgaaataggataaaagccaccaaatattttcttttttttccagaatttgttttgccattttttagtgctatcatcattcctaacaagactaacttacagaaaaataattatatctgactgatttaaaatgttcaggtttcttatccaaatcccttggaactatggaaaggagtttgatttcacattcacagtgtatttacaaaatacgctgtgtcataaatatgtttgaattccaacagccaaagccattgagagtcataggagttttccataaccttctcttctatgacccaacaacaagctcatgactgaaatttcaccagatttctgagacgatgtcttaatattctatgtgctatgtaccagataattctttagatgaatgtttcttaggattgtaggaaaattatctagttaatcataatatttgatggaaagaaaaagacaataaaattgtaatataataaatttggctgacaagaaaccaaagtgattcttaattagtatacatcagaatgatgctcttatagttgtaccatctataaaaattactttaagggctctcacattttaataatttatcttattatgtattaagtatacaggaacaatattatttttcctttaacaaaatgaagagacaggctatctggttaatgttacataggaatttaatagtaatgcttgaacttcatccatagatcatactctgtacaaaatttgttagctaacatcctatctcataattattttatgttttgtggagaaatttgttgattttgtaccaaagtgtttctgaagacaataaattgtgagtcaactttagaacaaaaaaaattagagttttttcaatgtttatattctgattaagcttactttaccttacattttttctaagtaacaatgaatcctgatttctagtgtcctaaaaattgcttagtgatttgattgtggtaatatcatttcttatctacaatgtctaaagttttatgggacagtttttcttttatttattttgcctgtttgtgcagataagaacagaaacttttctaagacccacatttggttattgaaggccacagcgaatcttaacctaacagccttgacaaactgcaccataggtgtttttagactcatataatttgttatttttcaaacaatagtgaataattaatatttttgtttggaatttgagaacaattaaatttgtacttttagtaactaccattctttgattagaaaattaagagaatgcatatcttactttggttgtaaattatcaagggctttctaatagaaatcatatataacatttctaaatataagtcctttcacatactgtgtttccagttgtcttgatattgaaaagtgtaataaacttcatgctcacctattggagatttgggaaggttgaaaataaacttcctaatttttatttgta

SEQ ID NO: 24190 - DNA, 4101 bp, Artificial Sequence
  derived and/or modified sequence
tgagaggctcttcctggatcccttattttctacaggagaggaggaaaacacctgggatgctccagtgctcttacgcagataatgatcattaacatcagcctctctgatcaaagagctactccaccccactctggctgtagtgtgacattcctgcctgcctgaggaagaaatggtgagcaggggctgcaattgcagacaagtgtcacccagaagccacaagtttctgtgagcaccaggtctacaaactacccaaggcatagcaatggcattatcactggaagaattcgtccactcccttgacctcaggaccctacccagggttctagaaatccaggcaggcatctatcttgaaggctctatttatgaaatgtttggaaatgaatgctgtttttcaacaggagaagtgattaaaattactggtctcaaagttaagaagatcatagctgaaatttgtgagcagattgaaggttgtgagtctctacagccatttgaactgcctatgaattttccaggtctttttaagattgtggctgataaaactccataccttactatggaagaaatcacaaggaccattcatattggaccaagtagactagggcatccttgcttctatcatcagaaggatataaaactagagaacctcatcataaagcagggtgagcaaatcatgctcaactcagttgaagagattgatggagaaataatggtgagctgtgcagtagcaaggaatcatcaaactcactcatttaatttgcctttgtcacaagaaggagaattctacgagtgtgaagatgaacgtatttacactctaaaggagattgttgaatggaagattcctaagaacagaacaagaactgtaaaccttacagatttttcaaataagtgggactcaacgaatccatttcctaaagacttttatggtaccctgattctcaagcctgtttatgaaattcaaggtgtgatgaaatttcgaaaagatataatccgcatcctccccagtctagatgtcgaagtcaaagacatcactgattcttacgatgctaactggtttcttcagctgttatcaacagaagatctttttgaaatgactagtaaagagttccccatagtgactgaagtcatagaagcacctgaaggaaaccacctgccccaaagcattttacagcctgggaaaaccattgtgatccacaaaaagtaccaggcatcaagaatcttagcttcagaaattagaagcaattttcctaaaagacacttcttgatccccactagctataaaggcaagttcaagcggcgaccgagggagttcccaacggcctatgacctagagatcgctaagagtgaaaaggagcctcttcacgtggtggccaccaaagcgtttcattcccctcatgacaagctgtcatccgtatctgttggggaccagtttctggtgcatcagtcagagacgactgaagtcctctgtgagggaataaaaaaagtggtgaatgttctggcctgtgaaaaaatcctcaaaaagtcctatgaggctgcgctgctccctttgtacatggaaggaggttttgtagaggtgattcatgataagaaacagtacccgatttctgagctctgtaaacagttccgtttgcccttcaatgtgaaggtgtctgtcagggatctttccattgaagaggacgtgttggctgccacaccaggactgcagttggaggaggacattacagactcttacctactcataagtgactttgccaaccccacggagtgctgggaaattcctgtgggccgcttgaatatgactgttcagttagttagtaatttctctagggatgcagaaccatttctagtcaggactctggtagaagagatcactgaagagcaatattacatgatgcggagatatgaaagctcagcctcacatcccccacctcgccctccgaaacacccctcagtagaggaaacaaagttaaccctgctaaccttagcagaagaaaggacggtagacctgcccaagtctcccaagcgtcatcacgtagacataaccaagaaacttcacccaaatcaagctggcctggattcaaaagtactgattggtagtcagaatgatttggtggatgaagagaaagaaaggagcaaccgtggggccacagcaatagcagaaacattcaaaaatgaaaaacatcaaaaataacaagatgtgacagaagccacttaggcagcaaacataaatgttgcagtgaaaaaagaagctagccttctagctgaaaaacgagtattccccaatggactccagaagaaacttgattcatcgctgcaaaggaaagaacaaccttaaaacttttaacagataaaacttacagaaacctatgatatagaattcatatagtctattctgttgtgtctaaatctgtaggcattgtgttgttgttctttaggacgtatttatttaacttgcacattttttcagattcttatttctactaccaacaactaagtaattgggaaataattctgtatttcagtttctgagtaaaaccagtctgaaataggataaaagccaccaaatattttcttttttttccagaatttgttttgccattttttagtgctatcatcattcctaacaagactaacttacagaaaaataattatatctgactgatttaaaatgttcaggtttcttatccaaatcccttggaactatggaaaggagtttgatttcacattcacagtgtatttacaaaatacgctgtgtcataaatatgtttgaattccaacagccaaagccattgagagtcataggagttttccataaccttctcttctatgacccaacaacaagctcatgactgaaatttcaccagatttctgagacgatgtcttaatattctatgtgctatgtaccagataattctttagatgaatgtttcttaggattgtaggaaaattatctagttaatcataatatttgatggaaagaaaaagacaataaaattgtaatataataaatttggctgacaagaaaccaaagtgattcttaattagtatacatcagaatgatgctcttatagttgtaccatctataaaaattactttaagggctctcacattttaataatttatcttattatgtattaagtatacaggaacaatattatttttcctttaacaaaatgaagagacaggctatctggttaatgttacataggaatttaatagtaatgcttgaacttcatccatagatcatactctgtacaaaatttgttagctaacatcctatctcataattattttatgttttgtggagaaatttgttgattttgtaccaaagtgtttctgaagacaataaattgtgagtcaactttagaacaaaaaaaattagagttttttcaatgtttatattctgattaagcttactttaccttacattttttctaagtaacaatgaatcctgatttctagtgtcctaaaaattgcttagtgatttgattgtggtaatatcatttcttatctacaatgtctaaagttttatgggacagtttttcttttatttattttgcctgtttgtgcagataagaacagaaacttttctaagacccacatttggttattgaaggccacagcgaatcttaacctaacagccttgacaaactgcaccataggtgtttttagactcatataatttgttatttttcaaacaatagtgaataattaatatttttgtttggaatttgagaacaattaaatttgtacttttagtaactaccattctttgattagaaaattaagagaatgcatatcttactttggttgtaaattatcaagggctttctaatagaaatcatatataacatttctaaatataagtcctttcacatactgtgtttccagttgtcttgatattgaaaagtgtaataaacttcatgctcacctattggagatttgggaaggttgaaaataaacttcctaatttttatttgtatgtgttctcttctatgtttaactctagaataactatcttcctgtaacgattaagttaaaatattctttaactagaattgaaataaattgttcactaaggagggggctgcttgtgctaaaaaa

SEQ ID NO: 24191 - DNA, 3830 bp, Artificial Sequence
  derived and/or modified sequence
ttcacagataaagtgttctgcagactcaaggtttatacttacaattacgagatttatatttgcattagtctctttggctggtgggtaggggtgagaggctcttcctggatcccttattttctacaggagaggaggaaaacacctgggatgctccagtgctcttacgcagataatgatcattaacatcagcctctctgatcaaaggctctatttatgaaatgtttggaaatgaatgctgtttttcaacaggagaagtgattaaaattactggtctcaaagttaagaagatcatagctgaaatttgtgagcagattgaaggttgtgagtctctacagccatttgaactgcctatgaattttccaggtctttttaagattgtggctgataaaactccataccttactatggaagaaatcacaaggaccattcatattggaccaagtagactagggcatccttgcttctatcatcagaaggatataaaactagagaacctcatcataaagcagggtgagcaaatcatgctcaactcagttgaagagattgatggagaaataatggtgagctgtgcagtagcaaggaatcatcaaactcactcatttaatttgcctttgtcacaagaaggagaattctacgagtgtgaagatgaacgtatttacactctaaaggagattgttgaatggaagattcctaagaacagaacaagaactgtaaaccttacagatttttcaaataagtgggactcaacgaatccatttcctaaagacttttatggtaccctgattctcaagcctgtttatgaaattcaaggtgtgatgaaatttcgaaaagatataatccgcatcctccccagtctagatgtcgaagtcaaagacatcactgattcttacgatgctaactggtttcttcagctgttatcaacagaagatctttttgaaatgactagtaaagagttccccatagtgactgaagtcatagaagcacctgaaggaaaccacctgccccaaagcattttacagcctgggaaaaccattgtgatccacaaaaagtaccaggcatcaagaatcttagcttcagaaattagaagcaattttcctaaaagacacttcttgatccccactagctataaaggcaagttcaagcggcgaccgagggagttcccaacggcctatgacctagagatcgctaagagtgaaaaggagcctcttcacgtggtggccaccaaagcgtttcattcccctcatgacaagctgtcatccgtatctgttggggaccagtttctggtgcatcagtcagagacgactgaagtcctctgtgagggaataaaaaaagtggtgaatgttctggcctgtgaaaaaatcctcaaaaagtcctatgaggctgcgctgctccctttgtacatggaaggaggttttgtagaggtgattcatgataagaaacagtacccgatttctgagctctgtaaacagttccgtttgcccttcaatgtgaaggtgtctgtcagggatctttccattgaagaggacgtgttggctgccacaccaggactgcagttggaggaggacattacagactcttacctactcataagtgactttgccaaccccacggagtgctgggaaattcctgtgggccgcttgaatatgactgttcagttagttagtaatttctctagggatgcagaaccatttctagtcaggactctggtagaagagatcactgaagagcaatattacatgatgcggagatatgaaagctcagcctcacatcccccacctcgccctccgaaacacccctcagtagaggaaacaaagttaaccctgctaaccttagcagaagaaaggacggtagacctgcccaagtctcccaagcgtcatcacgtagacataaccaagaaacttcacccaaatcaagctggcctggattcaaaagtactgattggtagtcagaatgatttggtggatgaagagaaagaaaggagcaaccgtggggccacagcaatagcagaaacattcaaaaatgaaaaacatcaaaaataacaagatgtgacagaagccacttaggcagcaaacataaatgttgcagtgaaaaaagaagctagccttctagctgaaaaacgagtattccccaatggactccagaagaaacttgattcatcgctgcaaaggaaagaacaaccttaaaacttttaacagataaaacttacagaaacctatgatatagaattcatatagtctattctgttgtgtctaaatctgtaggcattgtgttgttgttctttaggacgtatttatttaacttgcacattttttcagattcttatttctactaccaacaactaagtaattgggaaataattctgtatttcagtttctgagtaaaaccagtctgaaataggataaaagccaccaaatattttcttttttttccagaatttgttttgccattttttagtgctatcatcattcctaacaagactaacttacagaaaaataattatatctgactgatttaaaatgttcaggtttcttatccaaatcccttggaactatggaaaggagtttgatttcacattcacagtgtatttacaaaatacgctgtgtcataaatatgtttgaattccaacagccaaagccattgagagtcataggagttttccataaccttctcttctatgacccaacaacaagctcatgactgaaatttcaccagatttctgagacgatgtcttaatattctatgtgctatgtaccagataattctttagatgaatgtttcttaggattgtaggaaaattatctagttaatcataatatttgatggaaagaaaaagacaataaaattgtaatataataaatttggctgacaagaaaccaaagtgattcttaattagtatacatcagaatgatgctcttatagttgtaccatctataaaaattactttaagggctctcacattttaataatttatcttattatgtattaagtatacaggaacaatattatttttcctttaacaaaatgaagagacaggctatctggttaatgttacataggaatttaatagtaatgcttgaacttcatccatagatcatactctgtacaaaatttgttagctaacatcctatctcataattattttatgttttgtggagaaatttgttgattttgtaccaaagtgtttctgaagacaataaattgtgagtcaactttagaacaaaaaaaattagagttttttcaatgtttatattctgattaagcttactttaccttacattttttctaagtaacaatgaatcctgatttctagtgtcctaaaaattgcttagtgatttgattgtggtaatatcatttcttatctacaatgtctaaagttttatgggacagtttttcttttatttattttgcctgtttgtgcagataagaacagaaacttttctaagacccacatttggttattgaaggccacagcgaatcttaacctaacagccttgacaaactgcaccataggtgtttttagactcatataatttgttatttttcaaacaatagtgaataattaatatttttgtttggaatttgagaacaattaaatttgtacttttagtaactaccattctttgattagaaaattaagagaatgcatatcttactttggttgtaaattatcaagggctttctaatagaaatcatatataacatttctaaatataagtcctttcacatactgtgtttccagttgtcttgatattgaaaagtgtaataaacttcatgctcacctattggagatttgggaaggttgaaaataaacttcctaatttttatttgta

SEQ ID NO: 24192 - protein, 290 aa, Artificial Sequence
  derived and/or modified sequence
MWVTKLLPALLLQHVLLHLLLLPIAIPYAEGQRKRRNTIHEFKKSAKTTLIKIDPALKIKTKKVNTADQCANRCTRNKGLPFTCKAFVFDKARKQCLWFPFNSMSSGVKKEFGHEFDLYENKDYIRNCIIGKGRSYKGTVSITKSGIKCQPWSSMIPHEHSFLPSSYRGKDLQENYCRNPRGEEGGPWCFTSNPEVRYEVCDIPQCSEVECMTCNGESYRGLMDHTESGKICQRWDHQTPHRHKFLPERYPDKGFDDNYCRNPDGQPRPWCYTLDPHTRWEYCAIKTCET

SEQ ID NO: 24193 - DNA, 1307 bp, Artificial Sequence
  derived and/or modified sequence
gggagttcagacctagatctttccagttaatcacacaacaaacttagctcatcgcaataaaaagcagctcagagccgactggctcttttaggcactgactccgaacaggattctttcacccaggcatctcctccagagggatccgccagcccgtccagcagcaccatgtgggtgaccaaactcctgccagccctgctgctgcagcatgtcctcctgcatctcctcctgctccccatcgccatcccctatgcagagggacaaaggaaaagaagaaatacaattcatgaattcaaaaaatcagcaaagactaccctaatcaaaatagatccagcactgaagataaaaaccaaaaaagtgaatactgcagaccaatgtgctaatagatgtactaggaataaaggacttccattcacttgcaaggcttttgtttttgataaagcaagaaaacaatgcctctggttccccttcaatagcatgtcaagtggagtgaaaaaagaatttggccatgaatttgacctctatgaaaacaaagactacattagaaactgcatcattggtaaaggacgcagctacaagggaacagtatctatcactaagagtggcatcaaatgtcagccctggagttccatgataccacacgaacacagctttttgccttcgagctatcggggtaaagacctacaggaaaactactgtcgaaatcctcgaggggaagaagggggaccctggtgtttcacaagcaatccagaggtacgctacgaagtctgtgacattcctcagtgttcagaagttgaatgcatgacctgcaatggggagagttatcgaggtctcatggatcatacagaatcaggcaagatttgtcagcgctgggatcatcagacaccacaccggcacaaattcttgcctgaaagatatcccgacaagggctttgatgataattattgccgcaatcccgatggccagccgaggccatggtgctatactcttgaccctcacacccgctgggagtactgtgcaattaaaacatgcgagacataacatgggctctcaactgatggtgaacttcttctggtgagtgacagaggctgcagtgaagaataatgagtctaatagaagtttatcacagatgtctctaatctttatagctgatccctacctctctcgctgtctttgtacccagcctgcattctgtttcgatctgtcttttagcagtccatacaatcatttttctacatgctggcccttacctagcttttctgaatttacaataaaaactattttttaacgtgaaaaaaaaaaaaaaaaaa

SEQ ID NO: 24194 - DNA, 891 bp, Artificial Sequence
  derived and/or modified sequence
atgtgggtgaccaagctgctgcccgccctgctgctgcagcacgtgctgctgcacctgctgctgctgcccatcgccatcccctacgccgagggccagagaaagagaagaaacaccatccacgagttcaagaagagcgccaagaccaccctgatcaagatcgaccccgccctgaagatcaagaccaagaaggtgaacaccgccgaccagtgcgccaacagatgcaccagaaacaagggcctgcccttcacctgcaaggccttcgtgttcgacaaggccagaaagcagtgcctgtggttccccttcaacagcatgagcagcggcgtgaagaaggagttcggccacgagttcgacctgtacgagaacaaggactacatcagaaactgcatcatcggcaagggcagaagctacaagggcaccgtgagcatcaccaagagcggcatcaagtgccagccctggagcagcatgatcccccacgagcacagcttcctgcccagcagctacagaggcaaggacctgcaggagaactactgcagaaaccccagaggcgaggagggcggcccctggtgcttcaccagcaaccccgaggtgagatacgaggtgtgcgacatcccccagtgcagcgaggtggagtgcatgacctgcaacggcgagagctacagaggcctgatggaccacaccgagagcggcaagatctgccagagatgggaccaccagaccccccacagacacaagttcctgcccgagagataccccgacaagggcttcgacgacaactactgcagaaaccccgacggccagcccagaccctggtgctacaccctggacccccacaccagatgggagtactgcgccatcaagacctgcggcgacatcacctgggccctgaactag

SEQ ID NO: 24195 - DNA, 873 bp, Artificial Sequence
  derived and/or modified sequence
atgtgggtgaccaagctgctgcccgccctgctgctgcagcacgtgctgctgcacctgctgctgctgcccatcgccatcccctacgccgagggccagagaaagagaagaaacaccatccacgagttcaagaagagcgccaagaccaccctgatcaagatcgaccccgccctgaagatcaagaccaagaaggtgaacaccgccgaccagtgcgccaacagatgcaccagaaacaagggcctgcccttcacctgcaaggccttcgtgttcgacaaggccagaaagcagtgcctgtggttccccttcaacagcatgagcagcggcgtgaagaaggagttcggccacgagttcgacctgtacgagaacaaggactacatcagaaactgcatcatcggcaagggcagaagctacaagggcaccgtgagcatcaccaagagcggcatcaagtgccagccctggagcagcatgatcccccacgagcacagcttcctgcccagcagctacagaggcaaggacctgcaggagaactactgcagaaaccccagaggcgaggagggcggcccctggtgcttcaccagcaaccccgaggtgagatacgaggtgtgcgacatcccccagtgcagcgaggtggagtgcatgacctgcaacggcgagagctacagaggcctgatggaccacaccgagagcggcaagatctgccagagatgggaccaccagaccccccacagacacaagttcctgcccgagagataccccgacaagggcttcgacgacaactactgcagaaaccccgacggccagcccagaccctggtgctacaccctggacccccacaccagatgggagtactgcgccatcaagacctgcgagacctag

SEQ ID NO: 24196 - DNA, 891 bp, Artificial Sequence
  derived and/or modified sequence
atgtgggtcacaaagctactcccagctctcctactgcagcatgtgctcctgcacctcctgcttttacccatcgctattccttacgccgagggacagcgcaagcgtagaaatactatccacgaattcaagaaatccgccaagactacgctgattaaaattgatccagccctgaaaattaagaccaagaaggtaaacactgccgaccagtgcgctaatcgctgcacccgaaataaaggactgccctttacatgcaaagcattcgtcttcgacaaggctagaaaacagtgtctttggtttcctttcaatagtatgagcagcggtgtaaagaaggagtttggtcatgagtttgatctttatgaaaataaggactacatccgaaactgcattatcgggaaggggagaagctacaagggcaccgtttcgatcactaagtcaggcatcaagtgccagccctggtcatcaatgatacctcatgaacattcatttctcccatcctcatatagaggaaaagacctccaggagaactattgccggaaccctcggggcgaggagggggggccatggtgttttacatctaatccggaggtgcggtatgaggtttgtgatatccctcagtgctcggaggtggagtgcatgacttgcaacggagagagttacagggggttgatggatcacactgagtcaggaaaaatctgccagcggtgggaccaccagactccccatcggcataaatttttacccgagagatatcctgacaaaggcttcgacgacaattattgtcgaaaccccgacggccagcccagaccctggtgctacacccttgacccacatacccggtgggaatactgtgcaatcaagacttgcggcgacataacctgggccctaaattag

SEQ ID NO: 24197 - DNA, 873 bp, Artificial Sequence
  derived and/or modified sequence
atgtgggtcaccaagctactgcccgcactcctactgcaacatgtcctccttcacctgctactcctgcctattgccatcccttacgccgaaggccaacgaaagcgccgtaacaccatccacgagtttaagaagtcagccaaaactactcttatcaagatagaccctgctttaaaaatcaagacgaaaaaggtgaacactgcagaccagtgcgctaacagatgtacccgaaataagggtttgcctttcacctgcaaagcattcgtgtttgataaggcacgcaagcagtgcctatggttcccattcaactcaatgagttccggagtcaaaaaagagttcggccatgaattcgacctctacgagaataaggattacattcgcaactgtatcattgggaaggggcgcagctataagggaactgtgtctataacgaagagtggcataaagtgtcaaccctggtcaagtatgatccctcacgagcacagctttcttcccagtagctacaggggcaaggatttgcaggagaattactgtcgaaatccacgcggggaggagggggggccatggtgctttacctccaatccagaggtccggtatgaggtgtgtgatatcccacagtgcagtgaggtggagtgtatgacctgcaatggtgagagttaccgcggattgatggatcacacagaatcaggaaagatctgtcagcgctgggatcaccaaactccccatcggcacaagttcttacccgagagataccccgataaaggattcgacgacaattactgcagaaatccagacggacagccacgcccctggtgctacacgctggatcctcacactaggtgggagtattgcgccatcaaaacctgcgagacatag

SEQ ID NO: 24198 - DNA, 891 bp, Artificial Sequence
  derived and/or modified sequence
atgtgggtgaccaagctgctgcctgccctgctgctgcagcacgtgctgctgcacctgctgctgctgcccatcgccatcccctatgcagagggccagaggaagagaagaaacaccatccacgagttcaagaagagcgccaagaccaccctcatcaagattgatcctgccctgaagatcaagaccaagaaggtgaacacagctgaccagtgtgccaaccgctgcaccaggaacaagggcctgcccttcacctgcaaggcctttgtgtttgacaaggccaggaagcagtgcctgtggttccccttcaacagcatgagcagcggcgtgaagaaggagtttggccacgagtttgacctgtatgagaacaaggactacatccggaactgcatcatcggcaagggccgcagctacaagggcaccgtgtccatcaccaagagcggcatcaagtgccagccctggagctccatgatcccccatgagcacagcttcctgcccagcagctaccggggcaaggacctgcaggagaactactgcaggaaccccagaggagaggagggcggcccctggtgcttcaccagcaaccctgaggtgcgctatgaggtgtgtgacatcccccagtgcagcgaggtggagtgcatgacctgcaatggagagagctaccggggcctgatggaccacacagagagcggcaagatctgccagcgctgggaccaccagaccccccaccgccacaagttcctgcctgagcgctacccagacaagggctttgatgacaactactgcagaaatccagatggccagccccggccctggtgctacaccctggacccccacacccgctgggagtactgtgccatcaagacctgtggggacatcacctgggccctgaactag

SEQ ID NO: 24199 - DNA, 873 bp, Artificial Sequence
  derived and/or modified sequence
atgtgggtgaccaagctgctgcctgccctgctgctgcagcacgtgctgctgcacctgctgctgctgcccatcgccatcccctatgcagagggccagaggaagagaagaaacaccatccacgagttcaagaagagcgccaagaccaccctcatcaagattgatcctgccctgaagatcaagaccaagaaggtgaacacagctgaccagtgtgccaaccgctgcaccaggaacaagggcctgcccttcacctgcaaggcctttgtgtttgacaaggccaggaagcagtgcctgtggttccccttcaacagcatgagcagcggcgtgaagaaggagtttggccacgagtttgacctgtatgagaacaaggactacatccggaactgcatcatcggcaagggccgcagctacaagggcaccgtgtccatcaccaagagcggcatcaagtgccagccctggagctccatgatcccccatgagcacagcttcctgcccagcagctaccggggcaaggacctgcaggagaactactgcaggaaccccagaggagaggagggcggcccctggtgcttcaccagcaaccctgaggtgcgctatgaggtgtgtgacatcccccagtgcagcgaggtggagtgcatgacctgcaatggagagagctaccggggcctgatggaccacacagagagcggcaagatctgccagcgctgggaccaccagaccccccaccgccacaagttcctgcctgagcgctacccagacaagggctttgatgacaactactgcagaaatccagatggccagccccggccctggtgctacaccctggacccccacacccgctgggagtactgtgccatcaagacctgtgagacctag

SEQ ID NO: 24200 - DNA, 891 bp, Artificial Sequence
  derived and/or modified sequence
atgtgggtgaccaagctgctgcccgccctgctgctgcagcacgtgcttctccatttgctgttgctgccaatcgcaattccttacgccgagggtcaacgaaagcgtagaaatacaatacatgaattcaagaagtcggctaagactactctgattaagattgatcccgccctgaagataaagaccaagaaggtcaatacagccgaccagtgtgccaacagatgtacccggaataagggcctgccattcacatgtaaggccttcgtgttcgacaaagcccgcaagcagtgtctctggttcccctttaatagtatgtcttcaggcgtaaagaaggaattcggccacgagttcgacctgtacgagaacaaagactatatccgcaactgtatcattggaaagggaagaagctataagggaaccgtatccattaccaagagcggcatcaagtgtcagccctggtcctccatgatacctcatgaacattcatttctgccatcatcctaccgcgggaaggacttacaagagaactattgtcgcaaccccagaggggaggagggcggtccctggtgttttacatccaacccagaagtgcgatatgaggtttgcgatatccctcagtgctcggaggtggaatgcatgacatgcaacggggagagctatcggggactgatggaccacactgagtcaggcaagatttgtcagagatgggaccaccagaccccccatcgccacaaattcctccctgagcgttatcctgacaagggctttgatgataattactgcaggaatcccgacggacaaccacgtccgtggtgttatacgctggatccgcatacccgctgggaatattgtgcaattaaaacctgcggggacattacctgggccctgaactag

SEQ ID NO: 24201 - DNA, 873 bp, Artificial Sequence
  derived and/or modified sequence
atgtgggtgaccaagctgctgcccgccctgctgctgcagcacgtgctgctgcacctgttgctccttccaattgcaattccttacgccgaggggcaacggaaacgtagaaataccattcacgagtttaaaaagtccgctaagaccaccttgataaagatcgatcctgcactgaaaataaagaccaagaaggtgaacacagccgaccagtgtgctaacaggtgcacaagaaacaaagggctaccgttcacctgcaaggcctttgtgttcgacaaagcaaggaaacaatgtctttggtttccattcaactcgatgtcttctggggtgaagaaggagttcggccatgaattcgacctgtatgagaataaagactacattaggaactgcattattgggaaagggcgtagttacaaagggaccgtgagtattactaagtctgggattaaatgccaaccatggtcgtccatgataccccacgagcacagcttcctgcctagtagttatcgcggaaaggacctgcaggagaactactgccgcaatcctaggggagaggagggcggcccctggtgcttcacgagcaatccagaagttcgctatgaggtgtgtgatattcctcagtgctcagaggtggaatgcatgacctgcaatggggaatcctatcgaggactgatggatcacaccgaatctggtaagatctgtcagcgctgggaccaccagacaccccacagacacaaattcctccctgaacgctatccggacaagggctttgacgataactactgtcggaatccggatggccagcctcgcccgtggtgttatacgctcgacccccacacaaggtgggaatactgtgccatcaaaacctgtgagacatag

SEQ ID NO: 24202 - DNA, 891 bp, Artificial Sequence
  derived and/or modified sequence
atgtgggtgacaaagctattacccgcattgctcctccaacatgtgctgctccatctgcttctactgcccatagccataccctacgccgagggacaaagaaagcgaagaaatactattcatgagttcaaaaagtcagccaaaaccacactgataaaaatagaccctgctctgaaaatcaaaaccaagaaagttaacactgctgatcaatgtgctaaccggtgtaccaggaataaaggcctgcctttcacgtgtaaagcctttgtcttcgataaggcgcgaaaacagtgcctgtggttccccttcaactcaatgtcaagcggggtgaagaaagagttcgggcacgaattcgatctgtatgaaaacaaggactacataagaaactgtatcattggaaagggtcgttcgtacaagggcactgtgagcatcacaaaaagtggaattaaatgtcaaccctggtctagcatgatcccgcacgaacactcctttctgccatctagctatcgtggcaaagatctacaagaaaattattgtcggaacccacggggtgaggagggaggtccatggtgtttcactagtaatcccgaagtccggtacgaggtttgcgacatccctcagtgctcggaggtggagtgcatgacatgtaacggcgaaagttaccggggactgatggatcacaccgagagcgggaaaatatgccagaggtgggatcaccagacacctcacaggcataagtttctgcctgagcgttatcctgacaagggatttgacgacaactactgcagaaacccagacggccaacccaggccttggtgttacaccctcgatccacacacaagatgggaatattgtgctatcaagacctgcggcgatatcacctgggccttgaactag

SEQ ID NO: 24203 - DNA, 873 bp, Artificial Sequence
  derived and/or modified sequence
atgtgggtgactaaattgctcccggcactcctactgcaacacgtgctgctccatctcctgctgcttcccatcgccatcccctatgctgaagggcaaaggaaacggcgaaatacaattcacgaattcaagaagtccgcaaaaactacactcatcaaaatcgatccggcattaaagattaaaaccaagaaagtgaacacagcagaccagtgcgccaacagatgtacgaggaataagggcctgccattcacttgtaaagcatttgtgttcgacaaggctaggaaacaatgtctgtggttccccttcaattctatgtcatcgggagttaaaaaggagtttggtcacgagttcgacctgtacgaaaacaaggactacatccgaaactgtattatcggtaaagggagaagctataaaggaaccgtttcaatcaccaaatcaggaattaagtgccagccatggtcatccatgatccctcatgagcatagtttcttaccctcgtcctatcgtggcaaagaccttcaggagaattattgtaggaatccacgaggtgaggagggaggcccatggtgctttaccagcaaccctgaggttcggtatgaagtgtgcgacattccccaatgctcggaggtggagtgtatgacttgcaatggagagtcgtacaggggactgatggaccacacagaatcagggaaaatttgccagcggtgggaccatcagacgccacaccgacacaaattcttacctgagcgctaccctgataaaggctttgatgataactattgccgcaaccccgacggacagcccagaccttggtgctacacactcgacccccacacaaggtgggagtattgcgccattaagacttgtgaaacttag

SEQ ID NO: 24204 - DNA, 1053 bp, Artificial Sequence
  derived and/or modified sequence
agttcagacctagatctttccagttaatcacacaacaaacttagctcatcgcaataaaaagcagctcagagccgactggctcttttaggcactgactccgaacaggattctttcacccaggcatctcctccagagggatccgccagcccgtccagcagcaccatgtgggtgaccaaactcctgccagccctgctgctgcagcatgtcctcctgcatctcctcctgctccccatcgccatcccctatgcagagggacaaaggaaaagaagaaatacaattcatgaattcaaaaaatcagcaaagactaccctaatcaaaatagatccagcactgaagataaaaaccaaaaaagtgaatactgcagaccaatgtgctaatagatgtactaggaataaaggacttccattcacttgcaaggcttttgtttttgataaagcaagaaaacaatgcctctggttccccttcaatagcatgtcaagtggagtgaaaaaagaatttggccatgaatttgacctctatgaaaacaaagactacattagaaactgcatcattggtaaaggacgcagctacaagggaacagtatctatcactaagagtggcatcaaatgtcagccctggagttccatgataccacacgaacacagctttttgccttcgagctatcggggtaaagacctacaggaaaactactgtcgaaatcctcgaggggaagaagggggaccctggtgtttcacaagcaatccagaggtacgctacgaagtctgtgacattcctcagtgttcagaagttgaatgcatgacctgcaatggggagagttatcgaggtctcatggatcatacagaatcaggcaagatttgtcagcgctgggatcatcagacaccacaccggcacaaattcttgcctgaaagatatcccgacaagggctttgatgataattattgccgcaatcccgatggccagccgaggccatggtgctatactcttgaccctcacacccgctgggagtactgtgcaattaaaacatgcggagacataacatgggctctcaactga

SEQ ID NO: 24205 - DNA, 1184 bp, Artificial Sequence
  derived and/or modified sequence
caggattctttcacccaggcatctcctccagagggatccgccagcccgtccagcagcaccatgtgggtgaccaaactcctgccagccctgctgctgcagcatgtcctcctgcatctcctcctgctccccatcgccatcccctatgcagagggacaaaggaaaagaagaaatacaattcatgaattcaaaaaatcagcaaagactaccctaatcaaaatagatccagcactgaagataaaaaccaaaaaagtgaatactgcagaccaatgtgctaatagatgtactaggaataaaggacttccattcacttgcaaggcttttgtttttgataaagcaagaaaacaatgcctctggttccccttcaatagcatgtcaagtggagtgaaaaaagaatttggccatgaatttgacctctatgaaaacaaagactacattagaaactgcatcattggtaaaggacgcagctacaagggaacagtatctatcactaagagtggcatcaaatgtcagccctggagttccatgataccacacgaacacagctttttgccttcgagctatcggggtaaagacctacaggaaaactactgtcgaaatcctcgaggggaagaagggggaccctggtgtttcacaagcaatccagaggtacgctacgaagtctgtgacattcctcagtgttcagaagttgaatgcatgacctgcaatggggagagttatcgaggtctcatggatcatacagaatcaggcaagatttgtcagcgctgggatcatcagacaccacaccggcacaaattcttgcctgaaagatatcccgacaagggctttgatgataattattgccgcaatcccgatggccagccgaggccatggtgctatactcttgaccctcacacccgctgggagtactgtgcaattaaaacatgcgagacataacatgggctctcaactgatggtgaacttcttctggtgagtgacagaggctgcagtgaagaataatgagtctaatagaagtttatcacagatgtctctaatctttatagctgatccctacctctctcgctgtctttgtacccagcctgcattctgtttcgatctgtcttttagcagtccatacaatcatttttctacatgctggcccttacctagcttttctgaatttacaataaaaactattttttaacgtg

SEQ ID NO: 24206 - protein, 118 aa, Artificial Sequence
  derived and/or modified sequence
MWVTKLLPALLLQHVLLHLLLLPIAIPYAEGQRKRRNTIHEFKKSAKTTLIKIDPALKIKTKKVNTADQCANRCTRNKGLPFTCKAFVFDKARKQCLWFPFNSMSSGVKKEFGHEFDL

SEQ ID NO: 24207 - protein, 723 aa, Artificial Sequence
  derived and/or modified sequence
MWVTKLLPALLLQHVLLHLLLLPIAIPYAEGQRKRRNTIHEFKKSAKTTLIKIDPALKIKTKKVNTADQCANRCTRNKGLPFTCKAFVFDKARKQCLWFPFNSMSSGVKKEFGHEFDLYENKDYIRNCIIGKGRSYKGTVSITKSGIKCQPWSSMIPHEHSYRGKDLQENYCRNPRGEEGGPWCFTSNPEVRYEVCDIPQCSEVECMTCNGESYRGLMDHTESGKICQRWDHQTPHRHKFLPERYPDKGFDDNYCRNPDGQPRPWCYTLDPHTRWEYCAIKTCADNTMNDTDVPLETTECIQGQGEGYRGTVNTIWNGIPCQRWDSQYPHEHDMTPENFKCKDLRENYCRNPDGSESPWCFTTDPNIRVGYCSQIPNCDMSHGQDCYRGNGKNYMGNLSQTRSGLTCSMWDKNMEDLHRHIFWEPDASKLNENYCRNPDDDAHGPWCYTGNPLIPWDYCPISRCEGDTTPTIVNLDHPVISCAKTKQLRVVNGIPTRTNIGWMVSLRYRNKHICGGSLIKESWVLTARQCFPSRDLKDYEAWLGIHDVHGRGDEKCKQVLNVSQLVYGPEGSDLVLMKLARPAVLDDFVSTIDLPNYGCTIPEKTSCSVYGWGYTGLINYDGLLRVAHLYIMGNEKCSQHHRGKVTLNESEICAGAEKIGSGPCEGDYGGPLVCEQHKMRMVLGVIVPGRGCAIPNRPGIFVRVAYYAKWIHKIILTYKVPQS

SEQ ID NO: 24208 - protein, 18 aa, Artificial Sequence
  derived and/or modified sequence
NPDGSESPWCFTTDPNIR

SEQ ID NO: 24209 - DNA, 2805 bp, Artificial Sequence
  derived and/or modified sequence
gggagttcagacctagatctttccagttaatcacacaacaaacttagctcatcgcaataaaaagcagctcagagccgactggctcttttaggcactgactccgaacaggattctttcacccaggcatctcctccagagggatccgccagcccgtccagcagcaccatgtgggtgaccaaactcctgccagccctgctgctgcagcatgtcctcctgcatctcctcctgctccccatcgccatcccctatgcagagggacaaaggaaaagaagaaatacaattcatgaattcaaaaaatcagcaaagactaccctaatcaaaatagatccagcactgaagataaaaaccaaaaaagtgaatactgcagaccaatgtgctaatagatgtactaggaataaaggacttccattcacttgcaaggcttttgtttttgataaagcaagaaaacaatgcctctggttccccttcaatagcatgtcaagtggagtgaaaaaagaatttggccatgaatttgacctctatgaaaacaaagactacattagaaactgcatcattggtaaaggacgcagctacaagggaacagtatctatcactaagagtggcatcaaatgtcagccctggagttccatgataccacacgaacacagctatcggggtaaagacctacaggaaaactactgtcgaaatcctcgaggggaagaagggggaccctggtgtttcacaagcaatccagaggtacgctacgaagtctgtgacattcctcagtgttcagaagttgaatgcatgacctgcaatggggagagttatcgaggtctcatggatcatacagaatcaggcaagatttgtcagcgctgggatcatcagacaccacaccggcacaaattcttgcctgaaagatatcccgacaagggctttgatgataattattgccgcaatcccgatggccagccgaggccatggtgctatactcttgaccctcacacccgctgggagtactgtgcaattaaaacatgcgctgacaatactatgaatgacactgatgttcctttggaaacaactgaatgcatccaaggtcaaggagaaggctacaggggcactgtcaataccatttggaatggaattccatgtcagcgttgggattctcagtatcctcacgagcatgacatgactcctgaaaatttcaagtgcaaggacctacgagaaaattactgccgaaatccagatgggtctgaatcaccctggtgttttaccactgatccaaacatccgagttggctactgctcccaaattccaaactgtgatatgtcacatggacaagattgttatcgtgggaatggcaaaaattatatgggcaacttatcccaaacaagatctggactaacatgttcaatgtgggacaagaacatggaagacttacatcgtcatatcttctgggaaccagatgcaagtaagctgaatgagaattactgccgaaatccagatgatgatgctcatggaccctggtgctacacgggaaatccactcattccttgggattattgccctatttctcgttgtgaaggtgataccacacctacaatagtcaatttagaccatcccgtaatatcttgtgccaaaacgaaacaattgcgagttgtaaatgggattccaacacgaacaaacataggatggatggttagtttgagatacagaaataaacatatctgcggaggatcattgataaaggagagttgggttcttactgcacgacagtgtttcccttctcgagacttgaaagattatgaagcttggcttggaattcatgatgtccacggaagaggagatgagaaatgcaaacaggttctcaatgtttcccagctggtatatggccctgaaggatcagatctggttttaatgaagcttgccaggcctgctgtcctggatgattttgttagtacgattgatttacctaattatggatgcacaattcctgaaaagaccagttgcagtgtttatggctggggctacactggattgatcaactatgatggcctattacgagtggcacatctctatataatgggaaatgagaaatgcagccagcatcatcgagggaaggtgactctgaatgagtctgaaatatgtgctggggctgaaaagattggatcaggaccatgtgagggggattatggtggcccacttgtttgtgagcaacataaaatgagaatggttcttggtgtcattgttcctggtcgtggatgtgccattccaaatcgtcctggtatttttgtccgagtagcatattatgcaaaatggatacacaaaattattttaacatataaggtaccacagtcatagctgaagtaagtgtgtctgaagcacccaccaatacaactgtcttttacatgaagatttcagagaatgtggaatttaaaatgtcacttacaacaatcctaagacaactactggagagtcatgtttgttgaaattctcattaatgtttatgggtgttttctgttgttttgtttgtcagtgttattttgtcaatgttgaagtgaattaaggtacatgcaagtgtaataacatatctcctgaagatacttgaatggattaaaaaaacacacaggtatatttgctggatgataaagatttcatgggaaaaaaaatcaattaatctgtctaagctgctttctgatgttggtttcttaataatgagtaaaccacaaattaaatgttattttaacctcaccaaaacaatttataccttgtgtccctaaattgtagccctatattaaattatattacatttcaaaaaaaaaaaaaaaa

SEQ ID NO: 24210 - DNA, 2172 bp, Artificial Sequence
  derived and/or modified sequence
atgtgggtgaccaagctgctgcccgccctgctgctgcagcacgtgctgctgcacctgctgctgctgcccatcgccatcccctacgccgagggccagagaaagagaagaaacaccatccacgagttcaagaagagcgccaagaccaccctgatcaagatcgaccccgccctgaagatcaagaccaagaaggtgaacaccgccgaccagtgcgccaacagatgcaccagaaacaagggcctgcccttcacctgcaaggccttcgtgttcgacaaggccagaaagcagtgcctgtggttccccttcaacagcatgagcagcggcgtgaagaaggagttcggccacgagttcgacctgtacgagaacaaggactacatcagaaactgcatcatcggcaagggcagaagctacaagggcaccgtgagcatcaccaagagcggcatcaagtgccagccctggagcagcatgatcccccacgagcacagctacagaggcaaggacctgcaggagaactactgcagaaaccccagaggcgaggagggcggcccctggtgcttcaccagcaaccccgaggtgagatacgaggtgtgcgacatcccccagtgcagcgaggtggagtgcatgacctgcaacggcgagagctacagaggcctgatggaccacaccgagagcggcaagatctgccagagatgggaccaccagaccccccacagacacaagttcctgcccgagagataccccgacaagggcttcgacgacaactactgcagaaaccccgacggccagcccagaccctggtgctacaccctggacccccacaccagatgggagtactgcgccatcaagacctgcgccgacaacaccatgaacgacaccgacgtgcccctggagaccaccgagtgcatccagggccagggcgagggctacagaggcaccgtgaacaccatctggaacggcatcccctgccagagatgggacagccagtacccccacgagcacgacatgacccccgagaacttcaagtgcaaggacctgagagagaactactgcagaaaccccgacggcagcgagagcccctggtgcttcaccaccgaccccaacatcagagtgggctactgcagccagatccccaactgcgacatgagccacggccaggactgctacagaggcaacggcaagaactacatgggcaacctgagccagaccagaagcggcctgacctgcagcatgtgggacaagaacatggaggacctgcacagacacatcttctgggagcccgacgccagcaagctgaacgagaactactgcagaaaccccgacgacgacgcccacggcccctggtgctacaccggcaaccccctgatcccctgggactactgccccatcagcagatgcgagggcgacaccacccccaccatcgtgaacctggaccaccccgtgatcagctgcgccaagaccaagcagctgagagtggtgaacggcatccccaccagaaccaacatcggctggatggtgagcctgagatacagaaacaagcacatctgcggcggcagcctgatcaaggagagctgggtgctgaccgccagacagtgcttccccagcagagacctgaaggactacgaggcctggctgggcatccacgacgtgcacggcagaggcgacgagaagtgcaagcaggtgctgaacgtgagccagctggtgtacggccccgagggcagcgacctggtgctgatgaagctggccagacccgccgtgctggacgacttcgtgagcaccatcgacctgcccaactacggctgcaccatccccgagaagaccagctgcagcgtgtacggctggggctacaccggcctgatcaactacgacggcctgctgagagtggcccacctgtacatcatgggcaacgagaagtgcagccagcaccacagaggcaaggtgaccctgaacgagagcgagatctgcgccggcgccgagaagatcggcagcggcccctgcgagggcgactacggcggccccctggtgtgcgagcagcacaagatgagaatggtgctgggcgtgatcgtgcccggcagaggctgcgccatccccaacagacccggcatcttcgtgagagtggcctactacgccaagtggatccacaagatcatcctgacctacaaggtgccccagagctag

SEQ ID NO: 24211 - DNA, 2172 bp, Artificial Sequence
  derived and/or modified sequence
atgtgggtaacgaaactgttgcctgcccttttactgcaacacgttctgctccacctacttttactgcctatcgccataccatacgcagaaggccaacgcaaacggcgcaacacgattcacgagttcaaaaagtccgctaagactactttaattaaaatcgacccagcactcaagataaagacgaagaaggtgaacaccgctgatcaatgcgcaaaccgctgtaccagaaacaaaggtctgcccttcacctgtaaggcatttgtgttcgataaggcacgaaaacagtgtctttggttcccgttcaacagcatgtcctcaggagtgaagaaagaattcggccacgagttcgatctctatgagaataaagattatatcaggaactgtattatcggtaagggcagatcatataagggcaccgtgagtattactaagtccgggatcaagtgccaaccctggtcatctatgatccctcatgagcattcctaccgcggcaaggatctgcaggaaaactattgtcgaaatcctagaggtgaggaggggggaccctggtgcttcacttccaacccagaggtcagatatgaggtttgcgatattccacagtgttctgaggtggagtgcatgacctgcaatggtgaatcttataggggcctgatggatcacacagaatccgggaaaatctgtcaacgctgggaccaccagacaccccacaggcataagtttctccccgagcgctatccagacaaaggattcgacgacaactactgtagaaacccagacggtcagcctcgcccatggtgctacacccttgatccacatacacgttgggagtactgtgccatcaagacctgtgcagacaatactatgaacgacaccgacgtgcctcttgagactaccgagtgcatccagggtcagggtgagggctatcgcggaaccgtgaacaccatttggaacggaattccgtgccagcgctgggacagccagtaccctcatgaacatgacatgacacctgagaacttcaaatgcaaagaccttcgtgagaactattgtagaaatccggacggctctgagagtccttggtgctttacgactgaccccaacatacgtgtaggatattgttcacagattcccaactgtgacatgtcccatggccaggattgttacagggggaatggtaaaaattacatgggaaatctgtcacagacccgctcgggtctgacctgttcaatgtgggataagaacatggaagacttacatcgccacattttctgggaaccagatgcaagcaagctgaacgagaattattgccgcaacccggacgacgatgcgcacggtccttggtgctatacgggaaaccccctcattccatgggactattgcccaatctctaggtgtgagggggacactacacccacgattgtgaatctggaccacccagtaatatcctgcgcgaagaccaagcaactcagggttgtcaatgggatccccacccggacaaatataggctggatggtttctctgcgctacagaaataaacacatctgtggtggctccctgataaaagaaagttgggtgctgacagctaggcaatgctttccctcgagggaccttaaggactatgaggcatggctgggaatccacgatgtgcacgggagaggtgacgaaaagtgcaagcaggtgctgaatgtaagtcagctcgtctatgggcccgagggcagcgatctagtcctcatgaagctggccagacctgccgtcctggatgactttgtaagtactatcgatctgcccaattacggatgtaccatccccgagaaaacgtcttgcagcgtatacggctggggctacacgggactgatcaactatgacggattgttgcgggtagcacatctatacatcatgggtaatgaaaagtgtagccagcatcacagagggaaggtgacattgaatgagagtgagatatgcgccggtgcggaaaaaatcggttccggcccatgcgaaggagactatggcggtcccctggtctgcgagcagcacaagatgaggatggtgcttggcgttatagtgccgggacgaggttgcgctattcccaatcgacccgggatattcgttcgagtggcttactacgccaaatggattcacaagattattctgacgtataaagtcccacagtcttag

SEQ ID NO: 24212 - DNA, 2172 bp, Artificial Sequence
  derived and/or modified sequence
atgtgggtgaccaagctgctgcctgccctgctgctgcagcacgtgctgctgcacctgctgctgctgcccatcgccatcccctatgcagagggccagaggaagagaagaaacaccatccacgagttcaagaagagcgccaagaccaccctcatcaagattgatcctgccctgaagatcaagaccaagaaggtgaacacagctgaccagtgtgccaaccgctgcaccaggaacaagggcctgcccttcacctgcaaggcctttgtgtttgacaaggccaggaagcagtgcctgtggttccccttcaacagcatgagcagcggcgtgaagaaggagtttggccacgagtttgacctgtatgagaacaaggactacatccggaactgcatcatcggcaagggccgcagctacaagggcaccgtgtccatcaccaagagcggcatcaagtgccagccctggagctccatgatcccccatgagcacagctaccggggcaaggacctgcaggagaactactgcaggaaccccagaggagaggagggcggcccctggtgcttcaccagcaaccctgaggtgcgctatgaggtgtgtgacatcccccagtgcagcgaggtggagtgcatgacctgcaatggagagagctaccggggcctgatggaccacacagaaagtggcaagatctgccagcgctgggaccaccagaccccccaccgccacaagttcctgcctgagcgctacccagacaagggctttgatgacaactactgcaggaacccagatggccagccccggccctggtgctacaccctggacccccacacccgctgggagtactgtgccatcaagacctgtgccgacaacaccatgaatgacacagatgtgcccctggagaccacagagtgcatccagggccagggcgagggctaccggggcaccgtgaacaccatctggaatggcatcccctgccagcgctgggacagccagtacccccatgaacatgacatgaccccagagaacttcaagtgcaaggacctgcgggagaactactgcaggaacccagatggcagcgagagcccctggtgcttcaccacagaccccaacatccgggtgggctactgcagccagatccccaactgtgacatgagccacggccaggactgctacagaggaaatggcaagaactacatgggcaacctgagccagaccaggagcggcctgacctgcagcatgtgggacaagaacatggaggacctgcaccgccacatcttctgggagccagatgccagcaagctgaatgaaaactactgcaggaacccagatgatgatgcccacggcccctggtgctacacaggcaaccccctcatcccctgggactactgccccatcagccgctgtgagggggacaccacccccaccatcgtgaacctggaccaccctgtgatcagctgtgccaagaccaagcagctgcgggtggtgaatggcatccccaccaggaccaacatcggctggatggtgtccctgcgctacagaaacaagcacatctgtggcggcagcctcatcaaggagagctgggtgctgacagcccggcagtgcttccccagccgggacctgaaggactatgaggcctggctgggcatccatgatgtgcacggcagaggagatgagaagtgcaagcaggtgctgaatgtgtcccagctggtgtatggccctgagggcagtgacctggtgctgatgaagctggcccggcctgctgtgctggatgactttgtgtccaccatcgacctgcccaactacggctgcaccatccctgagaagaccagctgcagcgtgtatggctggggctacacaggcctcatcaactatgatggcctgctgcgggtggcccacctgtacatcatgggaaatgagaagtgcagccagcaccaccggggcaaggtgaccctgaatgaaagtgagatctgtgccggggctgagaagattggcagcggcccctgtgagggggactatggaggccccctggtgtgtgagcagcacaagatgaggatggtgctgggcgtcatcgtgcccggccggggctgtgccatccccaaccggcccggcatctttgtgcgggtggcctactatgccaagtggatccacaagatcatcctgacctacaaggtgccccagagctag

SEQ ID NO: 24213 - DNA, 2172 bp, Artificial Sequence
  derived and/or modified sequence
atgtgggtgaccaagctgctgcccgccctgctgctgcagcacgtgttattgcacttactgcttctgcctatagccatcccatacgccgaggggcagcggaagaggcggaacacaatacacgagtttaagaaatcagcaaagaccacactgattaagatcgatccggccctgaaaatcaaaacaaagaaagtgaacacagctgatcagtgcgccaatagatgcacccgtaataaggggctgccattcacgtgcaaagcgttcgtttttgataaggctcgtaaacagtgtttgtggttcccattcaattccatgtccagtggtgtgaagaaggagttcggacatgagtttgatctgtatgagaataaggattatatccggaactgtattatcggcaaaggcagaagctacaaagggaccgtgagcataaccaaatctggcataaagtgccagccatggtcttctatgattccccacgagcatagttacagagggaaagatctgcaggagaactactgccggaatccacggggtgaggagggtggcccttggtgcttcacctcaaaccctgaggttagatatgaagtttgcgatattccccagtgcagtgaggtggagtgcatgacttgtaatggggaaagttaccggggacttatggatcacactgagtccggtaaaatctgtcagcgatgggatcatcaaacacctcacaggcacaaattcctcccagagcgatatccggataagggattcgacgataattactgtcggaaccctgatggacagccgagaccttggtgctacacattggacccacacacacgttgggagtattgcgccattaaaacatgcgccgataatactatgaatgataccgacgtgcctctagaaacgacagaatgcattcagggacagggggagggatacagagggactgtcaacacaatatggaacgggatcccgtgtcaacggtgggactcacaatatccacacgagcatgacatgacccccgagaattttaagtgtaaagatttgcgcgaaaactactgccgcaaccctgacggtagcgaaagcccttggtgctttactacagacccgaatattagggtcgggtactgctcacagatccctaactgcgatatgtctcacgggcaggactgttaccgcggcaatggaaaaaattatatgggcaatttaagtcaaacgcggtccgggcttacctgcagtatgtgggataagaacatggaagatctccatcggcatattttctgggagcccgatgcctccaaactaaacgagaattattgtcgcaatcctgatgacgacgcgcacggcccatggtgttataccggtaacccactaataccctgggattattgtccgatctctagatgcgagggagatactacccccaccattgttaacctcgatcatcctgtaatttcttgcgccaaaacaaaacagctcagggttgtaaatggaatccccacccggaccaatattgggtggatggtaagtctccggtacagaaacaagcacatctgcggaggatccctgatcaaggagtcttgggtgctgacagcccgccagtgttttccatcacgtgacctgaaagattacgaagcgtggctggggatccacgatgtgcacggccgtggcgacgaaaagtgcaagcaagtgttgaacgtgagccagctggtttatggacctgagggatctgatctggtgttaatgaagttggcacgtccagctgtgctagacgacttcgtgtcaacaatagatcttcctaattacggatgcactatcccagaaaagacttcttgtagtgtttacgggtggggatacaccggactaatcaactacgacggactccttcgcgtagctcatctgtacataatggggaatgagaagtgctcacaacatcataggggtaaagttaccctcaacgagagcgagatttgcgccggggctgagaagatagggagcggcccatgtgagggagattacggcgggcccctcgtttgtgaacaacacaagatgagaatggttcttggcgtgatcgtgccgggcagaggatgcgcaatcccaaatcggcctggcattttcgttcgtgtcgcttactacgccaagtggatccacaaaatcatcctaacatataaggtccctcagtcctag

SEQ ID NO: 24214 - DNA, 2172 bp, Artificial Sequence
  derived and/or modified sequence
atgtgggtgaccaagctactgccggctctgctactacagcacgtgctgcttcatctgctgctcctgcctatcgccatcccatacgcagaggggcagcgcaaaaggcgtaatactattcacgagttcaagaaatcagccaagacaacactaatcaagatcgatccagccctgaagataaagactaagaaggtcaacactgctgaccagtgcgctaaccgctgtactaggaacaaagggctgcctttcacctgcaaagctttcgtatttgacaaagccagaaaacagtgcctatggtttcccttcaactccatgagctctggagtgaagaaggagttcggacacgagtttgacctgtacgaaaataaggattacattcggaactgtatcatcgggaaaggcagatcctacaagggaaccgtctccatcacaaagtcggggatcaagtgtcagccctggagctccatgattccccacgagcactcctaccgaggtaaagatctccaggagaactattgtaggaaccccagaggagaggagggcggaccctggtgttttacgagcaatcccgaggtcaggtacgaggtgtgcgacatcccccagtgttcagaggtggagtgcatgacctgcaatggggaaagttatcggggtctgatggaccacaccgaaagcggcaaaatttgccagcgctgggatcaccagaccccgcatcggcacaaattccttccagagcgatatccagacaaaggtttcgacgacaattactgccgaaatcccgatggccagccacgaccttggtgctacacacttgatccacatacgagatgggaatactgcgcaattaagacctgcgcggataacactatgaacgatacggatgtgccccttgaaacgaccgaatgcatccagggacaaggcgaaggctacagaggcacggttaataccatctggaacgggatcccctgccaacgttgggacagtcagtacccccatgaacacgatatgacccccgaaaactttaagtgtaaggatctccgcgaaaactattgtcgcaaccctgacggatcagagagcccatggtgtttcactaccgacccaaacatcagggttgggtactgctcccaaattccaaattgtgacatgtctcatggtcaagactgttatcggggaaacggcaaaaactatatgggcaaccttagtcaaacacgaagtggtcttacctgttccatgtgggacaagaatatggaagatcttcaccgccacatattctgggagcctgatgctagtaagctgaacgagaattattgtcggaacccagacgatgatgcgcacgggccttggtgttatactggcaaccctttgatcccatgggattattgccccataagccgctgcgaaggagatacgactcctaccattgtcaatctggaccaccccgtcattagctgtgccaaaactaaacagttacgcgtcgtgaatggtatccctacacggactaatatcggctggatggtatctctgaggtaccgaaacaaacatatctgcgggggtagcttgataaaggagtcttgggtcctcacagcgaggcagtgcttcccgagcagagacctcaaagactacgaggcgtggctcgggatccacgacgtgcatggcaggggtgatgaaaaatgcaagcaagtcctgaatgtgtcacagcttgtgtatggacccgagggctcagatctggtgctcatgaaactggctcggccagccgttctcgatgactttgtgtcaactatcgatttgccaaactatggctgcactatcccagagaagacgtcctgttcagtctacggatggggctacacgggtctgatcaactacgacggcttgttgagagttgcgcatctgtatatcatgggcaacgaaaaatgttcccagcatcataggggtaaagtgacccttaacgagtctgagatctgcgctggcgcagagaagattggttccggcccatgtgagggcgattacggaggccctttggtctgtgagcagcacaaaatgaggatggttctgggtgttattgtcccgggacgcggatgcgccatccccaaccggcctggtatcttcgtccgggtcgcttattatgccaagtggatccataagatcatcctcacctacaaggtccctcagtcatag

SEQ ID NO: 24215 - DNA, 2249 bp, Artificial Sequence
  derived and/or modified sequence
taggcactgactccgaacaggattctttcacccaggcatctcctccagagggatccgccagcccgtccagcagcaccatgtgggtgaccaaactcctgccagccctgctgctgcagcatgtcctcctgcatctcctcctgctccccatcgccatcccctatgcagagggacaaaggaaaagaagaaatacaattcatgaattcaaaaaatcagcaaagactaccctaatcaaaatagatccagcactgaagataaaaaccaaaaaagtgaatactgcagaccaatgtgctaatagatgtactaggaataaaggacttccattcacttgcaaggcttttgtttttgataaagcaagaaaacaatgcctctggttccccttcaatagcatgtcaagtggagtgaaaaaagaatttggccatgaatttgacctctatgaaaacaaagactacattagaaactgcatcattggtaaaggacgcagctacaagggaacagtatctatcactaagagtggcatcaaatgtcagccctggagttccatgataccacacgaacacagctatcggggtaaagacctacaggaaaactactgtcgaaatcctcgaggggaagaagggggaccctggtgtttcacaagcaatccagaggtacgctacgaagtctgtgacattcctcagtgttcagaagttgaatgcatgacctgcaatggggagagttatcgaggtctcatggatcatacagaatcaggcaagatttgtcagcgctgggatcatcagacaccacaccggcacaaattcttgcctgaaagatatcccgacaagggctttgatgataattattgccgcaatcccgatggccagccgaggccatggtgctatactcttgaccctcacacccgctgggagtactgtgcaattaaaacatgcgctgacaatactatgaatgacactgatgttcctttggaaacaactgaatgcatccaaggtcaaggagaaggctacaggggcactgtcaataccatttggaatggaattccatgtcagcgttgggattctcagtatcctcacgagcatgacatgactcctgaaaatttcaagtgcaaggacctacgagaaaattactgccgaaatccagatgggtctgaatcaccctggtgttttaccactgatccaaacatccgagttggctactgctcccaaattccaaactgtgatatgtcacatggacaagattgttatcgtgggaatggcaaaaattatatgggcaacttatcccaaacaagatctggactaacatgttcaatgtgggacaagaacatggaagacttacatcgtcatatcttctgggaaccagatgcaagtaagctgaatgagaattactgccgaaatccagatgatgatgctcatggaccctggtgctacacgggaaatccactcattccttgggattattgccctatttctcgttgtgaaggtgataccacacctacaatagtcaatttagaccatcccgtaatatcttgtgccaaaacgaaacaattgcgagttgtaaatgggattccaacacgaacaaacataggatggatggttagtttgagatacagaaataaacatatctgcggaggatcattgataaaggagagttgggttcttactgcacgacagtgtttcccttctcgagacttgaaagattatgaagcttggcttggaattcatgatgtccacggaagaggagatgagaaatgcaaacaggttctcaatgtttcccagctggtatatggccctgaaggatcagatctggttttaatgaagcttgccaggcctgctgtcctggatgattttgttagtacgattgatttacctaattatggatgcacaattcctgaaaagaccagttgcagtgtttatggctggggctacactggattgatcaactatgatggcctattacgagtggcacatctctatataatgggaaatgagaaatgcagccagcatcatcgagggaaggtgactctgaatgagtctgaaatatgtgctggggctgaaaagattggatcaggaccatgtgagggggattatggtggcccacttgtttgtgagcaacataaaatgagaatggttcttggtgtcattgttcctggtcgtggatgtgccattccaaatcgtcctggtatttttgtccgagtagcatattatgcaaaatggatacacaaaattattttaacatataaggtaccacagtcatag

SEQ ID NO: 24216 - protein, 285 aa, Artificial Sequence
  derived and/or modified sequence
MWVTKLLPALLLQHVLLHLLLLPIAIPYAEGQRKRRNTIHEFKKSAKTTLIKIDPALKIKTKKVNTADQCANRCTRNKGLPFTCKAFVFDKARKQCLWFPFNSMSSGVKKEFGHEFDLYENKDYIRNCIIGKGRSYKGTVSITKSGIKCQPWSSMIPHEHSYRGKDLQENYCRNPRGEEGGPWCFTSNPEVRYEVCDIPQCSEVECMTCNGESYRGLMDHTESGKICQRWDHQTPHRHKFLPERYPDKGFDDNYCRNPDGQPRPWCYTLDPHTRWEYCAIKTCET

SEQ ID NO: 24217 - DNA, 1292 bp, Artificial Sequence
  derived and/or modified sequence
gggagttcagacctagatctttccagttaatcacacaacaaacttagctcatcgcaataaaaagcagctcagagccgactggctcttttaggcactgactccgaacaggattctttcacccaggcatctcctccagagggatccgccagcccgtccagcagcaccatgtgggtgaccaaactcctgccagccctgctgctgcagcatgtcctcctgcatctcctcctgctccccatcgccatcccctatgcagagggacaaaggaaaagaagaaatacaattcatgaattcaaaaaatcagcaaagactaccctaatcaaaatagatccagcactgaagataaaaaccaaaaaagtgaatactgcagaccaatgtgctaatagatgtactaggaataaaggacttccattcacttgcaaggcttttgtttttgataaagcaagaaaacaatgcctctggttccccttcaatagcatgtcaagtggagtgaaaaaagaatttggccatgaatttgacctctatgaaaacaaagactacattagaaactgcatcattggtaaaggacgcagctacaagggaacagtatctatcactaagagtggcatcaaatgtcagccctggagttccatgataccacacgaacacagctatcggggtaaagacctacaggaaaactactgtcgaaatcctcgaggggaagaagggggaccctggtgtttcacaagcaatccagaggtacgctacgaagtctgtgacattcctcagtgttcagaagttgaatgcatgacctgcaatggggagagttatcgaggtctcatggatcatacagaatcaggcaagatttgtcagcgctgggatcatcagacaccacaccggcacaaattcttgcctgaaagatatcccgacaagggctttgatgataattattgccgcaatcccgatggccagccgaggccatggtgctatactcttgaccctcacacccgctgggagtactgtgcaattaaaacatgcgagacataacatgggctctcaactgatggtgaacttcttctggtgagtgacagaggctgcagtgaagaataatgagtctaatagaagtttatcacagatgtctctaatctttatagctgatccctacctctctcgctgtctttgtacccagcctgcattctgtttcgatctgtcttttagcagtccatacaatcatttttctacatgctggcccttacctagcttttctgaatttacaataaaaactattttttaacgtgaaaaaaaaaaaaaaaaaa

SEQ ID NO: 24218 - DNA, 858 bp, Artificial Sequence
  derived and/or modified sequence
atgtgggtgaccaagctgctgcccgccctgctgctgcagcacgtgctgctgcacctgctgctgctgcccatcgccatcccctacgccgagggccagagaaagagaagaaacaccatccacgagttcaagaagagcgccaagaccaccctgatcaagatcgaccccgccctgaagatcaagaccaagaaggtgaacaccgccgaccagtgcgccaacagatgcaccagaaacaagggcctgcccttcacctgcaaggccttcgtgttcgacaaggccagaaagcagtgcctgtggttccccttcaacagcatgagcagcggcgtgaagaaggagttcggccacgagttcgacctgtacgagaacaaggactacatcagaaactgcatcatcggcaagggcagaagctacaagggcaccgtgagcatcaccaagagcggcatcaagtgccagccctggagcagcatgatcccccacgagcacagctacagaggcaaggacctgcaggagaactactgcagaaaccccagaggcgaggagggcggcccctggtgcttcaccagcaaccccgaggtgagatacgaggtgtgcgacatcccccagtgcagcgaggtggagtgcatgacctgcaacggcgagagctacagaggcctgatggaccacaccgagagcggcaagatctgccagagatgggaccaccagaccccccacagacacaagttcctgcccgagagataccccgacaagggcttcgacgacaactactgcagaaaccccgacggccagcccagaccctggtgctacaccctggacccccacaccagatgggagtactgcgccatcaagacctgcgagacctag

SEQ ID NO: 24219 - DNA, 858 bp, Artificial Sequence
  derived and/or modified sequence
atgtgggtcaccaaactgctgcccgccctgctgctacagcatgtgttgttgcacttgctcctcctgccaattgccattccttatgcagaggggcagcgcaaaagaagaaatacaatccacgagtttaagaagagcgccaagactacacttatcaaaattgatcctgctttgaagatcaaaaccaaaaaggtgaatactgctgaccagtgtgccaaccgttgtacccggaataaaggtttacccttcacctgcaaggctttcgtgtttgacaaggcccgcaagcagtgcttgtggttcccattcaactctatgtcaagcggtgtgaagaaagagtttggccacgaattcgatctgtacgaaaacaaggattatattcggaactgcatcatcgggaaaggtaggtcttataagggcactgtctcgataacaaagtcaggtatcaaatgtcaaccctggtcctctatgattccacatgagcattcataccgcggtaaggatctgcaggaaaactactgccgaaacccacggggcgaggaaggtggcccatggtgtttcacctccaacccagaagtcaggtatgaagtatgtgatatacctcaatgttccgaagtggagtgcatgacatgtaatggagaatcctataggggattgatggaccataccgaaagtggaaagatctgtcagcggtgggaccaccagacccctcatagacacaagttcttgccagagcgctatcctgataagggcttcgatgacaactactgtagaaatcccgatggccaaccgagaccttggtgttacaccctcgacccccacactagatgggagtactgcgcaataaagacttgcgagacatag

SEQ ID NO: 24220 - DNA, 858 bp, Artificial Sequence
  derived and/or modified sequence
atgtgggtgaccaagctgctgcctgccctgctgctgcagcacgtgctgctgcacctgctgctgctgcccatcgccatcccctatgcagagggccagaggaagagaagaaacaccatccacgagttcaagaagagcgccaagaccaccctcatcaagattgatcctgccctgaagatcaagaccaagaaggtgaacacagctgaccagtgtgccaaccgctgcaccaggaacaagggcctgcccttcacctgcaaggcctttgtgtttgacaaggccaggaagcagtgcctgtggttccccttcaacagcatgagcagcggcgtgaagaaggagtttggccacgagtttgacctgtatgagaacaaggactacatccggaactgcatcatcggcaagggccgcagctacaagggcaccgtgtccatcaccaagagcggcatcaagtgccagccctggagctccatgatcccccatgagcacagctaccggggcaaggacctgcaggagaactactgcaggaaccccagaggagaggagggcggcccctggtgcttcaccagcaaccctgaggtgcgctatgaggtgtgtgacatcccccagtgcagcgaggtggagtgcatgacctgcaatggagagagctaccggggcctgatggaccacacagaaagtggcaagatctgccagcgctgggaccaccagaccccccaccgccacaagttcctgcctgagcgctacccagacaagggctttgatgacaactactgcaggaacccagatggccagccccggccctggtgctacaccctggacccccacacccgctgggagtactgtgccatcaagacctgtgagacctag

SEQ ID NO: 24221 - DNA, 858 bp, Artificial Sequence
  derived and/or modified sequence
atgtgggtgaccaagctgctgcccgccctgctgctgcagcacgtgctgttgcacttgcttctgctccccatcgccatcccctacgctgagggccaaaggaaaagaaggaacaccattcatgagttcaagaaaagtgccaagactaccctcatcaagatcgaccccgccctgaaaattaaaaccaaaaaggtgaacacagctgaccaatgcgccaaccgctgtacaaggaacaagggtttgcctttcacatgcaaagcatttgtgttcgacaaggccaggaagcagtgtttgtggttccctttcaattctatgagcagtggggtcaagaaggaattcggtcacgagtttgatctctatgaaaataaggattacatccgcaattgtataattgggaagggcaggtcgtataaagggaccgttagcattacaaaatctggaattaagtgccagccttggtcttctatgatccctcacgagcatagctaccggggaaaggacctgcaggagaactactgcaggaatcctaggggggaggagggaggaccatggtgcttcacgtcaaatcctgaggttcgttatgaggtatgcgacatacctcagtgtagtgaagttgagtgtatgacatgcaatggagaaagttaccgtggcctcatggatcacactgagagtggcaagatctgtcaaagatgggatcatcaaactccgcaccggcacaaattccttcccgaacggtaccccgacaaaggttttgacgataattattgtcggaatcccgatggccaacctagaccatggtgttacacgttggacccccatactaggtgggagtactgtgcaattaaaacgtgcgagacttag

SEQ ID NO: 24222 - DNA, 858 bp, Artificial Sequence
  derived and/or modified sequence
atgtgggtcaccaaattattacccgcacttctgctccagcacgtacttctgcaccttctcctccttccaatcgccattccatacgccgagggtcagcgcaagaggagaaacaccatccatgagttcaaaaagtctgcaaagaccactctcatcaagatcgatcctgccttgaaaattaagaccaaaaaggtaaacacggccgatcagtgtgccaatagatgcaccaggaataaaggtctacctttcacatgtaaggccttcgtcttcgataaggcgagaaaacagtgcctgtggttcccttttaatagtatgagttccggtgtgaaaaaggagttcgggcatgaatttgacctgtatgagaacaaagattacattcgtaattgcatcatcgggaagggtcgatcgtataaaggtaccgtgagcattaccaaaagcggcattaagtgccaaccttggagctccatgatcccccatgaacatagctatcggggaaaagatctgcaggaaaattactgtagaaacccacgcggtgaggaggggggtccttggtgctttacttccaaccctgaagtgcgttacgaagtatgtgacatcccacagtgttcagaggttgagtgtatgacttgcaacggggagtcataccgcggtctgatggatcacacagaaagtggaaagatttgccagaggtgggaccaccagacgccacaccgtcataaatttttacctgagcggtatcctgacaaaggcttcgacgacaattactgtaggaatccagatggacagccgcgaccctggtgctatacactcgacccccacacaagatgggagtactgcgccattaagacctgcgagacctag

SEQ ID NO: 24223 - DNA, 1111 bp, Artificial Sequence
  derived and/or modified sequence
ggcatctcctccagagggatccgccagcccgtccagcagcaccatgtgggtgaccaaactcctgccagccctgctgctgcagcatgtcctcctgcatctcctcctgctccccatcgccatcccctatgcagagggacaaaggaaaagaagaaatacaattcatgaattcaaaaaatcagcaaagactaccctaatcaaaatagatccagcactgaagataaaaaccaaaaaagtgaatactgcagaccaatgtgctaatagatgtactaggaataaaggacttccattcacttgcaaggcttttgtttttgataaagcaagaaaacaatgcctctggttccccttcaatagcatgtcaagtggagtgaaaaaagaatttggccatgaatttgacctctatgaaaacaaagactacattagaaactgcatcattggtaaaggacgcagctacaagggaacagtatctatcactaagagtggcatcaaatgtcagccctggagttccatgataccacacgaacacagctatcggggtaaagacctacaggaaaactactgtcgaaatcctcgaggggaagaagggggaccctggtgtttcacaagcaatccagaggtacgctacgaagtctgtgacattcctcagtgttcagaagttgaatgcatgacctgcaatggggagagttatcgaggtctcatggatcatacagaatcaggcaagatttgtcagcgctgggatcatcagacaccacaccggcacaaattcttgcctgaaagatatcccgacaagggctttgatgataattattgccgcaatcccgatggccagccgaggccatggtgctatactcttgaccctcacacccgctgggagtactgtgcaattaaaacatgcgagacataacatgggctctcaactgatggtgaacttcttctggtgagtgacagaggctgcagtgaagaataatgagtctaatagaagtttatcacagatgtctctaatctttatagctgatccctacctctctcgctgtctttgtacccagcctgcattctgtttcgatctgtcttttagcagtccatacaatcatttttctacatgctggcccttacc

SEQ ID NO: 24224 - protein, 184 aa, Artificial Sequence
  derived and/or modified sequence
MWVTKLLPALLLQHVLLHLLLLPIAIPYAEGQRKRRNTIHEFKKSAKTTLIKIDPALKIKTKKVNTADQCANRCTRNKGLPFTCKAFVFDKARKQCLWFPFNSMSSGVKKEFGHEFDLYENKDYIRNCIIGKGRSYKGTVSITKSGIKCQPWSSMIPHEHSGGDDCLVESTFYSIPFWGHNSAR

SEQ ID NO: 24225 - protein, 141 aa, Artificial Sequence
  derived and/or modified sequence
MWVTKLLPALLLQHVLLHLLLLPIAIPYAEGQRKRRNTIHEFKKSAKTTLIKIDPALKIKTKKVNTADQCANRCTRNKGLPFTCKAFVFDKARKQCLWFPFNSMSSGVKKEFGHEFDLYENKDYIRNCIIGKGRSYKGTVS

SEQ ID NO: 24226 - protein, 210 aa, Artificial Sequence
  derived and/or modified sequence
MWVTKLLPALLLQHVLLHLLLLPIAIPYAEGQRKRRNTIHEFKKSAKTTLIKIDPALKIKTKKVNTADQCANRCTRNKGLPFTCKAFVFDKARKQCLWFPFNSMSSGVKKEFGHEFDLYENKDYIRNCIIGKGRSYKGTVSITKSGIKCQPWSSMIPHEHSFLPSSYRGKDLQENYCRNPRGEEGGPWCFTSNPEVRYEVCDIPQCSEGK

SEQ ID NO: 24227 - protein, 16 aa, Artificial Sequence
  derived and/or modified sequence
GEEGGPWCFTSNPEVR

SEQ ID NO: 24228 - DNA, 2079 bp, Artificial Sequence
  derived and/or modified sequence
gggagttcagacctagatctttccagttaatcacacaacaaacttagctcatcgcaataaaaagcagctcagagccgactggctcttttaggcactgactccgaacaggattctttcacccaggcatctcctccagagggatccgccagcccgtccagcagcaccatgtgggtgaccaaactcctgccagccctgctgctgcagcatgtcctcctgcatctcctcctgctccccatcgccatcccctatgcagagggacaaaggaaaagaagaaatacaattcatgaattcaaaaaatcagcaaagactaccctaatcaaaatagatccagcactgaagataaaaaccaaaaaagtgaatactgcagaccaatgtgctaatagatgtactaggaataaaggacttccattcacttgcaaggcttttgtttttgataaagcaagaaaacaatgcctctggttccccttcaatagcatgtcaagtggagtgaaaaaagaatttggccatgaatttgacctctatgaaaacaaagactacattagaaactgcatcattggtaaaggacgcagctacaagggaacagtatctatcactaagagtggcatcaaatgtcagccctggagttccatgataccacacgaacacagctttttgccttcgagctatcggggtaaagacctacaggaaaactactgtcgaaatcctcgaggggaagaagggggaccctggtgtttcacaagcaatccagaggtacgctacgaagtctgtgacattcctcagtgttcagaaggtaaataaacctgaatgccatgtgggccattctattccccctatgtgtagaactgtaactcacattaaaggttaacagcaacgaatcaatcataacaaatatgttgttcgtgcaaatgcaactacaaataattatttaaacatttttatacaatgtttttaaaactgttggattatcaccagattaatgcaaaataacagagcgagttatcagtttgaatttcaacactgcctgagacatccctctggggaaagtgaaagagagggtttacttacctactgtcttgagctcacatacctcaaaatctactactgtgtggcacctgaaaggagttgaatgaagcttagcctttcattagcaatgttaattctattcaaccagcacctgcttccacagaaattctgtccaaactatcatgaagtggtgtgacaagggtatatggacccagaagataatacaatataagaagggatcactggaagcttgaccccatgcacattttggtgaaaatgtgcctagaatcaaatgtgacacgtaggctggaactgagtaccattcagaataggatctgaagagatcaaagcaatggagaccaccaaactgtcttgaaggcatgtctatggaccttaagtccatgtctatgttttcagctcttctcacagcataaaagggcattgtccttacttttgcagtggaaaactgaatggctgacaagatggaagagtaaccatttcagcattgtatgtggtttcatttttcttagttatctggctactgaatagccggatttttcagttctgtcagaaactctaaatttccaaaaatctaagtgaaacatggatgaaactctgttagaaaattgttaggattttggagtatttggggagggggactactggaatgctgtccaagttttatactaagatatcttacctgtttgttattaaccaaatatttttaaaaatatttcctccataaatattcatttaatattaggttgatatttatcacataaaaagtaaaggctactgttagctaattgtcacagagaaggatttgttttctgttgttagtgaatttgaaatccttgactttatgtgctacagccagttccatctctgtttgtaaattcttactttccattccatatcatattctgttccctataacctcttcattgttttcttttcttttaaaaataataaacttttctatgatcaaaaaaaaaaaaaaaaaaaaaaaaaaaaaaaaaaaaaaaaaaaaaaaaaaaaaaaaaaaaaaaaaaaaaa

SEQ ID NO: 24229 - DNA, 555 bp, Artificial Sequence
  derived and/or modified sequence
atgtgggtgaccaagctgctgcccgccctgctgctgcagcacgtgctgctgcacctgctgctgctgcccatcgccatcccctacgccgagggccagagaaagagaagaaacaccatccacgagttcaagaagagcgccaagaccaccctgatcaagatcgaccccgccctgaagatcaagaccaagaaggtgaacaccgccgaccagtgcgccaacagatgcaccagaaacaagggcctgcccttcacctgcaaggccttcgtgttcgacaaggccagaaagcagtgcctgtggttccccttcaacagcatgagcagcggcgtgaagaaggagttcggccacgagttcgacctgtacgagaacaaggactacatcagaaactgcatcatcggcaagggcagaagctacaagggcaccgtgagcatcaccaagagcggcatcaagtgccagccctggagcagcatgatcccccacgagcacagcggcggcgacgactgcctggtggagagcaccttctacagcatccccttctggggccacaacagcgccagatag

SEQ ID NO: 24230 - DNA, 426 bp, Artificial Sequence
  derived and/or modified sequence
atgtgggtgaccaagctgctgcccgccctgctgctgcagcacgtgctgctgcacctgctgctgctgcccatcgccatcccctacgccgagggccagagaaagagaagaaacaccatccacgagttcaagaagagcgccaagaccaccctgatcaagatcgaccccgccctgaagatcaagaccaagaaggtgaacaccgccgaccagtgcgccaacagatgcaccagaaacaagggcctgcccttcacctgcaaggccttcgtgttcgacaaggccagaaagcagtgcctgtggttccccttcaacagcatgagcagcggcgtgaagaaggagttcggccacgagttcgacctgtacgagaacaaggactacatcagaaactgcatcatcggcaagggcagaagctacaagggcaccgtgagctag

SEQ ID NO: 24231 - DNA, 357 bp, Artificial Sequence
  derived and/or modified sequence
atgtgggtgaccaagctgctgcccgccctgctgctgcagcacgtgctgctgcacctgctgctgctgcccatcgccatcccctacgccgagggccagagaaagagaagaaacaccatccacgagttcaagaagagcgccaagaccaccctgatcaagatcgaccccgccctgaagatcaagaccaagaaggtgaacaccgccgaccagtgcgccaacagatgcaccagaaacaagggcctgcccttcacctgcaaggccttcgtgttcgacaaggccagaaagcagtgcctgtggttccccttcaacagcatgagcagcggcgtgaagaaggagttcggccacgagttcgacctgtag

SEQ ID NO: 24232 - DNA, 633 bp, Artificial Sequence
  derived and/or modified sequence
atgtgggtgaccaagctgctgcccgccctgctgctgcagcacgtgctgctgcacctgctgctgctgcccatcgccatcccctacgccgagggccagagaaagagaagaaacaccatccacgagttcaagaagagcgccaagaccaccctgatcaagatcgaccccgccctgaagatcaagaccaagaaggtgaacaccgccgaccagtgcgccaacagatgcaccagaaacaagggcctgcccttcacctgcaaggccttcgtgttcgacaaggccagaaagcagtgcctgtggttccccttcaacagcatgagcagcggcgtgaagaaggagttcggccacgagttcgacctgtacgagaacaaggactacatcagaaactgcatcatcggcaagggcagaagctacaagggcaccgtgagcatcaccaagagcggcatcaagtgccagccctggagcagcatgatcccccacgagcacagcttcctgcccagcagctacagaggcaaggacctgcaggagaactactgcagaaaccccagaggcgaggagggcggcccctggtgcttcaccagcaaccccgaggtgagatacgaggtgtgcgacatcccccagtgcagcgagggcaagtag

SEQ ID NO: 24233 - DNA, 555 bp, Artificial Sequence
  derived and/or modified sequence
atgtgggtaacgaagttacttcccgcacttctgctacagcatgtgctgttgcaccttctgctcctgccaatcgccatcccgtacgccgaggggcagagaaagcgtagaaacacaattcacgagtttaaaaaatccgctaagaccactctcataaagattgatccagcactgaaaatcaagacaaaaaaagtgaacactgcagaccagtgcgcaaataggtgtacacgcaacaagggacttccttttacatgcaaggcctttgttttcgataaggccaggaagcagtgcttatggtttcctttcaattccatgagttcaggtgtgaagaaggaatttggtcacgaattcgacctttatgagaataaagactatatacgcaactgcattattggtaaaggcaggagctataagggcacggtttcaatcactaagtctggtataaagtgccagccctggagtagcatgatcccacatgagcattctggaggtgacgactgcctcgtggagagtaccttctactcgatccctttttggggccacaatagcgctaggtag

SEQ ID NO: 24234 - DNA, 426 bp, Artificial Sequence
  derived and/or modified sequence
atgtgggtgacaaagctcctgccagctctgctgctccagcatgtgttactgcacctgttgctgttgccaatcgctataccttacgctgaaggccaaaggaaacggcgtaacacaatccacgagtttaaaaaaagcgccaagacaaccctgatcaagattgatccagccttgaagattaaaaccaaaaaggtgaacacagctgaccagtgtgccaaccgatgcaccaggaataagggcctgccttttacctgcaaggccttcgtgtttgataaggctaggaaacaatgtctttggtttcctttcaattcgatgagctccggggtcaagaaggagttcggtcatgagttcgacctgtacgagaataaagattatatcagaaactgcataatcgggaaaggccgcagttacaagggcaccgtttcttag

SEQ ID NO: 24235 - DNA, 357 bp, Artificial Sequence
  derived and/or modified sequence
atgtgggttaccaagttgctaccggctctccttttgcaacacgtccttctccaccttctgctactcccaatagcaataccctacgccgaaggacagcgcaagcgcaggaacactattcatgagtttaaaaaaagtgcaaagactacattaattaagatcgatccagccctgaagatcaagaccaagaaggtgaatactgcagaccagtgtgcgaatagatgcacccggaacaagggccttccctttacttgcaaggcttttgttttcgataaagcgaggaagcagtgtctgtggtttccctttaactctatgtcttccggcgtaaagaaggaattcggtcacgagttcgatttgtag

SEQ ID NO: 24236 - DNA, 633 bp, Artificial Sequence
  derived and/or modified sequence
atgtgggtgacaaagttactacctgccttgctcctgcagcatgtgctcttgcatttacttcttctgcccattgccatcccctatgcagagggccagcgcaagcggaggaataccattcacgaattcaagaagtctgcaaaaaccacccttatcaaaattgacccggcgctgaagatcaagacaaagaaggtgaataccgctgaccaatgtgcaaaccgatgcaccagaaataaggggctgcctttcacctgcaaggccttcgtgtttgataaagcccgcaagcaatgtctgtggtttcctttcaactctatgagctcgggagttaaaaaagaatttggccacgaatttgacttatacgagaacaaagattacatcaggaactgcataattggtaaggggagatcctacaagggcactgtaagcatcacaaaaagtggcatcaaatgtcaaccttggtcgtccatgataccgcacgaacatagcttcctccctagctcctatagaggaaaagacctccaggagaactactgtcgcaacccaaggggggaggaagggggaccctggtgcttcacttctaatcctgaggtgagatacgaggtatgcgatatcccacagtgtagcgagggaaagtag

SEQ ID NO: 24237 - DNA, 555 bp, Artificial Sequence
  derived and/or modified sequence
atgtgggtgaccaagctgctgcctgccctgctgctgcagcacgtgctgctgcacctgctgctgctgcccatcgccatcccctatgcagagggccagaggaagagaagaaacaccatccacgagttcaagaagagcgccaagaccaccctcatcaagattgatcctgccctgaagatcaagaccaagaaggtgaacacagctgaccagtgtgccaaccgctgcaccaggaacaagggcctgcccttcacctgcaaggcctttgtgtttgacaaggccaggaagcagtgcctgtggttccccttcaacagcatgagcagcggcgtgaagaaggagtttggccacgagtttgacctgtatgagaacaaggactacatccggaactgcatcatcggcaagggccgcagctacaagggcaccgtgtccatcaccaagagcggcatcaagtgccagccctggagctccatgatcccccatgagcacagcggaggagatgactgcctggtggagagcaccttctacagcatccccttctggggccacaacagcgccaggtag

SEQ ID NO: 24238 - DNA, 426 bp, Artificial Sequence
  derived and/or modified sequence
atgtgggtgaccaagctgctgcctgccctgctgctgcagcacgtgctgctgcacctgctgctgctgcccatcgccatcccctatgcagagggccagaggaagagaagaaacaccatccacgagttcaagaagagcgccaagaccaccctcatcaagattgatcctgccctgaagatcaagaccaagaaggtgaacacagctgaccagtgtgccaaccgctgcaccaggaacaagggcctgcccttcacctgcaaggcctttgtgtttgacaaggccaggaagcagtgcctgtggttccccttcaacagcatgagcagcggcgtgaagaaggagtttggccacgagtttgacctgtatgagaacaaggactacatccggaactgcatcatcggcaagggccgcagctacaagggcaccgtgtcctag

SEQ ID NO: 24239 - DNA, 357 bp, Artificial Sequence
  derived and/or modified sequence
atgtgggtgaccaagctgctgcctgccctgctgctgcagcacgtgctgctgcacctgctgctgctgcccatcgccatcccctatgcagagggccagaggaagagaagaaacaccatccacgagttcaagaagagcgccaagaccaccctcatcaagattgatcctgccctgaagatcaagaccaagaaggtgaacacagctgaccagtgtgccaaccgctgcaccaggaacaagggcctgcccttcacctgcaaggcctttgtgtttgacaaggccaggaagcagtgcctgtggttccccttcaacagcatgagcagcggcgtgaagaaggagtttggccacgagtttgacctgtag

SEQ ID NO: 24240 - DNA, 633 bp, Artificial Sequence
  derived and/or modified sequence
atgtgggtgaccaagctgctgcctgccctgctgctgcagcacgtgctgctgcacctgctgctgctgcccatcgccatcccctatgcagagggccagaggaagagaagaaacaccatccacgagttcaagaagagcgccaagaccaccctcatcaagattgatcctgccctgaagatcaagaccaagaaggtgaacacagctgaccagtgtgccaaccgctgcaccaggaacaagggcctgcccttcacctgcaaggcctttgtgtttgacaaggccaggaagcagtgcctgtggttccccttcaacagcatgagcagcggcgtgaagaaggagtttggccacgagtttgacctgtatgagaacaaggactacatccggaactgcatcatcggcaagggccgcagctacaagggcaccgtgtccatcaccaagagcggcatcaagtgccagccctggagctccatgatcccccatgagcacagcttcctgcccagcagctaccggggcaaggacctgcaggagaactactgcaggaaccccagaggagaggagggcggcccctggtgcttcaccagcaaccctgaggtgcgctatgaggtgtgtgacatcccccagtgcagcgagggcaagtag

SEQ ID NO: 24241 - DNA, 555 bp, Artificial Sequence
  derived and/or modified sequence
atgtgggtgaccaagctgctgcccgccctgctgctgcagcacgtgcttttgcacctgctgctcttacccatagccatcccatatgccgagggccagcgcaagagaagaaacacaatacatgagtttaagaagtctgctaagaccacgttgatcaagatagaccccgcgctgaaaattaagactaaaaaggtaaataccgcggaccagtgtgcaaaccggtgcacaagaaacaaggggctgcccttcacatgtaaggcctttgtgtttgacaaggcaagaaaacagtgcctctggttcccttttaactccatgtcttccggcgtcaagaaggaatttgggcatgaatttgatctctatgagaataaggactatatcaggaattgcattattggcaaaggccggtcgtataaaggaactgtgagcatcactaagtctggaattaagtgtcaaccctggtcctctatgatcccccatgagcatagcggaggcgatgattgtttggttgagagcaccttctactccatcccattctgggggcacaactcagcgcggtag

SEQ ID NO: 24242 - DNA, 426 bp, Artificial Sequence
  derived and/or modified sequence
atgtgggtgaccaagctgctgcccgccctgctgctgcagcacgtgctcctgcatctcctcctgctgcccatcgccattccctacgcggagggtcaacggaaaaggcggaacacaatccacgagttcaaaaaatccgcgaagactactctaattaagatagacccagcactgaagatcaagaccaaaaaggttaatacggccgaccagtgtgccaacaggtgcacaagaaacaaaggcctgccctttacttgcaaggctttcgtctttgataaggccaggaagcaatgtctgtggttcccctttaactctatgtccagcggagtgaagaaagagttcggccacgagttcgatctgtacgagaacaaagattacattcggaattgtattattggcaagggaagaagctacaaaggcaccgtcagctag

SEQ ID NO: 24243 - DNA, 357 bp, Artificial Sequence
  derived and/or modified sequence
atgtgggtgaccaagctgctgcccgccctgctgctgcagcacgtgttgctacacctgctgctccttcctatcgccattccgtacgccgagggccagcggaagcgacgaaacacgatccacgaatttaaaaagtctgcaaagacaactttgattaaaatagaccctgccctgaagattaaaactaagaaagttaacacggcggatcagtgcgcaaaccgttgtactcggaataagggcctgccttttacttgtaaagcatttgtctttgacaaagctagaaagcagtgcttgtggtttccatttaatagcatgagctcaggggtcaagaaggaatttggtcatgagtttgacctctag

SEQ ID NO: 24244 - DNA, 633 bp, Artificial Sequence
  derived and/or modified sequence
atgtgggtgaccaagctgctgcccgccctgctgctgcagcacgtgctgctccacctccttctgctccccatcgcaattccatatgcggaagggcagcgtaaacgtaggaatactattcatgagtttaagaaatctgcaaaaactacgctgatcaagattgaccccgctctcaaaatcaagactaaaaaagttaataccgcggatcagtgcgctaacagatgtactaggaataaagggctcccattcacttgtaaggcattcgtattcgataaggcccggaagcaatgtctatggtttcccttcaacagtatgtctagtggcgtgaagaaagaatttgggcacgagtttgacctatatgagaataaagactatatcagaaactgtattattgggaagggaagatcctacaagggcactgtcagtataactaagagcgggattaaatgtcagccttggagtagcatgattccacacgaacatagctttctcccttccagctatcgtggaaaggacctccaggaaaactattgtaggaacccccggggcgaagaaggaggcccctggtgcttcactagtaaccccgaggtacggtatgaagtttgcgacatcccacaatgtagcgaaggcaagtag

SEQ ID NO: 24245 - DNA, 1425 bp, Artificial Sequence
  derived and/or modified sequence
atgtgggtgaccaaactcctgccagccctgctgctgcagcatgtcctcctgcatctcctcctgctccccatcgccatcccctatgcagagggacaaaggaaaagaagaaatacaattcatgaattcaaaaaatcagcaaagactaccctaatcaaaatagatccagcactgaagataaaaaccaaaaaagtgaatactgcagaccaatgtgctaatagatgtactaggaataaaggacttccattcacttgcaaggcttttgtttttgataaagcaagaaaacaatgcctctggttccccttcaatagcatgtcaagtggagtgaaaaaagaatttggccatgaatttgacctctatgaaaacaaagactacattagaaactgcatcattggtaaaggacgcagctacaagggaacagtatctatcactaagagtggcatcaaatgtcagccctggagttccatgataccacacgaacacagtggtggtgatgactgccttgttgaatccactttttattctattccattttggggacacaattctgcaagatgattcttcattaggaaacagagatgagttattgaccaacacagaaagaaaaagagtttgttgctccacactgggattaaacctatgatcttggcctaattaacactagctagtaagtgtccaagctgatcatctctacaacatttcaataacagaaaacaacaattttcaaaattagttacttacaattatgtagaaatgcctctaaaacacagtattttccttatattacaaaaacaaaaattataattggttttgtcctcttttgagagtttgcatggtgttactccctgcatagtgaagaaaacattttatttaagtagatggatctaagtttttcatgaacaaaggaatgacatttgaaatcaatcctaccctagtccaggagaatgcattagattaacctagtagaggtcttatttcaccctgagttttctatgatcgtgattctctgctggaggagtaattgtgaaatagatctctctgggaactggcttcctagtccaatcagctcttttaccaatgaacacttccttgtgatatagatgtttatggccgagaggatccagtatattaataaaatccctttttgtattcaatgagggaaacacataattttcatcaattagcagcttattggaatatctgcatgatggtttaacacttttaagtgttgactaaagattaattttacagaaaatagaaaaagaaatatgtttctgtctggaggaatgatttattgttgacccctaaattgaaatattttactagtggcttaatggaaagatgatgaaagatgatgaaattaatgtagaagcttaactagaaaatcaggtgacctgatatctacatctgtatccttcattggccacc

SEQ ID NO: 24246 - DNA, 555 bp, Artificial Sequence
  derived and/or modified sequence
atgtgggtaaccaagcttcttcctgcgttactgttacagcacgtcctcctgcacctactccttctgccgattgccattccatacgcggaaggccagcgtaaacgcaggaacactatccacgaatttaagaaaagcgctaaaaccactctcattaaaatagatccggcactcaaaattaaaacgaagaaagtcaatacggctgatcagtgcgcaaatcggtgcaccaggaataaaggcctgccttttacatgcaaagcatttgtttttgataaggccaggaaacagtgcctctggttccctttcaacagcatgtccagcggagtgaagaaggaattcggacacgagtttgacttatatgagaacaaggactatattaggaattgtataataggtaaaggcagatcatacaaggggaccgtatcgatcacaaagagcggaatcaaatgccagccatggtcttctatgatcccccacgaacactcaggaggcgatgactgtctggtagaaagtaccttttattctattcccttctgggggcataactcagctagatag

SEQ ID NO: 24247 - DNA, 426 bp, Artificial Sequence
  derived and/or modified sequence
atgtgggtgacgaaattgctgcctgctctcctgctgcagcacgtactgctccacttgcttttattgcctattgccatcccctacgctgaaggacagcggaaaaggagaaacaccattcatgaatttaagaagagtgccaagacgacactgatcaagatcgaccccgctctgaagattaaaactaaaaaggtgaataccgccgatcaatgtgcaaatcggtgtacccggaacaagggactcccctttacctgtaaagcattcgtgtttgacaaggcgcgtaagcagtgcttgtggtttccatttaatagcatgtcctcgggtgttaaaaaagaatttggtcacgagttcgacttatacgagaacaaagattatatcaggaactgtatcatcgggaaaggtagatcatataaaggcacagtatcttag

SEQ ID NO: 24248 - DNA, 357 bp, Artificial Sequence
  derived and/or modified sequence
atgtgggtaactaagttactgcctgcactgctactccaacacgtgctattgcatctgctcctcctgcccatcgcgatcccctatgcagaagggcagcgcaagcgccgaaatactatacatgagttcaaaaagtccgcaaaaaccactctaattaagatcgatccagcgctcaagataaaaaccaaaaaagtgaatactgccgatcagtgcgcaaacagatgtaccaggaataaaggcctcccttttacctgcaaggccttcgtgtttgataaggcaagaaagcaatgtctgtggttcccttttaacagcatgtctagtggagtgaaaaaagagtttggccacgaattcgacctgtag

SEQ ID NO: 24249 - DNA, 633 bp, Artificial Sequence
  derived and/or modified sequence
atgtgggtgactaaattactccctgcactcctgctgcagcacgtcctcttacacctcctccttcttccgattgccatcccatatgccgaaggtcagaggaagcgcaggaataccatacatgaattcaagaaatctgctaaaacaacactcattaagatagaccccgctctgaagatcaaaacgaagaaagtgaatacagctgaccaatgcgccaatagatgtactcggaacaaagggctaccattcacctgcaaggccttcgtgttcgataaggcaaggaagcagtgtttgtggtttcctttcaacagcatgagctccggtgtcaaaaaggagttcggccatgaattcgacttgtacgaaaacaaggattacatccggaactgtatcatcggaaaaggacggagttacaagggtactgtaagcattacgaagtccggtatcaaatgtcagccctggtccagcatgatcccgcacgaacacagcttccttccttcctcctataggggcaaagatctgcaggaaaactactgcaggaaccctagaggggaggaggggggtccctggtgttttaccagtaaccccgaggttcggtacgaagtttgcgacatcccccagtgctccgagggaaagtag

SEQ ID NO: 24250 - DNA, 590 bp, Artificial Sequence
  derived and/or modified sequence
attgggctcagccttgctcctcccttccttactcggataggagccactgggatctggagctccagcttccaaattgaagctggcctcaggccaggtgaccttttctttgattctttcacccaggcatctcctccagagggatccgccagcccgtccagcagcaccatgtgggtgaccaaactcctgccagccctgctgctgcagcatgtcctcctgcatctcctcctgctccccatcgccatcccctatgcagagggacaaaggaaaagaagaaatacaattcatgaattcaaaaaatcagcaaagactaccctaatcaaaatagatccagcactgaagataaaaaccaaaaaagtgaatactgcagaccaatgtgctaatagatgtactaggaataaaggacttccattcacttgcaaggcttttgtttttgataaagcaagaaaacaatgcctctggttccccttcaatagcatgtcaagtggagtgaaaaaagaatttggccatgaatttgacctctatgaaaacaaagactacattagaaactgcatcattggtaaaggacgcagctacaagggaacagtatctat

SEQ ID NO: 24251 - DNA, 545 bp, Artificial Sequence
  derived and/or modified sequence
attgagcgaattggtcccctgcctgtgccttgatttagccattgggctcagccttgctcctcccttccttactcggataggagccactgggatctggagctccagcttccaaattgaagctggcctcaggccaggtgaccttttctttgcatctcctccagagggatccgccagcccgtccagcagcaccatgtgggtgaccaaactcctgccagccctgctgctgcagcatgtcctcctgcatctcctcctgctccccatcgccatcccctatgcagagggacaaaggaaaagaagaaatacaattcatgaattcaaaaaatcagcaaagactaccctaatcaaaatagatccagcactgaagataaaaaccaaaaaagtgaatactgcagaccaatgtgctaatagatgtactaggaataaaggacttccattcacttgcaaggcttttgtttttgataaagcaagaaaacaatgcctctggttccccttcaatagcatgtcaagtggagtgaaaaaagaatttggccatgaatttgacctct

SEQ ID NO: 24252 - DNA, 1990 bp, Artificial Sequence
  derived and/or modified sequence
cacacaacaaacttagctcatcgcaataaaaagcagctcagagccgactggctcttttaggcactgactccgaacaggattctttcacccaggcatctcctccagagggatccgccagcccgtccagcagcaccatgtgggtgaccaaactcctgccagccctgctgctgcagcatgtcctcctgcatctcctcctgctccccatcgccatcccctatgcagagggacaaaggaaaagaagaaatacaattcatgaattcaaaaaatcagcaaagactaccctaatcaaaatagatccagcactgaagataaaaaccaaaaaagtgaatactgcagaccaatgtgctaatagatgtactaggaataaaggacttccattcacttgcaaggcttttgtttttgataaagcaagaaaacaatgcctctggttccccttcaatagcatgtcaagtggagtgaaaaaagaatttggccatgaatttgacctctatgaaaacaaagactacattagaaactgcatcattggtaaaggacgcagctacaagggaacagtatctatcactaagagtggcatcaaatgtcagccctggagttccatgataccacacgaacacagctttttgccttcgagctatcggggtaaagacctacaggaaaactactgtcgaaatcctcgaggggaagaagggggaccctggtgtttcacaagcaatccagaggtacgctacgaagtctgtgacattcctcagtgttcagaaggtaaataaacctgaatgccatgtgggccattctattccccctatgtgtagaactgtaactcacattaaaggttaacagcaacgaatcaatcataacaaatatgttgttcgtgcaaatgcaactacaaataattatttaaacatttttatacaatgtttttaaaactgttggattatcaccagattaatgcaaaataacagagcgagttatcagtttgaatttcaacactgcctgagacatccctctggggaaagtgaaagagagggtttacttacctactgtcttgagctcacatacctcaaaatctactactgtgtggcacctgaaaggagttgaatgaagcttagcctttcattagcaatgttaattctattcaaccagcacctgcttccacagaaattctgtccaaactatcatgaagtggtgtgacaagggtatatggacccagaagataatacaatataagaagggatcactggaagcttgaccccatgcacattttggtgaaaatgtgcctagaatcaaatgtgacacgtaggctggaactgagtaccattcagaataggatctgaagagatcaaagcaatggagaccaccaaactgtcttgaaggcatgtctatggaccttaagtccatgtctatgttttcagctcttctcacagcataaaagggcattgtccttacttttgcagtggaaaactgaatggctgacaagatggaagagtaaccatttcagcattgtatgtggtttcatttttcttagttatctggctactgaatagccggatttttcagttctgtcagaaactctaaatttccaaaaatctaagtgaaacatggatgaaactctgttagaaaattgttaggattttggagtatttggggagggggactactggaatgctgtccaagttttatactaagatatcttacctgtttgttattaaccaaatatttttaaaaatatttcctccataaatattcatttaatattaggttgatatttatcacataaaaagtaaaggctactgttagctaattgtcacagagaaggatttgttttctgttgttagtgaatttgaaatccttgactttatgtgctacagccagttccatctctgtttgtaaattcttactttccattccatatcatattctgttccctataacctcttcattgttttcttttcttttaaaaataataaacttttctatgatcacgttttgaaca

SEQ ID NO: 24253 - protein, 1086 aa, Artificial Sequence
  derived and/or modified sequence
MLEARPPRTQGSDAAGAAAGRGLRALLLSLTAAAGIWGSMGERSAYQRLAGGEEGPQRLGGGRMQPEEGTGWLLELLSEVQLQQYFLRLRDDLNVTRLSHFEYVKNEDLEKIGMGRPGQRRLWEAVKRRKALCKRKSWMSKVFSGKRLEAEFPPHHSQSTFRKTSPAPGGPAGEGPLQSLTCLIGEKDLRLLEKLGDGSFGVVRRGEWDAPSGKTVSVAVKCLKPDVLSQPEAMDDFIREVNAMHSLDHRNLIRLYGVVLTPPMKMVTELAPLGSLLDRLRKHQGHFLLGTLSRYAVQVAEGMGYLESKRFIHRDLAARNLLLATRDLVKIGDFGLMRALPQNDDHYVMQEHRKVPFAWCAPESLKTRTFSHASDTWMFGVTLWEMFTYGQEPWIGLNGSQILHKIDKEGERLPRPEDCPQDIYNVMVQCWAHKPEDRPTFVALRDFLLEAQPTDMRALQDFEEPDKLHIQMNDVITVIEGRAENYWWRGQNTRTLCVGPFPRNVVTSVAGLSAQDISQPLQNSFIHTGHGDSDPRHCWGFPDRIDELYLGNPMDPPDLLSVELSTSRPPQHLGGVKREPPPRPPQPAFFTQKPTYDPVSEDQDPLSSDFKRLGLRKPGLPRGLWLAKPSARVPGTKASRGSGAEVTLIDFGEEPVVPALRPCAPSLAQLAMDACSLLDETPPQSPTRALPRPLHPTPVVDWDARPLPPPPAYDDVAQDEDDFEICSINSTLVGAGVPAGPSQGQTNYAFVPEQARPPPPLEDNLFLPPQGGGKPPSSAQTAEIFQALQQECMRQLQAPAGSPAPSPSPGGDDKPQVPPRVPIPPRPTRPHVQLSPAPPGEEETSQWPGPASPPRVPPREPLSPQGSRTPSPLVPPGSSPLPPRLSSSPGKTMPTTQSFASDPKYATPQVIQAPGPRAGPCILPIVRDGKKVSSTHYYLLPERPSYLERYQRFLREAQSPEEPTPLPVPLLLPPPSTPAPAAPTATVRPMPQAALDPKANFSTNNSNPGARPPPPRATARLPQRGCPGDGPEAGRPADKIQMVEQLFGLGLRPRGECHKVLEMFDWNLEQAGCHLLGSWGPAHHKR

SEQ ID NO: 24254 - protein, 97 aa, Artificial Sequence
  derived and/or modified sequence
MQPEEGTGWLLELLSEVQLQQYFLRLRDDLNVTRLSHFEYVKNEDLEKIGMGRPGQRRLWEAVKRRKALCKRKSWMSKVFSGKRLEAEFPPHHSQST

SEQ ID NO: 24255 - DNA, 1587 bp, Artificial Sequence
  derived and/or modified sequence
atgcagcccgaggagggcaccggctggctgctggagctgctgagcgaggtgcagctgcagcagtacttcctgagactgagagacgacctgaacgtgaccagactgagccacttcgagtacgtgaagaacgaggacctggagaagatcggcatgggcagacccggccagagaagactgtgggaggccgtgaagagaagaaaggccctgtgcaagagaaagagctggatgagcaaggtgttcagcggcaagagactggaggccgagttccccccccaccacagccagagcaccttcagaaagaccagccccgcccccggcggccccgccggcgagggccccctgcagagcctgacctgcctgatcggcgagaaggacctgagactgctggagaagctgggcgacggcagcttcggcgtggtgagaagaggcgagtgggacgcccccagcggcaagaccgtgagcgtggccgtgaagtgcctgaagcccgacgtgctgagccagcccgaggccatggacgacttcatcagagaggtgaacgccatgcacagcctggaccacagaaacctgatcagactgtacggcgtggtgctgaccccccccatgaagatggtgaccgagctggcccccctgggcagcctgctggacagactgagaaagcaccagggccacttcctgctgggcaccctgagcagatacgccgtgcaggtggccgagggcatgggctacctggagagcaagagattcatccacagagacctggccgccagaaacctgctgctggccaccagagacctggtgaagatcggcgacttcggcctgatgagagccctgccccagaacgacgaccactacgtgatgcaggagcacagaaaggtgcccttcgcctggtgcgcccccgagagcctgaagaccagaaccttcagccacgccagcgacacctggatgttcggcgtgaccctgtgggagatgttcacctacggccaggagccctggatcggcctgaacggcagccagatcctgcacaagatcgacaaggagggcgagagactgcccagacccgaggactgcccccaggacatctacaacgtgatggtgcagtgctgggcccacaagcccgaggacagacccaccttcgtggccctgagagacttcctgctggaggcccagcccaccgacatgagagccctgcaggacttcgaggagcccgacaagctgcacatccagatgaacgacgtgatcaccgtgatcgagggcagagccgagaactactggtggagaggccagaacaccagaaccctgtgcgtgggccccttccccagaaacgtggtgaccagcgtggccggcctgagcgcccaggacatcagccagcccctgcagaacagcttcatccacaccggccacggcgacagcgaccccagacactgctggggcttccccgacagaatcgacgagtgccccttcagcgccttcagccccggccacccccccgccgagacctgcggccaggtgctgtggaccggcagaagagaggcctgcgccagcgaccccagactgcaccccgtgagcagcagaaccaagggcctgtag

SEQ ID NO: 24256 - DNA, 3261 bp, Artificial Sequence
  derived and/or modified sequence
atgctggaggccagaccccccagaacccagggcagcgacgccgccggcgccgccgccggcagaggcctgagagccctgctgctgagcctgaccgccgccgccggcatctggggcagcatgggcgagagaagcgcctaccagagactggccggcggcgaggagggcccccagagactgggcggcggcagaatgcagcccgaggagggcaccggctggctgctggagctgctgagcgaggtgcagctgcagcagtacttcctgagactgagagacgacctgaacgtgaccagactgagccacttcgagtacgtgaagaacgaggacctggagaagatcggcatgggcagacccggccagagaagactgtgggaggccgtgaagagaagaaaggccctgtgcaagagaaagagctggatgagcaaggtgttcagcggcaagagactggaggccgagttccccccccaccacagccagagcaccttcagaaagaccagccccgcccccggcggccccgccggcgagggccccctgcagagcctgacctgcctgatcggcgagaaggacctgagactgctggagaagctgggcgacggcagcttcggcgtggtgagaagaggcgagtgggacgcccccagcggcaagaccgtgagcgtggccgtgaagtgcctgaagcccgacgtgctgagccagcccgaggccatggacgacttcatcagagaggtgaacgccatgcacagcctggaccacagaaacctgatcagactgtacggcgtggtgctgaccccccccatgaagatggtgaccgagctggcccccctgggcagcctgctggacagactgagaaagcaccagggccacttcctgctgggcaccctgagcagatacgccgtgcaggtggccgagggcatgggctacctggagagcaagagattcatccacagagacctggccgccagaaacctgctgctggccaccagagacctggtgaagatcggcgacttcggcctgatgagagccctgccccagaacgacgaccactacgtgatgcaggagcacagaaaggtgcccttcgcctggtgcgcccccgagagcctgaagaccagaaccttcagccacgccagcgacacctggatgttcggcgtgaccctgtgggagatgttcacctacggccaggagccctggatcggcctgaacggcagccagatcctgcacaagatcgacaaggagggcgagagactgcccagacccgaggactgcccccaggacatctacaacgtgatggtgcagtgctgggcccacaagcccgaggacagacccaccttcgtggccctgagagacttcctgctggaggcccagcccaccgacatgagagccctgcaggacttcgaggagcccgacaagctgcacatccagatgaacgacgtgatcaccgtgatcgagggcagagccgagaactactggtggagaggccagaacaccagaaccctgtgcgtgggccccttccccagaaacgtggtgaccagcgtggccggcctgagcgcccaggacatcagccagcccctgcagaacagcttcatccacaccggccacggcgacagcgaccccagacactgctggggcttccccgacagaatcgacgagctgtacctgggcaaccccatggacccccccgacctgctgagcgtggagctgagcaccagcagacccccccagcacctgggcggcgtgaagagagagcccccccccagacccccccagcccgccttcttcacccagaagcccacctacgaccccgtgagcgaggaccaggaccccctgagcagcgacttcaagagactgggcctgagaaagcccggcctgcccagaggcctgtggctggccaagcccagcgccagagtgcccggcaccaaggccagcagaggcagcggcgccgaggtgaccctgatcgacttcggcgaggagcccgtggtgcccgccctgagaccctgcgcccccagcctggcccagctggccatggacgcctgcagcctgctggacgagacccccccccagagccccaccagagccctgcccagacccctgcaccccacccccgtggtggactgggacgccagacccctgccccccccccccgcctacgacgacgtggcccaggacgaggacgacttcgagatctgcagcatcaacagcaccctggtgggcgccggcgtgcccgccggccccagccagggccagaccaactacgccttcgtgcccgagcaggccagaccccccccccccctggaggacaacctgttcctgcccccccagggcggcggcaagccccccagcagcgcccagaccgccgagatcttccaggccctgcagcaggagtgcatgagacagctgcaggcccccgccggcagccccgcccccagccccagccccggcggcgacgacaagccccaggtgccccccagagtgcccatcccccccagacccaccagaccccacgtgcagctgagccccgccccccccggcgaggaggagaccagccagtggcccggccccgccagcccccccagagtgccccccagagagcccctgagcccccagggcagcagaacccccagccccctggtgccccccggcagcagccccctgccccccagactgagcagcagccccggcaagaccatgcccaccacccagagcttcgccagcgaccccaagtacgccaccccccaggtgatccaggcccccggccccagagccggcccctgcatcctgcccatcgtgagagacggcaagaaggtgagcagcacccactactacctgctgcccgagagacccagctacctggagagataccagagattcctgagagaggcccagagccccgaggagcccacccccctgcccgtgcccctgctgctgcccccccccagcacccccgcccccgccgcccccaccgccaccgtgagacccatgccccaggccgccctggaccccaaggccaacttcagcaccaacaacagcaaccccggcgccagaccccccccccccagagccaccgccagactgccccagagaggctgccccggcgacggccccgaggccggcagacccgccgacaagatccagatggtggagcagctgttcggcctgggcctgagacccagaggcgagtgccacaaggtgctggagatgttcgactggaacctggagcaggccggctgccacctgctgggcagctggggccccgcccaccacaagagatag

SEQ ID NO: 24257 - DNA, 1587 bp, Artificial Sequence
  derived and/or modified sequence
atgcagcctgaggaaggcaccggatggcttctggagctcctgtccgaggtgcaacttcagcagtacttcctccggctcagggacgaccttaacgttacaagactatctcacttcgagtacgtgaagaacgaagatctcgagaaaattggcatgggtcgaccgggacagaggcggctttgggaagccgtaaaacgtcgtaaggccctgtgcaagaggaagagttggatgtctaaggtgttcagcggcaaacgccttgaggcggaattccctccacatcacagtcagagtacatttcggaagactagccccgccccaggtggcccagctggagagggacccttgcagagtctaacctgcctgatcggggagaaggacttaagactattggaaaaactgggcgatggctctttcggtgttgtgaggcggggggaatgggatgccccctcaggaaagacagtgagcgtggccgtcaaatgtcttaagcctgacgtactttctcagcctgaagcgatggatgactttattcgggaggttaatgcgatgcatagtctggatcacaggaacttgatccgcctttacggagtggtgctgacaccccctatgaagatggttactgagctggctccccttggctccctgttagatcgtttgcgcaaacatcagggacacttcctgctcggtaccctctcaaggtatgcagtgcaggtcgcagaggggatggggtacctcgagagcaagcgatttattcaccgggacctcgcagcccgaaacctgcttctggctactcgcgatctggtaaagattggtgatttcggcctcatgcgggccttaccacagaacgacgatcattatgtcatgcaggaacatcgcaaggtgccgtttgcctggtgcgctcccgagagcttaaagactcgcaccttcagccatgcatctgacacatggatgtttggtgtcaccctgtgggagatgttcacctacggacaggaaccttggataggtctgaatggctcccagatccttcacaagatcgacaaggagggtgagaggcttccgagaccagaagattgtcctcaagatatttataacgtgatggtccagtgctgggcacataaacccgaagatcgccctaccttcgtggccttgcgggattttctcctggaagcacagcctacggacatgcgcgcactccaggactttgaggaacctgataagctgcacatccagatgaacgatgttattaccgttattgaaggcagggcagaaaactactggtggcgcggacagaatacgaggactctttgtgtgggacccttccctcggaacgtggtcacttctgtggcgggcctatctgcccaggatatatctcagccgctgcaaaacagcttcatccacacaggccacggagacagcgacccaaggcattgttggggctttccagaccgtatcgatgaatgccccttcagcgcctttagtcccggacatcccccggccgagacgtgcgggcaggtcctctggacaggccggcgggaggcatgtgcatctgatccacggttacaccctgtgtcaagccgcacaaaagggctctag

SEQ ID NO: 24258 - DNA, 3261 bp, Artificial Sequence
  derived and/or modified sequence
atgctggaggcccggccaccgcgcacccagggatcagatgctgccggcgcggctgcagggcgaggccttcgcgcattactgttaagcctgaccgcggcagcaggcatatggggatctatgggcgagagaagcgcttaccaacggctggctggcggagaggaagggccccagcgcctcggcggcgggaggatgcagcccgaggagggcactgggtggttgctggaactcttatcagaggtgcagctgcagcagtatttcctcaggcttagagacgacctcaatgttacacggttgtcacatttcgagtatgtaaagaatgaagaccttgagaaaatcggcatgggtaggccgggccagagacggctgtgggaggccgtcaagagacgaaaggccctgtgcaagagaaaaagttggatgtccaaagttttttccgggaaaagactcgaggcagagtttccgccgcatcactcacagtctacctttaggaaaacaagcccagcgccaggcggtccagcgggcgaagggcctctacagtccctaacctgcctcattggggagaaggacttacgccttctcgagaaactcggagacggaagctttggcgttgttaggcgcggtgagtgggatgcaccaagcggcaaaactgtctcggttgcagttaagtgcctcaagcctgatgtgctctcccagccggaggctatggacgattttattcgcgaggtcaacgctatgcacagtctggaccacagaaatcttattcgtctatacggggtggtcttgaccccacccatgaaaatggtgacagagttagctcctttgggaagtctcctggaccgattaagaaagcaccaagggcactttctgcttgggacactttccagatatgccgttcaggtggctgagggcatgggctatctcgagtctaagcggttcatccatagggacctggcggcaagaaacctgctgctggctacacgggacctcgtcaagattggcgacttcggtctgatgcgagcactaccccagaacgatgaccattatgtgatgcaggagcatcgaaaggtgccatttgcctggtgtgctcccgaaagcttgaaaacaaggacgttttcacacgcatctgacacctggatgtttggagttacactttgggaaatgttcacatacggccaggagccctggattggcttgaatggctctcagattctccataaaatcgacaaggagggcgagaggctgccaagacccgaggattgcccccaggatatctacaatgtgatggttcagtgctgggcgcataaacctgaggatcgacccaccttcgttgctctgcgagacttcctcctggaagcacaaccaactgatatgagagccctccaggatttcgaagagcccgataagttgcacatccagatgaatgatgtcatcaccgtaattgagggtagagctgaaaactattggtggcggggacagaacactcggacactatgcgtagggccatttccgcggaatgtcgtcacatcagtagcggggctttcagcacaagacatatcgcagccgctgcagaactctttcatccacactgggcatggcgattccgatccacgccactgttggggattcccagacaggattgatgagctctacctcgggaacccgatggatccacccgacttattatctgtagagctcagcacttccaggccaccgcaacacttagggggcgtgaagagggaaccgcccccacggcctccccagcccgccttcttcacgcaaaagccaacctacgacccggtgtccgaagaccaagacccactgagctctgactttaaaaggctggggctgcgcaagccagggctgccgaggggattatggttggccaagcctagtgccagagtgcctggaaccaaggctagccggggttccggcgcggaggtgacactgattgacttcggtgaagagcccgtggtacctgcactgcggccatgcgccccgagtctggcccagctggctatggatgcctgttcgctgctggacgaaacaccaccacaaagccctacacgggcccttcccagacccctgcaccccacgccagtagtcgattgggacgcccgccccctgcccccccctcccgcttacgacgatgtcgcgcaagatgaagatgactttgagatctgttccatcaactctaccctggttggagcaggagtccccgccggacccagccaggggcaaactaactatgcattcgtacctgaacaggcccgtcccccaccccccctggaagataatctatttctgccaccccagggcggtgggaaacccccctcatcggcccagacggccgagattttccaagctctgcagcaggaatgcatgaggcagctgcaggcacctgccgggtcaccggcaccgtccccaagcccggggggcgacgataaaccacaggtgccgccccgggtgcccattccccctagaccaaccagaccacatgtgcagttgtccccggctccgccaggggaggaggagacatcgcagtggcccggccccgccagccctccccgagtgccccctagagaaccattgtccccccaggggagtagaaccccatccccactggtcccacccggatcgtctccactgccgcctcggctctccagcagtcctgggaaaaccatgcccacgacccagtcctttgccagcgatcctaagtacgccacccctcaggttatacaagccccaggcccccgtgctggaccctgcattctgcctattgtgcgggacggtaagaaggttagcagcactcattactacctactgcctgagagaccctcctacctagagcgctaccaacgcttccttagagaagctcagagtcctgaggaacccactcctctccctgttccactgctcttaccgccacccagcacgccagcaccagccgcaccgacagccaccgtgcggccaatgcctcaggctgcgttggaccctaaagctaacttttctaccaacaattcaaaccccggggcccgcccaccacccccacgtgctactgcccgcctgccccaaagaggttgccctggcgatgggcctgaagccggaaggcctgccgataagatccagatggtggagcagctgttcggcctgggtctccggcctaggggcgagtgtcacaaagtcctggagatgtttgactggaacctcgaacaggcaggatgccatctgttgggctcctgggggcccgcccaccataagcgatag

SEQ ID NO: 24259 - DNA, 1587 bp, Artificial Sequence
  derived and/or modified sequence
atgcagcctgaggagggcaccggctggctgctggagctgctgtctgaggtgcagctgcagcagtacttcctgcggctgagagatgacctgaatgtgacccggctgagccactttgaatatgtgaagaatgaagacctggagaagattggcatgggccggcccggccagaggcggctgtgggaggccgtgaagaggaggaaggccctgtgcaagaggaagtcctggatgagcaaggtgttttctgggaagaggctggaggccgagttccccccccaccacagccagagcaccttcaggaagaccagccctgcccctgggggccctgctggggagggccccctgcagagcctgacctgcctgattggagagaaggacctgcggctgctggagaagctgggagatggcagctttggagtggtgagaagaggagagtgggatgcccccagcggcaagacagtgtctgtggccgtgaagtgcctgaagccagatgtgctgagccagcctgaggccatggatgacttcatccgggaggtgaatgccatgcacagcctggaccacaggaacctgatccggctgtatggagtggtgctgaccccacccatgaagatggtgacagagctggcccccctgggcagcctgctggaccggctgaggaagcaccagggccacttcctgctgggcaccctgagccgctatgctgtgcaggtggccgagggcatgggctacctggagagcaagcgcttcatccaccgggacctggccgccaggaacctgctgctggccacccgggacctggtgaagatcggggactttggcctgatgagggccctgccccagaatgatgaccactacgtgatgcaggagcacaggaaggtgccctttgcctggtgtgcccctgagagcctgaagaccaggaccttcagccacgccagtgacacctggatgtttggagtgaccctgtgggagatgttcacctacggccaggagccctggattggcctgaatggcagccagatcctgcacaagattgacaaggagggggagcggctgcccaggcctgaggactgcccccaggacatctacaacgtgatggtgcagtgctgggcccacaagccagaagatcggcccacctttgtggccctgcgggacttcctgctggaggcccagcccacagacatgagggccctgcaggactttgaggagccagacaagctgcacatccagatgaatgatgtgatcaccgtcatcgagggccgggcagagaactactggtggaggggccagaacaccaggaccctgtgtgtgggccccttccccagaaatgtggtgacctctgtggccggcctgagcgcccaggacatcagccagcccctgcagaacagcttcatccacactggacatggagacagcgaccccaggcactgctggggcttcccagacagaattgatgagtgccccttcagcgccttcagccctggccaccccccagctgagacctgtggccaggtgctgtggacaggccggcgggaggcctgtgccagtgacccccggctgcaccctgtgagcagcaggaccaagggcctgtag

SEQ ID NO: 24260 - DNA, 3261 bp, Artificial Sequence
  derived and/or modified sequence
atgctggaggcccggccccccaggacccagggcagtgatgctgctggagctgctgctggccggggcctgcgggccctgctgctgagcctgacagctgctgctggcatctggggctccatgggagagaggtctgcctaccagaggctggccggcggggaggagggcccccagaggctgggcggcggccgcatgcagcctgaggagggcaccggctggctgctggagctgctgtctgaggtgcagctgcagcagtacttcctgcggctgagagatgacctgaatgtgacccggctgagccactttgaatatgtgaagaatgaagacctggagaagattggcatgggccggcccggccagaggcggctgtgggaggccgtgaagaggaggaaggccctgtgcaagaggaagtcctggatgagcaaggtgttcagcggcaagaggctggaggccgagttccccccccaccacagccagagcaccttcaggaagaccagccctgcccctgggggccctgctggggagggccccctgcagagcctgacctgcctgattggagagaaggacctgcggctgctggagaagctgggagatggcagctttggagtggtgcggcggggggagtgggatgcccccagcggcaagacagtgtctgtggccgtgaagtgcctgaagccagatgtgctgagccagcctgaggccatggatgacttcatccgggaggtgaatgccatgcacagcctggaccacaggaacctgatccggctgtatggagtggtgctgaccccacccatgaagatggtgacagagctggcccccctgggcagcctgctggaccggctgaggaagcaccagggccacttcctgctgggcaccctgagccgctatgctgtgcaggtggccgagggcatgggctacctggagagcaagcgcttcatccaccgggacctggccgccaggaacctgctgctggccacccgggacctggtgaagattggagactttggcctgatgagggccctgccccagaatgatgaccactacgtgatgcaggagcacaggaaggtgccctttgcctggtgtgcccctgagagcctgaagaccaggaccttcagccacgccagtgacacctggatgtttggagtgaccctgtgggagatgttcacctacggccaggagccctggattggcctgaatggcagccagatcctgcacaagattgacaaggagggggagcggctgcccaggcctgaggactgcccccaggacatctacaacgtgatggtgcagtgctgggcccacaagccagaggaccggcccacctttgtggccctgcgggacttcctgctggaggcccagcccacagacatgagggccctgcaggactttgaggagccagacaagctgcacatccagatgaatgatgtgatcaccgtgattgagggccgggcagagaactactggtggaggggccagaacaccaggaccctgtgtgtgggccccttccccagaaatgtggtgacctctgtggccggcctgagcgcccaggacatcagccagcccctgcagaacagcttcatccacacaggccacggggacagcgaccccaggcactgctggggcttcccagacagaattgatgagctgtacctgggcaaccccatggaccccccagacctgctgtctgtggagctgagcaccagcaggcctccccagcacctgggcggcgtgaagcgggagcccccaccccggcccccccagcctgccttcttcacccagaagcccacctatgaccctgtgtctgaggaccaggaccccctgagcagtgacttcaagaggctgggcctgaggaagccaggcctgccccggggcctgtggctggccaagcccagcgcccgggtgcccggcaccaaggccagccggggcagcggggctgaggtgaccctgattgactttggagaggagcctgtggtgcctgccctgcggccctgtgcccccagcctggcccagctggccatggatgcctgcagcctgctggatgagaccccaccccagagccccacccgggccctgccccggcccctgcaccccacccctgtggtggactgggatgcccggcccctgcccccacctccagcctatgatgatgtggcccaggatgaagatgactttgagatctgcagcatcaacagcaccctggtgggcgccggcgtgcctgctggccccagccagggccagaccaactatgcctttgtgcctgagcaggcccggcccccaccacccctggaggacaacctcttcctgcccccccagggcggcggcaagccacccagcagcgcccagacagctgagatcttccaggccctgcagcaggagtgcatgaggcagctgcaggccccagctggcagccctgcccccagccccagccctggaggagatgacaagccccaggtgcccccccgggtgcccatccccccccggcccacccggccccacgtgcagctgagccctgcccctcctggagaggaggagaccagccagtggccaggccctgccagccccccccgggtgcccccccgggagcccctgagcccccagggcagcaggacccccagccccctggtgcccccaggcagcagccccctgcccccccggctgagcagcagccctgggaagaccatgcccaccacccagagctttgccagtgaccccaagtatgccaccccccaggtgatccaggcccctggcccccgggccggcccctgcatcctgcccatcgtgagagatggcaagaaggtgagcagcacccactactacctgctgcctgagcggcccagctacctggagcgctaccagcgcttcctgcgggaggcccagagccctgaggagcccacccccctgcctgtgcccctgctgctgcccccacccagcaccccagccccagctgcccccacagccaccgtgcggcccatgccccaggccgccctggaccccaaggccaacttcagcaccaacaacagcaaccctggggcccggcccccaccaccccgggccacagcccggctgccccagaggggctgccctggagatggccctgaggccggccggcctgctgacaagatccagatggtggagcagctgtttggcctgggcctgcggcccagaggagagtgccacaaggtgctggagatgtttgactggaacctggagcaggccggctgccacctgctgggctcctggggccctgcccaccacaagaggtag

SEQ ID NO: 24261 - DNA, 1587 bp, Artificial Sequence
  derived and/or modified sequence
atgcagcccgaggagggcaccggctggctgctggagctgctgagcgaggtgcaattacagcagtactttctcaggctgagagatgatttaaatgttacgcggctcagtcatttcgaatatgtaaaaaacgaagatctggagaagattggtatgggaagaccaggccagcgcaggctgtgggaggcagtaaaaagacgtaaagccttatgcaagaggaagtcttggatgagcaaagtcttttcgggcaaaaggctcgaggctgaattcccccctcaccattcacaatcgaccttccgtaaaactagtccggcccctgggggtcccgctggagaaggaccactgcaatcgctaacctgtctgatcggggagaaggatctgcgcctcttagagaagctgggcgatgggtctttcggtgtggtccgcagaggagagtgggatgcaccctcaggaaaaacggtcagtgtcgcagtgaagtgccttaaacccgacgtgttaagtcaaccagaagcaatggacgatttcatccgcgaggtgaatgctatgcattctctggaccatcgaaatttgattcgcttgtacggagtcgtgttgactccgccaatgaagatggtgactgagctggcaccgctgggatcactgctggatagactacgaaagcaccaggggcactttctgctcggaacactgtccaggtacgccgtacaggtggcggagggtatgggctacctcgagtccaagcgatttatccatcgcgatctggctgcgcgtaacttgctgttagcaacacgggacctggttaagatcggcgacttcggattgatgagggcccttcctcagaacgatgaccattacgtaatgcaagaacatcgcaaggtgccattcgcctggtgtgcccccgagtccctgaaaaccaggacatttagccacgccagcgatacttggatgttcggagtgacactttgggaaatgttcacatatggccaagagccatggattggcctgaacgggagtcagatcttgcataaaattgacaaggagggcgagagactgccgcgaccggaagactgtccacaagacatctataacgtaatggtgcaatgttgggcgcacaaacccgaagatagaccgacctttgtcgccctgcgggacttcctgcttgaggcccagccaactgatatgcgggctctccaagactttgaagagccagacaagctccatattcagatgaatgacgtcatcaccgtgatcgagggacgggccgaaaactattggtggcggggacagaatactcgaaccttatgtgtggggcccttcccacgcaacgtggtaacgtccgtggccgggctgtccgcacaggatatttcccagcccctccagaatagcttcatccataccggacacggcgatagtgatccccgccactgttggggatttcctgacaggatcgatgagtgtccgttctccgccttctctccaggtcatccaccagctgagacgtgtggtcaggtgctgtggaccggccgccgtgaggcatgcgcttcagacccacgattgcatcctgtgtcttctcggactaagggcctctag

SEQ ID NO: 24262 - DNA, 3261 bp, Artificial Sequence
  derived and/or modified sequence
atgctggaggcccggcccccccggacccagggcagcgacgccgccggggctgctgcggggagaggcctgcgggccctcttgttatcattaacagcagccgccgggatctggggatccatgggggagcgttccgcctatcaacgcctcgcaggaggagaagaaggacctcagcggctcgggggtggacgcatgcaaccagaggagggtaccggctggctgttagagctgttaagcgaggtccagctgcagcagtattttctccggctgcgagatgacttgaacgtgacgagactatcgcattttgagtatgtaaaaaacgaggacctggagaagattgggatgggcaggcctgggcagaggcgcctctgggaggcagtaaaacgcaggaaggccctgtgtaagcgcaagtcttggatgtctaaagtcttttcaggtaaacggctcgaggcggagttccctccacatcattcccagagcacattccgaaaaaccagccccgccccaggcggaccagccggagaagggcctctgcagtccctcacctgccttatcggggagaaagacctgaggctgcttgagaagcttggagacggtagcttcggcgtggttcgcagaggtgaatgggatgctccgtctggcaaaactgtgagcgtggccgtcaaatgtttgaagccagacgtcttgtcacagccagaggccatggacgacttcatcagggaagtgaacgctatgcactccctggaccaccgaaatctgattcgcctatatggggtggtcctcaccccacccatgaagatggtcactgagttagctccactggggagcctgttggacaggcttcgaaagcatcagggacacttccttctgggcacgctgagtcggtacgccgtgcaggtagctgagggcatgggctacctggagtccaagcgcttcatacatcgtgatctggcggcgcgtaatctccttttggccaccagggacttggtcaagataggtgacttcggtctcatgagggccctgccccagaacgacgatcattacgttatgcaagagcacaggaaagtgccctttgcctggtgtgcccccgagagcctcaagactagaacattcagtcacgcttctgatacttggatgttcggagtgacactgtgggaaatgttcacttatgggcaagaaccttggatcggcctgaacgggtctcagattttacataagatcgataaagagggtgaaagactgccccggccagaagattgtcctcaggatatttataacgtgatggtccagtgttgggctcataagccggaggataggcccacgtttgtggcattgcgtgatttcttgcttgaggcccagcccactgatatgagggcgctccaggatttcgaggaacccgacaagctgcatattcaaatgaacgatgtaattaccgtgattgagggccgggctgaaaattactggtggagggggcagaacactaggacgctgtgtgtcggacccttccccagaaatgtggttactagcgtggccgggttgtccgctcaggacatatcacaaccactccaaaactctttcatccataccgggcacggagactctgatccccggcactgctggggcttcccagataggatcgatgagttgtatctcggaaatcctatggatccacccgatttgctttcagtagagctgagtacaagccgaccaccccaacacttggggggcgtcaaaagagaacctccgccccggccgccacaaccagcattctttactcagaaacctacatatgatcccgtgtcagaggaccaggatcctctcagctctgatttcaaaaggctaggattacgaaaaccagggctccctagaggtctgtggctggcaaaaccatccgctcgggttcctgggaccaaagcctcccgggggtctggggctgaggttacactgatcgacttcggagaggaacctgtggtacccgcactgcgcccttgcgccccctccctggcccagcttgccatggatgcatgcagtctccttgatgagacccccccgcagagtccgacgagggcactgcctcgacccctgcatccgactccagttgtcgattgggacgcccggcctttgccaccgcctcctgcttatgatgacgttgcccaggacgaggatgattttgagatctgctcaatcaactctacgctggtgggcgccggcgtgcccgctgggccctcccaaggtcagacgaattacgcattcgtacccgagcaagctagaccccctcctcccctggaagacaatctctttcttccacctcaaggcggcggaaaacccccctcttccgcccaaaccgctgagatatttcaggctctgcaacaggagtgcatgcgccagctccaggcaccagcgggtagccctgcgccctctccttctcccggtggcgatgacaagccccaggtaccaccacgcgtcccgatccccccgcgccccacccgcccccacgtacaactttctcccgctccacccggcgaggaggaaacaagccagtggccggggccagcaagcccaccaagggtccctcccagggaaccactgtctcctcagggtagccgaacaccatctcccctcgttcccccagggtcctcgcctctgcccccgcggttgtcctcttcccctggaaagactatgccgaccacgcaatcattcgcatccgaccccaaatatgcaacgccacaagtaatccaagcccccgggcctcgcgccgggccatgcatcctcccaattgttagggacggcaagaaggtttcatcgacacactactacctgcttcccgagaggccatcttatcttgagaggtatcaaaggtttcttcgtgaggcacagtcacccgaggagccaacccctttgcccgtgcccctgctgcttccaccgccttccacaccggcccctgccgctcccaccgccactgttcgccccatgccccaggctgcgctagatccaaaagcaaacttcagcacaaacaacagtaatcccggcgcgagaccaccacctccccgagctacagcaagactacctcagcgtggatgccctggcgacggacctgaggcgggcaggccagccgataagatccaaatggtggagcagctattcggccttggcctccggccgagaggcgaatgccacaaggtcctcgaaatgttcgattggaatctggagcaggctggctgtcatctcctgggcagctggggcccagcccatcacaagcgatag

SEQ ID NO: 24263 - DNA, 1587 bp, Artificial Sequence
  derived and/or modified sequence
atgcagcccgaggaaggaactggatggctgttagaactcctcagcgaggtccaactgcagcaatactttctgaggctgagggacgatctcaacgtgacgcgtctctctcatttcgaatatgtcaagaacgaggatctcgagaagatcggtatgggcaggccaggccagcgtcgactttgggaagctgtaaaaagacgaaaggccctgtgtaaacgaaagtcctggatgtccaaggttttttccgggaaacggctggaagcagaatttccccctcaccactcacagtctacattccgaaaaaccagccccgctcctggcggaccagctggcgagggacccctgcagtccctcacatgtctgattggggagaaggatctgcgactgctagagaagctgggagacggaagcttcggggtcgtccgtcgaggagagtgggatgctccaagcggcaaaactgttagtgtcgcggtgaaatgcctcaagccagatgtgctgtcccaacctgaagcaatggacgacttcattcgagaggttaatgcaatgcactctctcgaccaccggaatcttattagattatatggggttgtcctaaccccaccaatgaaaatggtaaccgaattggcacctttgggtagcctgctcgaccggctgcggaagcaccaaggacatttcctattaggaactttatctaggtatgccgtgcaggtggccgaaggcatggggtacctcgaaagcaaaagattcatccatagggacttggccgcaaggaatctgttattggcaactcgggacctcgttaagattggagacttcggcctcatgcgggcactgcctcagaacgatgaccactacgtcatgcaagagcaccgcaaggtgccttttgcctggtgtgctcctgagtcactcaagacaaggaccttttcacatgcttctgacacttggatgttcggagtaaccttgtgggaaatgttcacctatggccaggaaccatggattggtttgaatggcagccagattctgcacaaaattgacaaggaaggcgaaaggctgcctcgccctgaagactgtccccaggacatatataatgtcatggtgcaatgttgggcgcacaaacccgaagatagaccaacgttcgtggctttacgtgatttcctcctagaggcccagccgactgatatgagggctttgcaggacttcgaggaacccgacaagttgcacattcaaatgaatgacgtgattactgtgatcgaaggacgggctgaaaactattggtggcgaggtcagaacactcgcactctgtgcgtgggcccatttccgaggaacgtggtaacgagcgtggccggactgtccgctcaggacatcagccaacccctgcaaaattcctttatccataccgggcacggagactccgatccacggcattgctggggctttccagacagaattgacgaatgccctttttctgccttttctcctggacatccccctgccgaaacctgcggccaagtcctgtggaccggacgcagagaggcttgcgcctctgaccccaggttgcatcccgtgagtagtaggacgaagggcctctag

SEQ ID NO: 24264 - DNA, 3261 bp, Artificial Sequence
  derived and/or modified sequence
atgctagaggctaggcctccacggactcaaggaagtgacgccgctggagctgcagctggccgtgggctacgagccctgcttctcagtcttaccgccgcagccggtatctggggtagtatgggagagcggagcgcctaccagcgcctggcgggaggagaggaaggacctcagagattgggcggagggagaatgcagcctgaggagggtacaggctggctgctagaacttttgtctgaagtgcagcttcagcagtattttctgcgattgcgcgacgacttaaacgtgactcggctgtctcattttgagtacgtgaaaaatgaggacctggaaaaaatcggaatggggaggcctggacagaggcgcctttgggaggcagtaaagcgcagaaaagccctctgcaagcggaaatcctggatgagcaaggtgttctcgggaaagcggttagaggccgaattccctccccaccacagtcaatctaccttcaggaagacttctcccgctcccggagggcctgcaggcgaaggtccactgcagagcctaacgtgcctgatcggtgaaaaggacctgcgcctgcttgaaaaactcggcgatggatcctttggcgtggtgaggaggggagagtgggacgcgccatctggtaaaactgtgagtgtcgccgtgaagtgtttaaagcctgacgtcctgtcccagcctgaggccatggacgacttcattcgtgaggtgaacgcaatgcattctctggatcacaggaacctgatccgcctatacggtgtggtactgaccccacctatgaagatggtcactgaactcgcccctctgggttcgcttctggaccgactgcgcaagcatcagggacattttctgcttggaaccctgtccagatacgcggtgcaggtggcggagggtatggggtacctcgaaagtaaacgctttattcatagggatctggccgcaagaaacttgctcctcgccacccgggatctcgtaaagataggagacttcgggcttatgcgcgctctcccacaaaacgatgaccactatgtgatgcaggagcacagaaaggtgcccttcgcttggtgtgccccagagagcctcaagacaagaacgttctcacatgcctcggatacctggatgtttggcgttactctgtgggaaatgttcacctatgggcaagagccatggataggcctcaatgggtctcagatcctccacaagatcgataaagaaggcgagagactgccccgtcctgaagactgcccgcaggatatttacaacgtgatggtacagtgttgggcccataagcctgaagatcgccctacatttgttgcactgagagatttcctgctggaggcgcaacccacagatatgcgagccctgcaggactttgaggaacctgacaaactgcatatccagatgaatgacgttattactgtaattgagggcagggccgaaaactattggtggcggggtcagaatacccgcacgctgtgtgtggggccttttcctcggaatgtggtgacgtccgtggcaggcctcagcgcccaggacatctcacagccactgcagaatagctttatccatacggggcatggagattccgatcctcggcattgttggggcttccctgacagaatcgacgagctgtatctgggtaatccaatggatcctccagacttgctgtcagtcgagctttctacaagcagaccccctcagcatctaggcggagttaagcgcgagccgcctcctcgaccgcctcagcctgccttctttactcagaagcctacttacgatcctgtctccgaggatcaagatcctttgagttccgattttaagagactgggcctccgcaagcctggactccctagaggcctgtggctggcaaagccatccgctagagtgccaggcacaaaggcatctcgtggatctggggcagaggtaactctgatagacttcggcgaggagccggttgtaccagccctcagaccttgtgccccatcccttgcacagctcgctatggacgcctgttccctactagacgagactcctcctcagagtccaacacgcgcattgcctaggccactgcacccgactcccgtagtggactgggatgcaaggcctctgccccctccacctgcatacgacgacgttgcccaggacgaggatgatttcgaaatctgcagcatcaattctacactcgtaggggctggtgtgccggcagggccaagccaggggcaaaccaattacgccttcgtacccgaacaggcccgtcctccacctccactggaggataatctcttccttccgccacagggagggggtaaaccgcctagctccgcccagactgcagagattttccaagccctgcagcaggagtgcatgagacagctgcaggcaccggcaggtagccccgcaccatctccctcccctggcggtgatgataagccccaagtgcccccacgcgtccctattcccccaaggcctactcggcctcatgttcaattatctcccgcaccacccggtgaagaggaaacctcacaatggcctggtccagcctctcccccaagagtgcctcccagagagcctctatcaccccagggatctcggacacccagccctctagtgcctcctgggagttctcctctaccaccccgactgagcagcagtcctggaaagacaatgccaacaacacagagcttcgcctccgaccctaagtacgccacccctcaggtcattcaagcacctggtccaagagcagggccttgtattctgcctatcgtgagggatgggaaaaaagtttcctctacccattattacctcctgcccgagcgtcctagctacctggagaggtaccagaggttcctaagggaagcccagtctcctgaggaacctacaccgctccccgtgcctctattgttgcctcccccttctacacccgctccagccgcacccaccgctaccgtcagacccatgcctcaggcagctctggatccaaaggccaacttctccactaacaacagcaatcccggagctaggcctccaccccctcgtgcaaccgcccgtctcccgcaacgcggatgtccaggcgatggtcctgaggccggacggccagccgataagatccagatggtcgaacaattgttcgggctgggactgcgtccacggggagaatgtcataaggtactagaaatgttcgattggaaccttgaacaggccggttgtcatctgctggggagctgggggccagcccaccacaagcggtag

SEQ ID NO: 24265 - DNA, 1921 bp, Artificial Sequence
  derived and/or modified sequence
ggagaggaggaacggagctgggacgggctgcaggagggaatggccgcaggccggcaggaggaggggcgcgaccacccggccgccggccgatggcggatgaggctatgggggctgagacgcagtagcggccctgcacttctggaggatgctcgaggcccggccccccaggacgcagggcagtgacgctgccggtgccgctgcggggcgggggctgcgggcgctgcttctctccctgaccgcagccgctgggatttggggctccatgggggagagatctgcttaccagcgcctggctgggggcgaggagggaccgcagaggctgggaggcggcagaatgcagccagaggagggcacaggctggctgctggagctgctgtccgaggtgcagctgcaacagtacttcctgcggctccgagatgacctcaacgtcacccgcctgtcccactttgagtacgtcaagaatgaggacctggagaagatcggcatgggtcggcctggccagcggcggctgtgggaggctgtgaagaggaggaaggccttgtgcaaacgcaagtcgtggatgagtaaggtgttcagtggaaagcgactggaggctgagttcccacctcatcactctcagagcaccttccggaagacctcgcccgcccctgggggcccagcaggggaggggcccctgcagagcctcacctgcctcattggggagaaggacctgcgcctcctggagaagctgggtgatggttcctttggcgtggtgcgcaggggcgagtgggacgcgccctcagggaagacggtgagtgtggctgtgaagtgcctgaagcccgatgtcctgagccagccagaagccatggacgacttcatccgggaggtcaatgccatgcactcgctcgaccaccgaaacctcatccgcctctacggggtggtgctcacgccgcccatgaagatggtgacagagctggcacctctgggatcgttgttggaccggctacgtaagcaccagggccacttcctcctggggactctgagccgctacgctgtgcaggtggctgagggcatgggctacctggagtccaagcgctttattcaccgtgacctggctgcccgcaatctgctgttggctacccgcgacctggtcaagatcggggactttgggctgatgcgagcactacctcagaatgacgaccattacgtcatgcaggaacatcgcaaggtgcccttcgcctggtgtgcccccgagagcctgaagacacgcaccttctcccatgccagcgacacctggatgttcggggtgacactgtgggaaatgttcacctacggccaggagccctggatcggcctcaacggcagtcagatcctgcataagatcgacaaggagggggagcggctgccccggcccgaggactgtccccaggacatctacaacgtcatggtccagtgctgggctcacaagccagaggacagacccacgtttgtggccctgcgggacttcctgctggaggcccagcccacagacatgcgggcccttcaggactttgaggaaccggacaagctgcacatccagatgaatgatgtcatcaccgtcatcgagggaagggccgagaactactggtggcgtggccagaacacacggacgctgtgtgtggggcccttccctcgcaacgtggtgacctccgtggccggcctgtcggcccaggacatcagccagcccctgcagaacagcttcatccacacagggcatggcgacagtgacccccgccactgctggggcttcccggacaggattgacgagtgtcctttctctgccttctctccaggacaccccccagctgagacgtgcggtcaggttctgtggactgggaggcgggaggcctgtgcttcagacccaagactacacccggtttcctccaggacgaaggggctctga

SEQ ID NO: 24266 - DNA, 4223 bp, Artificial Sequence
  derived and/or modified sequence
ggagaggaggaacggagctgggacgggctgcaggagggaatggccgcaggccggcaggaggaggggcgcgaccacccggccgccggccgatggcggatgaggctatgggggctgagacgcagtagcggccctgcacttctggaggatgctcgaggcccggccccccaggacgcagggcagtgacgctgccggtgccgctgcggggcgggggctgcgggcgctgcttctctccctgaccgcagccgctgggatttggggctccatgggggagagatctgcttaccagcgcctggctgggggcgaggagggaccgcagaggctgggaggcggcagaatgcagccagaggagggcacaggctggctgctggagctgctgtccgaggtgcagctgcaacagtacttcctgcggctccgagatgacctcaacgtcacccgcctgtcccactttgagtacgtcaagaatgaggacctggagaagatcggcatgggtcggcctggccagcggcggctgtgggaggctgtgaagaggaggaaggccttgtgcaaacgcaagtcgtggatgagtaaggtgttcagtggaaagcgactggaggctgagttcccacctcatcactctcagagcaccttccggaagacctcgcccgcccctgggggcccagcaggggaggggcccctgcagagcctcacctgcctcattggggagaaggacctgcgcctcctggagaagctgggtgatggttcctttggcgtggtgcgcaggggcgagtgggacgcgccctcagggaagacggtgagtgtggctgtgaagtgcctgaagcccgatgtcctgagccagccagaagccatggacgacttcatccgggaggtcaatgccatgcactcgctcgaccaccgaaacctcatccgcctctacggggtggtgctcacgccgcccatgaagatggtgacagagctggcacctctgggatcgttgttggaccggctacgtaagcaccagggccacttcctcctggggactctgagccgctacgctgtgcaggtggctgagggcatgggctacctggagtccaagcgctttattcaccgtgacctggctgcccgcaatctgctgttggctacccgcgacctggtcaagatcggggactttgggctgatgcgagcactacctcagaatgacgaccattacgtcatgcaggaacatcgcaaggtgcccttcgcctggtgtgcccccgagagcctgaagacacgcaccttctcccatgccagcgacacctggatgttcggggtgacactgtgggaaatgttcacctacggccaggagccctggatcggcctcaacggcagtcagatcctgcataagatcgacaaggagggggagcggctgccccggcccgaggactgtccccaggacatctacaacgtcatggtccagtgctgggctcacaagccagaggacagacccacgtttgtggccctgcgggacttcctgctggaggcccagcccacagacatgcgggcccttcaggactttgaggaaccggacaagctgcacatccagatgaatgatgtcatcaccgtcatcgagggaagggccgagaactactggtggcgtggccagaacacacggacgctgtgtgtggggcccttccctcgcaacgtggtgacctccgtggccggcctgtcggcccaggacatcagccagcccctgcagaacagcttcatccacacagggcatggcgacagtgacccccgccactgctggggcttcccggacaggattgacgaactgtatctgggaaaccccatggacccccccgacctcctgagcgtggaactgagcacctcccggcccccccagcatctaggaggggtgaaaagggagcctccacctcgcccacctcagcctgccttcttcactcagaaaccaacctatgaccctgtgagcgaggaccaagaccccttgtccagcgacttcaagaggctgggcctgcggaagccaggcctgccccgagggctgtggctggcgaagccctcggcgcgggtgccgggcaccaaggccagccgaggcagcggggctgaggtcacgctcatcgacttcggtgaggagcccgtggtcccggccctacggccctgcgcgccctccctggcgcagctggccatggacgcctgctccctgctggacgagaccccgcctcagagccccacgcgggcactgccccggcccctgcaccccacgcctgtggtggactgggacgcacgcccgctgccccccccgcccgcctatgacgacgtggcccaggatgaggatgactttgagatctgctccatcaacagcaccctcgtgggcgcgggggtccctgccgggcccagccagggccagaccaactacgcctttgtgcctgagcaggcgcggccgccccctcccctggaggacaacctgttcctcccgccccagggtgggggcaagccgcccagctccgcacagaccgcagagatcttccaggcgctacagcaggagtgcatgaggcaactgcaggctccggccggctccccggccccctctcccagcccggggggtgacgacaagccccaggtgcctcctcgggtacccatcccccctcggcccacgcgcccacacgtccagctgtctccagcccccccgggcgaggaggagaccagccagtggcctggacctgcttcccctccccgggtgcctccgcgggagcccctgtcccctcaaggctcgaggacacccagccccctggtaccacctggcagctccccgctgccaccccggctctcaagctcacctgggaagaccatgcccaccacccagagctttgcctcagaccccaagtacgccaccccccaggtgatccaggcccctggcccgcgggctggtccctgcatcctgcccatcgtccgggatggcaagaaggtcagcagcacccactattacttgctgcccgagcgaccatcctacctggagcgctaccagcgcttcctgcgtgaggcccagagccccgaggagcctacccccctgcctgtgcctctgctgctgcccccacccagcaccccagcccccgccgcccccacggccaccgtgcggccgatgccccaggctgccttggaccccaaggccaacttctccaccaacaacagcaacccaggggcccggccaccacccccgagggccactgctcggctgccacagaggggctgccctggcgatgggccagaggcgggccggccagcagacaagatccagatggtggagcagctcttcgggctgggtctgcggcccagaggggagtgccacaaagtgctggagatgttcgactggaacctggagcaggccggctgccaccttctgggctcctggggccctgcccaccacaagcgctgagatgcgtctggagagccagagggcctgcctgaaggaatcacctgagcctgtccgtccaccaggagtggggagatgcccccatccagtcctggaggacccgctgctcctgctgctcccggggatggagcaaggccaaggctgcgggaggctgggagccctgccctgcccatccctcctgcaccagcgctgtccctgcacactttggttcagtcccggtgcccctgccaagatgtggaaggggccgggtgaagacaggcttgagggctgccccagcaggctctgggtatgacctgcctctggccctggtcctgggcggggcctgtgggtggagtagtacccccaggccctgccctgggtgacagactgggaggaaaccaggctggacctgggcaggcgggatgtgttggccacagggagaggcggaccggcacccggtgggacctcctaggactgggccttcttccagggggcccctggcagcagctggggtgtcgggcagaatgtgacttgtggccttaccatggacttgaatgggacttggctggcctcaggatcttgtgcctggaaatagcctgaggtggctcaggaagcggagaaagggtgccagaccattctctggcggggaccagggcccaaggccccagggctggaaggagaccaaggggcagccgccctggagggacatcagtgcttcctcttccacccaattcccccacgcggttccatgttttcccaccagcctgttggcgaagttgctgctccggcattcagtacctgcttcttccagagaaataaagttagtttctattttatgtta

SEQ ID NO: 24267 - protein, 229 aa, Artificial Sequence
  derived and/or modified sequence
MDSLDRSCQDWCDRKQHWLEIGPPDLVERKGSLTLRSHHKKYSKPVLVYSWHRDREAFPKGYDIEGPEKVKKLCNSTYRRLGTDESPIWTSETHEKLSQMCLNTEWVEMKSKALLNEETVSSGIIERVTGLPATGFGAVFPRHPPDWSKMCALTTYSEDYVPPYDYQPHAYPCQDDYSIVHRKCRSQFTDLNGSKRFGINTWHDESGIYANSDVKQKLYPLTSGPIVPI

SEQ ID NO: 24268 - DNA, 873 bp, Artificial Sequence
  derived and/or modified sequence
gagacgccgaatcttggtacttacgttcctgccgggcaggacaggtgcatagggaactcctcagaggtctgtacctcgagggctcccatggatagccttgacagatcctgccaggactggtgcgacaggaagcaacactggttggagatcggaccaccggacttggtggagcgcaagggctccctgaccctccgctcccatcacaagaaatactcgaagccggtgttggtgtattcctggcaccgtgacagagaagcttttcccaaaggttatgatatagagggtcctgagaaagttaaaaaactgtgtaattcaacatatcggcgactgggaaccgatgaatccccaatttggacatcagaaacacatgaaaagttgtcacaaatgtgtttaaacacagaatgggttgaaatgaagagcaaggctttattgaatgaggaaacagtgagctccgggattatcgaaagggtcaccggattgcctgccacaggttttggagctgtctttcctagacatccaccggattggagcaaaatgtgtgcattgacaacgtactcagaagattatgttccaccatatgattatcagccacatgcttatccctgtcaagatgattattccatagtccacagaaaatgccgttctcagttcacggatctaaatggttctaaaagatttggcatcaacacttggcatgatgagagtgggatttatgctaattcagatgtaaaacagaaactctatcccttgactagtgggcctattgtgccaatttaaaaataatgtatagaatcagcatctctgactaatgaaaaatggatgtagcagttgatgattttctatcttaataaatgcaatggaagtgttactata

SEQ ID NO: 24269 - DNA, 690 bp, Artificial Sequence
  derived and/or modified sequence
atggacagcctggacagaagctgccaggactggtgcgacagaaagcagcactggctggagatcggcccccccgacctggtggagagaaagggcagcctgaccctgagaagccaccacaagaagtacagcaagcccgtgctggtgtacagctggcacagagacagagaggccttccccaagggctacgacatcgagggccccgagaaggtgaagaagctgtgcaacagcacctacagaagactgggcaccgacgagagccccatctggaccagcgagacccacgagaagctgagccagatgtgcctgaacaccgagtgggtggagatgaagagcaaggccctgctgaacgaggagaccgtgagcagcggcatcatcgagagagtgaccggcctgcccgccaccggcttcggcgccgtgttccccagacacccccccgactggagcaagatgtgcgccctgaccacctacagcgaggactacgtgcccccctacgactaccagccccacgcctacccctgccaggacgactacagcatcgtgcacagaaagtgcagaagccagttcaccgacctgaacggcagcaagagattcggcatcaacacctggcacgacgagagcggcatctacgccaacagcgacgtgaagcagaagctgtaccccctgaccagcggccccatcgtgcccatctag

SEQ ID NO: 24270 - DNA, 690 bp, Artificial Sequence
  derived and/or modified sequence
atggacagtctggaccggtcttgtcaggactggtgtgatcgcaagcagcactggctggaaattggacctccagatcttgtcgagcgcaaaggatcactgaccctaaggtcccaccacaagaaatactcaaaaccagtgctggtgtacagctggcatcgggaccgggaagcctttcctaagggctacgatatcgaggggccagagaaggtgaaaaaactctgtaactcgacctatcgcagactcgggaccgacgagtcaccgatatggacatctgagacacatgagaaactttcccagatgtgtcttaacactgagtgggtagagatgaagagtaaagcccttctgaacgaggagaccgtctctagtgggatcatagagcgagtaactggactgcctgcaacgggattcggagcggtatttcccaggcacccccctgattggtctaagatgtgtgcccttacaacctactccgaagactacgtgcctccttatgattatcagccacatgcctacccttgccaggatgactactctatagtgcaccgcaagtgccgttcacagttcaccgacttgaatgggtctaagaggttcggtattaacacatggcatgacgagagcgggatctatgcaaactctgacgtgaagcagaagctgtatcccttgacctccggtcccatcgtacctatttag

SEQ ID NO: 24271 - DNA, 690 bp, Artificial Sequence
  derived and/or modified sequence
atggacagcctggacaggagctgccaggactggtgtgacaggaagcagcactggctggagatcggccccccagacctggtggagaggaagggcagcctgaccctgcggagccaccacaagaagtacagcaagcctgtgctggtgtacagctggcaccgggaccgggaggccttccccaagggctatgacatcgagggccctgagaaggtgaagaagctgtgcaacagcacctacagaaggctgggcacagatgagagccccatctggaccagcgagacccatgagaagctgagccagatgtgcctgaacacagagtgggtggagatgaagagcaaggccctgctgaatgaggagaccgtgagcagcggcatcatcgagcgggtgacaggcctgcctgccaccggctttggagctgtgttccccaggcaccccccagactggagcaagatgtgtgccctgaccacctacagcgaggactatgtgcccccctatgactaccagccccacgcctacccctgccaggatgactacagcatcgtgcacaggaaatgtcgcagccagttcacagacctgaatggcagcaagagatttggcatcaacacctggcatgatgagagcggcatctatgccaacagtgatgtgaagcagaagctgtaccccctgaccagcggccccatcgtgcccatctag

SEQ ID NO: 24272 - DNA, 690 bp, Artificial Sequence
  derived and/or modified sequence
atggacagcctggaccggagctgccaggactggtgcgaccggaagcagcactggctcgagattggacccccggatttggtggaaaggaaagggtccttgacacttagatcgcatcacaaaaaatacagcaagcctgtgctcgtatattcctggcaccgcgaccgggaggcctttcctaagggctatgatattgagggacccgaaaaagtgaaaaagctttgtaatagcacttatcggcgacttggcaccgatgaatcacccatctggaccagcgagacccatgaaaagttgagccagatgtgtctgaatactgaatgggtggaaatgaaatccaaagccttgctgaatgaagagaccgtgtcatccggcataatcgaaagggtgaccggtctgccggccactggattcggagccgtgttcccgcgacacccgcctgattggtccaaaatgtgtgcgctgactacttattctgaggactacgtgcctccctatgattatcagcctcacgcttacccctgccaggatgattactccattgtgcaccggaaatgcagatcgcagttcacagatttgaacggcagcaagaggtttggtataaacacgtggcatgacgagagtggaatctatgctaactcagatgtgaaacagaagctgtaccctctgacttccggcccaatcgtgcccatttag

SEQ ID NO: 24273 - DNA, 690 bp, Artificial Sequence
  derived and/or modified sequence
atggattccttggacagatcttgtcaggactggtgcgaccggaaacaacactggttagaaataggacctcctgatctggtcgagcgtaagggaagccttaccttgcgctctcaccataaaaagtattcaaaaccagtgctggtgtatagttggcacagagaccgggaggccttcccaaaaggctacgatatcgaggggcctgagaaagtcaaaaaactgtgcaatagtacctatcgtagactaggaaccgacgagagccctatatggaccagcgaaacacacgaaaagctgagtcaaatgtgtctgaacacagagtgggttgagatgaagagcaaggcactgctgaatgaggagactgtgtccagcggaataattgaaagggtcaccggactccccgcaacaggatttggtgccgtgttccccaggcaccccccagattggagtaaaatgtgcgcattgactacttactctgaggattacgtgcctccctacgattatcagcctcacgcatacccctgccaggatgactattctatcgttcacagaaaatgcaggtcacagtttacagacctgaacggttctaagagatttggcataaatacctggcacgatgagagcggaatttacgcaaatagcgatgtcaaacagaaactataccctctgacctccggccctattgtgcccatttag

SEQ ID NO: 24274 - protein, 184 aa, Artificial Sequence
  derived and/or modified sequence
MREYKLVVLGSGGVGKSALTVQFVQGIFVEKYDPTIEDSYRKQVEVDAQQCMLEILDTAGTEQFTAMRDLYMKNGQGFALVYSITAQSTFNDLQDLREQILRVKDTDDVPMILVGNKCDLEDERVVGKEQGQNLARQWNNCAFLESSAKSKINVNEIFYDLVRQINRKTPVPGKARKKSSCQLL

SEQ ID NO: 24275 - protein, 118 aa, Artificial Sequence
  derived and/or modified sequence
MRDLYMKNGQGFALVYSITAQSTFNDLQDLREQILRVKDTDDVPMILVGNKCDLEDERVVGKEQGQNLARQWNNCAFLESSAKSKINVNEIFYDLVRQINRKTPVPGKARKKSSCQLL

SEQ ID NO: 24276 - protein, 32 aa, Artificial Sequence
  derived and/or modified sequence
MREYKLVVLGSGGVGKSALTVQFVQGIFVEKY

SEQ ID NO: 24277 - protein, 127 aa, Artificial Sequence
  derived and/or modified sequence
MREYKLVVLGSGGVGKSALTVQFVQGIFVEKYDPTIEDSYRKQVEVDAQQCMLEILDTAGTEQFTAMRDLYMKNGQGFALVYSITAQSTFNDLQDLREQILRVKDTDDVPMILVGNKCDLEDERVVG

SEQ ID NO: 24278 - protein, 142 aa, Artificial Sequence
  derived and/or modified sequence
MREYKLVVLGSGGVGKSALTVQFVQGIFVEKYDPTIEDSYRKQVEVDAQQCMLEILDTAGTEQFTAMRDLYMKNGQGFALVYSITAQSTFNDLQDLREQILRVKDTDDVPMILVGNKCDLEDERVVGKEQGQNLDNGTTVHS

SEQ ID NO: 24279 - protein, 48 aa, Artificial Sequence
  derived and/or modified sequence
MREYKLVVLGSGGVGKSALTVQFVQGIFVEKYDPTIEDSYRKQVEVDA

SEQ ID NO: 24280 - protein, 87 aa, Artificial Sequence
  derived and/or modified sequence
MREYKLVVLGSGGVGKSALTVQFVQGIFVEKYDPTIEDSYRKQVEVDAQQCMLEILDTAGTEQFTAMRDLYMKNGQGFALVYSITAQ

SEQ ID NO: 24281 - protein, 101 aa, Artificial Sequence
  derived and/or modified sequence
MREYKLVVLGSGGVGKSALTVQFVQGIFVEKYDPTIEDSYRKQVEVDAQQCMLEILDTAGTEQFTAMRDLYMKNGQGFALVYSITAQSTFNDLQDLREQIL

SEQ ID NO: 24282 - protein, 53 aa, Artificial Sequence
  derived and/or modified sequence
MREYKLVVLGSGGVGKSALTVQFVQGIFVEKYDPTIEDSYRKQVEVDAQQCML

SEQ ID NO: 24283 - protein, 139 aa, Artificial Sequence
  derived and/or modified sequence
MREYKLVVLGSGGVGKSALTVQFVQGIFVEKYDPTIEDSYRKQVEVDAQQCMLEILDTAGTEQFTAMRDLYMKNGQGFALVYSITAQSTFNDLQDLREQILRVKDTDDVPMILVGNKCDLEDERVVGKEQGQNLARQWN

SEQ ID NO: 24284 - protein, 93 aa, Artificial Sequence
  derived and/or modified sequence
MREYKLVVLGSGGVGKSALTVQFVQGIFVEKYDPTIEDSYRKQVEVDAQQCMLEILDTAGTEQFTAMRDLYMKNGQGFALVYSITAQSTFNDL

SEQ ID NO: 24285 - protein, 98 aa, Artificial Sequence
  derived and/or modified sequence
MREYKLVVLGSGGVGKSALTVQFVQGIFVEKYDPTIEDSYRKQVEVDAQQCMLEILDTAGTEQFTAMRDLYMKNGQGFALVYSITAQSTFNDLQDLRE

SEQ ID NO: 24286 - protein, 122 aa, Artificial Sequence
  derived and/or modified sequence
MREYKLVVLGSGGVGKSALTVQFVQGIFVEKYDPTIEDSYRKQVEVDAQQCMLEILDTAGTEQFTAMRDLYMKNGQGFALVYSITAQSTFNDLQDLREQILRVKDTDDVPMILVGNKCDLED

SEQ ID NO: 24287 - protein, 85 aa, Artificial Sequence
  derived and/or modified sequence
MREYKLVVLGSGGVGKSALTVQFVQGIFVEKYDPTIEDSYRKQVEVDAQQCMLEILDTAGTEQFTAMRDLYMKNGQGFALVYSIT

SEQ ID NO: 24288 - DNA, 555 bp, Artificial Sequence
  derived and/or modified sequence
atgagggaatacaaacttgtcgtcctcggctccggcggcgtcggcaaatctgcgcttactgtgcagttcgtgcagggcattttcgtcgagaagtatgatcccaccattgaagacagctaccgcaagcaggtagaggtggacgcccagcagtgtatgcttgaaatccttgatactgccgggactgaacagtttacagctatgcgagatctgtatatgaagaacggccagggcttcgctttggtatactctattaccgctcagtctaccttcaatgacttacaagatctcagggagcagattctgcgggtaaaagataccgacgacgtgcccatgatcttggtaggcaacaaatgtgatttggaggatgagcgggttgtggggaaagaacagggtcagaacctcgctcgccaatggaataattgtgcctttcttgagagttctgcgaagtctaagatcaatgtaaacgaaattttttacgacttggttaggcagataaatagaaagacccctgttccaggcaaggcccgcaaaaaatcatcatgtcaattgctttag

SEQ ID NO: 24289 - DNA, 555 bp, Artificial Sequence
  derived and/or modified sequence
atgagggagtataaacttgtggttctcggatccgggggcgtgggtaaatctgcattaactgtacagtttgtccaagggatcttcgtggagaagtatgatcccacaattgaggattcttaccgaaaacaggtggaggtggatgcccagcagtgtatgctggagattcttgacaccgcgggtacagaacaatttactgcaatgcgggacttgtacatgaaaaatggccagggcttcgctctcgtgtactcaatcacagcccagagcaccttcaatgatctgcaggacctccgcgagcagatcctccgcgtcaaggataccgacgacgtgcccatgatccttgtcgggaacaaatgtgaccttgaagacgaacgtgtagtcgggaaagagcagggccagaacctggcaaggcaatggaacaattgcgcttttctcgaatcttcagcaaaaagtaagatcaatgttaatgagatattctacgatctggtgcgtcagattaatagaaagacaccagtccccggtaaagcccgtaaaaagagttcctgtcaactactgtag

SEQ ID NO: 24290 - DNA, 555 bp, Artificial Sequence
  derived and/or modified sequence
atgagggagtacaaattagttgtcctggggagtgggggtgtcggaaaatccgccttgactgttcagtttgtccaagggatctttgtagaaaagtacgacccaacaattgaagattcttaccgcaagcaagtggaggtggacgcacagcagtgcatgctggagatcctggacaccgccggcacagaacagtttaccgctatgagggatttgtacatgaagaacggacaggggttcgccctggtatacagtatcactgcgcagagcactttcaacgacctgcaggatctgcgggagcagatcctacgcgtgaaagacacagatgatgtcccaatgattttagtggggaacaaatgcgatctggaagacgagcgtgtcgtgggtaaagagcagggccagaatctcgcacgccagtggaacaattgtgcgttcttagagtccagtgctaagtctaagatcaacgtcaacgaaattttttacgatctcgtgcgccaaataaatagaaagacccctgtgcctgggaaggcacgtaagaaatcttcttgtcaactactctag

SEQ ID NO: 24291 - DNA, 384 bp, Artificial Sequence
  derived and/or modified sequence
atgagagagtataagctggttgtgctagggagtggaggtgtcggtaaatcagccctgacagtccagttcgttcagggcatttttgtcgaaaagtacgaccccactatcgaagactcttaccggaagcaggtcgaagtagatgcacagcaatgcatgctggaaattctggacaccgctggaactgagcagtttacggctatgagagacctgtacatgaagaacgggcaagggttcgctctggtgtattccatcaccgcacaaagcacttttaacgaccttcaagatttgcgagaacagatcctgagagtgaaggatactgacgacgtgccaatgattttagtgggtaacaaatgcgacctggaagacgagcgtgtggtaggatag

SEQ ID NO: 24292 - DNA, 429 bp, Artificial Sequence
  derived and/or modified sequence
atgagggaatacaagctcgtggtactgggtagcgggggggtcggcaaaagtgcactgaccgttcaatttgtgcagggcatcttcgtagagaaatacgaccccacaatagaggacagttatcgcaagcaggttgaggtagatgcccagcagtgtatgctggaaatattagataccgccggcaccgaacaattcactgctatgcgcgatctgtacatgaaaaacggccagggcttcgctttggtgtattccatcacggctcagtcaacctttaacgatctgcaggacttgcgcgagcaaattcttcgcgtgaaagacacagacgacgtacccatgatcctcgtgggcaacaaatgtgatttagaagacgaacgggtggtgggcaaggagcagggccagaacctagataacggcacaaccgtccacagttag

SEQ ID NO: 24293 - DNA, 264 bp, Artificial Sequence
  derived and/or modified sequence
atgagggagtataagctggtggtattaggcagtggtggggtgggtaagtcagctttgacagttcagttcgtacagggcatcttcgtcgaaaagtacgaccccactattgaggacagttaccggaaacaggtcgaagtcgatgcccaacagtgtatgctagaaatactggataccgccggaactgagcagtttaccgcaatgcgtgacctctatatgaagaatggccagggattcgcgttagtatactcaattacagcacagtag

SEQ ID NO: 24294 - DNA, 555 bp, Artificial Sequence
  derived and/or modified sequence
atgcgagaatataaactcgtggtcctcggctcaggcggagtgggcaaaagcgccctgacggtccaatttgtgcaaggcatttttgtggagaaatacgatcccaccatcgaggactcgtacaggaaacaagttgaggtggacgctcagcaatgcatgctagaaatactggacaccgccgggactgagcagtttacggctatgagggacttgtatatgaagaacggacagggctttgctcttgtgtattcaatcacagcacagagtacctttaacgatctgcaagatctaagagagcagatactgcgggtgaaggacacagatgatgtgcctatgattctggtgggtaataagtgtgatctcgaggatgagcgcgttgtcggaaaagaacaaggccagaaccttgcaagacagtggaataactgcgcttttttagaaagttctgccaaaagtaagatcaacgtgaatgaaattttttatgacttggtccgacagattaatcggaaaacccccgtgccaggcaaggcaagaaaaaagtccagctgtcagctcctgtag

SEQ ID NO: 24295 - DNA, 306 bp, Artificial Sequence
  derived and/or modified sequence
atgcgggagtacaaactcgttgtgctgggatctggcggagtgggcaagagtgccctaaccgtccaatttgtccaagggatctttgtcgagaaatatgaccccacaatcgaggactcataccgcaagcaggtcgaagtggacgcccaacagtgcatgttggagatcctcgacacagcaggaacagagcagttcaccgctatgagagatctgtacatgaaaaatgggcagggcttcgccctggtgtattccataaccgcccaatcaacttttaatgacctgcaggacctgagagaacagattctgtag

SEQ ID NO: 24296 - DNA, 420 bp, Artificial Sequence
  derived and/or modified sequence
atgcgagagtacaagctggttgtgctggggagtggaggggtgggcaaaagcgctcttaccgtccagttcgtccaggggatttttgtcgagaagtacgatccaaccatcgaggactcatatcgcaagcaggtggaggtggatgcacagcagtgcatgttggaaatacttgatacggctggaacagagcagtttaccgcgatgcgggacctttacatgaagaacggtcaggggttcgctctcgtctacagcatcacagcgcagagcacttttaatgacttgcaggacctccgagaacagattctcagggtgaaggataccgacgacgtgcccatgattttggttggcaacaagtgcgacttggaggacgagagggtcgtaggtaaggagcagggacagaacttagcccgacagtggaattag

SEQ ID NO: 24297 - DNA, 282 bp, Artificial Sequence
  derived and/or modified sequence
atgcgtgaatacaaactggtggtgctcggctcaggtggtgtcggcaagagcgccttgaccgtacaattcgtacagggaatcttcgtggagaaatatgatccaactatcgaagacagctaccggaagcaagtggaagtggatgcccaacagtgcatgctggagatcctggatactgccggaactgagcaattcaccgcaatgcgcgatttgtacatgaaaaacggccaaggatttgcactggtgtacagtatcaccgcacagtccacatttaacgatttatag

SEQ ID NO: 24298 - DNA, 297 bp, Artificial Sequence
  derived and/or modified sequence
atgagagaatataagctagttgttctcggaagcggtggcgtgggaaaatctgccttaaccgtccagttcgtgcagggaatcttcgtcgagaagtacgaccccaccattgaggactcgtatagaaaacaggtggaggtcgacgctcagcagtgtatgcttgagatcctggatactgcagggactgaacaatttaccgctatgcgggatctgtacatgaaaaacggacagggtttcgctcttgtgtattcgattaccgcccagtctaccttcaatgatctccaagacttaagggaatag

SEQ ID NO: 24299 - DNA, 369 bp, Artificial Sequence
  derived and/or modified sequence
atgcgagaatataagttggtggtgctcggctctggaggagtaggcaagtccgcattaacggtccaattcgtgcagggtatatttgttgaaaagtatgatccaactattgaggatagctacagaaagcaggtagaagttgacgctcagcagtgtatgttggaaattctggatactgcaggaaccgagcagttcaccgccatgagagacctttacatgaagaacggtcagggatttgctcttgtgtactctataacggcccagtctactttcaacgacctccaggacctgagagaacagattctcagagttaaggacacggatgatgtgcccatgatcctggttggcaataagtgcgacctggaggactag

SEQ ID NO: 24300 - DNA, 258 bp, Artificial Sequence
  derived and/or modified sequence
atgagagaatacaagcttgtcgtacttggcagtgggggtgtgggaaagagtgccttaacagtccagtttgtgcagggtattttcgtggagaagtacgaccccaccattgaggattcctaccggaagcaagtagaggtggacgcacaacagtgtatgctggagatccttgataccgcgggcaccgagcagttcactgccatgagggacctttacatgaagaacggccaaggcttcgccctcgtgtacagcatcacatag

SEQ ID NO: 24301 - DNA, 555 bp, Artificial Sequence
  derived and/or modified sequence
atgagggagtacaagctggtggtgctgggcagcggaggagtgggcaagagcgccctgactgtgcagtttgtgcagggcatctttgtggagaagtatgaccccaccattgaagattcctacaggaagcaggtggaggtggatgcccagcagtgcatgctggagatcctggacacagctggaacagagcagttcaccgccatgagggacctgtacatgaagaatggccagggctttgccctggtgtacagcatcacagcccagagcaccttcaatgacctgcaggacctgcgggagcagatcctgcgggtgaaggacacagatgatgtgcccatgatcctggtgggcaacaagtgtgacctggaggatgagcgggtggtgggcaaggagcagggccagaacctggcccggcagtggaacaactgtgccttcctggagagcagcgccaagagcaagatcaacgtgaatgagatcttctatgacctggtgcggcagatcaacaggaagacccctgtgcctgggaaggccaggaagaagagcagctgccagctgctgtag

SEQ ID NO: 24302 - DNA, 384 bp, Artificial Sequence
  derived and/or modified sequence
atgagggagtacaagctggtggtgctgggcagcggaggagtgggcaagagcgccctgactgtgcagtttgtgcagggcatctttgtggagaagtatgaccccaccattgaagattcctacaggaagcaggtggaggtggatgcccagcagtgcatgctggagatcctggacacagctggaacagagcagttcaccgccatgagggacctgtacatgaagaatggccagggctttgccctggtgtacagcatcacagcccagagcaccttcaatgacctgcaggacctgcgggagcagatcctgcgggtgaaggacacagatgatgtgcccatgatcctggtgggcaacaagtgtgacctggaggatgagcgggtggtgggctag

SEQ ID NO: 24303 - DNA, 429 bp, Artificial Sequence
  derived and/or modified sequence
atgagggagtacaagctggtggtgctgggcagcggaggagtgggcaagagcgccctgactgtgcagtttgtgcagggcatctttgtggagaagtatgaccccaccattgaagattcctacaggaagcaggtggaggtggatgcccagcagtgcatgctggagatcctggacacagctggaacagagcagttcaccgccatgagggacctgtacatgaagaatggccagggctttgccctggtgtacagcatcacagcccagagcaccttcaatgacctgcaggacctgcgggagcagatcctgcgggtgaaggacacagatgatgtgcccatgatcctggtgggcaacaagtgtgacctggaggatgagcgggtggtgggcaaggagcagggccagaacctggacaatggcaccaccgtgcacagctag

SEQ ID NO: 24304 - DNA, 264 bp, Artificial Sequence
  derived and/or modified sequence
atgagggagtacaagctggtggtgctgggcagcggaggagtgggcaagagcgccctgactgtgcagtttgtgcagggcatctttgtggagaagtatgaccccaccattgaagattcctacaggaagcaggtggaggtggatgcccagcagtgcatgctggagatcctggacacagctggaacagagcagttcaccgccatgagggacctgtacatgaagaatggccagggctttgccctggtgtacagcatcacagcccagtag

SEQ ID NO: 24305 - DNA, 306 bp, Artificial Sequence
  derived and/or modified sequence
atgagggagtacaagctggtggtgctgggcagcggaggagtgggcaagagcgccctgactgtgcagtttgtgcagggcatctttgtggagaagtatgaccccaccattgaagattcctacaggaagcaggtggaggtggatgcccagcagtgcatgctggagatcctggacacagctggaacagagcagttcaccgccatgagggacctgtacatgaagaatggccagggctttgccctggtgtacagcatcacagcccagagcaccttcaatgacctgcaggacctgcgggagcagatcctgtag

SEQ ID NO: 24306 - DNA, 420 bp, Artificial Sequence
  derived and/or modified sequence
atgagggagtacaagctggtggtgctgggcagcggaggagtgggcaagagcgccctgactgtgcagtttgtgcagggcatctttgtggagaagtatgaccccaccattgaagattcctacaggaagcaggtggaggtggatgcccagcagtgcatgctggagatcctggacacagctggaacagagcagttcaccgccatgagggacctgtacatgaagaatggccagggctttgccctggtgtacagcatcacagcccagagcaccttcaatgacctgcaggacctgcgggagcagatcctgcgggtgaaggacacagatgatgtgcccatgatcctggtgggcaacaagtgtgacctggaggatgagcgggtggtgggcaaggagcagggccagaacctggcccggcagtggaactag

SEQ ID NO: 24307 - DNA, 282 bp, Artificial Sequence
  derived and/or modified sequence
atgagggagtacaagctggtggtgctgggcagcggaggagtgggcaagagcgccctgactgtgcagtttgtgcagggcatctttgtggagaagtatgaccccaccattgaagattcctacaggaagcaggtggaggtggatgcccagcagtgcatgctggagatcctggacacagctggaacagagcagttcaccgccatgagggacctgtacatgaagaatggccagggctttgccctggtgtacagcatcacagcccagagcaccttcaatgacctgtag

SEQ ID NO: 24308 - DNA, 297 bp, Artificial Sequence
  derived and/or modified sequence
atgagggagtacaagctggtggtgctgggcagcggaggagtgggcaagagcgccctgactgtgcagtttgtgcagggcatctttgtggagaagtatgaccccaccattgaagattcctacaggaagcaggtggaggtggatgcccagcagtgcatgctggagatcctggacacagctggaacagagcagttcaccgccatgagggacctgtacatgaagaatggccagggctttgccctggtgtacagcatcacagcccagagcaccttcaatgacctgcaggacctgcgggagtag

SEQ ID NO: 24309 - DNA, 369 bp, Artificial Sequence
  derived and/or modified sequence
atgagggagtacaagctggtggtgctgggcagcggaggagtgggcaagagcgccctgactgtgcagtttgtgcagggcatctttgtggagaagtatgaccccaccattgaagattcctacaggaagcaggtggaggtggatgcccagcagtgcatgctggagatcctggacacagctggaacagagcagttcaccgccatgagggacctgtacatgaagaatggccagggctttgccctggtgtacagcatcacagcccagagcaccttcaatgacctgcaggacctgcgggagcagatcctgcgggtgaaggacacagatgatgtgcccatgatcctggtgggcaacaagtgtgacctggaggactag

SEQ ID NO: 24310 - DNA, 258 bp, Artificial Sequence
  derived and/or modified sequence
atgagggagtacaagctggtggtgctgggcagcggaggagtgggcaagagcgccctgactgtgcagtttgtgcagggcatctttgtggagaagtatgaccccaccattgaagattcctacaggaagcaggtggaggtggatgcccagcagtgcatgctggagatcctggacacagctggaacagagcagttcaccgccatgagggacctgtacatgaagaatggccagggctttgccctggtgtacagcatcacctag

SEQ ID NO: 24311 - DNA, 555 bp, Artificial Sequence
  derived and/or modified sequence
atgcgggagtacaagctggtggtgctgggcagcggcggcgtgggcaagtccgccctcacagtgcaatttgtgcagggcatcttcgtcgagaaatacgaccccacaatcgaggacagttaccggaagcaagtagaagtggatgcccaacagtgtatgctagagattctcgatactgcaggaacagaacaatttacggcaatgcgtgacctttacatgaagaatggccagggtttcgccctggtgtacagcatcacagcccaatcaactttcaatgatctgcaggacttacgtgagcagatcctgagggtgaaggatacggacgatgtgcctatgatactcgtcggaaataagtgcgatctggaggacgaacgcgtagtgggaaaggaacagggtcaaaacctcgcacggcagtggaacaactgcgcatttttggagagctctgctaaaagtaaaatcaatgttaatgaaattttctacgatttggtccggcagattaacaggaaaaccccagtgccaggaaaggccaggaagaagagttcctgccagctcctgtag

SEQ ID NO: 24312 - DNA, 555 bp, Artificial Sequence
  derived and/or modified sequence
atgcgggagtacaagctggtggtgctgggcagcggcggcgtgggcaagtccgctctgactgtgcagtttgtccagggcatcttcgtagaaaaatacgaccccacaattgaagacagctatcggaagcaggtcgaggttgatgctcagcagtgtatgcttgaaattctggacacagcaggaacggagcagttcactgcaatgcgggatctgtacatgaagaacggccaagggttcgcacttgtgtatagtatcaccgctcagagcacattcaacgacctgcaggacctgcgtgagcaaatcctccgcgttaaggacacagacgacgtaccaatgatactggtggggaataaatgcgatctggaagacgagagagtggtcggcaaggaacagggacaaaacctagcccggcagtggaacaactgtgctttcttggaaagcagtgccaagtccaagattaatgttaatgagatcttctacgatctggtgcggcaaattaacagaaagacgcccgtccccggcaaagctcggaaaaagtctagttgtcagttgctgtag

SEQ ID NO: 24313 - DNA, 555 bp, Artificial Sequence
  derived and/or modified sequence
atgcgggagtacaagctggtggtgctgggcagcggcggcgtgggcaaaagtgcactgactgtgcagttcgtgcaaggaatctttgtcgagaaatacgatcccaccatcgaagactcttacagaaaacaggttgaggtggatgcgcagcagtgcatgctggagatacttgacacggctggtactgagcaatttaccgcaatgagagatctctatatgaagaatggccagggtttcgcgctcgtttattctattaccgctcagagtacctttaacgatctccaggacctgcgcgaacagatcctgcgggtgaaggatacagatgacgtgcctatgatcctggttggcaataagtgtgacctggaagacgaacgggtggtcggtaaggagcaagggcaaaacctggcacggcagtggaacaattgtgccttcctggagagcagcgccaagagcaaaatcaatgtcaacgaaattttttacgacttggtgcggcagatcaacaggaagacgcccgttcctgggaaagcacggaagaaatccagctgtcagctgttgtag

SEQ ID NO: 24314 - DNA, 384 bp, Artificial Sequence
  derived and/or modified sequence
atgcgggagtacaagctggtggtgctgggcagcggcggcgtgggcaaaagcgctctgacagtgcagtttgtgcaggggatatttgtggagaagtatgaccccacaatcgaggactcctataggaagcaagtcgaggtggatgcccagcagtgcatgctggagatcttagacacggctggaacggaacagttcacagctatgcgcgacctttacatgaagaatggtcagggcttcgctctcgtgtacagcatcacagcacaaagtactttcaatgacctccaagacttgcgggaacagattctaagggtgaaggacactgatgatgtccctatgatccttgtcggaaataagtgcgatctggaagacgaacgtgttgtaggctag

SEQ ID NO: 24315 - DNA, 429 bp, Artificial Sequence
  derived and/or modified sequence
atgcgggagtacaagctggtggtgctgggcagcggcggcgtgggcaaaagcgctctcacggtgcagttcgtacagggaattttcgttgagaaatacgatccgacaatcgaagactcataccgtaagcaggtggaagtcgatgcccagcagtgcatgctggagatcctcgacacagccggcaccgagcagttcaccgctatgcgggatctctatatgaaaaacgggcaaggtttcgcccttgtttacagtatcacagcccaatctactttcaatgacttgcaagaccttagggaacagattctgagagtgaaggacacagatgatgtaccaatgattttggtgggaaataaatgtgatctcgaagacgaacgtgtggtcggtaaggaacagggacagaatctggacaacggcaccactgtgcactcctag

SEQ ID NO: 24316 - DNA, 264 bp, Artificial Sequence
  derived and/or modified sequence
atgcgggagtacaagctggtggtgctgggcagcggcggcgtgggcaagagcgctctcacagtccagttcgtgcaagggattttcgtggaaaagtatgaccctaccatcgaggacagctacagaaaacaggtggaagtggatgctcaacagtgcatgctggaaatcttggacacagcggggacggagcaatttacagcaatgcgcgacctctacatgaaaaacggacaaggctttgctctggtgtactccatcactgcccaatag

SEQ ID NO: 24317 - DNA, 555 bp, Artificial Sequence
  derived and/or modified sequence
atgcgggagtacaagctggtggtgctgggcagcggcggcgtgggcaaatccgcactgacagtacagtttgtgcagggaatatttgtggagaagtacgaccccactattgaagacagttaccgcaaacaggtggaagttgatgcccagcagtgtatgttggaaattctcgacacggctgggacggagcagttcacagccatgcgcgacctttacatgaagaacggccaggggtttgccctggtttactctattaccgcccaatccacttttaacgacttgcaagacttgagagagcagatccttagggttaaggatacagatgacgtgccaatgattctggttggaaataagtgcgacttagaggacgagcgagttgtgggcaaggagcaaggacagaacctcgccagacagtggaataactgtgctttcttagagagtagtgccaaatctaagattaatgtgaatgagatcttctacgacctcgttagacagatcaaccgtaaaactccggttcctggcaaggcacgaaagaagtcctcctgccagcttctgtag

SEQ ID NO: 24318 - DNA, 306 bp, Artificial Sequence
  derived and/or modified sequence
atgcgggagtacaagctggtggtgctgggcagcggcggcgtgggcaaaagcgcactgaccgttcagtttgtccagggaattttcgtcgaaaaatatgaccccacaatcgaggactcttatagaaagcaagtggaagtggacgcccagcagtgtatgttagagattctagatactgccggcaccgagcaatttacagcgatgcgtgacctttatatgaaaaatggccaggggttcgcgcttgtgtactcaattacagctcaaagtacattcaacgacttacaggacctgcgcgagcaaatactctag

SEQ ID NO: 24319 - DNA, 420 bp, Artificial Sequence
  derived and/or modified sequence
atgcgggagtacaagctggtggtgctgggcagcggcggcgtgggcaaatcagccctgacagtgcaattcgtacaagggatcttcgtagaaaagtacgatcccaccatagaggattcctatcgaaagcaagtggaagtcgatgcccagcagtgcatgttggaaattctggacacagctggtacagagcagttcaccgccatgcgcgatctctacatgaaaaacggccagggtttcgccctggtgtatagtatcactgctcaaagcacttttaacgacttgcaggacctccgagaacagattctccgagtgaaggataccgatgacgtacctatgatcctcgttggaaacaagtgtgacctggaagatgagagggtggtcggtaaggaacaggggcagaacctcgctcgtcagtggaattag

SEQ ID NO: 24320 - DNA, 282 bp, Artificial Sequence
  derived and/or modified sequence
atgcgggagtacaagctggtggtgctgggcagcggcggcgtgggcaagtcagccctcacggtgcagtttgtgcaggggatctttgtcgaaaagtacgaccccacgatcgaagatagctaccgaaaacaagtcgaggttgacgcacaacagtgtatgttagagattctcgataccgcaggcacagagcagttcactgccatgagggatctgtatatgaaaaacgggcagggtttcgccttggtctactccatcaccgcccagtccactttcaatgacctgtag

SEQ ID NO: 24321 - DNA, 297 bp, Artificial Sequence
  derived and/or modified sequence
atgcgggagtacaagctggtggtgctgggcagcggcggcgtgggcaagtcagccctgaccgttcagttcgtccaggggatctttgtagagaagtacgaccccacaatagaagactcataccgcaaacaggttgaggtagacgcccaacagtgcatgctggaaatcctcgataccgcagggaccgagcagtttacagcgatgcgagacttgtacatgaagaatggccagggatttgctctggtgtatagcataacggcacagagcacgttcaatgacctacaggatctgagggagtag

SEQ ID NO: 24322 - DNA, 369 bp, Artificial Sequence
  derived and/or modified sequence
atgcgggagtacaagctggtggtgctgggcagcggcggcgtgggcaaatccgccctaaccgttcagttcgtgcaggggatctttgtcgaaaagtacgatccaaccatcgaggactcttacagaaagcaggttgaggtggatgcgcagcagtgtatgctggagatcttagacactgccggcactgaacagtttaccgccatgagagacctgtacatgaaaaatggtcaaggttttgccctcgtgtactcaatcactgcacagtcgacattcaatgacttacaggatctccgggaacagatcctacgggtgaaggacacagacgatgtcccaatgatcctggttggaaacaaatgcgatctggaagactag

SEQ ID NO: 24323 - DNA, 258 bp, Artificial Sequence
  derived and/or modified sequence
atgcgggagtacaagctggtggtgctgggcagcggcggcgtgggcaaatccgcactgactgtacagtttgtgcagggcattttcgtggaaaagtacgatcccacgatagaggattcataccggaagcaggtggaggtggacgcccaacagtgcatgctggaaatactggacaccgccgggaccgaacagttcaccgccatgcgagacctctacatgaagaatggacagggcttcgcacttgtttacagtatcacatag

SEQ ID NO: 24324 - DNA, 555 bp, Artificial Sequence
  derived and/or modified sequence
atgcgagaatataaactggtcgtgttaggaagcgggggagttggcaagagtgccctgaccgtgcagtttgtgcagggcattttcgtggaaaagtatgatcctacaatagaggactcttacagaaaacaggtggaggtggatgcgcagcagtgcatgctagagatcctggatactgctgggactgagcagtttacagccatgcgtgatctgtacatgaaaaacggtcagggattcgccttggtatactcaatcacagctcagtccacgtttaacgacctccaggacttgcgggaacagattcttcgtgtcaaagacacagatgacgtgcctatgatactggtggggaacaagtgcgatttggaggacgaacgggttgtcggtaaggagcaaggacaaaatctggcccgacaatggaataactgcgcatttttggagtcctctgcgaaatctaaaatcaatgtgaatgaaatcttctatgacctcgtgcggcagattaacaggaagactcctgttcctggcaaagctaggaagaagtcctcatgccagctgctgtag

SEQ ID NO: 24325 - DNA, 555 bp, Artificial Sequence
  derived and/or modified sequence
atgcgtgaatataagctcgtggtcttagggtcagggggagtgggcaaaagcgccctgacggtgcaattcgttcagggaatattcgttgaaaagtatgatcccactatagaggacagctaccgaaagcaggtcgaggttgatgctcaacagtgcatgctggagattctcgacactgcaggtactgaacagtttaccgcaatgagagacttatacatgaagaacggacagggcttcgcccttgtctacagcataaccgctcaaagcaccttcaacgacctacaggacttaagggagcaaattttgcgtgtcaaagataccgacgacgtacctatgatcctggtgggcaataaatgtgatctggaagacgagcgcgttgtgggaaaagaacagggccaaaacttagctcgccagtggaacaactgcgccttcctagaatcgtccgctaagtcaaagattaacgtcaatgaaattttctacgaccttgtcagacagataaacaggaagacacccgtcccaggcaaagccagaaaaaaaagctcatgtcaattgctatag

SEQ ID NO: 24326 - DNA, 555 bp, Artificial Sequence
  derived and/or modified sequence
atgcgagagtacaagctggtagttcttgggtccggcggagttgggaagtctgcattgaccgttcaattcgttcaaggcatattcgttgaaaagtatgaccccactatcgaagactcttatcgcaaacaggtggaggtggacgcgcagcaatgtatgctcgaaatcctcgacactgctggaaccgagcagttcacagctatgagggacctgtacatgaagaatggtcaggggtttgccctggtctactcgatcaccgcccagtctacttttaacgatttgcaggacctgagagagcaaattctgcgggtcaaggacactgatgacgttcccatgatcctggtcgggaacaagtgcgatctggaggatgaacgagtagtgggcaaagaacagggacaaaatcttgctcggcaatggaacaactgtgcttttctggaaagttccgctaagagcaaaattaatgtgaatgagatattttatgatctggtgaggcagatcaatcggaagacacccgtccccggtaaagcgcgaaagaagagttcttgtcagctcctctag

SEQ ID NO: 24327 - DNA, 384 bp, Artificial Sequence
  derived and/or modified sequence
atgagggaatataagctggtggtactgggcagcgggggagtaggaaagtcagcactgaccgttcagttcgttcaagggatctttgtagaaaaatacgaccctacaatcgaggacagctaccggaagcaagtggaagttgacgctcagcagtgcatgctggaaattcttgatacagctgggacggagcagttcacagcaatgcgcgatctttacatgaaaaacggacaggggttcgccctagtatactctattaccgcacagagcacattcaacgatttacaggatctgcgcgaacagatcctgagagtcaaagacactgatgatgtccccatgattctcgtaggaaataaatgtgatctagaggatgaaagggttgttggctag

SEQ ID NO: 24328 - DNA, 429 bp, Artificial Sequence
  derived and/or modified sequence
atgagagagtacaaactggtggtgttagggagcggtggcgtgggcaaaagcgctctgactgtacaattcgtacaggggatctttgtggagaaatacgaccccacaatcgaggactcgtaccggaagcaagtggaagtggatgcccagcagtgtatgctggaaatccttgacaccgccggtaccgagcaattcactgctatgagagatctctatatgaagaacgggcagggattcgctttggtgtactctatcacagcacagtcaacttttaatgatctgcaggatctacgagagcagattttgcgggttaaagatacagacgacgttccgatgattctggttggcaacaaatgtgaccttgaggacgaacgtgttgttggcaaggaacagggccagaacttggataatggtaccaccgttcattcctag

SEQ ID NO: 24329 - DNA, 264 bp, Artificial Sequence
  derived and/or modified sequence
atgcgggaatacaagctggtagtgcttggctccgggggagttgggaagtcggccctgaccgtacaatttgtgcagggtatttttgtcgaaaagtatgatcctacaatagaagactcttaccgaaaacaagtggaagtcgacgcccagcagtgcatgcttgagatcctggacacggctggcaccgagcagttcaccgccatgcgcgacctgtacatgaagaatggccaagggtttgcattggtgtactcgatcaccgcgcaatag

SEQ ID NO: 24330 - DNA, 555 bp, Artificial Sequence
  derived and/or modified sequence
atgagagaatataaactcgttgtactgggctctggaggagtcggaaagtccgccctgacagttcagtttgtccaggggatctttgtggaaaaatacgatccgaccatagaggacagctacaggaagcaggttgaggttgacgctcagcagtgcatgcttgaaatcctcgacaccgcaggcactgagcagtttaccgccatgagagatctgtatatgaagaacggacagggcttcgcccttgtgtatagcattacagcgcagagtaccttcaacgatctgcaggaccttagggaacagatcttgagagtgaaagacacagatgatgtgccaatgattctagttgggaataaatgtgaccttgaagacgagagggtggtcggtaaagagcagggtcagaacctcgcgcgtcaatggaacaattgcgcttttctggagtcctcagccaagagcaagataaacgtaaatgagattttctacgatctggtgaggcagattaaccggaagacacccgtgccaggcaaagcaagaaaaaaaagttcctgtcagctgctgtag

SEQ ID NO: 24331 - DNA, 306 bp, Artificial Sequence
  derived and/or modified sequence
atgcgcgaatacaaacttgttgtccttggtagcggcggagtgggaaagagcgcattgacagtacaatttgtgcaggggattttcgtcgagaaatatgatcctacaatcgaagattcctatagaaaacaagtcgaagtcgatgcacaacagtgcatgttagagatcctggacaccgccggaacggagcagttcactgctatgcgggatctatatatgaaaaacggccagggctttgccctggtatattccattacagcccagtccacgttcaacgacctccaggatctccgggaacagatactgtag

SEQ ID NO: 24332 - DNA, 420 bp, Artificial Sequence
  derived and/or modified sequence
atgcgggagtataagctggtggtgcttgggtccggcggagtggggaagagcgcactgacggtgcaattcgtccagggcattttcgtggagaaatatgatccgaccatcgaagattcatatagaaaacaggtggaggttgatgcgcagcaatgcatgcttgagatcctggataccgctgggaccgaacaatttactgctatgagggacctttatatgaagaatggacagggattcgcgttagtgtatagtatcacagcccagagtacattcaatgacctccaagatcttcgcgagcaaatcctgcgggtaaaggacactgacgatgtcccaatgatcctcgtaggaaataagtgcgacttagaggacgaaagggttgtaggcaaagagcagggtcagaatcttgctaggcagtggaattag

SEQ ID NO: 24333 - DNA, 282 bp, Artificial Sequence
  derived and/or modified sequence
atgcgagagtacaaactggtcgtgttgggttctggcggagtcgggaagtctgctctgactgtgcagttcgtgcaaggcatatttgtcgaaaagtatgatcctaccatcgaagattcataccgtaagcaggtggaagtcgatgcacagcagtgcatgctggaaatactcgatacagccggaactgagcagttcactgccatgcgcgatctgtatatgaagaacggccaggggttcgctttggtttactccattacagcccagagcacttttaatgatctttag

SEQ ID NO: 24334 - DNA, 297 bp, Artificial Sequence
  derived and/or modified sequence
atgcgcgagtacaaactcgttgtcctgggcagtggcggtgttggcaagtctgccctcaccgtgcaatttgtgcaggggatttttgtggagaagtatgatcccacgatcgaggatagttaccggaaacaggttgaagtggatgcacagcaatgcatgctggaaatcctggataccgccggaaccgaacagttcaccgcaatgagagatctttacatgaaaaatgggcagggcttcgctctcgtttatagcatcacagcccagtcgacctttaacgacctccaggatcttagagaatag

SEQ ID NO: 24335 - DNA, 369 bp, Artificial Sequence
  derived and/or modified sequence
atgagggagtataagctcgtggttcttggatctggtggcgtgggaaaatcagcactgactgtccagtttgtgcaaggtatcttcgttgaaaagtatgaccctaccatagaagatagctatagaaagcaggttgaagtcgacgctcagcagtgtatgttagaaattttggacactgcaggtacagaacagtttaccgccatgcgagacctctatatgaaaaatggacagggctttgctttggtgtatagtatcaccgctcagtccaccttcaacgacctgcaggatctacgagaacagatcctgagagttaaggacacggatgacgttccaatgatccttgttggaaacaagtgcgacctcgaagactag

SEQ ID NO: 24336 - DNA, 258 bp, Artificial Sequence
  derived and/or modified sequence
atgcgagaatacaaattggtcgtgttaggttccgggggtgtcggtaagagtgctctcactgtccaattcgtccaaggtatcttcgtggaaaagtacgacccgacaattgaggattcttatagaaaacaggtcgaggtagacgcccagcaatgcatgctggaaatcctggacacggctggcacagaacagtttacggccatgagggacctgtacatgaaaaacggtcaggggttcgcattagtctattctatcacttag

SEQ ID NO: 24337 - DNA, 2129 bp, Artificial Sequence
  derived and/or modified sequence
acccgcgcgccccgcccgcgggcggaagctggagcgaggctgaacgcctgacgtcaaggcgacatcgccaaacctcgcccagattcaggcgtgtaaaccagccggagcggcgcggcagcggcaggaccgccgtggcgcctagagtagcgacccggggggagcgcggggcgacgctggctgcagggacccggtgacagcgtgagaggtactaggttttgacaagcttgcatcatgcgtgagtataagctagtcgttcttggctcaggaggcgttggaaagtctgctttgactgtacaatttgttcaaggaatttttgtagaaaaatacgatcctacgatagaagattcttatagaaagcaagttgaagtagatgcacaacagtgtatgcttgaaatcttggatactgcaggaacggagcaatttacagcaatgagggatttatacatgaaaaatggacaaggatttgcattagtttattccatcacagcacagtccacatttaacgatttacaagacctgagagaacagattcttcgagttaaagacactgatgatgttccaatgattcttgttggtaataagtgtgacttggaagatgaaagagttgtagggaaggaacaaggtcaaaatctagcaagacaatggaacaactgtgcattcttagaatcttctgcaaaatcaaaaataaatgttaatgagatcttttatgacctagtgcggcaaattaacagaaaaactccagtgcctgggaaggctcgcaaaaagtcatcatgtcagctgctttaatatactaaatgcattgtagctctgagccaggtctgaagaactgttgcccaattcaacagtgccagcattccaactttgttaaacctaccaacatcttaaatggactttcctgtggtggtaccctttaagaggcggatgaaagctactatatcagtttgcacattctaatcactttccagtatcacaagagagatttttacttatataatagtcctagagtttgcagctggtaaaaccagaggctacatccagtattactgctaagagacattcttcatccaccaatgttgtacatgtatgaaaatggtgtactgtatactttaacatgccccatactttgtattggagagtacaataatgtaaatcctaaaagcaccactattttagcataataaaagaaagtccaaagagctcctatatagactactccagataacttcgcttctttgatacttgtagcttattgtaattttttttaagaaattcaaggtcattattattgtacaaaataagcgctttgattaacacagctatatagtttttttaatttttaaaaaacctgtggagacggtgatcttgtctttaaaacatgatagtcctttcagtataatgtcttagattaaagacgttgcctttaatatctgttgggaaggaaatgtccagacttttcaaatctcttattatatgtttcctttttttgtttacatagggaacaatgtttatagtcgtgtgtacagtgggggtctacaacaagaagtgtatattttcaaacaattttttaatgatttaacaatttttgtaaatcattttcaggcttctgcagctgtagattctcactgtgaatcccttgcttgctcatgcataagtgtatttgcaataccaaatatacaggtttagtatttttgcctgttagtgattgtttcacatgtgtaacgttttggttgagatgttaaatggtggacgagtactgtggatgtgaatgtgggaagtaattttaatcatatgtaattggtcacaaggcctaatttgcagtaactattgctgttttatttaacaatgccttgttgctttgtatgcattaatgtttggatgtaaagattgtgtgtctatccaacagggagccacagtatttaaattgaccaacctaatgttacaactactttgaggtggccaaatgtaaactaaaagccttaattaaagtggtgcaattttgtataacttagcatcagtagttcaataaatttggattgccatgcaagggcttgcattataattacttgccacttgaatgtgttttgtgtaatgttttaacagtgctagtaaataaatacgggtttaccctg

SEQ ID NO: 24338 - DNA, 714 bp, Artificial Sequence
  derived and/or modified sequence
aaacctcgcccagattcaggcgtgtaaaccagccggagcggcgcggcagcggcaggaccgccgtggcgcctagagtagcgacccggggggagcgcggggcgacgctggctgcagggacccggtgacagcgtgagaggttttgacaagcttgcatcatgcgtgagtataagctagtcgttcttggctcaggaggcgttggaaagtctgctttgactgtacaatttgttcaaggaatttttgtagaaaaatacgatcctacgatagaagattcttatagaaagcaagttgaagtagatgcacaacagtgtatgcttgaaatcttggatactgcaggaacggagcaatttacagcaatgagggatttatacatgaaaaatggacaaggatttgcattagtttattccatcacagcacagtccacatttaacgatttacaagacctgagagaacagattcttcgagttaaagacactgatgatgttccaatgattcttgttggtaataagtgtgacttggaagatgaaagagttgtagggaaggaacaaggtcaaaatctagcaagacaatggaacaactgtgcattcttagaatcttctgcaaaatcaaaaataaatgttaatgagatcttttatgacctagtgcggcaaattaacagaaaaactccagtgcctgggaaggctcgcaaaaagtcatcatgtcagctgctttaatata

SEQ ID NO: 24339 - DNA, 2049 bp, Artificial Sequence
  derived and/or modified sequence
gggcggaagctggagcgaggctgaacgcctgacgtcaaggcgacatcgccaaacctcgcccagattcaggcgtgtaaaccagccggagcggcgcggcagcggcaggaccgccgtggcgcctagagtagcgacccggggggagcgcggggcgacgctggctgcagggacccggtgacagcgtgagaggttcgcagagtactaggttttgacaagcttgcatcatgcgtgagtataagctagtcgttcttggctcaggaggcgttggaaagtctgctttgactgtacaatttgttcaaggaatttttgtagaaaaatacgatcctacgatagaagattcttatagaaagcaagttgaagtagatgcacaacagtgtatgcttgaaatcttggatactgcaggaacggagcaatttacagcaatgagggatttatacatgaaaaatggacaaggatttgcattagtttattccatcacagcacagtccacatttaacgatttacaagacctgagagaacagattcttcgagttaaagacactgatgatgttccaatgattcttgttggtaataagtgtgacttggaagatgaaagagttgtagggaaggaacaaggtcaaaatctagcaagacaatggaacaactgtgcattcttagaatcttctgcaaaatcaaaaataaatgttaatgagatcttttatgacctagtgcggcaaattaacagaaaaactccagtgcctgggaaggctcgcaaaaagtcatcatgtcagctgctttaatatactaaatgcattgtagctctgagccaggtctgaagaactgttgcccaattcaacagtgccagcattccaactttgttaaacctaccaacatcttaaatggactttcctgtggtggtaccctttaagaggcggatgaaagctactatatcagtttgcacattctaatcactttccagtatcacaagagagatttttacttatataatagtcctagagtttgcagctggtaaaaccagaggctacatccagtattactgctaagagacattcttcatccaccaatgttgtacatgtatgaaaatggtgtactgtatactttaacatgccccatactttgtattggagagtacaataatgtaaatcctaaaagcaccactattttagcataataaaagaaagtccaaagagctcctatatagactactccagataacttcgcttctttgatacttgtagcttattgtaattttttttaagaaattcaaggtcattattattgtacaaaataagcgctttgattaacacagctatatagtttttttaatttttaaaaaacctgtggagacggtgatcttgtctttaaaacatgatagtcctttcagtataatgtcttagattaaagacgttgcctttaatatctgttgggaaggaaatgtccagacttttcaaatctcttattatatgtttcctttttttgtttacatagggaacaatgtttatagtcgtgtgtacagtgggggtctacaacaagaagtgtatattttcaaacaattttttaatgatttaacaatttttgtaaatcattttcaggcttctgcagctgtagattctcactgtgaatcccttgcttgctcatgcataagtgtatttgcaataccaaatatacaggtttagtatttttgcctgttagtgattgtttcacatgtgtaacgttttggttgagatgttaaatggtggacgagtactgtggatgtgaatgtgggaagtaattttaatcatatgtaattggtcacaaggcctaatttgcagtaactattgctgttttatttaacaatgccttgttgctttgtatgcattaatgtttggatgtaaagattgtgtgtctatccaacagggagccacagtatttaaattgaccaacctaatgttacaactactttgaggtggccaaatgtaaactaaaagccttaattaaagtggtgcaattttgtataacttagcatcagtagttcaataaatttggattgccatgcaagggcttgcattataa

SEQ ID NO: 24340 - DNA, 530 bp, Artificial Sequence
  derived and/or modified sequence
aggcgtgtaaaccagccggagcggcgcggcagcggcaggaccgccgtggcgcctagagtagcgacccggggggagcgcggggcgacgctggctgcagggacccggtgacagcgtgagaggttcgcagagttttgacaagcttgcatcatgcgtgagtataagctagtcgttcttggctcaggaggcgttggaaagtctgctttgactgtacaatttgttcaaggaatttttgtagaaaaatacgatcctacgatagaagattcttatagaaagcaagttgaagtagatgcacaacagtgtatgcttgaaatcttggatactgcaggaacggagcaatttacagcaatgagggatttatacatgaaaaatggacaaggatttgcattagtttattccatcacagcacagtccacatttaacgatttacaagacctgagagaacagattcttcgagttaaagacactgatgatgttccaatgattcttgttggtaataagtgtgacttggaagatgaaagagttgtagggaa

SEQ ID NO: 24341 - DNA, 1942 bp, Artificial Sequence
  derived and/or modified sequence
accagccggagcggcgcggcagcggcaggaccgccgtggcgcctagagtagcgacccggggggagcgcggggcgacgctggctgcagggacccggtgacagcgtgagaggtactaggttttgacaagcttgcatcatgcgtgagtataagctagtcgttcttggctcaggaggcgttggaaagtctgctttgactgtacaatttgttcaaggaatttttgtagaaaaatacgatcctacgatagaagattcttatagaaagcaagttgaagtagatgcacaacagtgtatgcttgaaatcttggatactgcaggaacggagcaatttacagcaatgagggatttatacatgaaaaatggacaaggatttgcattagtttattccatcacagcacagtccacatttaacgatttacaagacctgagagaacagattcttcgagttaaagacactgatgatgttccaatgattcttgttggtaataagtgtgacttggaagatgaaagagttgtagggaaggaacaaggtcaaaatctagacaatggaacaactgtgcattcttagaatcttctgcaaaatcaaaaataaatgttaatgagatcttttatgacctagtgcggcaaattaacagaaaaactccagtgcctgggaaggctcgcaaaaagtcatcatgtcagctgctttaatatactaaatgcattgtagctctgagccaggtctgaagaactgttgcccaattcaacagtgccagcattccaactttgttaaacctaccaacatcttaaatggactttcctgtggtggtaccctttaagaggcggatgaaagctactatatcagtttgcacattctaatcactttccagtatcacaagagagatttttacttatataatagtcctagagtttgcagctggtaaaaccagaggctacatccagtattactgctaagagacattcttcatccaccaatgttgtacatgtatgaaaatggtgtactgtatactttaacatgccccatactttgtattggagagtacaataatgtaaatcctaaaagcaccactattttagcataataaaagaaagtccaaagagctcctatatagactactccagataacttcgcttctttgatacttgtagcttattgtaattttttttaagaaattcaaggtcattattattgtacaaaataagcgctttgattaacacagctatatagtttttttaatttttaaaaaacctgtggagacggtgatcttgtctttaaaacatgatagtcctttcagtataatgtcttagattaaagacgttgcctttaatatctgttgggaaggaaatgtccagacttttcaaatctcttattatatgtttcctttttttgtttacatagggaacaatgtttatagtcgtgtgtacagtgggggtctacaacaagaagtgtatattttcaaacaattttttaatgatttaacaatttttgtaaatcattttcaggcttctgcagctgtagattctcactgtgaatcccttgcttgctcatgcataagtgtatttgcaataccaaatatacaggtttagtatttttgcctgttagtgattgtttcacatgtgtaacgttttggttgagatgttaaatggtggacgagtactgtggatgtgaatgtgggaagtaattttaatcatatgtaattggtcacaaggcctaatttgcagtaactattgctgttttatttaacaatgccttgttgctttgtatgcattaatgtttggatgtaaagattgtgtgtctatccaacagggagccacagtatttaaattgaccaacctaatgttacaactactttgaggtggccaaatgtaaactaaaagccttaattaaagtggtgcaattttgtataacttagcatcagtagttcaataaatttggattgccatgc

SEQ ID NO: 24342 - DNA, 606 bp, Artificial Sequence
  derived and/or modified sequence
aggcgtgtaaaccagccggagcggcgcggcagcggcaggaccgccgtggcgcctagagtagcgacccggggggagcgcggggcgacgctggctgcagggacccggtgacagcgtgagaggcatggtggtgtgttcctgtagtcccagctactcgggaggctgagcaggagaatcgctggaacctggcaggcagaacttgcagtgagctgagatcgtgccactgcactccagcctaggcgacagagtgagactccgtctcaaacaacaacaacaacaaaagctcctcgatggaaccatttgatagtgacaaggattgaagtactaggttttgacaagcttgcatcatgcgtgagtataagctagtcgttcttggctcaggaggcgttggaaagtctgctttgactgtacaatttgttcaaggaatttttgtagaaaaatacgatcctacgatagaagattcttatagaaagcaagttgaagtagatgcacaacagtgtatgcttgaaatcttggatactgcaggaacggagcaatttacagcaatgagggatttatacatgaaaaatggacaaggatttgcattagtttattccatcacagcacagt

SEQ ID NO: 24343 - DNA, 1072 bp, Artificial Sequence
  derived and/or modified sequence
aaacctcgcccagattcaggcgtgtaaaccagccggagcggcgcggcagcggcaggaccgccgtggcgcctagagtagcgacccggggggagcgcggggcgacgctggctgcagggacccggtgacagcgtgagagccaggcatggtggtgtgttcctgtagtcccagctactcgggaggctgagcaggagaatcgctggaacctggcaggcagaacttgcagtgagctgagatcgtgccactgcactccagcctaggcgacagagtgagactccgtctcaaacaacaacaacaacaaaagctcctcgatggaaccatttgatagtgacaaggattgaagtactaggttttgacaagcttgcatcatgcgtgagtataagctagtcgttcttggctcaggaggcgttggaaagtctgctttgactgtacaatttgttcaaggaatttttgtagaaaaatacgatcctacgatagaagattcttatagaaagcaagttgaagtagatgcacaacagtgtatgcttgaaatcttggatactgcaggaacggagcaatttacagcaatgagggatttatacatgaaaaatggacaaggatttgcattagtttattccatcacagcacagtccacatttaacgatttacaagacctgagagaacagattcttcgagttaaagacactgatgatgttccaatgattcttgttggtaataagtgtgacttggaagatgaaagagttgtagggaaggaacaaggtcaaaatctagcaagacaatggaacaactgtgcattcttagaatcttctgcaaaatcaaaaataaatgttaatgagatcttttatgacctagtgcggcaaattaacagaaaaactccagtgcctgggaaggctcgcaaaaagtcatcatgtcagctgctttaatatactaaatgcattgtagctctgagccaggtctgaagaactgttgcccaattcaacagtgccagcattccaactttgttaaacctaccaacatcttaaatggactttcctgtggtggtaccctttaagaggcggatgaaagctactatatc

SEQ ID NO: 24344 - DNA, 591 bp, Artificial Sequence
  derived and/or modified sequence
aaacctcgcccagattcaggcgtgtaaaccagccggagcggcgcggcagcggcaggaccgccgtggcgcctagagtagcgacccggggggagcgcggggcgacgctggctgcagggacccggtgacagcgtgagaggttcgcagaggtctcacttgtcacccaggctggagtgcagtggcacaaacatgggtcactgcagcctcgactcctgggctcgagtgatgctcccacctcagcctctcaagtagctgggactacaggtactaggttttgacaagcttgcatcatgcgtgagtataagctagtcgttcttggctcaggaggcgttggaaagtctgctttgactgtacaatttgttcaaggaatttttgtagaaaaatacgatcctacgatagaagattcttatagaaagcaagttgaagtagatgcacaacagtgtatgcttgaaatcttggatactgcaggaacggagcaatttacagcaatgagggatttatacatgaaaaatggacaaggatttgcattagtttattccatcacagcacagtccacatttaacgatttacaagacctgagagaacagattcttc

SEQ ID NO: 24345 - DNA, 571 bp, Artificial Sequence
  derived and/or modified sequence
gtgtaaaccagccggagcggcgcggcagcggcaggaccgccgtggcgcctagagtagcgacccggggggagcgcggggcgacgctggctgcagggacccggtgacagcgtgagaggttcgcagagtgagtactaggttttgacaagcttgcatcatgcgtgagtataagctagtcgttcttggctcaggaggcgttggaaagtctgctttgactgtacaatttgttcaaggaatttttgtagaaaaatacgatcctacgatagaagattcttatagaaagcaagttgaagtagatgcacaacagtgtatgcttgaaatcttggatactgcaggaacggagcaatttacagcaatgagggatttatacatgaaaaatggacaaggatttgcattagtttattccatcacagcacagtccacatttaacgatttacaagacctgagagaacagattcttcgagttaaagacactgatgatgttccaatgattcttgttggtaataagtgtgacttggaagatgaaagagttgtagggaaggaacaaggtcaaaatctagcaagacaatggaac

SEQ ID NO: 24346 - DNA, 561 bp, Artificial Sequence
  derived and/or modified sequence
aaacctcgcccagattcaggcgtgtaaaccagccggagcggcgcggcagcggcaggaccgccgtggcgcctagagtagcgacccggggggagcgcggggcgacgctggctgcagggacccggtgacagcgtgagagacagggtctcacttgtcacccaggctggagtgcagtggcacaaacatgggtcactgcagcctcgactcctgggctcgagtgatgctcccacctcagcctctcaagtagctgggactacaggtactaggttttgacaagcttgcatcatgcgtgagtataagctagtcgttcttggctcaggaggcgttggaaagtctgctttgactgtacaatttgttcaaggaatttttgtagaaaaatacgatcctacgatagaagattcttatagaaagcaagttgaagtagatgcacaacagtgtatgcttgaaatcttggatactgcaggaacggagcaatttacagcaatgagggatttatacatgaaaaatggacaaggatttgcattagtttattccatcacagcacagtccacatttaacgattta

SEQ ID NO: 24347 - DNA, 633 bp, Artificial Sequence
  derived and/or modified sequence
agattcaggcgtgtaaaccagccggagcggcgcggcagcggcaggaccgccgtggcgcctagagtagcgacccggggggagcgcggggcgacgctggctgcagggacccgccaggcatggtggtgtgttcctgtagtcccagctactcgggaggctgagcaggagaatcgctggaacctggcaggcagaacttgcagtgagctgagatcgtgccactgcactccagcctaggcgacagagtgagactccgtctcaaacaacaacaacaacaaaagctcctcgatggaaccatttgatagtgacaaggattgaagtactaggttttgacaagcttgcatcatgcgtgagtataagctagtcgttcttggctcaggaggcgttggaaagtctgctttgactgtacaatttgttcaaggaatttttgtagaaaaatacgatcctacgatagaagattcttatagaaagcaagttgaagtagatgcacaacagtgtatgcttgaaatcttggatactgcaggaacggagcaatttacagcaatgagggatttatacatgaaaaatggacaaggatttgcattagtttattccatcacagcacagtccacatttaacgatttacaagacctgagagaa

SEQ ID NO: 24348 - DNA, 640 bp, Artificial Sequence
  derived and/or modified sequence
tcgcccagattcaggcgtgtaaaccagccggagcggcgcggcagcggcaggaccgccgtggcgcctagagtagcgacccggggggagcgcggggcgacgctggctgcagggacccggtgacagcgtgagagggtctcacttgtcacccaggctggagtgcagtggcacaaacatgggtcactgcagcctcgactcctgggctcgagtgatgctcccacctcagcctctcaagtagctgggactacaggtactaggttttgacaagcttgcatcatgcgtgagtataagctagtcgttcttggctcaggaggcgttggaaagtctgctttgactgtacaatttgttcaaggaatttttgtagaaaaatacgatcctacgatagaagattcttatagaaagcaagttgaagtagatgcacaacagtgtatgcttgaaatcttggatactgcaggaacggagcaatttacagcaatgagggatttatacatgaaaaatggacaaggatttgcattagtttattccatcacagcacagtccacatttaacgatttacaagacctgagagaacagattcttcgagttaaagacactgatgatgttccaatgattcttgttggtaataagtgtgacttggaagatg

SEQ ID NO: 24349 - DNA, 545 bp, Artificial Sequence
  derived and/or modified sequence
aggaccgccgtggcgcctagagtagcgacccggggggagcgcggggcgacgctggctgcagggacccggtgacagcgtgagaggttcgcagaccaggcatggtggtgtgttcctgtagtcccagctactcgggaggctgagcaggagaatcgctggaacctggcaggcagaactttgcagtggcacaaacatgggtcactgcagcctcgactcctgggctcgagtgatgctcccacctcagcctctcaagtagctgggactacaggtactaggttttgacaagcttgcatcatgcgtgagtataagctagtcgttcttggctcaggaggcgttggaaagtctgctttgactgtacaatttgttcaaggaatttttgtagaaaaatacgatcctacgatagaagattcttatagaaagcaagttgaagtagatgcacaacagtgtatgcttgaaatcttggatactgcaggaacggagcaatttacagcaatgagggatttatacatgaaaaatggacaaggatttgcattagtttattccatcac

SEQ ID NO: 24350 - DNA, 555 bp, Artificial Sequence
  derived and/or modified sequence
atgagagagtacaagctggtggtgctgggcagcggcggcgtgggcaagagcgccctgaccgtgcagttcgtgcagggcatcttcgtggagaagtacgaccccaccatcgaggacagctacagaaagcaggtggaggtggacgcccagcagtgcatgctggagatcctggacaccgccggcaccgagcagttcaccgccatgagagacctgtacatgaagaacggccagggcttcgccctggtgtacagcatcaccgcccagagcaccttcaacgacctgcaggacctgagagagcagatcctgagagtgaaggacaccgacgacgtgcccatgatcctggtgggcaacaagtgcgacctggaggacgagagagtggtgggcaaggagcagggccagaacctggccagacagtggaacaactgcgccttcctggagagcagcgccaagagcaagatcaacgtgaacgagatcttctacgacctggtgagacagatcaacagaaagacccccgtgcccggcaaggccagaaagaagagcagctgccagctgctgtag

SEQ ID NO: 24351 - DNA, 384 bp, Artificial Sequence
  derived and/or modified sequence
atgagagagtacaagctggtggtgctgggcagcggcggcgtgggcaagagcgccctgaccgtgcagttcgtgcagggcatcttcgtggagaagtacgaccccaccatcgaggacagctacagaaagcaggtggaggtggacgcccagcagtgcatgctggagatcctggacaccgccggcaccgagcagttcaccgccatgagagacctgtacatgaagaacggccagggcttcgccctggtgtacagcatcaccgcccagagcaccttcaacgacctgcaggacctgagagagcagatcctgagagtgaaggacaccgacgacgtgcccatgatcctggtgggcaacaagtgcgacctggaggacgagagagtggtgggctag

SEQ ID NO: 24352 - DNA, 429 bp, Artificial Sequence
  derived and/or modified sequence
atgagagagtacaagctggtggtgctgggcagcggcggcgtgggcaagagcgccctgaccgtgcagttcgtgcagggcatcttcgtggagaagtacgaccccaccatcgaggacagctacagaaagcaggtggaggtggacgcccagcagtgcatgctggagatcctggacaccgccggcaccgagcagttcaccgccatgagagacctgtacatgaagaacggccagggcttcgccctggtgtacagcatcaccgcccagagcaccttcaacgacctgcaggacctgagagagcagatcctgagagtgaaggacaccgacgacgtgcccatgatcctggtgggcaacaagtgcgacctggaggacgagagagtggtgggcaaggagcagggccagaacctggacaacggcaccaccgtgcacagctag

SEQ ID NO: 24353 - DNA, 264 bp, Artificial Sequence
  derived and/or modified sequence
atgagagagtacaagctggtggtgctgggcagcggcggcgtgggcaagagcgccctgaccgtgcagttcgtgcagggcatcttcgtggagaagtacgaccccaccatcgaggacagctacagaaagcaggtggaggtggacgcccagcagtgcatgctggagatcctggacaccgccggcaccgagcagttcaccgccatgagagacctgtacatgaagaacggccagggcttcgccctggtgtacagcatcaccgcccagtag

SEQ ID NO: 24354 - DNA, 306 bp, Artificial Sequence
  derived and/or modified sequence
atgagagagtacaagctggtggtgctgggcagcggcggcgtgggcaagagcgccctgaccgtgcagttcgtgcagggcatcttcgtggagaagtacgaccccaccatcgaggacagctacagaaagcaggtggaggtggacgcccagcagtgcatgctggagatcctggacaccgccggcaccgagcagttcaccgccatgagagacctgtacatgaagaacggccagggcttcgccctggtgtacagcatcaccgcccagagcaccttcaacgacctgcaggacctgagagagcagatcctgtag

SEQ ID NO: 24355 - DNA, 420 bp, Artificial Sequence
  derived and/or modified sequence
atgagagagtacaagctggtggtgctgggcagcggcggcgtgggcaagagcgccctgaccgtgcagttcgtgcagggcatcttcgtggagaagtacgaccccaccatcgaggacagctacagaaagcaggtggaggtggacgcccagcagtgcatgctggagatcctggacaccgccggcaccgagcagttcaccgccatgagagacctgtacatgaagaacggccagggcttcgccctggtgtacagcatcaccgcccagagcaccttcaacgacctgcaggacctgagagagcagatcctgagagtgaaggacaccgacgacgtgcccatgatcctggtgggcaacaagtgcgacctggaggacgagagagtggtgggcaaggagcagggccagaacctggccagacagtggaactag

SEQ ID NO: 24356 - DNA, 282 bp, Artificial Sequence
  derived and/or modified sequence
atgagagagtacaagctggtggtgctgggcagcggcggcgtgggcaagagcgccctgaccgtgcagttcgtgcagggcatcttcgtggagaagtacgaccccaccatcgaggacagctacagaaagcaggtggaggtggacgcccagcagtgcatgctggagatcctggacaccgccggcaccgagcagttcaccgccatgagagacctgtacatgaagaacggccagggcttcgccctggtgtacagcatcaccgcccagagcaccttcaacgacctgtag

SEQ ID NO: 24357 - DNA, 297 bp, Artificial Sequence
  derived and/or modified sequence
atgagagagtacaagctggtggtgctgggcagcggcggcgtgggcaagagcgccctgaccgtgcagttcgtgcagggcatcttcgtggagaagtacgaccccaccatcgaggacagctacagaaagcaggtggaggtggacgcccagcagtgcatgctggagatcctggacaccgccggcaccgagcagttcaccgccatgagagacctgtacatgaagaacggccagggcttcgccctggtgtacagcatcaccgcccagagcaccttcaacgacctgcaggacctgagagagtag

SEQ ID NO: 24358 - DNA, 369 bp, Artificial Sequence
  derived and/or modified sequence
atgagagagtacaagctggtggtgctgggcagcggcggcgtgggcaagagcgccctgaccgtgcagttcgtgcagggcatcttcgtggagaagtacgaccccaccatcgaggacagctacagaaagcaggtggaggtggacgcccagcagtgcatgctggagatcctggacaccgccggcaccgagcagttcaccgccatgagagacctgtacatgaagaacggccagggcttcgccctggtgtacagcatcaccgcccagagcaccttcaacgacctgcaggacctgagagagcagatcctgagagtgaaggacaccgacgacgtgcccatgatcctggtgggcaacaagtgcgacctggaggactag

SEQ ID NO: 24359 - DNA, 258 bp, Artificial Sequence
  derived and/or modified sequence
atgagagagtacaagctggtggtgctgggcagcggcggcgtgggcaagagcgccctgaccgtgcagttcgtgcagggcatcttcgtggagaagtacgaccccaccatcgaggacagctacagaaagcaggtggaggtggacgcccagcagtgcatgctggagatcctggacaccgccggcaccgagcagttcaccgccatgagagacctgtacatgaagaacggccagggcttcgccctggtgtacagcatcacctag

SEQ ID NO: 24360 - protein, 572 aa, Artificial Sequence
  derived and/or modified sequence
MAAPRPSPAISVSVSAPAFYAPQKKFGPVVAPKPKVNPFRPGDSEPPPAPGAQRAQMGRVGEIPPPPPEDFPLPPPPLAGDGDDAEGALGGAFPPPPPPIEESFPPAPLEEEIFPSPPPPPEEEGGPEAPIPPPPQPREKVSSIDLEIDSLSSLLDDMTKNDPFKARVSSGYVPPPVATPFSSKSSTKPAAGGTAPLPPWKSPSSSQPLPQVPAPAQSQTQFHVQPQPQPKPQVQLHVQSQTQPVSLANTQPRGPPASSPAPAPKFSPVTPKFTPVASKFSPGAPGGSGSQPNQKLGHPEALSAGTGSPQPPSFTYAQQREKPRVQEKQHPVPPPAQNQNQVRSPGAPGPLTLKEVEELEQLTQQLMQDMEHPQRQNVAVNELCGRCHQPLARAQPAVRALGQLFHIACFTCHQCAQQLQGQQFYSLEGAPYCEGCYTDTLEKCNTCGEPITDRMLRATGKAYHPHCFTCVVCARPLEGTSFIVDQANRPHCVPDYHKQYAPRCSVCSEPIMPEPGRDETVRVVALDKNFHMKCYKCEDCGKPLSIEADDNGCFPLDGHVLCRKCHTARAQT

SEQ ID NO: 24361 - protein, 415 aa, Artificial Sequence
  derived and/or modified sequence
MTKNDPFKARVSSGYVPPPVATPFSSKSSTKPAAGGTAPLPPWKSPSSSQPLPQVPAPAQSQTQFHVQPQPQPKPQVQLHVQSQTQPVSLANTQPRGPPASSPAPAPKFSPVTPKFTPVASKFSPGAPGGSGSQPNQKLGHPEALSAGTGSPQPPSFTYAQQREKPRVQEKQHPVPPPAQNQNQVRSPGAPGPLTLKEVEELEQLTQQLMQDMEHPQRQNVAVNELCGRCHQPLARAQPAVRALGQLFHIACFTCHQCAQQLQGQQFYSLEGAPYCEGCYTDTLEKCNTCGEPITDRMLRATGKAYHPHCFTCVVCARPLEGTSFIVDQANRPHCVPDYHKQYAPRCSVCSEPIMPEPGRDETVRVVALDKNFHMKCYKCEDCGKPLSIEADDNGCFPLDGHVLCRKCHTARAQT

SEQ ID NO: 24362 - protein, 164 aa, Artificial Sequence
  derived and/or modified sequence
MAAPRPSPAISVSVSAPAFYAPQKKFGPVVAPKPKVNPFRPGDSEPPPAPGAQRAQMGRVGEIPPPPPEDFPLPPPPLAGDGDDAEGALGGAFPPPPPPIEESFPPAPLEEEIFPSPPPPPEEEGGPEAPIPPPPQPREKVSSIDLEIDSLSSLLDDMTKNDPF

SEQ ID NO: 24363 - DNA, 2325 bp, Artificial Sequence
  derived and/or modified sequence
cccgccccctctcttctccctccctcctccttccgtgtgtccctccccgcccggctggaggctgctccggaccgggacgcagagtctgcggacccggcgccgaggcggccacccgagacgcggcgcgcacgctccggcctgcgcagcccggcccggccatggcggccccccgcccgtctcccgcgatctccgtttcggtctcggctccggctttttacgccccgcagaagaagttcggccctgtggtggccccaaagcccaaagtgaatcccttccggcccggggacagcgagcctcccccggcacccggggcccagcgcgcacagatgggccgggtgggcgagattcccccgccgcccccggaagactttcccctgcctccacctccccttgctggggatggcgacgatgcagagggtgctctgggaggtgccttcccgccgccccctcccccgatcgaggaatcatttccccctgcgcctctggaggaggagatcttcccttccccgccgcctcctccggaggaggagggagggcctgaggcccccataccgcccccaccacagcccagggagaaggtgagcagtattgatttggagatcgactctctgtcctcactgctggatgacatgaccaagaatgatcctttcaaagcccgggtgtcatctggatatgtgcccccaccagtggccactccattcagttccaagtccagtaccaagcctgcagccgggggcacagcacccctgcctccttggaagtccccttccagctcccagcctctgccccaggttccggctccggctcagagccagacacagttccatgttcagccccagccccagcccaagcctcaggtccaactccatgtccagtcccagacccagcctgtgtctttggctaacacccagccccgagggcccccagcctcatctccggctccagcccctaagttttctccagtgactcctaagtttactcctgtggcttccaagttcagtcctggagccccaggtggatctgggtcacaaccaaatcaaaaattggggcaccccgaagctctttctgctggcacaggctcccctcaacctcccagcttcacctatgcccagcagagggagaagccccgagtgcaggagaagcagcaccccgtgcccccaccggctcagaaccaaaaccaggtgcgctcccctggggccccagggcccctgactctgaaggaggtggaggagctggagcagctgacccagcagctaatgcaggacatggagcatcctcagaggcagaatgtggctgtcaacgaactctgcggccgatgccatcaacccctggcccgggcgcagccagccgtccgcgctctagggcagctgttccacatcgcctgcttcacctgccaccagtgtgcgcagcagctccagggccagcagttctacagtctggagggggcgccgtactgcgagggctgttacactgacaccctggagaagtgtaacacctgcggggagcccatcactgaccgcatgctgagggccacgggcaaggcctatcacccgcactgcttcacctgtgtggtctgcgcccgccccctggagggcacctccttcatcgtggaccaggccaaccggccccactgtgtccccgactaccacaagcagtacgccccgaggtgctccgtctgctctgagcccatcatgcctgagcctggccgagatgagactgtgcgagtggtcgccctggacaagaacttccacatgaagtgttacaagtgtgaggactgcgggaagcccctgtcgattgaggcagatgacaatggctgcttccccctggacggtcacgtgctctgtcggaagtgccacactgctagagcccagacctgagtgaggacaggccctcttcagaccgcagtccatgccccattgtggaccacccacactgagaccacctgcccccacctcagttattgttttgatgtctagcccctcccatttccaacccctccctagcatcccaggtgccctgacccaggacccaacatggtctagggatgcaggatccccgccctggggtctggtcctcgcccatcctgcagggattgcccaccgtcttccagacaccccacctgaggggggcaccaggtttagtgctgctgctttcactgctgcacccgcgccctcggccggccccccgagcagcctttgtactctgcttgcggagggctgggagaccctccaggacattcccaccctcccccatgctgccaagttgtagctatagctacaaataaaaaaaaaccttgttttccagaaaaaaaaaaaaaaaaaaaaa

SEQ ID NO: 24364 - DNA, 1719 bp, Artificial Sequence
  derived and/or modified sequence
atggccgcccccagacccagccccgccatcagcgtgagcgtgagcgcccccgccttctacgccccccagaagaagttcggccccgtggtggcccccaagcccaaggtgaaccccttcagacccggcgacagcgagcccccccccgcccccggcgcccagagagcccagatgggcagagtgggcgagatccccccccccccccccgaggacttccccctgccccccccccccctggccggcgacggcgacgacgccgagggcgccctgggcggcgccttcccccccccccccccccccatcgaggagagcttcccccccgcccccctggaggaggagatcttccccagccccccccccccccccgaggaggagggcggccccgaggcccccatccccccccccccccagcccagagagaaggtgagcagcatcgacctggagatcgacagcctgagcagcctgctggacgacatgaccaagaacgaccccttcaaggccagagtgagcagcggctacgtgcccccccccgtggccacccccttcagcagcaagagcagcaccaagcccgccgccggcggcaccgcccccctgcccccctggaagagccccagcagcagccagcccctgccccaggtgcccgcccccgcccagagccagacccagttccacgtgcagccccagccccagcccaagccccaggtgcagctgcacgtgcagagccagacccagcccgtgagcctggccaacacccagcccagaggcccccccgccagcagccccgcccccgcccccaagttcagccccgtgacccccaagttcacccccgtggccagcaagttcagccccggcgcccccggcggcagcggcagccagcccaaccagaagctgggccaccccgaggccctgagcgccggcaccggcagcccccagccccccagcttcacctacgcccagcagagagagaagcccagagtgcaggagaagcagcaccccgtgcccccccccgcccagaaccagaaccaggtgagaagccccggcgcccccggccccctgaccctgaaggaggtggaggagctggagcagctgacccagcagctgatgcaggacatggagcacccccagagacagaacgtggccgtgaacgagctgtgcggcagatgccaccagcccctggccagagcccagcccgccgtgagagccctgggccagctgttccacatcgcctgcttcacctgccaccagtgcgcccagcagctgcagggccagcagttctacagcctggagggcgccccctactgcgagggctgctacaccgacaccctggagaagtgcaacacctgcggcgagcccatcaccgacagaatgctgagagccaccggcaaggcctaccacccccactgcttcacctgcgtggtgtgcgccagacccctggagggcaccagcttcatcgtggaccaggccaacagaccccactgcgtgcccgactaccacaagcagtacgcccccagatgcagcgtgtgcagcgagcccatcatgcccgagcccggcagagacgagaccgtgagagtggtggccctggacaagaacttccacatgaagtgctacaagtgcgaggactgcggcaagcccctgagcatcgaggccgacgacaacggctgcttccccctggacggccacgtgctgtgcagaaagtgccacaccgccagagcccagacctag

SEQ ID NO: 24365 - DNA, 1248 bp, Artificial Sequence
  derived and/or modified sequence
atgaccaagaacgaccccttcaaggccagagtgagcagcggctacgtgcccccccccgtggccacccccttcagcagcaagagcagcaccaagcccgccgccggcggcaccgcccccctgcccccctggaagagccccagcagcagccagcccctgccccaggtgcccgcccccgcccagagccagacccagttccacgtgcagccccagccccagcccaagccccaggtgcagctgcacgtgcagagccagacccagcccgtgagcctggccaacacccagcccagaggcccccccgccagcagccccgcccccgcccccaagttcagccccgtgacccccaagttcacccccgtggccagcaagttcagccccggcgcccccggcggcagcggcagccagcccaaccagaagctgggccaccccgaggccctgagcgccggcaccggcagcccccagccccccagcttcacctacgcccagcagagagagaagcccagagtgcaggagaagcagcaccccgtgcccccccccgcccagaaccagaaccaggtgagaagccccggcgcccccggccccctgaccctgaaggaggtggaggagctggagcagctgacccagcagctgatgcaggacatggagcacccccagagacagaacgtggccgtgaacgagctgtgcggcagatgccaccagcccctggccagagcccagcccgccgtgagagccctgggccagctgttccacatcgcctgcttcacctgccaccagtgcgcccagcagctgcagggccagcagttctacagcctggagggcgccccctactgcgagggctgctacaccgacaccctggagaagtgcaacacctgcggcgagcccatcaccgacagaatgctgagagccaccggcaaggcctaccacccccactgcttcacctgcgtggtgtgcgccagacccctggagggcaccagcttcatcgtggaccaggccaacagaccccactgcgtgcccgactaccacaagcagtacgcccccagatgcagcgtgtgcagcgagcccatcatgcccgagcccggcagagacgagaccgtgagagtggtggccctggacaagaacttccacatgaagtgctacaagtgcgaggactgcggcaagcccctgagcatcgaggccgacgacaacggctgcttccccctggacggccacgtgctgtgcagaaagtgccacaccgccagagcccagacctag

SEQ ID NO: 24366 - DNA, 495 bp, Artificial Sequence
  derived and/or modified sequence
atggccgcccccagacccagccccgccatcagcgtgagcgtgagcgcccccgccttctacgccccccagaagaagttcggccccgtggtggcccccaagcccaaggtgaaccccttcagacccggcgacagcgagcccccccccgcccccggcgcccagagagcccagatgggcagagtgggcgagatccccccccccccccccgaggacttccccctgccccccccccccctggccggcgacggcgacgacgccgagggcgccctgggcggcgccttcccccccccccccccccccatcgaggagagcttcccccccgcccccctggaggaggagatcttccccagccccccccccccccccgaggaggagggcggccccgaggcccccatccccccccccccccagcccagagagaaggtgagcagcatcgacctggagatcgacagcctgagcagcctgctggacgacatgaccaagaacgaccccttctag

SEQ ID NO: 24367 - DNA, 1719 bp, Artificial Sequence
  derived and/or modified sequence
atggccgctccgcgcccgagccctgcaatctcagtaagtgtgtccgcaccagctttctatgccccccagaagaaattcggtcccgtcgtggcacccaagcctaaggtcaatccctttaggcctggcgatagcgagccccccccggcaccaggcgctcagcgagctcagatgggccgcgtgggagagatccccccaccgccccccgaggacttcccccttccaccgcccccactggctggagatggagacgatgcagaaggcgctctcggtggcgctttccccccccctcctccacctatagaggaatccttccctcctgcccccctggaagaagagatcttccctagtcctcccccccctcccgaggaagagggagggcctgaggcacctattccccctcccccacaacctcgcgagaaggtgtctagcatcgatctggaaattgacagcctatcgtctttgcttgatgatatgacgaaaaacgatccttttaaggcacgggtgagctccggctacgttccaccacccgtcgccactccctttagttccaagagttccaccaaacctgccgcggggggcaccgccccgttacccccctggaaaagtccctctagttctcagccgctgccccaggtacctgcccccgcccaaagccaaacgcagttccacgtgcaacctcaaccgcagccaaagcctcaggtgcaactgcacgtccagtcccagacgcagccggtaagtctcgctaacacacagccccgtggacctcccgcctcctctcccgcaccggcccctaagttcagcccagtaactccgaaatttacacccgtggcttcaaagttctcacccggagcccccggggggtcaggaagccagcctaatcagaagcttggccaccctgaagcattgagcgccggcacaggctcccctcagccccccagcttcacttacgcccagcagagggagaagcctcgcgtgcaggagaagcagcatccggtgcctccaccggcgcagaatcagaatcaggtccgaagccccggagcccctggtccgctgaccttgaaagaagtcgaagaattggagcagctcacccagcagctcatgcaagatatggagcaccctcagagacagaacgtggctgtcaacgagctgtgtgggcgctgccaccagccactagccagggcccaacccgccgtgagagcactgggacaactattccacattgcttgttttacgtgccatcagtgtgcacagcagcttcagggacagcagttctacagcttagagggcgctccctactgcgagggatgctatacggatacgttggagaagtgtaacacctgtggagagcccatcacagaccgcatgctgcgcgctactggcaaagcttaccacccccactgttttacatgcgtagtgtgcgccaggcctctcgagggtacttcctttattgtcgaccaggccaataggccccactgcgtccctgactatcacaagcaatacgccccacgctgctccgtatgtagtgagcccatcatgcctgagccaggtcgggatgagacagtccgcgtggtagctctggacaagaattttcatatgaagtgttataagtgtgaagattgtggaaaacctctgagcattgaggctgacgataatgggtgtttccccctcgatgggcatgtcttgtgcaggaaatgtcatacagctcgggcccagacttag

SEQ ID NO: 24368 - DNA, 1248 bp, Artificial Sequence
  derived and/or modified sequence
atgacaaagaacgaccctttcaaagctcgggtgtcaagcgggtacgttcccccacctgtggccaccccttttagctctaagtccagcaccaagcccgcagccggtggcactgcccccttgcccccctggaagtccccatcttcgtcacagccattacctcaagttcccgcacctgcacagtcgcagacacaattccacgtgcagccgcagccacagccaaagccccaagtacaattacacgtccagtcacagacccagcctgtatccctggccaatactcaacctcgcggcccacctgctagtagccctgctcccgctccaaagttctcgccagttacccctaagtttacacccgttgcgtccaagtttagtcctggggctcctggaggcagcggcagccagccaaaccagaaactgggccaccccgaggcattgtccgccggcacaggcagtccccaacccccttctttcacatatgcccaacagagagagaagccacgagttcaggagaagcagcatccagtacccccccctgcgcagaatcagaatcaggtccggtccccaggggcccccgggcctttgaccctgaaggaagtagaggagttggagcagcttactcagcagcttatgcaggatatggagcatccacagcgtcagaacgttgctgtgaacgagctatgtggccggtgccatcagccactagctagggcacaacctgcggtcagagctctggggcagctgttccatatcgcctgttttacatgccatcaatgcgcacagcagctgcagggtcagcagttctattccctggaaggggccccttactgcgagggatgttacacagataccctggagaaatgtaatacctgtggcgaaccaataactgataggatgctgagggctactggtaaagcataccatccacattgcttcacctgcgtggtatgtgcgcgccccctagaagggacttcatttattgttgaccaggcgaatcgtccccactgcgtacctgattaccacaagcagtacgcaccgcgctgctccgtctgcagcgagcccatcatgcctgaaccagggcgcgacgagaccgtcagggtggtggcactcgacaagaactttcacatgaagtgctacaagtgtgaggactgcggaaaacctctgtcgattgaagcagatgacaacggatgtttcccacttgacggtcacgtcctttgtcggaaatgccacaccgcacgtgcgcagacctag

SEQ ID NO: 24369 - DNA, 495 bp, Artificial Sequence
  derived and/or modified sequence
atggccgcacctagaccaagccctgccatatcagtttcagtgagcgccccagccttctatgcaccgcaaaagaaattcggtcctgtagtggcacccaagcctaaggtgaatcctttccgtcctggggatagcgaaccaccaccagcccccggggcacagagggcacagatgggaagggtcggcgagataccgccaccacccccggaggacttccctctgccaccacctcctctcgccggagacggtgatgacgctgagggtgcactgggtggggcttttccaccccctcctccacccattgaggagagctttccccctgcgcccctagaagaagaaatttttccttctcctccaccaccaccagaagaggaaggcggcccagaagccccgataccccctccaccacagccacgggagaaggtgtcaagtattgatttagagattgactctttaagcagcttattggatgacatgaccaaaaatgatcccttctag

SEQ ID NO: 24370 - DNA, 1719 bp, Artificial Sequence
  derived and/or modified sequence
atggccgccccccggcccagccctgccatctctgtgtctgtgtctgccccagccttctacgccccccagaagaagtttggacctgtggtggcccccaagcccaaggtgaaccccttccggcctggggacagcgagcccccaccagcccctggggcccagagggcccagatgggccgggtgggggagatccccccacctcctcctgaggacttccccctgcccccaccacccctggccggagatggagatgatgctgagggcgccctgggcggggccttccccccacctcctccacccatcgaggagagcttccccccagcccccctggaggaggagatcttccccagccccccacctcctcctgaggaggagggcggccctgaggcccccatccccccaccaccccagccccgggagaaggtgagcagcattgacctggagattgacagcctgagcagcctgctggatgacatgaccaagaatgaccccttcaaggcccgggtgagcagcggctacgtgcccccacctgtggccacccccttcagcagcaagagcagcaccaagccagctgctgggggcacagcccccctgcccccctggaagagccccagcagcagccagcccctgccccaggtgcctgccccagcccagagccagacccagttccacgtgcagccccagccccagcccaagccccaggtgcagctgcacgtgcagagccagacccagcctgtgtccctggccaacacccagccccggggccccccagccagcagccctgccccagcccccaagttcagccctgtgacccccaagttcacccctgtggccagcaagttcagccctggggcccctgggggcagcggcagccagcccaaccagaagctgggccaccctgaggccctgtctgctggcaccggcagcccccagcccccatccttcacctacgcccagcagcgggagaagccccgggtgcaggagaagcagcaccctgtgcccccaccagcccagaaccagaaccaggtgcgcagccctggggcccctggccccctgaccctgaaggaggtggaggagctggagcagctgacccagcagctgatgcaggacatggagcacccccagaggcagaatgtggccgtgaatgagctgtgtggccgctgccaccagcccctggcccgggcccagcctgctgtgcgggccctgggccagctgttccacatcgcctgcttcacctgccaccagtgtgcccagcagctgcagggccagcagttctacagcctggagggcgccccctactgtgagggctgctacacagacaccctggagaagtgcaacacctgtggggagcccatcacagacaggatgctgcgggccaccgggaaggcctaccacccccactgcttcacctgtgtggtgtgtgcccggcccctggagggcaccagcttcatcgtggaccaggccaaccggccccactgtgtgcctgactaccacaagcagtatgccccccgctgcagcgtgtgcagcgagcccatcatgcctgagcccggcagagatgagaccgtgcgggtggtggccctggacaagaacttccacatgaagtgctacaagtgtgaggactgtgggaagcccctgagcattgaagcagatgacaatggctgcttccccctggatggccacgtgctgtgcaggaagtgccacacagcccgggcccagacctag

SEQ ID NO: 24371 - DNA, 1248 bp, Artificial Sequence
  derived and/or modified sequence
atgaccaagaatgaccccttcaaggcccgggtgagcagcggctacgtgcccccacctgtggccacccccttcagcagcaagagcagcaccaagccagctgctgggggcacagcccccctgcccccctggaagagccccagcagcagccagcccctgccccaggtgcctgccccagcccagagccagacccagttccacgtgcagccccagccccagcccaagccccaggtgcagctgcacgtgcagagccagacccagcctgtgtccctggccaacacccagccccggggccccccagccagcagccctgccccagcccccaagttcagccctgtgacccccaagttcacccctgtggccagcaagttcagccctggggcccctgggggcagcggcagccagcccaaccagaagctgggccaccctgaggccctgtctgctggcaccggcagcccccagccccccagcttcacctacgcccagcagcgggagaagccccgggtgcaggagaagcagcaccctgtgcccccaccagcccagaaccagaaccaggtgcgcagccctggggcccctggccccctgaccctgaaggaggtggaggagctggagcagctgacccagcagctgatgcaggacatggagcacccccagaggcagaatgtggccgtgaatgagctgtgtggccgctgccaccagcccctggcccgggcccagcctgctgtgcgggccctgggccagctgttccacatcgcctgcttcacctgccaccagtgtgcccagcagctgcagggccagcagttctacagcctggagggcgccccctactgtgagggctgctacacagacaccctggagaagtgcaacacctgtggggagcccatcacagacaggatgctgcgggccaccgggaaggcctaccacccccactgcttcacctgtgtggtgtgtgcccggcccctggagggcaccagcttcatcgtggaccaggccaaccggccccactgtgtgcctgactaccacaagcagtatgccccccgctgcagcgtgtgcagcgagcccatcatgcctgagcccggcagagatgaaacagtgcgggtggtggccctggacaagaacttccacatgaagtgctacaagtgtgaggactgtgggaagcccctgagcattgaagcagatgacaatggctgcttccccctggatggccacgtgctgtgcaggaagtgccacacagcccgggcccagacctag

SEQ ID NO: 24372 - DNA, 495 bp, Artificial Sequence
  derived and/or modified sequence
atggccgccccccggcccagccctgccatctctgtgtctgtgtctgccccagccttctacgccccccagaagaagtttggacctgtggtggcccccaagcccaaggtgaaccccttccggcctggggacagcgagcccccaccagcccctggggcccagagggcccagatgggccgggtgggggagatccccccacctcctcctgaggacttccccctgcccccaccacccctggccggagatggagatgatgctgagggcgccctgggcggggccttccccccacctcctccacccatcgaggagagcttccccccagcccccctggaggaggagatcttccccagccccccacctcctcctgaggaggagggcggccctgaggcccccatccccccaccaccccagccccgggagaaggtgagcagcattgacctggagattgacagcctgagcagcctgctggatgacatgaccaagaatgaccccttctag

SEQ ID NO: 24373 - DNA, 1719 bp, Artificial Sequence
  derived and/or modified sequence
atggccgccccccggcccagccccgccatcagcgtgagcgtgagcgcaccagccttttatgctccacaaaagaaatttggaccagtggtagctccgaaaccaaaggtcaatccttttcgtccaggcgattctgagccccctcccgcccctggagctcaacgagctcaaatgggcagagtgggcgaaataccccctcctccgcccgaagactttcccttaccacccccccccctggcaggagacggtgatgacgcagagggcgcactgggcggggcgttccccccacctcctccacctatcgaggaatccttcccacctgctccattggaggaggaaatattccctagtcctccaccgccacctgaggaggagggaggcccagaagctcctatacccccacctccccagccacgcgagaaggtttcttctatcgacctggaaatagactctttgagctctttgctcgatgatatgactaaaaatgaccccttcaaagccagggtcagcagcggctacgtccccccacccgtcgctacaccattctcttctaagtctagtacaaagcctgccgcgggggggactgcccccttgccaccctggaagtccccaagctcatctcaaccattgcctcaggtccctgctcccgcccagagccagacgcagtttcatgttcagccacaacctcaacccaaaccccaagtccagctgcatgtccagagccagacgcaacctgtgtctctggctaacacacagccacgaggtccacctgccagtagccctgcccccgcccccaagttctctcccgtgactccaaagtttacgccggtggcatcaaagttctcaccaggcgctcctggcggctctggcagccagcccaaccagaagttgggacatcccgaggcactgtccgctggaacgggctccccccagccaccctccttcacatacgctcagcaacgtgaaaaaccccgggtgcaggaaaaacagcatccagtgcctcctcctgcccagaaccagaaccaggtgcgcagtccaggtgcccccggtcccctaaccctgaaggaggtagaggaactggaacagctaacccagcaattaatgcaggacatggagcatccacagagacagaacgtggccgtgaacgagctttgtgggcgctgtcaccagccgctcgcccgggctcagccagcggtgcgggcactcggccaactgttccacattgcctgcttcacatgtcaccagtgcgcccagcagctccaaggacagcagttttattctctcgagggcgctccctattgtgaaggctgttacaccgatacccttgagaaatgtaatacttgtggggaaccaatcacagaccggatgctgcgggcaaccggtaaggcttatcatccccactgtttcacctgcgtagtgtgcgcccgcccactggaagggacgagctttatcgtggaccaggctaacaggccccactgtgtcccagattatcataaacagtacgctccacgttgcagtgtctgtagcgaacccattatgccggaacctgggcgggacgaaaccgtgagagtcgtcgcattggataagaactttcatatgaagtgctacaaatgtgaagactgtggcaagccgctgtcaattgaggcggacgacaatggttgctttccgctggacggacacgtcctatgtcggaaatgccacactgcacgggcccagacgtag

SEQ ID NO: 24374 - DNA, 1248 bp, Artificial Sequence
  derived and/or modified sequence
atgaccaagaacgaccccttcaaggcccgggtgagcagcggctacgtccctccaccagtggcgacaccgttcagcagcaaatcaagtaccaagccggcagccggcggaactgccccgttaccaccctggaagagccccagtagctcgcagccactgccccaggttcccgcaccggcacagtcacaaacacagttccatgtgcaaccacagccacagcccaagccgcaggttcagttgcatgtgcagtcccagacacagccggtctctctggctaacacccagccaagaggccctccagcgtcgagcccagcacctgctcctaagttttcaccagttactccaaagtttacccccgtcgcctccaagttcagccccggagctcctgggggcagtggtagtcagcccaatcaaaaactgggtcatcctgaagcactgtccgccgggacgggtagtccccagcccccctccttcacctatgcccagcaacgggaaaagcctcgcgtacaggaaaaacagcatcctgtgcccccacctgcccaaaaccaaaaccaggtccgatcaccaggcgcccccggcccccttaccttgaaggaagttgaagaactggaacagctgacccagcagttgatgcaagacatggagcacccccagagacaaaacgtggccgtgaacgagctgtgtgggcgttgccatcagccactggctcgggcacagccagccgttcgtgctttgggacagttattccatatagcctgcttcacctgtcatcagtgcgcccagcagctccaaggtcagcagttctacagcctcgagggggctccatactgcgaagggtgttacactgacacactggaaaaatgcaatacatgcggcgagcctattactgaccgcatgctccgggcgactgggaaagcctatcatccccattgttttacttgtgttgtttgtgcacgtcccctggaggggacaagcttcatcgtcgatcaagccaatagaccacattgcgtccctgattatcacaagcagtacgccccccgctgctctgtttgcagcgagccaatcatgcctgaaccgggcagggatgagacagttagagtagtggcgttggacaaaaacttccatatgaagtgctataaatgtgaagattgtggtaagccactttcaattgaggccgatgacaacggctgcttccccctggatgggcatgtcctgtgccgtaaatgtcacactgccagggcccagacatag

SEQ ID NO: 24375 - DNA, 1719 bp, Artificial Sequence
  derived and/or modified sequence
atggcagcgcctcgcccatcccccgctatttcagtatccgtgagtgcccctgccttctacgccccacagaaaaagttcgggccagtggtggcaccaaagcccaaggttaaccccttccgacctggcgactcagagccaccccctgcaccaggagcgcagcgggcacagatgggtcgcgtgggagagatccctccgccacctcccgaggattttccgcttccaccgcctccgttagccggtgacggagacgacgctgagggggctctgggtggagcgtttcctcctcctcctccaccaatcgaggagagttttcccccagctcctcttgaggaggaaatctttccttccccccctcccccaccagaggaagaaggcggaccagaagctcctatacctccacctccccagccgagagaaaaggtttctagcattgatcttgaaattgacagcctgagttctctacttgacgacatgaccaaaaacgatcctttcaaagcccgtgtatcctctggctatgtgcccccacctgtagctactcctttcagttcaaaatcttccacaaaacccgctgcgggtggcaccgcccctttgccaccctggaagagcccgagttcaagtcaaccgctccctcaggtccccgctcccgcacaatcccagacacaatttcatgtgcagccacaaccccagcctaagccccaggtgcagctgcacgtgcagtcacagacccaacctgtgagtctggccaatacccagccacgcggtcctccagcctcctctcccgctcccgctcccaagttctcacccgtgaccccgaaattcactccagtcgcatccaagttctcacccggagcacccggtgggtcaggctcccagccaaatcagaaactcggccaccctgaggctctgtcagctggaacggggagccctcagcccccaagctttacatatgctcagcaacgggaaaagccccgagtccaggaaaaacagcaccccgtgcccccacccgctcaaaatcaaaaccaagtgaggtcaccgggagctccaggtcccttaactctgaaggaagtggaggagctggaacaactgacccaacagctgatgcaagacatggagcacccccagaggcagaacgtggcggtgaacgagctttgcggccgttgtcatcaacctctggccagggcacagccagctgtccgagctctgggtcagttgttccacatagcgtgctttacgtgccaccagtgcgcgcagcagctgcagggccagcagttttacagccttgagggagctccttactgcgaaggctgctacaccgacaccctggaaaagtgcaacacatgtggagagccaatcactgatcgaatgctgcgtgccacagggaaagcgtaccaccctcattgcttcacttgtgtggtttgtgcccgtcccctggaaggcacttcttttattgtggatcaggccaaccggccacactgcgtgcctgactatcataagcaatacgccccacggtgcagtgtctgcagcgagccaattatgccagaaccaggcagggatgaaaccgtcagagtggttgcattggacaagaatttccatatgaagtgttataagtgtgaggattgcggtaaaccattgtctatcgaagccgatgacaatggatgctttcccttagacggccacgtgctctgcagaaaatgccacacagcacgggcacagacatag

SEQ ID NO: 24376 - DNA, 1248 bp, Artificial Sequence
  derived and/or modified sequence
atgaccaagaacgatcctttcaaagctcgggtgagctcaggctatgttccacctcccgtggccacccctttctcgtctaagagctctaccaagcctgccgctgggggaacagccccactcccgccttggaaatcgccttcatcatctcagcctctaccacaggtccccgctccagcgcagtcccagacacagttccacgtacagccccagccccagccaaaaccccaggttcaactccatgtccaatcacagacccagccagtgagtttggccaacacgcagcctcgaggaccccctgcttctagtccagcccctgctcccaaattctcccctgttactcctaaatttaccccggttgcatccaagttctctccaggggctccaggcggaagtggcagccaacctaatcaaaaactgggtcatccagaagcgctgtcagccggaactggtagcccccagccgccaagctttacctacgcacagcaaagggaaaagccacgcgttcaggaaaaacaacaccccgttccccctcctgcccaaaatcagaaccaagtgcgttcaccaggagcacccggacccctgaccctcaaagaggttgaggaactcgaacagctaacccagcagcttatgcaggacatggagcacccacagcgtcagaacgttgcagtgaatgagttgtgtggcaggtgccatcagcctctggccagagcgcagccagccgtgcgcgctctgggtcagctgtttcacattgcctgttttacatgtcatcagtgtgcccagcagctgcaaggacagcaattctattccctggagggggctccatactgcgagggctgctacaccgatacactcgaaaaatgcaatacttgtggagaacccatcacggacagaatgttaagggccaccgggaaggcataccaccctcattgtttcacctgcgttgtttgtgctcgacccctggaagggacctccttcattgtggaccaggccaaccgacctcactgtgtgcctgactaccacaaacagtatgccccaaggtgctccgtctgcagcgagcctattatgccagagcccggtcgggacgaaactgtacgcgtggttgcactggataagaatttccatatgaaatgttataaatgtgaggattgtggaaagcccctgtcaattgaggctgatgacaatggctgttttcccctggatgggcacgtgctgtgccggaaatgtcatacagcaagggcacagacttag

SEQ ID NO: 24377 - DNA, 495 bp, Artificial Sequence
  derived and/or modified sequence
atggcggctccgcgaccatctccagcaatctccgtatccgtgagcgcgccagccttctatgccccacagaagaagtttgggcctgtggtcgcacccaaacctaaggtgaatcccttccggccaggagatagtgagccaccgccagctcctggggctcagagagcccagatggggagagtgggagaaattccaccaccacctcctgaggacttccctctcccgcctccccctctggcaggcgacggagacgatgctgagggagcgttgggcggagcatttcctccaccaccaccgccaattgaggagagctttccaccagcaccactcgaagaagagatctttcccagccctcctcctccaccggaagaagaaggcggtcccgaggctcctattccaccgccacctcagcccagagaaaaggtaagcagcatcgatctggagatcgacagtctcagcagcctgctggatgacatgaccaaaaatgatcccttctag

SEQ ID NO: 24378 - DNA, 2493 bp, Artificial Sequence
  derived and/or modified sequence
ctgagccgggctggggcggcgggggcggcagtgagtggggtgggggcgagcggacctcggcggagcctccggcctgaggcaggatcagggccccttcctgggggagtttcctgcctggtccgcccttccccgctctccccgccccctctccgggccgctccttgtatggtctgggcgccgctctctccccgccccctctcttctccctccctcctccttccgtgtgtccctccccgcccggctggaggctgctccggaccgggacgcagagtctgcggacccggcgccgaggcggccacccgagacgcggcgcgcacgctccggcctgcgcagcccggcccggccatggcggccccccgcccgtctcccgcgatctccgtttcggtctcggctccggctttttacgccccgcagaagaagttcggccctgtggtggccccaaagcccaaagtgaatcccttccggcccggggacagcgagcctcccccggcacccggggcccagcgcgcacagatgggccgggtgggcgagattcccccgccgcccccggaagactttcccctgcctccacctccccttgctggggatggcgacgatgcagagggtgctctgggaggtgccttcccgccgccccctcccccgatcgaggaatcatttccccctgcgcctctggaggaggagatcttcccttccccgccgcctcctccggaggaggagggagggcctgaggcccccataccgcccccaccacagcccagggagaaggtgagcagtattgatttggagatcgactctctgtcctcactgctggatgacatgaccaagaatgatcctttcaaagcccgggtgtcatctggatatgtgcccccaccagtggccactccattcagttccaagtccagtaccaagcctgcagccgggggcacagcacccctgcctccttggaagtccccttccagctcccagcctctgccccaggttccggctccggctcagagccagacacagttccatgttcagccccagccccagcccaagcctcaggtccaactccatgtccagtcccagacccagcctgtgtctttggctaacacccagccccgagggcccccagcctcatctccggctccagcccctaagttttctccagtgactcctaagtttactcctgtggcttccaagttcagtcctggagccccaggtggatctgggtcacaaccaaatcaaaaattggggcaccccgaagctctttctgctggcacaggctcccctcaacctcccagcttcacctatgcccagcagagggagaagccccgagtgcaggagaagcagcaccccgtgcccccaccggctcagaaccaaaaccaggtgcgctcccctggggccccagggcccctgactctgaaggaggtggaggagctggagcagctgacccagcagctaatgcaggacatggagcatcctcagaggcagaatgtggctgtcaacgaactctgcggccgatgccatcaacccctggcccgggcgcagccagccgtccgcgctctagggcagctgttccacatcgcctgcttcacctgccaccagtgtgcgcagcagctccagggccagcagttctacagtctggagggggcgccgtactgcgagggctgttacactgacaccctggagaagtgtaacacctgcggggagcccatcactgaccgcatgctgagggccacgggcaaggcctatcacccgcactgcttcacctgtgtggtctgcgcccgccccctggagggcacctccttcatcgtggaccaggccaaccggccccactgtgtccccgactaccacaagcagtacgccccgaggtgctccgtctgctctgagcccatcatgcctgagcctggccgagatgagactgtgcgagtggtcgccctggacaagaacttccacatgaagtgttacaagtgtgaggactgcgggaagcccctgtcgattgaggcagatgacaatggctgcttccccctggacggtcacgtgctctgtcggaagtgccacactgctagagcccagacctgagtgaggacaggccctcttcagaccgcagtccatgccccattgtggaccacccacactgagaccacctgcccccacctcagttattgttttgatgtctagcccctcccatttccaacccctccctagcatcccaggtgccctgacccaggacccaacatggtctagggatgcaggatccccgccctggggtctggtcctcgcccatcctgcagggattgcccaccgtcttccagacaccccacctgaggggggcaccaggtttagtgctgctgctttcactgctgcacccgcgccctcggccggccccccgagcagcctttgtactctgcttgcggagggctgggagaccctccaggacattcccaccctcccccatgctgccaagttgtagctatagctacaaataaaaaaaaaccttgttttccagaa

SEQ ID NO: 24379 - DNA, 2123 bp, Artificial Sequence
  derived and/or modified sequence
agatgttcttacctcatcgtggagctcgtggctgggagccagggctcctgggaccgttccaagtcccccgcctgggagtgggagtcgggaatgtggggcacgaatcttcccctccgggtccgttttccgaagtgtaacgggagctgcaccactcctcggcagtgcgcccggcctttcctgacctgactttcccctgcctccacctccccttgctggggatggcgacgatgcagagggtgctctgggaggtgccttcccgccgccccctcccccgatcgaggaatcatttccccctgcgcctctggaggaggagatcttcccttccccgccgcctcctccggaggaggagggagggcctgaggcccccataccgcccccaccacagcccagggagaaggtgagcagtattgatttggagatcgactctctgtcctcactgctggatgacatgaccaagaatgatcctttcaaagcccgggtgtcatctggatatgtgcccccaccagtggccactccattcagttccaagtccagtaccaagcctgcagccgggggcacagcacccctgcctccttggaagtccccttccagctcccagcctctgccccaggttccggctccggctcagagccagacacagttccatgttcagccccagccccagcccaagcctcaggtccaactccatgtccagtcccagacccagcctgtgtctttggctaacacccagccccgagggcccccagcctcatctccggctccagcccctaagttttctccagtgactcctaagtttactcctgtggcttccaagttcagtcctggagccccaggtggatctgggtcacaaccaaatcaaaaattggggcaccccgaagctctttctgctggcacaggctcccctcaacctcccagcttcacctatgcccagcagagggagaagccccgagtgcaggagaagcagcaccccgtgcccccaccggctcagaaccaaaaccaggtgcgctcccctggggccccagggcccctgactctgaaggaggtggaggagctggagcagctgacccagcagctaatgcaggacatggagcatcctcagaggcagaatgtggctgtcaacgaactctgcggccgatgccatcaacccctggcccgggcgcagccagccgtccgcgctctagggcagctgttccacatcgcctgcttcacctgccaccagtgtgcgcagcagctccagggccagcagttctacagtctggagggggcgccgtactgcgagggctgttacactgacaccctggagaagtgtaacacctgcggggagcccatcactgaccgcatgctgagggccacgggcaaggcctatcacccgcactgcttcacctgtgtggtctgcgcccgccccctggagggcacctccttcatcgtggaccaggccaaccggccccactgtgtccccgactaccacaagcagtacgccccgaggtgctccgtctgctctgagcccatcatgcctgagcctggccgagatgagactgtgcgagtggtcgccctggacaagaacttccacatgaagtgttacaagtgtgaggactgcgggaagcccctgtcgattgaggcagatgacaatggctgcttccccctggacggtcacgtgctctgtcggaagtgccacactgctagagcccagacctgagtgaggacaggccctcttcagaccgcagtccatgccccattgtggaccacccacactgagaccacctgcccccacctcagttattgttttgatgtctagcccctcccatttccaacccctccctagcatcccaggtgccctgacccaggacccaacatggtctagggatgcaggatccccgccctggggtctggtcctcgcccatcctgcagggattgcccaccgtcttccagacaccccacctgaggggggcaccaggtttagtgctgctgctttcactgctgcacccgcgccctcggccggccccccgagcagcctttgtactctgcttgcggagggctgggagaccctccaggacattcccaccctcccccatgctgccaagttgtagctatagctacaaataaaaaaaaaccttgttttccag

SEQ ID NO: 24380 - DNA, 703 bp, Artificial Sequence
  derived and/or modified sequence
cggcgccgaggcggccacccgagacgcggcgcgcacgctccggcctgcggtgaggcgcggggagcggcagggcggccccacggggagggggcgcggggcgccgggagggggcgagtgggggtcaccaaggggagctgggaccgcctggggctcctgagcccggctccgcgctgcgtaacccggcgacccaccccagcagcccggcccggccatggcggccccccgcccgtctcccgcgatctccgtttcggtctcggctccggctttttacgccccgcagaagaagttcggccctgtggtggccccaaagcccaaagtgaatcccttccggcccggggacagcgagcctcccccggcacccggggcccagcgcgcacagatgggccgggtgggcgagattcccccgccgcccccggaagactttcccctgcctccacctccccttgctggggatggcgacgatgcagagggtgctctgggaggtgccttcccgccgccccctcccccgatcgaggaatcatttccccctgcgcctctggaggaggagatcttcccttccccgccgcctcctccggaggaggagggagggcctgaggcccccataccgcccccaccacagcccagggagaaggtgagcagtattgatttggagatcgactctctgtcctcactgctggatgacatgaccaagaatgatcctttc

SEQ ID NO: 24381 - protein, 158 aa, Artificial Sequence
  derived and/or modified sequence
MQRTGGGAPRPGRNHGLPGSLRQPDPVALLMLLVDADQPEPMRSGARELALFLTPEPGAEAKEVEETIEGMLLRLEEFCSLADLIRSDTSQILEENIPVLKAKLTEMRGIYAKVDRLEKSPAPVPVTYELPTLYRTEDYFPVDAGEAQHHPRTCPRPL

SEQ ID NO: 24382 - DNA, 477 bp, Artificial Sequence
  derived and/or modified sequence
atgcaaaggacaggcggtggagctccgcgacccggccggaaccatggacttcctggaagcttaagacagcccgaccctgtcgccctcctgatgctgctggtggacgccgaccaacctgaacccatgcgcagtggggccagagagttggctctgttcctcacccctgaaccgggcgcagaggctaaagaagttgaggagacgatcgagggcatgctccttagattagaggaattctgttccctggccgatctgattaggagtgatacatcacagatcctggaagagaacatcccggtgctcaaggccaaactgaccgagatgagagggatttatgccaaggtggatagacttgaaaaaagtcccgccccagttccggtgacctacgagctaccaacactgtaccggactgaagattacttccctgttgacgcgggcgaggcccagcatcacccccgcacctgccctcgcccgctatag

SEQ ID NO: 24383 - DNA, 477 bp, Artificial Sequence
  derived and/or modified sequence
atgcagaggactggaggaggagcccccaggcctggaagaaatcatggcctgcccggcagcctgcggcagcctgaccctgtggccctgctgatgctgctggtggatgctgaccagcctgagcccatgaggtctggggcccgggagctggccctcttcctgaccccagagcctggagctgaggccaaggaggtggaggagaccatcgagggcatgctgctgcggctggaggagttctgcagcctggccgacctgatccgcagtgacaccagccagatcctggaggagaacatccctgtgctgaaggccaagctgacagagatgaggggcatctatgccaaggtggaccggctggagaagagccctgcccctgtgcctgtgacctatgagctgcccaccctgtacagaacagaggactacttccctgtggatgctggggaggcccagcaccaccccaggacctgcccccggcccctgtag

SEQ ID NO: 24384 - DNA, 477 bp, Artificial Sequence
  derived and/or modified sequence
atgcagcggaccggcggcggcgccccccggcccggccggaaccacggactcccgggatccctgagacaacctgaccccgtggctctacttatgttgttggtcgatgcagatcaacctgagcccatgagatccggggctagggagctggccttattcctgacacctgagccaggagcagaagcgaaagaggtcgaggagactatcgaaggtatgctgttacggctcgaggagttttgctcgctcgcagacttaatccggagcgacactagccagatactcgaggagaacatacccgtactgaaagccaaattgactgagatgcgcggcatttacgccaaagtggataggttggagaaatctccagctccagtacctgttacttacgagctgcccactctctataggactgaggactattttcccgtggacgccggcgaagcacaacatcatccgcgcacatgccccagacctctgtag

SEQ ID NO: 24385 - DNA, 477 bp, Artificial Sequence
  derived and/or modified sequence
atgcagagaacaggcggtggtgcccctaggcctggtaggaaccacggactgccaggctccttgaggcagcccgacccagtggccctcttgatgctgctggtggacgccgatcagcccgaacccatgcgaagcggcgctcgagagctcgctctgttcctcacacctgaacctggggcagaggccaaggaagttgaagaaaccatcgaggggatgttgcttagactcgaggaattctgctctctggccgatctgatcaggtctgacaccagccaaatcttagaagagaacattcccgtgctgaaggctaagctgaccgagatgagaggaatttacgctaaggtcgatagactcgagaaatcaccggctcctgttcctgtcacatatgaactgcccactctgtacaggacagaggattatttccccgttgatgccggtgaagcgcagcaccacccgaggacttgccctagacccctgtag

SEQ ID NO: 24386 - DNA, 1109 bp, Artificial Sequence
  derived and/or modified sequence
ggagctgcgagccgcgaccgccgggagcgcacctgccccgcctccgccaggcggtccgcggggcatgcagcggaccgggggcggggctccgaggcccgggcgcaaccacgggctcccaggcagcctccgccagccggaccccgtcgccctcctgatgctgctcgtggacgctgatcagccggagcccatgcgcagcggggcgcgcgagctcgcgctcttcctgacccccgagcctggggccgaggcgaaggaggtggaggagaccatcgagggcatgctcctcaggctggaagagttttgcagcctggctgacctgatcaggagtgatacttcacagatcctggaggaaaacatcccagtccttaaggccaaactgacagaaatgcgtggcatctatgccaaagtggaccggctagagaagtcacctgcaccggtgcccgtgacgtacgagctgcccacactgtataggacggaggactattttcctgtggacgccggggaagcacagcaccacccccgcacctgccctcggcctttgtgagctttgtggtcttcccatcaggaacgctggaaagtgacattgtgtacacactgcagcttgggggttttttctttgtattgctgtttattttatattttaaaaatatttaaaaaaatgtcgagatggggtctcactatgttgtccagactgatctcaaactcctgggctcaagtgatccacccaccttggccttccaaagtggtgggattatgggcaggagcctccgtgcccaggctgctgccattttcaaatttcctccctgcctcatgtgagaccacagggtttggagaagcagttggaacccacgtgtggtgatgcctcccacatcggcctgcttggggttctacaggggttgagggaccaggcctggccggggctgatggacagtggggactttccttctctccatgatggctttgcaggggctccatggtccttctctctgtgatgggtttttgcacggggtgtgctctgccactgtggtgggtgggtggatgctgcttctgttgcctccagacctcggtgcccacagccttgaggatccttccaataaaggtgtcaagagctc

SEQ ID NO: 24387 - DNA, 477 bp, Artificial Sequence
  derived and/or modified sequence
atgcagagaaccggcggcggcgcccccagacccggcagaaaccacggcctgcccggcagcctgagacagcccgaccccgtggccctgctgatgctgctggtggacgccgaccagcccgagcccatgagaagcggcgccagagagctggccctgttcctgacccccgagcccggcgccgaggccaaggaggtggaggagaccatcgagggcatgctgctgagactggaggagttctgcagcctggccgacctgatcagaagcgacaccagccagatcctggaggagaacatccccgtgctgaaggccaagctgaccgagatgagaggcatctacgccaaggtggacagactggagaagagccccgcccccgtgcccgtgacctacgagctgcccaccctgtacagaaccgaggactacttccccgtggacgccggcgaggcccagcaccaccccagaacctgccccagacccctgtag

SEQ ID NO: 24388 - protein, 264 aa, Artificial Sequence
  derived and/or modified sequence
MDVCLSSAQQPGRRGEGLSSPGGWLEAEKKGAPQKDSTGGVLEESNKIEPSLHSLQKFVPTDYASYTQEHYRFAGKEIVIQESIESYGAVVWPGAMALCQYLEEHAEELNFQDAKILEIGAGPGLVSIVASILGAQVTATDLPDVLGNLQYNLLKNTLQCTAHLPEVKELVWGEDLDKNFPKSAFYYDYVLASDVVYHHYFLDKLLTTMVYLSQPGTVLLWANKFRFSTDYEFLDKFKQVFDTTLLAEYPESSVKLFKGILKWD

SEQ ID NO: 24389 - DNA, 795 bp, Artificial Sequence
  derived and/or modified sequence
atggacgtgtgcctgagcagcgcccagcagcccggcagaagaggcgagggcctgagcagccccggcggctggctggaggccgagaagaagggcgccccccagaaggacagcaccggcggcgtgctggaggagagcaacaagatcgagcccagcctgcacagcctgcagaagttcgtgcccaccgactacgccagctacacccaggagcactacagattcgccggcaaggagatcgtgatccaggagagcatcgagagctacggcgccgtggtgtggcccggcgccatggccctgtgccagtacctggaggagcacgccgaggagctgaacttccaggacgccaagatcctggagatcggcgccggccccggcctggtgagcatcgtggccagcatcctgggcgcccaggtgaccgccaccgacctgcccgacgtgctgggcaacctgcagtacaacctgctgaagaacaccctgcagtgcaccgcccacctgcccgaggtgaaggagctggtgtggggcgaggacctggacaagaacttccccaagagcgccttctactacgactacgtgctggccagcgacgtggtgtaccaccactacttcctggacaagctgctgaccaccatggtgtacctgagccagcccggcaccgtgctgctgtgggccaacaagttcagattcagcaccgactacgagttcctggacaagttcaagcaggtgttcgacaccaccctgctggccgagtaccccgagagcagcgtgaagctgttcaagggcatcctgaagtgggactag

SEQ ID NO: 24390 - DNA, 795 bp, Artificial Sequence
  derived and/or modified sequence
atggatgtctgtctaagctcggctcagcagcctggccggcgcggcgaagggctgagctctcctggcggctggttggaagctgaaaagaagggcgcccctcagaaggacagcaccggtggagtgttagaagagagcaataaaattgaacccagcctacatagtctgcaaaaatttgtccctactgactacgcgtcctatactcaggaacattacaggttcgccggcaaagagatcgttatccaggaatctattgagagctacggcgccgttgtctggcctggggctatggccctctgccagtacctcgaggaacacgcagaggagctgaactttcaggatgctaaaatactcgagattggtgctggtccaggtctcgtgagtatagttgcatctattctcggggcccaggtcaccgcaaccgacttgcccgacgtcctgggtaaccttcagtacaatcttctgaagaacaccttgcagtgcaccgcccacctccccgaagtcaaggagcttgtctggggggaggatctggacaaaaactttccgaagagcgctttctactacgactatgtactcgcctccgacgtggtgtaccaccattatttcttagataagcttctgaccaccatggtgtatttgagtcagccaggaacggtgctcctgtgggctaataaattcagattctcaacagattacgaatttctcgataaattcaagcaggtgtttgacaccactcttctggccgagtatccagagtcttcggtcaagctgttcaagggcattctgaagtgggactag

SEQ ID NO: 24391 - DNA, 795 bp, Artificial Sequence
  derived and/or modified sequence
atggatgtgtgcctgagcagcgcccagcagcctggaagaagaggagagggcctgagcagccctgggggctggctggaggccgagaagaagggggccccccagaaggacagcactggaggagtgctggaggagagcaacaagattgagcccagcctgcacagcctgcagaagtttgtgcccacagattatgccagctacacccaggagcactacagatttgctgggaaggagatcgtcatccaggagagcattgagagctatggagctgtggtgtggccaggggccatggccctgtgccagtacctggaggagcacgccgaggagctgaacttccaggatgccaagatcctggagattggagctggccctggcctggtgtccatcgtggccagcatcctgggcgcccaggtgacagccacagacctgcctgatgtgctgggcaacctgcagtacaacctgctgaagaacaccctgcagtgcacagcccacctgcctgaggtgaaggagctggtgtggggcgaggacctggacaagaacttccccaagagcgccttctactatgactatgtgctggccagtgatgtggtgtaccaccactacttcctggacaagctgctgaccaccatggtgtacctgagccagcccggcaccgtgctgctgtgggccaacaagttccgcttcagcacagattatgagttcctggacaagttcaagcaggtgtttgacaccaccctgctggccgagtacccagagagctctgtgaagctgttcaagggcatcctgaagtgggactag

SEQ ID NO: 24392 - DNA, 795 bp, Artificial Sequence
  derived and/or modified sequence
atggacgtgtgcctgagcagcgcccagcagcccggccggcggggcgaaggtctgtcatcacctgggggatggctggaagcagaaaagaaaggggcgccgcagaaagactctacagggggggttctggaggagtccaataagatcgagccatctctacactctctgcagaagtttgtcccgaccgactatgcatcctacacccaagaacattacagattcgccggtaaggagattgttattcaggagagcatcgagtcctatggcgccgtggtctggcctggggccatggccctgtgccagtatcttgaggagcacgccgaagagctcaactttcaagacgcaaagattttggaaattggtgcaggtcccggactggtgagtatcgttgcttcaatcctgggcgcacaggttaccgctaccgacctgccagacgtcttagggaatctgcaatacaatctgctcaagaatacacttcagtgtacagcccatcttcctgaggttaaggagttggtgtggggcgaagacttggataaaaactttccgaagtctgcattctattatgactacgttcttgcctctgacgttgtgtatcatcactacttcctggacaagctcttgacaaccatggtgtatctttctcaaccaggaacagtgctcctatgggccaacaagttcagattcagtaccgactacgagttcctggacaagttcaaacaagttttcgacacgacactacttgccgaataccccgaaagctctgtaaagctgttcaaaggcatccttaagtgggattag

SEQ ID NO: 24393 - DNA, 1085 bp, Artificial Sequence
  derived and/or modified sequence
ccggctatggacgtgtgtctgagctccgcgcagcagcctgggcgccggggggaaggactcagctccccgggtggctggttagaggctgagaagaagggggctccgcagaaagacagcaccgggggagtcctagaagaatccaacaagatagaaccatctcttcatagcctccagaaatttgttcctacagattacgccagctacactcaggagcattatcggtttgcaggaaaggagattgtcatccaggaatccatagagagttacggagcggtggtgtggccaggggctatggctttgtgtcaatacttggaggaacatgccgaggaattgaatttccaagatgcaaaaatacttgaaattggtgccggaccaggccttgtttccattgtggccagtattttaggagctcaagtcacagcaacagatttgcctgatgtcctgggaaaccttcaatacaatcttttaaaaaacacactacaatgtacagcacatctgcctgaagtgaaagaactggtatggggggaagacctggacaaaaactttcccaagtcagctttttactatgattacgtcctagcctcagatgtggtctaccatcactacttcctggacaagctgctcaccaccatggtgtacctttcccagccagggacggtgctgctttgggcaaacaaattcaggttcagcaccgactatgaatttttagataaattcaagcaagtttttgacacaacactgttggctgaatatccagagtcatcagtcaaactttttaaggggatactaaaatgggactaaatccaacaaaatgcctttcacaacgttactgtgtcttttgagcaatgtgttagaaattgctttggtaatagacttctttcacaggattgagaaggtagtgcatagaaacaacttgtatacttggaacaaatgtaacaatactgcagaaactttctaatttctaagataatttaagattatctggttaatctaaatatctaaaaagaacaacataaaaacatgaaagtagctttgttggttccaacgaagttacatgtttaataaatcttacatggataaagtaa

SEQ ID NO: 24394 - DNA, 795 bp, Artificial Sequence
  derived and/or modified sequence
atggacgtgtgtctgtcgagtgcccaacaaccaggaaggcgcggtgaagggttaagctcaccaggaggctggctggaggctgagaagaagggagcacctcagaaagactctacaggcggtgttttggaggagtcaaacaagatcgagccgtcactacattcccttcagaagttcgttccaacggattacgcctcttatacccaggagcattaccgcttcgccggaaaagagattgttatccaggaatccattgagagttatggcgctgttgtctggcccggtgccatggctttgtgtcagtacctggaggagcatgccgaagagctgaactttcaagacgcaaaaatcctggaaatcggagcaggtcctggtctggtgagcattgtggcgagcatcctaggcgcacaagtcaccgctaccgatctacctgacgttctcggtaatctgcaatacaatttactcaagaataccctgcagtgcaccgctcatctgcctgaagtgaaggaattggtctggggcgaagacttggacaagaacttccctaaatcggccttttattacgactatgtgcttgcgagcgatgtggtataccaccattactttttagataaactcctgactacaatggtgtatctgtctcaacccggtacagttcttctgtgggccaataaatttcgattcagtacggactatgagtttctagataagtttaagcaagttttcgacaccaccctcttggccgaataccccgaatcgtccgtgaagctattcaaggggattctgaagtgggactag

SEQ ID NO: 24395 - protein, 371 aa, Artificial Sequence
  derived and/or modified sequence
MSFRKVNIIILVLAVALFLLVLHHNFLSLSSLLRNEVTDSGIVGPQPIDFVPNALRHAVDGRQEEIPVVIAASEDRLGGAIAAINSIQHNTRSNVIFYIVTLNNTADHLRSWLNSDSLKSIRYKIVNFDPKLLEGKVKEDPDQGESMKPLTFARFYLPILVPSAKKAIYMDDDVIVQGDILALYNTALKPGHAAAFSEDCDSASTKVVIRGAGNQYNYIGYLDYKKERIRKLSMKASTCSFNPGVFVANLTEWKRQNITNQLEKWMKLNVEEGLYSRTLAGSITTPPLLIVFYQQHSTIDPMWNVRHLGSSAGKRYSPQFVKAAKLLHWNGHLKPWGRTASYTDVWEKWYIPDPTGKFNLIRRYTEISNIK

SEQ ID NO: 24396 - protein, 226 aa, Artificial Sequence
  derived and/or modified sequence
MDDDVIVQGDILALYNTALKPGHAAAFSEDCDSASTKVVIRGAGNQYNYIGYLDYKKERIRKLSMKASTCSFNPGVFVANLTEWKRQNITNQLEKWMKLNVEEGLYSRTLAGSITTPPLLIVFYQQHSTIDPMWNPPPWFQCWKTIFTSVCKGCQVTHWNGHLKPWGRTASYTCLGKMVYSRPNRQIQPNPKIYRDLKHKVKQNLNCKQAFLRKSWKIACVGSNSC

SEQ ID NO: 24397 - protein, 30 aa, Artificial Sequence
  derived and/or modified sequence
MSFRKVNIIILVLAVALFLLVLHHNFLSLS

SEQ ID NO: 24398 - protein, 174 aa, Artificial Sequence
  derived and/or modified sequence
MSFRKVNIIILVLAVALFLLVLHHNFLSLSSLLRNEVTDSGIVGPQPIDFVPNALRHAVDGRQEEIPVVIAASEDRLGGAIAAINSIQHNTRSNVIFYIVTLNNTADHLRSWLNSDSLKSIRYKIVNFDPKLLEGKVKEDPDQGESMKPLTFARFYLPILVPSAKKAIYMDDDV

SEQ ID NO: 24399 - protein, 62 aa, Artificial Sequence
  derived and/or modified sequence
MSFRKVNIIILVLAVALFLLVLHHNFLSLSSLLRNEVTDSGIVGPQPIDFVPNALRHAVDGR

SEQ ID NO: 24400 - protein, 110 aa, Artificial Sequence
  derived and/or modified sequence
MSFRKVNIIILVLAVALFLLVLHHNFLSLSSLLRNEVTDSGIVGPQPIDFVPNALRHAVDGRQEEIPVVIAASEDRLGGAIAAINSIQHNTRSNVIFYIVTLNNTADHLR

SEQ ID NO: 24401 - protein, 89 aa, Artificial Sequence
  derived and/or modified sequence
MSFRKVNIIILVLAVALFLLVLHHNFLSLSSLLRNEVTDSGIVGPQPIDFVPNALRHAVDGRQEEIPVVIAASEDRLGGAIAAINSIQH

SEQ ID NO: 24402 - protein, 63 aa, Artificial Sequence
  derived and/or modified sequence
MSFRKVNIIILVLAVALFLLVLHHNFLSLSSLLRNEVTDSGIVGPQPIDFVPNALRHAVDGRQ

SEQ ID NO: 24403 - DNA, 1116 bp, Artificial Sequence
  derived and/or modified sequence
atgagcttcagaaaggtgaacatcatcatcctggtgctggccgtggccctgttcctgctggtgctgcaccacaacttcctgagcctgagcagcctgctgagaaacgaggtgaccgacagcggcatcgtgggcccccagcccatcgacttcgtgcccaacgccctgagacacgccgtggacggcagacaggaggagatccccgtggtgatcgccgccagcgaggacagactgggcggcgccatcgccgccatcaacagcatccagcacaacaccagaagcaacgtgatcttctacatcgtgaccctgaacaacaccgccgaccacctgagaagctggctgaacagcgacagcctgaagagcatcagatacaagatcgtgaacttcgaccccaagctgctggagggcaaggtgaaggaggaccccgaccagggcgagagcatgaagcccctgaccttcgccagattctacctgcccatcctggtgcccagcgccaagaaggccatctacatggacgacgacgtgatcgtgcagggcgacatcctggccctgtacaacaccgccctgaagcccggccacgccgccgccttcagcgaggactgcgacagcgccagcaccaaggtggtgatcagaggcgccggcaaccagtacaactacatcggctacctggactacaagaaggagagaatcagaaagctgagcatgaaggccagcacctgcagcttcaaccccggcgtgttcgtggccaacctgaccgagtggaagagacagaacatcaccaaccagctggagaagtggatgaagctgaacgtggaggagggcctgtacagcagaaccctggccggcagcatcaccaccccccccctgctgatcgtgttctaccagcagcacagcaccatcgaccccatgtggaacgtgagacacctgggcagcagcgccggcaagagatacagcccccagttcgtgaaggccgccaagctgctgcactggaacggccacctgaagccctggggcagaaccgccagctacaccgacgtgtgggagaagtggtacatccccgaccccaccggcaagttcaacctgatcagaagatacaccgagatcagcaacatcaagtag

SEQ ID NO: 24404 - DNA, 681 bp, Artificial Sequence
  derived and/or modified sequence
atggacgacgacgtgatcgtgcagggcgacatcctggccctgtacaacaccgccctgaagcccggccacgccgccgccttcagcgaggactgcgacagcgccagcaccaaggtggtgatcagaggcgccggcaaccagtacaactacatcggctacctggactacaagaaggagagaatcagaaagctgagcatgaaggccagcacctgcagcttcaaccccggcgtgttcgtggccaacctgaccgagtggaagagacagaacatcaccaaccagctggagaagtggatgaagctgaacgtggaggagggcctgtacagcagaaccctggccggcagcatcaccaccccccccctgctgatcgtgttctaccagcagcacagcaccatcgaccccatgtggaacccccccccctggttccagtgctggaagaccatcttcaccagcgtgtgcaagggctgccaggtgacccactggaacggccacctgaagccctggggcagaaccgccagctacacctgcctgggcaagatggtgtacagcagacccaacagacagatccagcccaaccccaagatctacagagacctgaagcacaaggtgaagcagaacctgaactgcaagcaggccttcctgagaaagagctggaagatcgcctgcgtgggcagcaacagctgctag

SEQ ID NO: 24405 - DNA, 525 bp, Artificial Sequence
  derived and/or modified sequence
atgagcttcagaaaggtgaacatcatcatcctggtgctggccgtggccctgttcctgctggtgctgcaccacaacttcctgagcctgagcagcctgctgagaaacgaggtgaccgacagcggcatcgtgggcccccagcccatcgacttcgtgcccaacgccctgagacacgccgtggacggcagacaggaggagatccccgtggtgatcgccgccagcgaggacagactgggcggcgccatcgccgccatcaacagcatccagcacaacaccagaagcaacgtgatcttctacatcgtgaccctgaacaacaccgccgaccacctgagaagctggctgaacagcgacagcctgaagagcatcagatacaagatcgtgaacttcgaccccaagctgctggagggcaaggtgaaggaggaccccgaccagggcgagagcatgaagcccctgaccttcgccagattctacctgcccatcctggtgcccagcgccaagaaggccatctacatggacgacgacgtgtag

SEQ ID NO: 24406 - DNA, 189 bp, Artificial Sequence
  derived and/or modified sequence
atgagcttcagaaaggtgaacatcatcatcctggtgctggccgtggccctgttcctgctggtgctgcaccacaacttcctgagcctgagcagcctgctgagaaacgaggtgaccgacagcggcatcgtgggcccccagcccatcgacttcgtgcccaacgccctgagacacgccgtggacggcagatag

SEQ ID NO: 24407 - DNA, 333 bp, Artificial Sequence
  derived and/or modified sequence
atgagcttcagaaaggtgaacatcatcatcctggtgctggccgtggccctgttcctgctggtgctgcaccacaacttcctgagcctgagcagcctgctgagaaacgaggtgaccgacagcggcatcgtgggcccccagcccatcgacttcgtgcccaacgccctgagacacgccgtggacggcagacaggaggagatccccgtggtgatcgccgccagcgaggacagactgggcggcgccatcgccgccatcaacagcatccagcacaacaccagaagcaacgtgatcttctacatcgtgaccctgaacaacaccgccgaccacctgagatag

SEQ ID NO: 24408 - DNA, 270 bp, Artificial Sequence
  derived and/or modified sequence
atgagcttcagaaaggtgaacatcatcatcctggtgctggccgtggccctgttcctgctggtgctgcaccacaacttcctgagcctgagcagcctgctgagaaacgaggtgaccgacagcggcatcgtgggcccccagcccatcgacttcgtgcccaacgccctgagacacgccgtggacggcagacaggaggagatccccgtggtgatcgccgccagcgaggacagactgggcggcgccatcgccgccatcaacagcatccagcactag

SEQ ID NO: 24409 - DNA, 192 bp, Artificial Sequence
  derived and/or modified sequence
atgagcttcagaaaggtgaacatcatcatcctggtgctggccgtggccctgttcctgctggtgctgcaccacaacttcctgagcctgagcagcctgctgagaaacgaggtgaccgacagcggcatcgtgggcccccagcccatcgacttcgtgcccaacgccctgagacacgccgtggacggcagacagtag

SEQ ID NO: 24410 - DNA, 1116 bp, Artificial Sequence
  derived and/or modified sequence
atgagcttccggaaagtcaacatcataatccttgtcctggccgtcgccctttttttactggtgctccatcataatttcctgtccctaagtagcctgctgcgaaacgaggttactgactcagggattgtcggacctcaaccaatagactttgtgccaaatgccttgcggcatgcggttgatggccgccaggaagagattccagtagtgatcgcagcatccgaagaccgattgggaggagctattgccgctataaattctatacagcacaatactcgctccaatgtgatcttctacattgtgacgctgaacaacaccgccgaccatctccggtcctggttgaattcagacagcctgaagagcatccgctacaagattgtgaatttcgaccctaaactcctggaaggcaaagtaaaggaggatcctgatcagggggaatcaatgaagccactcacgttcgcaagattttacctgccaatactggttccatcggcaaaaaaggcgatttacatggatgacgacgtaatagtgcagggagatatcctcgccctgtacaataccgcacttaagcccggccatgccgctgcctttagcgaagactgtgactccgcatctacaaaagttgtcatacgcggtgccggaaaccagtacaactatatcggatatttggactacaaaaaagaaaggatcagaaaactgtccatgaaggcaagcacctgcagcttcaatccaggcgtcttcgttgcaaatttgaccgaatggaagcggcaaaatatcacaaaccagctcgaaaagtggatgaagctgaatgtagaggaagggctgtactcacgcacacttgcaggctcgatcacaaccccccctctcctcatagtattctatcagcaacactccaccatcgacccgatgtggaatgtgcgccatcttgggagttctgcggggaagagatacagtccccagtttgtgaaagcagcaaagttgctccattggaacggtcacctcaaaccgtggggcagaactgcttcatataccgatgtctgggagaaatggtacatcccagatcctacaggcaagtttaacctcataagacggtatactgagatctccaacattaaatag

SEQ ID NO: 24411 - DNA, 1116 bp, Artificial Sequence
  derived and/or modified sequence
atgtcctttcggaaagtgaatattattattctggtgctggcagtggcactcttccttctggtgctgcatcataatttcctgagtctgagcagcttactaagaaatgaggtcacggatagcgggatagtgggccctcagccaattgatttcgtacccaatgctctcaggcatgccgtggatggcaggcaagaagagatccctgtagttattgcagcctctgaggaccgcctgggcggcgccatcgccgcaattaatagcattcagcataataccaggagtaatgtgattttctatatcgtaacgctgaataacactgctgaccacctgcggtcctggcttaactctgactctctgaaaagcatcaggtacaaaatcgtgaattttgatcccaagttgttagaaggaaaggtgaaagaagatccagaccaaggagaaagcatgaagccacttacctttgccagattctaccttcctatactggtgccctctgccaaaaaagccatttatatggacgatgatgtcatcgtgcagggtgacatactggcactgtacaatactgccctgaagcccggccatgccgccgcgttttctgaagattgtgattctgcgagtactaaagttgtgatcagaggtgccggcaatcaatacaactacattggatacctggattataagaaagagcgaattcgcaaactctctatgaaagcttcaacctgtagttttaaccctggagtattcgtggctaatctcactgagtggaaacggcaaaatattacaaatcaattagaaaagtggatgaagctgaacgtcgaggaggggctctactctaggacccttgcaggcagcataaccactccacccttacttatcgtattttaccagcaacatagtactatcgaccccatgtggaacgtccggcatctggggtcttcggcaggcaagcgctactcaccacagtttgtgaaagcagccaagctgttgcattggaatgggcatctcaagccatgggggagaactgcttcttacactgatgtgtgggagaagtggtacatccccgaccctacaggaaagttcaatttaatacgacgttatacagagatctcaaatatcaaatag

SEQ ID NO: 24412 - DNA, 681 bp, Artificial Sequence
  derived and/or modified sequence
atggacgacgacgtaatagtccagggagatatcctggctctgtacaatacggcactaaagcctggccacgccgctgcattcagcgaagattgcgactctgcgtcgactaaggtcgtgattcgcggtgccggcaatcaatataactacattggctacctggactataagaaagagagaattcggaagctgagcatgaaggcttctacctgttcctttaacccgggcgttttcgtagccaacctgacagagtggaagaggcagaatattacaaaccagttggagaaatggatgaaattgaacgtggaagaagggttatactctcgcactcttgctggttcaattaccaccccacccctgctgatcgttttctaccagcagcacagcaccatcgatcccatgtggaatccaccgccatggttccagtgttggaagaccatctttacgtctgtgtgcaagggttgccaggtcacccattggaatggacacctgaagccctgggggaggacagcctcttacacctgtctcggcaagatggtctactccagacctaatagacagatccagcctaatccaaaaatttacagagatttaaagcataaggtaaagcaaaatctgaactgtaagcaagctttcctgcgcaagagctggaaaattgcatgtgtcggatccaatagctgctag

SEQ ID NO: 24413 - DNA, 1116 bp, Artificial Sequence
  derived and/or modified sequence
atgtctttccgaaaggttaacatcatcatcttggtgctggccgtcgcgctcttcttgcttgtactgcaccataattttctaagtctgtcttcacttttgcgtaacgaggtgaccgattccggtatagtaggccctcagcccatcgacttcgtacccaatgcattgagacacgccgtagacggacgccaggaggagatccctgtggtcattgctgcctctgaggaccgcctgggaggtgccatcgctgcgatcaacagcatccagcacaatacccggtctaatgtgatcttctatattgtaaccctcaataacaccgcagatcacctaagaagttggcttaactcagatagtctaaaaagtatccgctacaagatcgtcaacttcgacccaaaactccttgagggaaaggtgaaggaagatccagatcagggtgaatccatgaagccacttacttttgccagattctatctgcccattttggtgcctagtgcaaaaaaggcaatctacatggacgacgatgtgatagtgcagggcgatattctcgccttatataacacggcccttaagccggggcacgccgcggccttttcagaggactgcgatagcgcaagcactaaggtcgtcatcaggggcgcaggaaaccagtacaactatattggatacttggactataaaaaggagcgcatccgaaaactgagcatgaaagcttctacgtgcagcttcaaccccggcgtcttcgttgctaatctgaccgaatggaaaaggcagaacatcacaaatcagcttgagaagtggatgaagctaaacgtggaagaaggcctgtatagcaggaccttggccggatctattacaacacctccccttctcattgttttctatcagcaacactcgactatagacccaatgtggaacgtgcgacaccttggatcctcagctgggaagaggtatagcccccagttcgtgaaagccgcaaagctcttgcattggaatggccatcttaaaccctggggaagaacagctagttacactgatgtttgggagaagtggtatattccagatcctacagggaagttcaacctaatacggaggtatacagagatttcgaacatcaagtag

SEQ ID NO: 24414 - DNA, 1116 bp, Artificial Sequence
  derived and/or modified sequence
atgtcatttcgtaaagtgaacatcattattctggtcttagctgtcgccttgttcctccttgtcctgcaccataattttctgtcacttagtagtctgcttaggaatgaggtgacagattccggaatcgtgggcccccaaccaatcgactttgttcctaatgcactgcggcacgcagttgatgggcggcaggaagagatacccgtggtcatcgccgcctcagaggaccgtttggggggcgcaatcgcagcaattaatagcattcagcataacacccgctcaaatgtaatcttctatatcgtcacactaaataatacagctgatcatcttagaagctggttgaatagcgacagcttgaaaagtatacgttacaagatagtgaacttcgatccgaaactgctagaaggcaaagtcaaggaagacccagaccaaggtgaatcaatgaagccactaacctttgcccgcttctacctgcccatattggtgccgagcgcaaaaaaggcaatttatatggacgatgacgtcattgtgcagggggacatccttgctctgtataacaccgctctcaagccgggacacgccgccgctttcagcgaggactgtgacagcgcaagtacaaaggtggtgattcgcggagctggcaaccagtacaactacataggctacctggactacaaaaaggaacggatccggaaactgtcaatgaaggcctctacctgtagcttcaaccccggcgtgttcgtagctaacttaactgagtggaagcggcaaaacattactaaccaactcgagaagtggatgaaactgaacgttgaagagggactttactctcggacgctggctgggagtataacaacccctcctctgctcattgtattttaccagcagcatagtactatcgaccctatgtggaacgttcgacacctgggctcgtcagccggaaagcgttatagccctcagtttgttaaggcagccaagctgttacattggaacggacatttgaaaccttggggaagaacggcctcttacacagacgtgtgggagaagtggtacattcccgatcccacaggaaagttcaatctgattaggagatacaccgaaatctccaacatcaaatag

SEQ ID NO: 24415 - DNA, 525 bp, Artificial Sequence
  derived and/or modified sequence
atgagctttcggaaggtgaatataattatcttggttttagcagtcgccctgttcctgcttgtgctacatcacaacttcctgtccctgtccagtctcttacggaacgaggtgacggacagcgggatcgtggggccccagcccattgacttcgtaccaaacgcgctgcggcacgccgttgatggccggcaggaggaaataccagtggttattgccgccagtgaggatcggctcgggggcgcaattgcagccatcaattctatccagcataatacgaggtccaatgtcatattttatattgtcactcttaacaacacggccgaccacctgcgatcctggctgaacagtgactcgctgaaatcaattcggtacaaaattgtgaatttcgacccaaagctgttagaagggaaggttaaggaggaccccgaccagggggagtccatgaagccgctgaccttcgcacgattttacctccctattctggtgccatctgcaaaaaaagccatctatatggacgatgatgtgtag

SEQ ID NO: 24416 - DNA, 189 bp, Artificial Sequence
  derived and/or modified sequence
atgtcttttcggaaagttaacatcattatcttggtgctcgctgtggcgctcttcctgctggtgctccatcacaacttcctctccttatcatcactgcttcgaaatgaggtcacagattcagggattgtgggaccgcagccaatagattttgtaccgaacgccctgagacatgctgtggatggaaggtag

SEQ ID NO: 24417 - DNA, 333 bp, Artificial Sequence
  derived and/or modified sequence
atgtcatttcgaaaggtcaacatcattatcctggtgttggccgtcgcgttgtttctcttggtgctgcaccataatttcctgtcactcagctcccttctaagaaatgaagtgacggatagcggcattgttggccctcagccgatcgacttcgtcccgaacgcgctgagacacgcagttgacggccgccaggaagaaatcccagtggtcattgcggcatctgaggaccgccttggcggcgcgattgctgctatcaattctattcagcacaatacaaggtccaacgtaatcttttacattgttacacttaataacacagcagaccacctgcgctag

SEQ ID NO: 24418 - DNA, 1116 bp, Artificial Sequence
  derived and/or modified sequence
atgagtttcaggaaggtaaacattatcatactggtcttagcagtggccctgttcttgctcgttttgcatcataattttctttctctgtccagtctcctgagaaatgaagttaccgacagcggaatcgtcggccctcaaccaatcgacttcgtcccaaacgccttgcgacacgccgtcgacgggcgtcaggaggagatccccgtcgtgatcgctgcgagcgaagataggctgggtggtgctattgcagccatcaactccatacaacacaatacacgatctaatgtcatcttttacattgtgacgcttaataacacggctgatcacctgagatcttggctcaacagtgacagcctgaagtctatcaggtacaaaatcgtcaattttgaccctaaactccttgaagggaaggttaaggaggatcccgaccagggggaatcaatgaagccgctgacctttgctaggttttacctccctatcctcgtacctagcgccaagaaggcgatttacatggatgacgatgtcattgtacagggtgacatcttggccctttataacacagccctaaagcccggacatgcagctgccttttcggaggactgtgacagcgcttctactaaggtagttattcggggcgccgggaatcagtacaattacatcgggtacttggactacaagaaggagagaatcagaaaactctccatgaaagcaagcacctgttcgtttaatcccggcgtgttcgtggcgaatctgactgagtggaaacgccaaaacattaccaaccagctcgaaaaatggatgaagctgaacgtcgaggagggcctgtattctaggacgttggctgggagtatcactacccccccactgctcatcgtcttttaccagcaacacagtacaattgacccaatgtggaacgtgcgccacttgggcagttccgccggcaagagatatagtcctcagttcgtcaaggccgccaaacttctgcactggaacggccatctcaagccatggggccgaacagcttcgtacacagatgtatgggaaaaatggtatatccccgatcccactggcaagtttaatctgattagaagatacacagagatcagcaatatcaagtag

SEQ ID NO: 24419 - DNA, 270 bp, Artificial Sequence
  derived and/or modified sequence
atgtcttttcgtaaggttaacataattatactggttttagctgtagccctttttttgctggtcctgcaccacaacttcctgtctctgtctagcctgctcagaaatgaggttacagattcaggaattgttggccctcaacccattgatttcgtcccgaatgccctcagacatgcagtggatgggaggcaagaagagattcctgtggtgatagcagccagcgaagatagactgggaggggcgattgccgccatcaattccatccaacactag

SEQ ID NO: 24420 - DNA, 192 bp, Artificial Sequence
  derived and/or modified sequence
atgtctttcagaaaggtgaatatcatcattctggtccttgctgtggccctgtttctactcgttcttcaccacaatttcctaagcttatcttctttacttcgaaacgaggtgaccgactctggcattgtgggacctcagcccatcgatttcgtgcctaatgcgctacgtcacgccgtggatggacgccagtag

SEQ ID NO: 24421 - DNA, 1116 bp, Artificial Sequence
  derived and/or modified sequence
atgtccttcaggaaggtgaacatcatcatcctggtgctggccgtggccctcttcctgctggtgctgcaccacaacttcctgagcctgagcagcctgctgagaaatgaggtgacagacagcggcatcgtgggcccccagcccatcgactttgtgcccaatgccctgcggcatgctgtggatggccggcaggaggagatccctgtggtgattgctgccagcgaggaccggctgggcggggccatcgccgccatcaacagcatccagcacaacaccaggagcaatgtcatcttctacatcgtgaccctgaacaacacagctgaccacctgcgctcctggctgaacagcgacagcctgaagagcatccgctacaagatcgtgaactttgaccccaagctgctggagggcaaggtgaaggaggaccctgaccagggcgagagcatgaagcccctgacctttgcccgcttctacctgcccatcctggtgcccagcgccaagaaggccatctacatggatgatgatgtgattgtgcagggcgacatcctggccctgtacaacacagccctgaagccaggccatgctgctgccttcagcgaggactgtgacagcgccagcaccaaggtggtgatccggggggccggcaaccagtacaactacatcggctacctggactacaagaaggagcgcatcaggaagctgtccatgaaggccagcacctgcagcttcaaccctggggtgtttgtggccaacctgacagagtggaagaggcagaacatcaccaaccagctggagaagtggatgaagctgaatgtggaggagggcctgtacagcaggaccctggccggcagcatcaccaccccacccctgctgattgtgttctaccagcagcacagcaccatcgaccccatgtggaatgtgcgccacctgggcagcagcgctgggaagcgctacagcccccagtttgtgaaggccgccaagctgctgcactggaatggccacctgaagccctggggccgcacagccagctacacagatgtgtgggagaagtggtacatcccagaccccaccgggaagttcaacctgatccgccgctacacagagatcagcaacatcaagtag

SEQ ID NO: 24422 - DNA, 681 bp, Artificial Sequence
  derived and/or modified sequence
atggatgatgatgtgattgtgcagggcgacatcctggccctgtacaacacagccctgaagccaggccacgccgccgccttcagcgaggactgtgacagcgccagcaccaaggtggtgatcagaggagctggcaaccagtacaactacatcggctacctggactacaagaaggagcgcatcaggaagctgtccatgaaggccagcacctgcagcttcaaccctggggtgtttgtggccaacctgacagagtggaagaggcagaacatcaccaaccagctggagaagtggatgaagctgaatgtggaggagggcctgtacagcaggaccctggccggcagcatcaccaccccacccctgctgattgtgttctaccagcagcacagcaccatcgaccccatgtggaaccccccaccctggttccagtgctggaagaccatcttcacctctgtgtgcaagggctgccaggtgacccactggaatggccacctgaagccctggggccgcacagccagctacacctgcctgggcaagatggtgtacagccggcccaaccggcagatccagcccaaccccaagatctacagagacctgaagcacaaggtgaagcagaacctgaactgcaagcaggccttcctgaggaagtcctggaagatcgcctgtgtgggcagcaacagctgctag

SEQ ID NO: 24423 - DNA, 525 bp, Artificial Sequence
  derived and/or modified sequence
atgtccttcaggaaggtgaacatcatcatcctggtgctggccgtggccctcttcctgctggtgctgcaccacaacttcctgagcctgagcagcctgctgagaaatgaggtgacagacagcggcatcgtgggcccccagcccatcgactttgtgcccaatgccctgcggcatgctgtggatggccggcaggaggagatccctgtggtgattgctgccagcgaggaccggctgggcggggccatcgccgccatcaacagcatccagcacaacaccaggagcaatgtcatcttctacatcgtgaccctgaacaacacagctgaccacctgcgctcctggctgaacagcgacagcctgaagagcatccgctacaagatcgtgaactttgaccccaagctgctggagggcaaggtgaaggaggaccctgaccagggcgagagcatgaagcccctgacctttgcccgcttctacctgcccatcctggtgcccagcgccaagaaggccatctacatggatgatgatgtgtag

SEQ ID NO: 24424 - DNA, 189 bp, Artificial Sequence
  derived and/or modified sequence
atgtccttcaggaaggtgaacatcatcatcctggtgctggccgtggccctcttcctgctggtgctgcaccacaacttcctgagcctgagcagcctgctgagaaatgaggtgacagacagcggcatcgtgggcccccagcccatcgactttgtgcccaatgccctgcggcatgctgtggatggccgctag

SEQ ID NO: 24425 - DNA, 333 bp, Artificial Sequence
  derived and/or modified sequence
atgtccttcaggaaggtgaacatcatcatcctggtgctggccgtggccctcttcctgctggtgctgcaccacaacttcctgagcctgagcagcctgctgagaaatgaggtgacagacagcggcatcgtgggcccccagcccatcgactttgtgcccaatgccctgcggcatgctgtggatggccggcaggaggagatccctgtggtgattgctgccagcgaggaccggctgggcggggccatcgccgccatcaacagcatccagcacaacaccaggagcaatgtcatcttctacatcgtgaccctgaacaacacagctgaccacctgaggtag

SEQ ID NO: 24426 - DNA, 270 bp, Artificial Sequence
  derived and/or modified sequence
atgtccttcaggaaggtgaacatcatcatcctggtgctggccgtggccctcttcctgctggtgctgcaccacaacttcctgagcctgagcagcctgctgagaaatgaggtgacagacagcggcatcgtgggcccccagcccatcgactttgtgcccaatgccctgcggcatgctgtggatggccggcaggaggagatccctgtggtgattgctgccagcgaggaccggctgggcggggccatcgccgccatcaacagcatccagcactag

SEQ ID NO: 24427 - DNA, 192 bp, Artificial Sequence
  derived and/or modified sequence
atgtccttcaggaaggtgaacatcatcatcctggtgctggccgtggccctcttcctgctggtgctgcaccacaacttcctgagcctgagcagcctgctgagaaatgaggtgacagacagcggcatcgtgggcccccagcccatcgactttgtgcccaatgccctgcggcatgctgtggatggccggcagtag

SEQ ID NO: 24428 - DNA, 2091 bp, Artificial Sequence
  derived and/or modified sequence
gcgcttttgccgcgccgtgctgcccgcgagggcagctgaggtggtggtggcggccgccttgtcgaggcatcgcgcgcccgtgaagtgttcgccgtcagtgctgttgggtgcctggagccgcgtcccccgtcccgaaaactgtccttgacagtacttgcgcggcccaacggccgccggcgcccccgcgtctccatggcgacggcctttttccctgcgaggaccccggcggcagggctgccccgcggcgcctgcttggcgcgacgctctagcggttaccgctgcgggctggctgggcgtagtggggctgcgcggctgccacggagctagagggcaagtgtgctcggcccagcgtgcagggaacgcgggcggccagacaacgggctgggctccggggcctgcggcgcgggcgctgagctggcagggcgggtcggggcgcgggctgcatccgcatctcctccatcgcctgcagtaagggcggccgcggcgagcctttgaggggaacgacttgtcggagccctaaccaggggtatctctgagcctggtgggatccccggagcgtcacatcactttccgatcacttcaaagtggttaaaaactaatatttatatgacagaagaaaaagatgtcattccgtaaagtaaacatcatcatcttggtcctggctgttgctctcttcttactggttttgcaccataacttcctcagcttgagcagtttgttaaggaatgaggttacagattcaggaattgtagggcctcaacctatagactttgtcccaaatgctctccgacatgcagtagatgggagacaagaggagattcctgtggtcatcgctgcatctgaagacaggcttgggggggccattgcagctataaacagcattcagcacaacactcgctccaatgtgattttctacattgttactctcaacaatacagcagaccatctccggtcctggctcaacagtgattccctgaaaagcatcagatacaaaattgtcaattttgaccctaaacttttggaaggaaaagtaaaggaggatcctgaccagggggaatccatgaaacctttaacctttgcaaggttctacttgccaattctggttcccagcgcaaagaaggccatatacatggatgatgatgtaattgtgcaaggtgatattcttgccctttacaatacagcactgaagccaggacatgcagctgcattttcagaagattgtgattcagcctctactaaagttgtcatccgtggagcaggaaaccagtacaattacattggctatcttgactataaaaaggaaagaattcgtaagctttccatgaaagccagcacttgctcatttaatcctggagtttttgttgcaaacctgacggaatggaaacgacagaatataactaaccaactggaaaaatggatgaaactcaatgtagaagagggactgtatagcagaaccctggctggtagcatcacaacacctcctctgcttatcgtattttatcaacagcactctaccatcgatcctatgtggaatgtccgccaccttggttccagtgctggaaaacgatattcacctcagtttgtaaaggctgccaagttactccattggaatggacatttgaagccatggggaaggactgcttcatatactgatgtttgggaaaaatggtatattccagacccaacaggcaaattcaacctaatccgaagatataccgagatctcaaacataaagtgaaacagaatttgaactgtaagcaagcatttctcaggaagtcctggaagatagcatgcgtgggaagtaacagttgctaggcttcaatgcctatcggtagcaagccatggaaaaagatgtgtcagctaggtaaagatgacaaactgccctgtctggcagtcagcttcccagacagactatagactataaatatgtctccatctgccttaccaagtgttttcttactacaatgctgaatgactggaaagaagaactgatatggctagttcagctagctggtacagataattcaaaactgctgttggttttaattttgtaacctgtggcctgatctgtaaataaaacttacatttttc

SEQ ID NO: 24429 - DNA, 1621 bp, Artificial Sequence
  derived and/or modified sequence
gtgggatttatttgagtgcaagatcgttttctcagtggtggtggaagttgcctcatcgcaggcagatgttggggctttgtccgaacagctcccctctgccagcttctgtagataagggttaaaaactaatatttatatgacagaagaaaaagatgtcattccgtaaagtaaacatcatcatcttggtcctggctgttgctctcttcttactggttttgcaccataacttcctcagcttgagcagtttgttaaggaatgaggttacagattcaggaattgtagggcctcaacctatagactttgtcccaaatgctctccgacatgcagtagatgggagacaagaggagattcctgtggtcatcgctgcatctgaagacaggcttgggggggccattgcagctataaacagcattcagcacaacactcgctccaatgtgattttctacattgttactctcaacaatacagcagaccatctccggtcctggctcaacagtgattccctgaaaagcatcagatacaaaattgtcaattttgaccctaaacttttggaaggaaaagtaaaggaggatcctgaccagggggaatccatgaaacctttaacctttgcaaggttctacttgccaattctggttcccagcgcaaagaaggccatatacatggatgatgatgtaattgtgcaaggtgatattcttgccctttacaatacagcactgaagccaggacatgcagctgcattttcagaagattgtgattcagcctctactaaagttgtcatccgtggagcaggaaaccagtacaattacattggctatcttgactataaaaaggaaagaattcgtaagctttccatgaaagccagcacttgctcatttaatcctggagtttttgttgcaaacctgacggaatggaaacgacagaatataactaaccaactggaaaaatggatgaaactcaatgtagaagagggactgtatagcagaaccctggctggtagcatcacaacacctcctctgcttatcgtattttatcaacagcactctaccatcgatcctatgtggaatgtccgccaccttggttccagtgctggaaaacgatattcacctcagtttgtaaaggctgccaagttactccattggaatggacatttgaagccatggggaaggactgcttcatatactgatgtttgggaaaaatggtatattccagacccaacaggcaaattcaacctaatccgaagatataccgagatctcaaacataaagtgaaacagaatttgaactgtaagcaagcatttctcaggaagtcctggaagatagcatgcgtgggaagtaacagttgctaggcttcaatgcctatcggtagcaagccatggaaaaagatgtgtcagctaggtaaagatgacaaactgccctgtctggcagtcagcttcccagacagactatagactataaatatgtctccatctgccttaccaagtgttttcttactacaatgctgaatgactggaaagaagaactgatatggctagttcagctagctggtacagataattcaaaactgctgttggttttaattttgtaacctgtggcctgatctgtaaataaaacttacatttttc

SEQ ID NO: 24430 - DNA, 1340 bp, Artificial Sequence
  derived and/or modified sequence
gtgggatttatttgagtgcaagatcgttttctcagtggtggtggaagttgcctcatcgcaggcagatgttggggctttgtccgaacagctcccctctgccagcttctgtagataagggttaaaaactaatatttatatgacagaagaaaaagatgtcattccgtaaagtaaacatcatcatcttggtcctggctgttgctctcttcttactggttttgcaccataacttcctcagcttgagcagtttgttaaggaatgaggttacagattcaggaattgtagggcctcaacctatagactttgtcccaaatgctctccgacatgcagtagatgggagacaagaggagattcctgtggtcatcgctgcatctgaagacaggcttgggggggccattgcagctataaacagcattcagcacaacactcgctccaatgtgattttctacattgttactctcaacaatacagcagaccatctccggtcctggctcaacagtgattccctgaaaagcatcagatacaaaattgtcaattttgaccctaaacttttggaaggaaaagtaaaggaggatcctgaccagggggaatccatgaaacctttaacctttgcaaggttctacttgccaattctggttcccagcgcaaagaaggccatatacatggatgatgatgtaattgtgcaaggtgatattcttgccctttacaatacagcactgaagccaggacatgcagctgcattttcagaagattgtgattcagcctctactaaagttgtcatccgtggagcaggaaaccagtacaattacattggctatcttgactataaaaaggaaagaattcgtaagctttccatgaaagccagcacttgctcatttaatcctggagtttttgttgcaaacctgacggaatggaaacgacagaatataactaaccaactggaaaaatggatgaaactcaatgtagaagagggactgtatagcagaaccctggctggtagcatcacaacacctcctctgcttatcgtattttatcaacagcactctaccatcgatcctatgtggaatccgccaccttggttccagtgctggaaaacgatattcacctcagtttgtaaaggctgccaagttactcattggaatggacatttgaagccatggggaaggactgcttcatatacttgtttgggaaaaatggtatattccagacccaacaggcaaattcaacctaatccgaagatataccgagatctcaaacataaagtgaaacagaatttgaactgtaagcaagcatttctcaggaagtcctggaagatagcatgcgtgggaagtaacagttgctag

SEQ ID NO: 24431 - DNA, 2320 bp, Artificial Sequence
  derived and/or modified sequence
gcgcttttgccgcgccgtgctgcccgcgagggcagctgaggtggtggtggcggccgccttgtcgaggcatcgcgcgcccgtgaagtgttcgccgtcagtgctgttgggtgcctggagccgcgtcccccgtcccgaaaactgtccttgacagtacttgcgcggcccaacggccgccggcgcccccgcgtctccatggcgacggcctttttccctgcgaggaccccggcggcagggctgccccgcggcgcctgcttggcgcgacgctctagcggttaccgctgcgggctggctgggcgtagtggggctgcgcggctgccacggagctagagggcaagtgtgctcggcccagcgtgcagggaacgcgggcggccagacaacgggctgggctccggggcctgcggcgcgggcgctgagctggcagggcgggtcggggcgcgggctgcatccgcatctcctccatcgcctgcagtaagggcggccgcggcgagcctttgaggggaacgacttgtcggagccctaaccaggggtatctctgagcctggtgggatccccggagcgtcacatcactttccgatcacttcaaagtacagcagaccgaggacacggttgttaccaagaccaggctgttgccttggaagagcccagagcgtgtcaagggagacagccacatcacgccagaaatacatgacagctggattagccctgggagagggaggcccagatgtgggagctcaggggaggtgcagctcaacgtggagtttggaggaggctaccttgacctttgaatgccaagtgggagccagccagatgaaaggggttaaaaactaatatttatatgacagaagaaaaagatgtcattccgtaaagtaaacatcatcatcttggtcctggctgttgctctcttcttactggttttgcaccataacttcctcagcttgagcagtttgttaaggaatgaggttacagattcaggaattgtagggcctcaacctatagactttgtcccaaatgctctccgacatgcagtagatgggagacaagaggagattcctgtggtcatcgctgcatctgaagacaggcttgggggggccattgcagctataaacagcattcagcacaacactcgctccaatgtgattttctacattgttactctcaacaatacagcagaccatctccggtcctggctcaacagtgattccctgaaaagcatcagatacaaaattgtcaattttgaccctaaacttttggaaggaaaagtaaaggaggatcctgaccagggggaatccatgaaacctttaacctttgcaaggttctacttgccaattctggttcccagcgcaaagaaggccatatacatggatgatgatgtaattgtgcaaggtgatattcttgccctttacaatacagcactgaagccaggacatgcagctgcattttcagaagattgtgattcagcctctactaaagttgtcatccgtggagcaggaaaccagtacaattacattggctatcttgactataaaaaggaaagaattcgtaagctttccatgaaagccagcacttgctcatttaatcctggagtttttgttgcaaacctgacggaatggaaacgacagaatataactaaccaactggaaaaatggatgaaactcaatgtagaagagggactgtatagcagaaccctggctggtagcatcacaacacctcctctgcttatcgtattttatcaacagcactctaccatcgatcctatgtggaatgtccgccaccttggttccagtgctggaaaacgatattcacctcagtttgtaaaggctgccaagttactccattggaatggacatttgaagccatggggaaggactgcttcatatactgatgtttgggaaaaatggtatattccagacccaacaggcaaattcaacctaatccgaagatataccgagatctcaaacataaagtgaaacagaatttgaactgtaagcaagcatttctcaggaagtcctggaagatagcatgcgtgggaagtaacagttgctaggcttcaatgcctatcggtagcaagccatggaaaaagatgtgtcagctaggtaaagatgacaaactgccctgtctggcagtcagcttcccagacagactatagactataaatatgtctccatctgccttaccaagtgttttcttactacaatgctgaatgactggaaagaagaactgatatggctagttcagctagctggtacagataattcaaaactgctgttggttttaattttgtaacctgtggcctgatctgtaaataaaacttacatttttc

SEQ ID NO: 24432 - DNA, 1826 bp, Artificial Sequence
  derived and/or modified sequence
gcggcgcctgcttggcgcgacgctctagcggttaccgctgcgggctggctgggcgtagtggggctgcgcggctgccacggagctagaggacagcagaccgaggacacggttgttaccaagaccaggctgttgccttggaagagcccagagcgtgtcaagggagacagccacatcacgccagaaatacatgacagctggattagccctgggagagggaggcccagatgtgggagctcaggggaggtgcagctcaacgtggagtttggaggaggctaccttgacctttgaatgccaagtgggagccagccagatgaaaggggttaaaaactaatatttatatgacagaagaaaaagatgtcattccgtaaagtaaacatcatcatcttggtcctggctgttgctctcttcttactggttttgcaccataacttcctcagcttgagcagtttgttaaggaatgaggttacagattcaggaattgtagggcctcaacctatagactttgtcccaaatgctctccgacatgcagtagatgggagacaagaggagattcctgtggtcatcgctgcatctgaagacaggcttgggggggccattgcagctataaacagcattcagcacaacactcgctccaatgtgattttctacattgttactctcaacaatacagcagaccatctccggtcctggctcaacagtgattccctgaaaagcatcagatacaaaattgtcaattttgaccctaaacttttggaaggaaaagtaaaggaggatcctgaccagggggaatccatgaaacctttaacctttgcaaggttctacttgccaattctggttcccagcgcaaagaaggccatatacatggatgatgatgtaattgtgcaaggtgatattcttgccctttacaatacagcactgaagccaggacatgcagctgcattttcagaagattgtgattcagcctctactaaagttgtcatccgtggagcaggaaaccagtacaattacattggctatcttgactataaaaaggaaagaattcgtaagctttccatgaaagccagcacttgctcatttaatcctggagtttttgttgcaaacctgacggaatggaaacgacagaatataactaaccaactggaaaaatggatgaaactcaatgtagaagagggactgtatagcagaaccctggctggtagcatcacaacacctcctctgcttatcgtattttatcaacagcactctaccatcgatcctatgtggaatgtccgccaccttggttccagtgctggaaaacgatattcacctcagtttgtaaaggctgccaagttactccattggaatggacatttgaagccatggggaaggactgcttcatatactgatgtttgggaaaaatggtatattccagacccaacaggcaaattcaacctaatccgaagatataccgagatctcaaacataaagtgaaacagaatttgaactgtaagcaagcatttctcaggaagtcctggaagatagcatgcgtgggaagtaacagttgctaggcttcaatgcctatcggtagcaagccatggaaaaagatgtgtcagctaggtaaagatgacaaactgccctgtctggcagtcagcttcccagacagactatagactataaatatgtctccatctgccttaccaagtgttttcttactacaatgctgaatgactggaaagaagaactgatatggctagttcagctagctggtacagataattcaaaactgctgttggttttaattttgtaacctgtggcctgatctgtaaataaaacttacatttttcaat

SEQ ID NO: 24433 - DNA, 720 bp, Artificial Sequence
  derived and/or modified sequence
attgggttcttgggaactgtgaattcaaaatgagtttctggcggaatactgtatatgcctcttgtttcttcctgaattaaaaaaaaaaaaaaagtgttagggcattttgatgtcccttctcatgtgcttactgactttgggggcttgtttttgttttgtagggttaaaaactaatatttatatgacagaagaaaaagatgtcattccgtaaagtaaacatcatcatcttggtcctggctgttgctctcttcttactggttttgcaccataacttcctcagcttgagcagtttgttaaggaatgaggttacagattcaggaattgtagggcctcaacctatagactttgtcccaaatgctctccgacatgcagtagatgggagacaagaggagattcctgtggtcatcgctgcatctgaagacaggcttgggggggccattgcagctataaacagcattcagcacaacactcgctccaatgtgattttctacattgttactctcaacaatacagcagaccatctccggtcctggctcaacagtgattccctgaaaagcatcagatacaaaattgtcaattttgaccctaaacttttggaaggaaaagtaaaggaggatcctgaccagggggaatccatgaaacctttaacctttgcaaggttctacttgccaattctggttcccagcgcaaagaaggccatatacatggatgatgatgtaa

SEQ ID NO: 24434 - DNA, 770 bp, Artificial Sequence
  derived and/or modified sequence
gcggttaccgctgcgggctggctgggcgtagtggggctgcgcggctgccacggagctagagggcaagtgtgctcggcccagcgtgcagggaacgcgggcggccagacaacgggctgggctccggggcctgcggcgcgggcgctgagctggcagggcgggtcggggcgcgggctgcatccgcatctcctccatcgcctgcagtaagggcggccgcggcgagcctttgaggggaacgacttgtcggagccctaaccaggggtatctctgagcctggtgggatccccggagcgtcacatcactttccgatcacttcaaagtacagcagaccgaggacacggttgttaccaagaccaggctgttgccttggaagagcccagagcgtgtcaagggagacagccacatcacgccagaaatacatgacagctggattagccctgggagagggaggcccagatgtgggagctcaggggaggtgcagctcaacgtggagtttggaggaggctaccttgacctttgaatgccaagtgggagccagccagatgaaaggggttaaaaactaatatttatatgacagaagaaaaagatgtcattccgtaaagtaaacatcatcatcttggtcctggctgttgctctcttcttactggttttgcaccataacttcctcagcttgagcagtttgttaaggaatgaggttacagattcaggaattgtagggcctcaacctatagactttgtcccaaatgctctccgacatgcagtagatgggagac

SEQ ID NO: 24435 - DNA, 706 bp, Artificial Sequence
  derived and/or modified sequence
gcctgcttggcgcgacgctctagcggttaccgctgcgggctggctgggcgtagtggggctgcgcggctgccacggagctagagggcaagtgtgctcggcccagcgtgcagggaacgcgggcggccagacaacgggctgggctccggggcctgcggcgcgggcgctgagctggcagggcgggtcggggcgcgggctgcatccgcatctcctccatcgcctgcagtaagggcggccgcggcgagcctttgaggggaacgacttgtcggagccctaaccaggggtatctctgagcctggtgggatccccggagcgtcacatcactttccgatcacttcaaagtggttaaaaactaatatttatatgacagaagaaaaagatgtcattccgtaaagtaaacatcatcatcttggtcctggctgttgctctcttcttactggttttgcaccataacttcctcagcttgagcagtttgttaaggaatgaggttacagattcaggaattgtagggcctcaacctatagactttgtcccaaatgctctccgacatgcagtagatgggagacaagaggagattcctgtggtcatcgctgcatctgaagacaggcttgggggggccattgcagctataaacagcattcagcacaacactcgctccaatgtgattttctacattgttactctcaacaatacagcagaccatctccgg

SEQ ID NO: 24436 - DNA, 1577 bp, Artificial Sequence
  derived and/or modified sequence
cttggcgcgacgctctagcggttaccgctgcgggctggctgggcgtagtggggctgcgcggctgccacggagctagagggcaaggttaaaaactaatatttatatgacagaagaaaaagatgtcattccgtaaagtaaacatcatcatcttggtcctggctgttgctctcttcttactggttttgcaccataacttcctcagcttgagcagtttgttaaggaatgaggttacagattcaggaattgtagggcctcaacctatagactttgtcccaaatgctctccgacatgcagtagatgggagacaagaggagattcctgtggtcatcgctgcatctgaagacaggcttgggggggccattgcagctataaacagcattcagcacaacactcgctccaatgtgattttctacattgttactctcaacaatacagcagaccatctccggtcctggctcaacagtgattccctgaaaagcatcagatacaaaattgtcaattttgaccctaaacttttggaaggaaaagtaaaggaggatcctgaccagggggaatccatgaaacctttaacctttgcaaggttctacttgccaattctggttcccagcgcaaagaaggccatatacatggatgatgatgtaattgtgcaaggtgatattcttgccctttacaatacagcactgaagccaggacatgcagctgcattttcagaagattgtgattcagcctctactaaagttgtcatccgtggagcaggaaaccagtacaattacattggctatcttgactataaaaaggaaagaattcgtaagctttccatgaaagccagcacttgctcatttaatcctggagtttttgttgcaaacctgacggaatggaaacgacagaatataactaaccaactggaaaaatggatgaaactcaatgtagaagagggactgtatagcagaaccctggctggtagcatcacaacacctcctctgcttatcgtattttatcaacagcactctaccatcgatcctatgtggaatgtccgccaccttggttccagtgctggaaaacgatattcacctcagtttgtaaaggctgccaagttactccattggaatggacatttgaagccatggggaaggactgcttcatatactgatgtttgggaaaaatggtatattccagacccaacaggcaaattcaacctaatccgaagatataccgagatctcaaacataaagtgaaacagaatttgaactgtaagcaagcatttctcaggaagtcctggaagatagcatgcgtgggaagtaacagttgctaggcttcaatgcctatcggtagcaagccatggaaaaagatgtgtcagctaggtaaagatgacaaactgccctgtctggcagtcagcttcccagacagactatagactataaatatgtctccatctgccttaccaagtgttttcttactacaatgctgaatgactggaaagaagaactgatatggctagttcagctagctggtacagataattcaaaactgctgttggttttaattttgtaacctgtggcctgatctgtaaataaaac

SEQ ID NO: 24437 - DNA, 577 bp, Artificial Sequence
  derived and/or modified sequence
atggcgacggcctttttccctgcgaggaccccggcggcagggctgccccgcggcgcctgcttggcgcgacgctctagcggttaccgctgcgggctggctgggcgtagtggggctgcgcggctgccacggagctagaggttacaatggctagaaatgtactccacacttttgatatcgattggattttgtgaatttttgtagctttttctgtgctgtgggtttgtcaagtgaatttggataatattcttttctctgaggacactcatgttaaagggttaaaaactaatatttatatgacagaagaaaaagatgtcattccgtaaagtaaacatcatcatcttggtcctggctgttgctctcttcttactggttttgcaccataacttcctcagcttgagcagtttgttaaggaatgaggttacagattcaggaattgtagggcctcaacctatagactttgtcccaaatgctctccgacatgcagtagatgggagacaagaggagattcctgtggtcatcgctgcatctgaagacaggcttgggggggccattgcagctataaacagcattcagcaca

SEQ ID NO: 24438 - DNA, 789 bp, Artificial Sequence
  derived and/or modified sequence
gggctgggctccggggcctgcggcgcgggcgctgagctggcagggcgggtcggggcgcgggctgcatccgcatctcctccatcgcctgcagtaagggcggccgcggcgagcctttgaggggaacgacttgtcggagccctaaccaggggtatctctgagcctggtgggatccccggagcgtcacatcactttccgatcacttcaaagtcagaccgaggacacggttgttaccaagaccaggctgttgccttggaagagcccagagcgtgtcaagggagacagccacatcacgccagaaatacatgacagctggattagccctgggagagggaggcccagatgtgggagctcaggggaggtgcagctcaacgtggagtttggaggaggctaccttgacctttgaatgccaagtgggagccagccagatgaaaggatccagcgtctgtgtgcaatttcgttttgagaattccttctaaccagatcaggaaagctctcttaccaggaatagccccaggaaagacaatatggattagacgtactccatgataactggcgttttgcatggttaaaaactaatatttatatgacagaagaaaaagatgtcattccgtaaagtaaacatcatcatcttggtcctggctgttgctctcttcttactggttttgcaccataacttcctcagcttgagcagtttgttaaggaatgaggttacagattcaggaattgtagggcctcaacctatagactttgtcccaaatgctctccgacatgcagtagatgggagacaag

SEQ ID NO: 24439 - DNA, 1116 bp, Artificial Sequence
  derived and/or modified sequence
atgagcttccggaaggtgaacatcatcatcctggtgctggccgtggccttgttcctgctagtccttcatcacaatttcctgtcgctatcatccctcctacggaatgaagtgacagattctggcatcgtagggcctcagcccattgatttcgttcccaacgctctgcgtcatgccgttgatggcagacaggaggagatcccagtggtcattgcagcctccgaggataggctgggtggagccatagcggccataaactctatccagcataacacacgcagcaatgttatcttttatattgttaccctcaacaacacagccgatcacctgaggtcttggttaaactcagactctctgaagtctatccggtacaagatagtcaactttgatcctaagctgctggaaggaaaagtgaaagaggatccagaccaaggggaatcaatgaaacctctgaccttcgctagattctacttacccattttggtgccttctgcaaaaaaggcaatatatatggacgacgacgtaatcgtccagggggacattctagccctctacaatacagccctcaagcctggccatgcggctgcgttcagcgaagattgcgactctgcctcaactaaggtggtgattaggggggcagggaatcagtataattacatcggttacttagactacaagaaggagcgcatccgaaaattgtctatgaaggcaagcacatgctccttcaatccaggcgtgtttgtggcaaacctgaccgagtggaaaagacaaaacatcactaaccaactcgaaaagtggatgaaactgaatgtggaggaagggctgtactctaggactctggctggtagcatcaccactccccctctccttatcgtgttttaccaacaacattccacgatcgatcctatgtggaatgtgaggcatttggggtctagtgcgggcaagaggtattcccctcagtttgtgaaagccgctaagctgctccactggaacggccacctgaaaccttggggtaggacggctagttacactgacgtatgggagaagtggtacatacctgacccgactgggaaatttaatcttattagacgatacacagagatctctaatattaaatag

SEQ ID NO: 24440 - DNA, 1116 bp, Artificial Sequence
  derived and/or modified sequence
atgagcttccggaaggtgaacatcatcatcctggtgctggccgtggcactgttcctcctcgtgctgcaccacaactttctgtctctaagctcactactgaggaatgaagtcacggactccggcatcgttgggccacaaccgatagattttgtccctaacgccctgcggcacgccgtggatggccggcaagaggagattcccgtagtaatagcggcgtcggaggatcgactgggaggcgccatcgccgcgatcaactctattcagcataacacgagaagcaacgtcatcttttacatcgttacacttaacaataccgcggaccacttgagatcatggcttaatagcgatagcctgaagtccatccgctacaagatcgtgaacttcgatcctaaactgctggagggcaaggtcaaagaggaccctgatcagggagaaagcatgaaaccactcacctttgcccgcttctatttgcctatcctagtgccgagcgcaaagaaggccatctacatggatgacgacgttatcgtgcagggtgacatcctggccctttacaacacagctttgaagcccggtcacgccgccgctttcagcgaggattgcgactccgcctcaaccaaggttgttatcaggggggccgggaaccagtacaattacattggctaccttgattataagaaagagcgcatcaggaaactttcaatgaaagccagtacttgcagcttcaatcctggtgtgttcgtcgcaaacctgactgaatggaaacgccagaatattacaaatcaattggagaaatggatgaaactgaacgttgaagaaggactatatagtcggactttagcaggctccattactaccccccctctgttgattgtgttctaccaacagcactctacaatcgacccgatgtggaatgtcaggcacctggggagctcagcgggtaagagatacagtcctcaatttgtgaaagccgccaagctgctgcactggaatgggcaccttaagccctggggaaggaccgccagctataccgacgtgtgggagaagtggtatatccctgatccaaccggcaagtttaacctcatccgcaggtacaccgagattagtaatataaaatag

SEQ ID NO: 24441 - DNA, 681 bp, Artificial Sequence
  derived and/or modified sequence
atggacgacgacgtgatcgtgcagggcgacatcctggccctgtacaacacagcactcaagccaggacatgccgccgcttttagtgaagattgcgattccgcgtcaacaaaggttgtaattaggggggcgggcaatcaatacaactacatcggatatttggactataagaaggaacgtattcggaagctgtcaatgaaagccagcacttgttcctttaaccctggtgtgttcgtcgccaacttgacagagtggaaaagacaaaacattacaaaccagcttgaaaaatggatgaagttgaatgtggaagaaggactgtattcaaggactctggccggttctattacgacaccacccttgctgatcgtcttttatcagcagcatagcacaatagacccaatgtggaacccccctccttggtttcagtgttggaagacgatatttacatccgtttgcaaaggctgccaagtgacccattggaacggtcacctgaagccctggggccgcacagcaagctacacctgcttgggaaaaatggtttacagccggccaaacaggcagattcagcctaatcctaagatttacagagatctgaagcacaaagttaagcagaatctgaactgcaagcaggcattcctgaggaaaagctggaagattgcctgcgtcgggtccaattcttgttag

SEQ ID NO: 24442 - DNA, 1116 bp, Artificial Sequence
  derived and/or modified sequence
atgagcttccggaaggtgaacatcatcatcctggtgctggccgtggctctgttcctccttgttctccatcacaactttctgtccctcagttcccttctgagaaacgaggttaccgacagtggcatagttggtccccaaccaatcgacttcgtgcctaatgccctgaggcatgctgtagacggcagacaggaggagatccctgttgtgatcgccgcgagcgaggaccgcctcggcggagccattgctgccattaactccatccagcacaacacccgctctaacgttatcttttatattgtcacactcaacaacaccgctgaccatttgaggagttggctgaattccgactcattaaaatccattcgttataagattgtgaatttcgaccctaaactcttggaggggaaggtgaaagaagatcccgaccagggggaatctatgaagcctctcacatttgcacgcttctacctgccgatcctggttccctccgccaaaaaagcaatttatatggatgatgatgtcatcgtccagggcgatattctggccctctacaatacagctctgaagcccggccatgctgccgccttttcagaggactgtgactctgcatcgaccaaggtggtcattcgaggagccggcaaccagtataattatattggctatctcgactataagaaagagcggattaggaagctgtctatgaaggcctcaacgtgcagctttaacccgggagtgttcgtcgccaacctgaccgagtggaaacgacagaatataactaaccagctcgaaaagtggatgaagctcaacgtggaagaaggtctctacagtagaaccttggccggctccattaccactccacctctgctgattgttttctaccaacaacattccaccattgatccaatgtggaatgtgcggcatttgggtagtagcgctggtaaacgctattcaccacagtttgtcaaagcggccaagctcctgcactggaacgggcacctaaaaccctgggggagaacagctagctataccgacgtctgggaaaagtggtatataccggatccaaccggaaaatttaacctcattagaagatacactgagatatcaaacatcaagtag

SEQ ID NO: 24443 - DNA, 1116 bp, Artificial Sequence
  derived and/or modified sequence
atgagcttccggaaggtgaacatcatcatcctggtgctggccgtggccctgttcctcctggtccttcatcacaacttcctttctctctccagtttgttaagaaacgaagtgaccgattccgggatagtggggcctcaaccaatcgactttgtccccaacgcactgagacacgctgtcgatggaaggcaggaggaaataccggttgtgatcgcagcaagcgaggacagacttggtggtgccattgctgctatcaactctatacagcacaatacacgctcaaacgtgattttttacatcgtgaccctcaacaatacagcggaccacttgcggtcctggctgaattcagattcactgaagtcaatacggtacaaaatcgtaaacttcgatccaaaactgttagaaggcaaagtgaaggaagatcccgaccagggtgaaagcatgaagcccctcacatttgctcggttctacctcccgattctggtgccttccgcaaagaaggccatctacatggacgatgacgtgattgttcagggggatatcctggccctgtataacacagccctgaagcccggtcacgctgctgctttcagtgaggactgtgactcagcttctaccaaagtggtgatcaggggagcggggaaccagtacaattacatcggttacctggactacaagaaggagcgaattcgcaaactgtcaatgaaggcttcgacatgcagcttcaatccgggcgtattcgttgctaaccttaccgagtggaaacggcaaaatatcacaaatcagctcgagaagtggatgaagctgaacgtggaggagggactctactcacgcacattggctggtagcatcaccacgccacctctgctcatcgtcttctaccagcaacactccactattgatcccatgtggaatgtgcggcacctcgggtcaagtgcgggcaagcgctactcacctcagttcgtcaaagccgctaagctgctacattggaatgggcacctcaagccctggggacgtaccgctagctacacagatgtgtgggaaaaatggtacatcccggatccaactggtaaatttaacctgataaggaggtataccgagattagcaacataaagtag

SEQ ID NO: 24444 - DNA, 525 bp, Artificial Sequence
  derived and/or modified sequence
atgagcttccggaaggtgaacatcatcatcctggtgctggccgtggcactctttttgcttgtactgcaccataactttctgagtctttcctctctgctgagaaatgaagtgacggactcgggcatcgtgggtccccagcctatcgactttgttcctaatgcccttcggcacgcagtagatggcaggcaggaggaaatccctgtggtcattgcggcttctgaggatagactgggtggagctattgctgctattaattcgatccaacacaacaccagatccaacgttattttctacattgtgaccttgaataataccgctgatcacttgcgttcatggcttaactctgatagcctcaagagcatcaggtataagattgtgaactttgatccaaagctgctcgaaggaaaagtgaaagaagatccggaccagggtgagtcaatgaagccgctgacctttgcccgtttttatttgccaattctggtaccatcagccaagaaggctatttatatggatgacgacgtatag

SEQ ID NO: 24445 - DNA, 189 bp, Artificial Sequence
  derived and/or modified sequence
atgagcttccggaaggtgaacatcatcatcctggtgctggccgtggcattattcttacttgttcttcatcacaacttcctcagtctgtcctcattattgcgcaacgaggtaacggacagtgggatagttggaccccagcccattgactttgtccccaatgccctgaggcacgccgtagacggccgctag

SEQ ID NO: 24446 - DNA, 333 bp, Artificial Sequence
  derived and/or modified sequence
atgagcttccggaaggtgaacatcatcatcctggtgctggccgtggccctgttcttgctggtgcttcatcacaactttttgagcctgtcctctctgctgcgaaatgaggtgaccgattccggtatcgtggggccccagcctattgatttcgtgcctaatgcccttaggcatgccgttgacggacgccaggaggagattcctgtggtgattgccgcgtcagaggatcgcctgggtggggcgattgccgctatcaattccattcagcacaatactagaagcaatgtcatcttttatatcgtcacactgaacaatactgctgatcacttgcgttag

SEQ ID NO: 24447 - DNA, 1116 bp, Artificial Sequence
  derived and/or modified sequence
atgagcttccggaaggtgaacatcatcatcctggtgctggccgtggcgctattcctcttagttctccaccacaattttttatccctctcttctttactcagaaatgaggtcactgactcaggaattgtgggacctcagcccatagactttgtgcccaatgcactcaggcacgcagtagacggacgccaagaggagattcctgtggttattgcagcctccgaggatagactaggaggagccatcgctgcgatcaattcaattcaacacaataccagaagcaatgttatcttctatattgtgacactgaacaataccgctgaccacctcaggagctggctaaactctgactccttaaagagcattagatataagatcgtgaactttgatccaaaactgctggagggaaaggtgaaagaagaccccgatcagggagagtcaatgaaaccactgactttcgcccgcttctatctgcccatcctggtgcctagcgccaagaaagccatctatatggatgatgacgtgatagtacaaggggatatccttgctctgtacaataccgcgttaaagcccggacatgcagccgcattcagcgaagattgcgattccgcctccactaaggtcgtcatccgcggtgctgggaaccagtacaattatattggatatctcgactataagaaggagagaatcagaaagttaagcatgaaggcttctacatgctcttttaaccctggggtgttcgtggccaatttgacggagtggaagagacagaacattaccaaccaattagaaaaatggatgaagctcaacgtggaggaggggctgtacagtcgtacactcgccggtagcattactacacccccacttctgatcgtgttctatcagcagcatagcactattgatccaatgtggaatgttagacacttgggcagctcagcgggcaagcgctatagtccacagtttgttaaagccgcaaagctgctgcactggaatgggcatctgaagccgtggggcaggacagcctcttacaccgatgtgtgggaaaaatggtatatccctgacccgacaggcaagttcaatctcatccggcgctacaccgagatttcaaacatcaagtag

SEQ ID NO: 24448 - DNA, 270 bp, Artificial Sequence
  derived and/or modified sequence
atgagcttccggaaggtgaacatcatcatcctggtgctggccgtggcgctattcctcctggttctccaccacaacttcctgtctctctccagtctgctgcgcaacgaagttacagattcgggaatcgtaggtccccagcctatagactttgtgcccaatgctttgcggcacgctgtggatggacggcaggaggaaattcctgtcgtgatcgctgcctccgaggatcggctgggtggggcaatcgccgctatcaatagcattcagcactag

SEQ ID NO: 24449 - DNA, 192 bp, Artificial Sequence
  derived and/or modified sequence
atgagcttccggaaggtgaacatcatcatcctggtgctggccgtggcactgttcctgcttgtcctccatcataattttctaagcctgtcatcattgctgcgcaatgaagttaccgactctggcatagtggggccacaaccaattgattttgttccgaatgcccttcgccacgccgtggatggacggcagtag

SEQ ID NO: 24450 - DNA, 1116 bp, Artificial Sequence
  derived and/or modified sequence
atgagcttcagaaaggtgaatataattattctggtcttggccgtggctctatttctgctagtgttgcatcacaactttctttctttgtcaagcttgctacggaacgaggttacagattccggaatcgtcggaccgcagcccatcgatttcgttcccaatgccctaaggcacgcagtggacgggaggcaagaggaaattcctgtcgtcatcgctgcctcggaggatagactcggtggcgcaatagccgcaattaatagcatccagcacaataccagaagcaacgtgattttctacatagtgacccttaacaataccgccgatcaccttaggtcctggctaaattctgacagcctgaaaagcattaggtacaagatcgttaacttcgacccaaagctgttggagggaaaagtaaaagaggatcccgaccaaggcgagagcatgaaaccactcacatttgccaggttctacctgcccatactggttccgtctgccaaaaaggccatatacatggatgacgatgtcatagtccagggcgacattctcgccttgtacaacacagcactaaaacccggtcacgcagctgcttttagcgaggactgcgacagtgcctctacaaaggtggtaattagaggcgctggcaatcagtacaattatattggctatctggactacaaaaaggaacgtatccggaagctgtccatgaaggccagtacctgtagtttcaatcctggcgtgtttgttgccaatcttacagagtggaaaaggcagaatatcacaaaccaactcgagaaatggatgaaactgaacgtcgaagaaggactctattctcggaccttagccggatccataaccaccccaccactgctaatcgttttttatcagcagcacagcacgatcgaccctatgtggaacgtgaggcatcttggctcaagtgcagggaagagatattcccctcagttcgttaaggcagctaagctgcttcattggaatgggcacctcaaaccgtggggcaggaccgcatcttacacagatgtatgggagaagtggtacatcccagacccgaccggcaagttcaacctgatccggcgatatactgagatctcaaatatcaaatag

SEQ ID NO: 24451 - DNA, 1116 bp, Artificial Sequence
  derived and/or modified sequence
atgtccttcagaaaagttaatataattatcctagtcctggccgtagcactcttcctgcttgtgctgcaccataattttttaagcttgtccagccttctgcgcaacgaagtgaccgacagcggaatcgtgggccctcagcctatagactttgtccctaacgctctgcgccacgcagtggatggacgtcaggaggagatacccgtggtcatagcggctagcgaagacagactgggaggtgctattgccgctataaactcaattcagcataataccagaagtaatgtcatcttttacattgtgacactgaataataccgccgaccatctgcggtcatggctgaacagtgatagcctgaaaagcatccgatacaagatagtcaatttcgaccccaaactcctggaaggaaaagtgaaggaggaccccgaccaaggcgaatcaatgaagcctctgacatttgctagattttatctcccgattctggttcccagcgcgaagaaagcgatatatatggatgacgacgtgatcgtgcagggggacatcctcgccctttacaatacagctttgaagccaggccatgctgcagcattctcagaagactgcgattccgcatcaacaaaggtggtcattaggggagccggaaatcagtataattatattggatacctggactataagaaagaaaggatacggaaactgagcatgaaggctagcacctgcagcttcaatccaggcgtgttcgtggcaaatctcaccgaatggaagagacagaatattacaaaccaattagaaaagtggatgaagttgaacgtggaagaagggttgtactccagaacacttgccggaagcatcacaactcctcccctgttgattgtgttctaccagcaacacagcacaatcgaccccatgtggaatgtgcgccatttgggcagcagtgcgggtaaaaggtactcgccgcagtttgttaaggctgccaagctactgcattggaatggccatctgaagccgtgggggcgaacagccagttatacagatgtttgggaaaagtggtatatccccgacccaactggaaagtttaatcttatcagaaggtatactgaaattagcaatatcaaatag

SEQ ID NO: 24452 - DNA, 681 bp, Artificial Sequence
  derived and/or modified sequence
atggacgacgacgtcattgtgcagggggacattctggcgctttacaacaccgctcttaagcctggtcacgccgctgctttcagtgaagattgcgactctgcctcaactaaggttgtgattagaggggcaggaaaccaatacaattacatcggttacctagattataagaaagaaagaatccgtaagctttccatgaaagctagcacctgtagtttcaatccaggtgtgtttgtggccaacttgacagagtggaaaaggcagaacatcacaaatcagctcgaaaagtggatgaaattgaatgtggaggagggactgtacagccgcacactggctggatccataaccaccccaccactactgatcgtgttttaccagcagcacagcaccatagaccctatgtggaaccctcctccttggtttcagtgttggaaaacaatatttacaagtgtgtgcaaagggtgccaggtgacgcattggaatgggcatctcaagccctggggtagaacggccagttatacttgcctcggaaaaatggtgtatagtcgcccaaaccgtcagattcagcccaatcccaagatttacagagacttaaagcataaggttaaacagaaccttaactgcaagcaagcttttctacgcaagtcatggaagattgcttgtgtgggctctaatagctgctag

SEQ ID NO: 24453 - DNA, 1116 bp, Artificial Sequence
  derived and/or modified sequence
atgtcctttagaaaggtgaacattatcatcctggtcctggcagttgctctcttcctcctggtgctacaccacaacttcctgagtctaagtagtctcctgcggaatgaggtcaccgactctggtatcgttggtccccaacctattgacttcgttcccaacgctctccgccatgcggtggacggacgccaggaggagatccctgtggtaatcgccgcatctgaagacagacttggaggggctatcgcagctatcaactcaatacagcataacacgaggagcaatgtaattttttatatcgtgactttgaataataccgccgatcatctgcgttcttggctgaattcagactccctcaagtcaattcgctataaaatcgtgaattttgaccccaaactgctcgaaggaaaggtgaaggaggacccagatcagggggagagcatgaaacctttgaccttcgcaagattttacctgcccatccttgtgcccagtgcaaaaaaggctatctacatggacgatgacgtcatcgtgcagggcgacattctagctctttacaacaccgccctaaaacctgggcatgccgcagcattcagcgaagactgtgactccgcttcaacgaaggttgtgatcagaggagccggtaatcagtataactacataggatatcttgattataaaaaggaaaggataaggaagctgagcatgaaagcgtccacatgttccttcaatccaggcgtattcgtggccaatctgaccgagtggaagagacagaatattacgaatcaactcgagaaatggatgaagttaaatgttgaggaaggcctgtacagtcgaacattagcagggtccatcaccacgccgccactactaattgtcttctaccagcagcattcaacgatcgatcctatgtggaacgttcggcatctcggatctagcgccggaaagcggtactccccccaatttgtgaaggcagcaaaactgttgcattggaacgggcatctgaagccctggggacggactgcctcatacactgatgtctgggaaaaatggtacatacccgacccgaccggtaagtttaacttgattcgaaggtacacagagatctctaacatcaagtag

SEQ ID NO: 24454 - DNA, 1116 bp, Artificial Sequence
  derived and/or modified sequence
atgagcttccggaaggtgaacatcatcatcctggtgcttgcagttgcgttgttcctgctggtgttgcatcataacttccttagtctcagctccttgctacgtaacgaagtgactgacagcggaatcgtgggaccgcagcccattgactttgtcccaaacgccctccggcacgcagtggacggcagacaggaggaaattcccgttgtaattgccgctagcgaggaccggctcgggggagccattgctgccatcaattcaatccagcacaatacgcgtagtaacgtgattttttatattgtgaccctgaataacactgctgatcatctccgcagctggctgaatagcgatagtttaaaatctatccgctacaaaattgttaattttgaccccaaactgctggaggggaaagtaaaagaagacccagaccagggcgaaagcatgaagcccctgacgttcgcacgcttctacctaccgattcttgttccgagcgctaagaaggcaatctacatggatgacgatgtcatcgttcagggcgatattcttgcactttataataccgcactgaaaccgggacacgctgctgcattcagtgaagattgcgacagtgctagcacaaaagtcgtcattagaggcgctggcaatcaatacaattacattggctatctggattataaaaaggagaggataaggaaactctccatgaaggcttccacatgcagctttaaccccggagtgttcgtggctaacctgacagaatggaaacggcagaacatcacgaatcagctagagaagtggatgaaattgaacgtcgaagagggtctctattccaggactcttgcaggatccataactactcctccattgctgatagtcttttatcagcagcattcgacgatcgatccaatgtggaacgtgagacatctgggatcctctgcaggcaagcgatattccccacagtttgtgaaagccgcaaagcttctgcactggaatggccacttgaaaccctggggcaggaccgccagctacaccgatgtgtgggaaaagtggtatatcccagatccaaccggaaagttcaatctgattaggagatacaccgagatctcaaatattaagtag

SEQ ID NO: 24455 - DNA, 525 bp, Artificial Sequence
  derived and/or modified sequence
atgtcattccgaaaggtgaacattatcattctggtcctggccgtggccctgttcctccttgttcttcaccacaattttcttagcctgagcagccttcttcggaacgaagtgacagactccggcatagtgggccctcagcccatcgacttcgttccaaacgcgttgagacacgccgtggatggacgacaggaagagattccggtagtgatcgctgcctccgaggatagactgggcggagcaatagctgccattaattcgattcagcataacactcgaagtaatgtgatcttttacattgtgactttaaacaacacggctgatcacctgcggagctggctaaacagcgattcactgaaaagcattcgctacaaaatcgtgaacttcgatcctaagcttcttgaaggtaaggtaaaggaggaccctgaccaaggggagtcaatgaagcctctcactttcgccagattttatttgcctatattagtccctagtgcaaaaaaagcaatatacatggatgatgacgtgtag

SEQ ID NO: 24456 - DNA, 189 bp, Artificial Sequence
  derived and/or modified sequence
atgtcgtttagaaaggtcaacatcatcatcttggtacttgctgtggccctgttcctgctggtgctgcaccataactttttaagcctctctagtctgctcaggaatgaagtgaccgatagtgggattgtcggaccccagccgatagacttcgttcccaatgccctgcggcatgctgtggatggcagatag

SEQ ID NO: 24457 - DNA, 333 bp, Artificial Sequence
  derived and/or modified sequence
atgtcgtttagaaaggtgaatattatcattctggttcttgcagttgcgcttttcctgctggtgcttcatcacaattttctgagcctgtccagcttgctgcgcaacgaagtcacggactctggcatcgtagggcctcaacctatcgatttcgttcccaatgccttgcgccatgctgtcgatggacgacaggaggagatccctgttgtcattgccgcttcagaggaccggttgggtggggctatcgccgcaatcaacagcatccaacataacactcgatccaatgttatcttttacattgtgaccctaaacaacaccgctgaccatttgcggtag

SEQ ID NO: 24458 - DNA, 1116 bp, Artificial Sequence
  derived and/or modified sequence
atgtccttccggaaggtgaacataattatattagtgctcgccgtagccttattcctgctggtgctccatcacaatttcttaagtctgagcagtctgctaaggaatgaagtcactgactccggcatcgtgggaccacagcccattgacttcgtccctaacgctcttcgtcacgccgtcgacgggaggcaggaggagattccagtcgtgatagcagccagcgaagaccgattgggaggtgccatcgcggcaataaattctatccagcacaacacccgttcaaatgtgatcttttacatcgttacactgaacaataccgctgaccacctgcgaagttggctcaactctgactctttgaagagcatcagatacaaaattgtgaatttcgacccaaagctcttagaggggaaggtgaaggaagatccagaccagggcgagagcatgaagcccctgacttttgcacgtttctatctgcccatcctggttccttccgccaagaaggccatctacatggatgacgacgtgatcgtgcagggtgatatcctagctctatacaatactgccctgaagccagggcacgctgcagcgttttctgaggactgtgacagtgctagtacaaaagttgtaatcagaggtgctgggaaccagtacaactatataggctacctggactacaaaaaggaacgcatccggaagctatctatgaaggcaagcacgtgttctttcaaccccggtgtgtttgtggccaacctgaccgaatggaaacggcaaaacatcactaatcagctcgaaaagtggatgaagctgaacgtcgaggaaggtttatacagccgtaccttagccggaagcatcacgaccccacccctgctgatcgttttctaccagcagcatagcaccatcgacccaatgtggaacgtccggcatttgggctcttcagcaggcaagcggtactcaccgcagtttgtgaaagctgctaagctcctgcattggaatggccacctgaagccatggggaagaactgcctcatataccgacgtttgggaaaagtggtacatccccgatccaaccggcaaatttaaccttataaggaggtataccgaaattagcaacattaaatag

SEQ ID NO: 24459 - DNA, 270 bp, Artificial Sequence
  derived and/or modified sequence
atgtcgttcagaaaggtgaatattatcattttggtcctggccgtggctttgttcctcttagtgcttcatcacaattttctgtctctgagctctctgcttaggaatgaggttactgattccggcatcgtgggaccccagccaatcgacttcgtgcccaacgccttgagacatgcagtagacggaaggcaggaggaaatcccggttgttattgctgcctcggaagatcgactcggaggagcaattgcagcaattaactcaatccagcattag

SEQ ID NO: 24460 - DNA, 192 bp, Artificial Sequence
  derived and/or modified sequence
atgtcctttagaaaggtgaacattatcatcctggtgctcgcggtggctctgtttctcttggttctgcaccacaattttttgagcctgagctcactgctgaggaatgaggtaacagacagcgggatcgttggccctcagcccatcgattttgtgcctaacgccctacgccatgccgtggacggacggcagtag

SEQ ID NO: 24461 - protein, 250 aa, Artificial Sequence
  derived and/or modified sequence
MDDDLMLALRLQEEWNLQEAERDHAQESLSLVDASWELVDPTPDLQALFVQFNDQFFWGQLEAVEVKWSVRMTLCAGICSYEGKGGMCSIRLSEPLLKLRPRKDLVETLLHEMIHAYLFVTNNDKDREGHGPEFCKHMHRINSLTGANITVYHTFHDEVDEYRRHWWRCNGPCQHRPPYYGYVKRATNREPSAHDYWWAEHQKTCGGTYIKIKEPENYSKKGKGKAKLGKEPVLAAENKGTFVYILLIFM

SEQ ID NO: 24462 - DNA, 753 bp, Artificial Sequence
  derived and/or modified sequence
atggacgacgacctgatgctggccctgagactgcaggaggagtggaacctgcaggaggccgagagagaccacgcccaggagagcctgagcctggtggacgccagctgggagctggtggaccccacccccgacctgcaggccctgttcgtgcagttcaacgaccagttcttctggggccagctggaggccgtggaggtgaagtggagcgtgagaatgaccctgtgcgccggcatctgcagctacgagggcaagggcggcatgtgcagcatcagactgagcgagcccctgctgaagctgagacccagaaaggacctggtggagaccctgctgcacgagatgatccacgcctacctgttcgtgaccaacaacgacaaggacagagagggccacggccccgagttctgcaagcacatgcacagaatcaacagcctgaccggcgccaacatcaccgtgtaccacaccttccacgacgaggtggacgagtacagaagacactggtggagatgcaacggcccctgccagcacagacccccctactacggctacgtgaagagagccaccaacagagagcccagcgcccacgactactggtgggccgagcaccagaagacctgcggcggcacctacatcaagatcaaggagcccgagaactacagcaagaagggcaagggcaaggccaagctgggcaaggagcccgtgctggccgccgagaacaagggcaccttcgtgtacatcctgctgatcttcatgtag

SEQ ID NO: 24463 - DNA, 753 bp, Artificial Sequence
  derived and/or modified sequence
atggatgacgacctgatgttagcactgaggctgcaggaagagtggaatctgcaggaagcagagcgagaccatgctcaggaatcactgagcctcgtggacgccagctgggagctagtggaccccacacccgacctgcaggctttgttcgtgcagtttaatgatcaattcttttggggacagttagaggccgtggaggtcaagtggagtgtccgtatgaccttgtgtgccggtatctgctcctacgaagggaaggggggtatgtgtagcattcggcttagcgagcctctcctcaagttacgtcctcgaaaggaccttgttgagacattgctgcatgagatgatccatgcttatctgtttgtgaccaataacgataaggacagagagggtcacggacctgaattctgtaaacacatgcaccgaattaattccctcacgggagcaaacatcacagtctaccatacatttcatgacgaggtagacgagtaccgtaggcactggtggagatgcaacggaccatgtcagcataggccgccttactacggttatgtcaaacgggctacgaaccgggagccctctgctcacgactactggtgggccgagcaccagaagacttgtggaggcacctacattaagattaaagaaccagagaactattcaaagaaaggcaaggggaaagccaagctgggcaaagagcctgtcctggccgccgagaataagggcacgtttgtgtacatcctactgattttcatgtag

SEQ ID NO: 24464 - DNA, 753 bp, Artificial Sequence
  derived and/or modified sequence
atggatgatgacctgatgctggccctgcggctgcaggaggagtggaacctgcaggaggccgagcgggaccacgcccaggagagcctgagcctggtggatgcctcctgggagctggtggaccccaccccagacctgcaggccctgtttgtgcagttcaatgaccagttcttctggggccagctggaggccgtggaggtgaagtggagcgtgaggatgaccctgtgtgccggcatctgcagctatgagggcaagggcggcatgtgcagcatccggctgtctgagcccctgctgaagctgcggcccaggaaggacctggtggagaccctgctgcacgagatgattcatgcctacctgtttgtgaccaacaatgacaaggaccgggagggccacggccctgagttctgcaagcacatgcaccgcatcaacagcctgactggagccaacatcaccgtgtaccacaccttccatgatgaggtggatgagtacagaagacactggtggcgctgcaatggcccctgccagcacaggcctccctactacggctacgtgaagagggccaccaaccgggagcccagcgcccatgactactggtgggccgagcaccagaagacctgtggcggcacctacatcaagatcaaggagcctgagaactacagcaagaagggcaagggcaaggccaagctgggcaaggagcctgtgctggccgcagaaaataaaggcacctttgtgtacatcctgctgatcttcatgtag

SEQ ID NO: 24465 - DNA, 753 bp, Artificial Sequence
  derived and/or modified sequence
atggacgacgacctgatgctggccctgcggctgcaggaggagtggaatctccaggaggcagaaagggatcacgctcaggagtcactgtcgctggtggatgcaagctgggagctggtcgatcctacacctgatttgcaggcccttttcgttcagttcaatgatcagttcttctggggtcaattggaggccgtggaggtcaagtggtcggttcgcatgacgctctgcgcaggtatttgcagttacgaaggtaaggggggcatgtgttcaattaggctaagcgagccgttgctcaagctaagacctagaaaggatctggtagaaacactgctgcatgagatgatccacgcctacctatttgtgactaataatgacaaagaccgcgaggggcacgggcctgaattttgcaagcacatgcacaggataaactcactgactggagccaatataacggtgtatcacacattccacgacgaggtggacgaataccggcgccattggtggcggtgcaatgggccgtgtcagcaccgaccgccttactatgggtatgtcaaacgggctactaacagggagccctcagcccacgattactggtgggccgagcaccagaagacctgcggcggcacctatatcaagattaaggagccagagaactacagcaaaaaagggaaagggaaagctaagctcggaaaagagcccgtactggcagctgagaacaaaggcacgttcgtttatatactcctgatctttatgtag

SEQ ID NO: 24466 - DNA, 753 bp, Artificial Sequence
  derived and/or modified sequence
atggatgacgatctcatgctggcccttagacttcaagaagagtggaatctgcaggaggcagaaagggatcatgcgcaggagtcgctgagcctggttgatgcgtcctgggagttggtcgatcctactccagatctgcaagccctgtttgtgcagtttaacgaccaatttttttggggccagctcgaggctgtggaggtcaagtggagtgtgaggatgacattatgtgccggaatttgtagttacgaggggaaaggaggtatgtgtagtattcgactgagtgagccactgctgaagttacggcctcgcaaagacttagttgaaaccctccttcacgagatgatccatgcctatctttttgtgacaaataacgataaggaccgggagggacacgggcctgaattttgcaaacacatgcatcggattaattccctaaccggggcaaacattacggtgtaccacactttccacgatgaagtggacgagtacagacgccattggtggagatgtaacgggccatgtcagcaccgcccaccttattatggctacgtgaaacgggcaaccaaccgcgaaccaagcgctcatgactactggtgggctgagcaccaaaagacctgcggcggtacgtatataaagatcaaggaaccagagaactactcaaagaaggggaagggtaaggcgaaactgggcaaagagcctgtcctggcagcagagaacaaaggcactttcgtttatattctactaatttttatgtag

SEQ ID NO: 24467 - DNA, 3559 bp, Artificial Sequence
  derived and/or modified sequence
caccaacaagcaatcgttcatgagaaagccgtgcacccgctgcagttgggccatgtggtccgcatcgtattccactaggtccccattgtacaccaagtactgtcccggcgtctccagcagatgcctgcagccttccaccttctcaagcagggtggtgagagtgcgctgctttccttcctcgcctggaccggagccgtcgcgggaggcacccccgggggtggagaaaaagccggcctggcctcggaggtggtctcggccccccgccccaccgactccctcctcccctccagaggcggcggcggctccggcggcagcagcggcaggcagcaacgtaagcgggatgctctccaggctgcttttctgctcggtcagcaaatggctgagctggtacatctcgctctccaggtaggagatctcgcgggccgtctctatgaactgccggtagttctggtagacgttgcgcttcaggttctgcgccgtctcctccgccagcgcctggatgcgctgccggtgctcctggaggtcccggtccccatccgactgctgcgagagctgcttcacgtacagccgcgcctcaaaaccccctgactccagctgccgacgcaggcggctcgccccactgtccgacatcgccatcgccatttctctccgggtctcacgcactcactgtcactatcggcgccgcagccgccgcggctgtctagacccacccaaggccaaccgagctcctgggctgaggaagcaggaatgggaacgagacgagtacgcctgcgccgggtctgagcgtcagacactgcgcctgcgcaagtgggccgagcgcagacattgcgcctgcgcagcaatgccatcggttaaagcgcatgcgcaagatgagctattgcggaagtgaggggagggagaggccgagagaaatttcggtactgcgcatgaaccgagcgtgacgttgaggtttgaaataaccggcaaagagtaaaggctgaaactagcttcctgaaagcttcgtagggcccgagccctgtgagcccaggttctgcgcccactaggaggtgtcatgctgactgctttttttaaagccctagaatcttggcttcggcgtttggggtaagctccgttctcgttctcaagcgcgtttccgcgaactctcgcgggattgacgggccgtctcgagagccggcatctcctaggagctagtcctggtcctcggctaggcggcttggggtcgcggcgtaactggggagccagcctgacgccggcggaccccgcctgtgatcctggcaacgatggatgatgacttgatgttggcactgcggcttcaggaggagtggaacttgcaggaggcggagcgcgatcatgcccaggagtccctgtcgctagtggacgcgtcgtgggagttggtggaccccacaccggacttgcaggcactgtttgttcagtttaacgaccaattcttctggggccagctggaggccgtcgaggtgaagtggagcgtgcgaatgaccctgtgtgctgggatatgcagctatgaagggaagggtggaatgtgttccatccgtctcagcgaaccccttttgaagttgaggccaagaaaggatcttgtagagaccctcctgcatgaaatgatacatgcctatttatttgtcactaataacgacaaagaccgagaagggcatggtccagaattttgtaaacatatgcatcgcatcaacagcctgactggagccaatataacggtataccatacttttcacgatgaggtggatgagtatcggcgacactggtggcgctgcaatgggccgtgccagcacaggccaccgtattacggctatgtcaaacgagctactaacagggaaccctctgctcatgactattggtgggctgagcaccagaaaacctgtggaggcacttacataaaaatcaaggaaccagagaattactcaaaaaaaggcaaaggaaaggcaaaactaggaaaggaaccagtattggccgcagagaataaaggtaccttcgtgtatattcttctgatttttatgtgaccatagctatgatgtaaagacaatactgtccttcagagaactggtattaagataaacttaaggatcgtttctggtgtagaagtcttcaagtgtagacttaaggaaaaaatcccactgtccatgaaatgatggtaggaaaacagactttgctctgtacagaagtaagtaaaagtaggaatagtttccatggatatttttatttttattaacttttttcagtttctttttattcaaagaaacaaaattcaatctctgataatatttgaggtaaagttcctttccctatcttgactcactgagttattaggaaacagaaggcaaaaagattgtcaaaataaaaacaataattcaagtaacaatgcccggaatatacgtcctaactacaccccttcctatcagctggattctatccaagtgactctattgatgtatgtatgttcattcaaagaatgggaaaaggatatgacatatatttgccagtacttcatcttcaagatttacccttttcctgtgaagttcagagttactgaagatgcttcttcccttgggaagttgttgacccaagaacataggttatatttcccaaatctttaattattgagtgaaagagctatagatgaattgatatggaaagaccgtatcttcattttcgtgagtagaaggaaagataagaatgaggcagcagattttccctcctggaattacacataaaggacactaagcaattttcaaggtaaatgttgccttgttgttggtctttggcatgataagattctttatttaaatatgagagaatttttttttatcctttatattctctcaatatcagaactcctgaattctgaagattgccctcctcccattaataggattgtatggatgtaagatggaataaaatactagttcttcattttgagaaaactgtacattagtttaatgtttgttactgtatttcttttgagttgaggcacttacataacaatcttctttgcttttttggcagataaacccaacagaggtgaggcccagctagtaatcccttttagtgggaaaggatatgttctaggagaaacaagcaatttaccttcacctgggaaactgatcacttcacatgccattaataaaacccaagatcttttaaatcaaaaccattcagcaaatgctgtaagacctaattctaaaatcaaggtgaaatttgaacagaatggttcaagtaaaaattctcatctggtctcccctgctgttagtaacagtcaccaaaatgttctaagcaactactttcctagagtatcatttgccaaccaaaaggctttcagaggtgtgaatggatctccaaggataagtgtaacagttggcaacatccctaaaaactcagtctcttctagttctcagagaagggtttcatcttctaagatatccctaagaaattcttcaaaagtaacggaatcagcatctgtgatgccatcccaggatgtgagtgggtctgaagatacattcccaaataaacgacctaggctagaagataa

SEQ ID NO: 24468 - protein, 232 aa, Artificial Sequence
  derived and/or modified sequence
MESETEPEPVTLLVKSPNQRHRDLELSGDRGWSVGHLKAHLSRVYPERPRPEDQRLIYSGKLLLDHQCLRDLLPKEKRHVLHLVCNVKSPSKMPEINAKVAESTEEPAGSNRGQYPEDSSSDGLRQREVLRNLSSPGWENISRHHVGWFPFRPRPVQNFPNDGPPPDVVNQDPNNNLQEGTDPETEDPNHLPPDRDVLDGEQTSPSFMSTAWLVFKTFFASLLPEGPPAIAN

SEQ ID NO: 24469 - protein, 390 aa, Artificial Sequence
  derived and/or modified sequence
MESETEPEPVTLLVKSPNQRHRDLELSGDRGWSVGHLKAHLSRVYPERPRPEDQRLIYSGKLLLDHQCLRDLLPKEKRHVLHLVCNVKSPSKMPEINAKVAESTEEPAGSNRGQYPEDSSSDGLRQREVLRNLSSPGWENISRPEAAQQAFQGLGPGFSGYTPYGWLQLSWFQQIYARQYYMQYLAATAASGAFVPPPSAQEIPVVSAPAPAPIHNQFPAENQPANQNAAPQVVVNPGANQNLRMNAQGGPIVEEDDEINRDWLDWTYSAATFSVFLSILYFYSSLSRFLMVMGATVVMYLHHVGWFPFRPRPVQNFPNDGPPPDVVNQDPNNNLQEGTDPETEDPNHLPPDRDVLDGEQTSPSFMSTAWLVFKTFFASLLPEGPPAIAN

SEQ ID NO: 24470 - DNA, 699 bp, Artificial Sequence
  derived and/or modified sequence
atggagagcgagactgagcccgagccagttacactgttggtgaagtctcccaaccagcgtcacagggacctggagctgagcggagatcgcggatggtctgtcggccatctcaaggcccatttgtcccgggtatacccagaacgtccccgcccagaggaccaaagactgatttatagcggtaagttgcttttggaccatcagtgtctgcgagatctgctgccaaaagaaaagaggcacgtgttgcatcttgtttgcaatgtgaagtctccgagcaaaatgccagaaatcaacgctaaggtggccgaatcaaccgaagaacccgctggatctaaccgcggtcagtacccggaggatagcagtagtgacggactcagacaaagagaggtgcttcgcaatctgtccagcccgggctgggaaaacataagccgccatcatgttgggtggttccctttcaggccgaggcccgtgcagaattttcccaacgacggtcccccccctgacgtggtgaatcaggacccaaataataatctccaggaagggactgatcccgagacagaagaccccaaccacctcccaccggatagggacgttctcgatggcgagcagacctcacccagcttcatgtccaccgcctggctagtcttcaaaacgttctttgcatcactgcttccagagggcccaccagccatcgccaattag

SEQ ID NO: 24471 - DNA, 1173 bp, Artificial Sequence
  derived and/or modified sequence
atggaatcagaaacagaaccagagcccgtgaccctccttgtgaagtcacctaatcaacggcaccgcgacttggaactgtctggcgacagagggtggtctgtaggacatctgaaagctcatctgtcaagagtttacccagaacggccaaggcctgaggatcagcgactgatttactccggaaagctgctgcttgaccatcagtgtctacgagacttactgccaaaagagaagaggcacgtgctccatctcgtgtgcaacgttaagtctccgtctaagatgcccgagattaacgcaaaagtcgcagagtcgaccgaagagccagctggctccaacagggggcagtatcctgaggattcttctagcgacggactcagacagcgagaggtgcttcgtaatctgtctagccccggctgggagaacatctctaggccagaagcagctcaacaggccttccaggggttagggcccggattctctggctacacgccctacgggtggctgcagctctcctggttccagcagatttacgcccgacagtattacatgcaatatctggcagccactgcagcttccggtgcatttgtgcccccaccatccgcccaggagatcccagtggtatctgcccccgctcccgcgcccatccacaaccagttccccgcagagaaccagcccgccaatcaaaatgccgccccgcaggtggttgtgaatccaggtgcaaatcagaatcttcgcatgaatgcccagggcggccccatagtcgaggaagatgatgaaatcaatagagactggttggattggacctactccgcagccactttctccgtgttcctgagtatactgtacttttactcgagcctgagtagattcctaatggtgatgggcgctacggtggtcatgtatttgcaccatgtcggatggttcccctttaggccgcgacctgtgcaaaactttccaaatgatggccctccccccgacgtggtcaaccaggaccctaataataatctgcaagagggtaccgatccagagaccgaagatcccaaccacttacctccagaccgtgacgtgctggacggggagcagacaagtcctagctttatgtccacagcctggcttgtgttcaagactttctttgctagcctcctcccagaagggccgccagctatcgctaactag

SEQ ID NO: 24472 - DNA, 1388 bp, Artificial Sequence
  derived and/or modified sequence
agagacgtgaactgtcgttgcagagattgcgggcggctgagacgccgcctgcctggcacctaggagcgcagcggagccccgacaccgccgccgccgccatggagtccgagaccgaacccgagcccgtcacgctcctggtgaagagccccaaccagcgccaccgcgacttggagctgagtggcgaccgcggctggagtgtgggccacctcaaggcccacctgagccgcgtctaccccgagcgtccgcgtccagaggaccagaggttaatttattctgggaagctgttgttggatcaccaatgtctcagggacttgcttccaaaggaaaaacggcatgttttgcatctggtgtgcaatgtgaagagtccttcaaaaatgccagaaatcaacgccaaggtggctgaatccacagaggagcctgctggttctaatcggggacagtatcctgaggattcctcaagtgatggtttaaggcaaagggaagttcttcggaacctttcttcccctggatgggaaaacatctcaaggcatcacgttgggtggtttccatttagaccgaggccggttcagaacttcccaaatgatggtcctcctcctgacgttgtaaatcaggaccccaacaataacttacaggaaggcactgatcctgaaactgaagaccccaaccacctccctccagacagggatgtactagatggcgagcagaccagcccctcctttatgagcacagcatggcttgtcttcaagactttctttgcctctcttcttccagaaggccccccagccatcgcaaactgatggtgtttgtgctgtagctgttggaggctttgacaggaatggactggatcacctgactccagctagattgcctctcctggacatggcaatgatgagtttttaaaaaacagtgtggatgatgatatgcttttgtgagcaagcaaaagcagaaacgtgaagccgtgatacaaattggtgaacaaaaaatgcccaaggcttctcatgtctttattctgaagagctttaatatatactctatgtagtttaataagcactgtacgtagaaggccttaggtgttgcatgtctatgcttgaggaacttttccaaatgtgtgtgtctgcatgtgtgtttgtacatagaagtcatagatgcagaagtggttctgctggtacgatttgattcctgttggaatgtttaaattacactaagtgtactactttatataatcaatgaaattgctagacatgttttagcaggacttttctaggaaagacttatgtataattgctttttaaaatgcagtgctttactttaaactaaggggaactttgcggaggtgaaaacctttgctgggttttctgttcaataaagttttactatgaatgaccctg

SEQ ID NO: 24473 - DNA, 699 bp, Artificial Sequence
  derived and/or modified sequence
atggagagcgagacagagcctgagcctgtgaccctgctggtgaagagccccaaccagaggcaccgggacctggagctgagcggggaccggggctggagcgtgggccacctgaaggcccacctgagccgggtgtacccagagcggcccaggcctgaggaccagaggctcatctacagcggcaagctgctgctggaccaccagtgcctgcgggacctgctgcccaaggagaagagacatgtgctgcacctggtgtgcaatgtgaagagccccagcaagatgcctgagatcaatgccaaggtggccgagagcacagaggagcccgccggcagcaacagaggccagtacccagaggacagcagcagtgatggcctgcggcagcgggaggtgctgaggaacctgagcagccctggctgggagaacatcagccgccaccacgtgggctggttccccttccggcccaggcctgtgcagaacttccccaatgatggccccccaccagatgtggtgaaccaggaccccaacaacaacctgcaggagggcacagatcctgagacagaggaccccaaccacctgcccccagacagagatgtgctggatggagagcagaccagccccagcttcatgagcacagcctggctggtgttcaagaccttctttgccagcctgctgcctgagggccccccagccatcgccaactag

SEQ ID NO: 24474 - DNA, 1173 bp, Artificial Sequence
  derived and/or modified sequence
atggagagcgagacagagcctgagcctgtgaccctgctggtgaagagccccaaccagaggcaccgggacctggagctgagcggggaccggggctggagcgtgggccacctgaaggcccacctgagccgggtgtacccagagcggcccaggcctgaggaccagaggctcatctacagcggcaagctgctgctggaccaccagtgcctgcgggacctgctgcccaaggagaagagacatgtgctgcacctggtgtgcaatgtgaagagccccagcaagatgcctgagatcaatgccaaggtggccgagagcacagaggagcccgccggcagcaacagaggccagtacccagaggacagcagcagtgatggcctgcggcagcgggaggtgctgaggaacctgagcagccctggctgggagaacatcagcaggcctgaggccgcccagcaggccttccagggcctgggccctggcttcagcggctacaccccctacggctggctgcagctgtcctggttccagcagatctatgcccggcagtactacatgcagtacctggccgccacagctgccagcggggcctttgtgcccccaccttctgcccaggagatccctgtggtgtctgccccagccccagcccccatccacaaccagtttcctgctgagaaccagcctgccaaccagaatgctgccccccaggtggtggtgaaccctggggccaaccagaacctgaggatgaatgcccagggcggccccatcgtggaggaggatgatgagatcaacagagactggctggactggacctacagcgctgccaccttcagcgtcttcctgagcatcctgtacttctacagcagcctgagccgcttcctgatggtgatgggcgccaccgtggtgatgtacctgcaccacgtgggctggttccccttccggcccaggcctgtgcagaacttccccaatgatggccccccaccagatgtggtgaaccaggaccccaacaacaacctgcaggagggcacagatcctgagacagaggaccccaaccacctgcccccagacagagatgtgctggatggagagcagaccagccccagcttcatgagcacagcctggctggtgttcaagaccttctttgccagcctgctgcctgagggccccccagccatcgccaactag

SEQ ID NO: 24475 - DNA, 699 bp, Artificial Sequence
  derived and/or modified sequence
atggagagcgagaccgagcccgagcccgtgaccctgctggtgaagtcccccaatcagagacatcgtgacttggaactttccggcgataggggttggtccgtagggcaccttaaggcacatcttagtcgagtgtaccctgagagacctcgacccgaagaccagaggctaatttatagtggaaaactgctcctggaccatcagtgtctcagagacctgctgcccaaagagaaaaggcatgtgctgcacctcgtctgcaacgttaagtcgccctctaaaatgcctgaaattaatgctaaagtagctgagagcacagaggaacccgcaggcagcaaccgtggccaatatcctgaagatagttcatctgacggcttgaggcagagggaagtcctgagaaacttatcttcacctggatgggagaatatctctcggcaccacgtcggatggttccccttcagacctcggcccgttcagaacttccccaacgacgggcctccacctgacgttgtgaatcaggaccctaataataatctgcaggagggcactgacccagaaaccgaggatcctaatcatttacctcccgatagggatgtgcttgatggcgaacagacatcaccttcattcatgtctacagcctggttggtgtttaagacattctttgcttccctcttacccgaaggaccgcctgcaattgccaattag

SEQ ID NO: 24476 - DNA, 1173 bp, Artificial Sequence
  derived and/or modified sequence
atggagagcgagaccgagcccgagcccgtgaccctgctggtgaagtctcccaatcagcgccacagggaccttgagctgtccggggatagagggtggagtgtgggccatttgaaggcgcacctgtcccgggtctatccagaaaggcctagacccgaagatcagcgtcttatatactccggcaagctgctgttagaccatcagtgcctccgggacttgttgcccaaagaaaaaagacatgtgttgcatttggtttgcaatgttaagtccccttctaagatgccggagattaatgctaaagtggcagagagtacagaggagccggccggatccaacagaggtcagtaccctgaggattcatcttccgatggcctccgccagcgggaggtcctacggaatctgagctcaccaggctgggagaacatatcccgccctgaagcagctcagcaggcctttcaggggctcggccccgggttcagcggctacactccgtacggctggctgcaactatcctggtttcagcagatctatgcccgccagtactacatgcaatatctggccgccacagccgccagtggcgcttttgttccccctccttctgctcaggagatcccagtggtttctgcccccgcccccgctccaattcacaatcagttccctgcggaaaaccagccagccaaccagaacgccgcccctcaagtggttgtgaatcctggcgccaaccagaacctcaggatgaacgcccagggggggcccatagtggaggaagacgatgaaattaaccgcgactggctggattggacgtactcagcagccacattttccgttttcctttccatcctgtatttttacagtagtctgtcccggttcctgatggtcatgggcgccactgtggtgatgtatctccatcacgtgggctggtttcccttccgcccccggcccgtccagaactttcccaacgatggccccccccccgacgtcgtgaaccaggacccgaataacaacctccaggagggaacggatcctgaaacagaggaccccaaccatctgccccctgacagggacgtcctggacggcgagcagactagtcccagttttatgagcacggcctggctggtgtttaaaacattcttcgccagtctcctacctgaggggccccctgctatcgccaactag

SEQ ID NO: 24477 - DNA, 699 bp, Artificial Sequence
  derived and/or modified sequence
atggagtctgaaacggaaccagaacccgtaacgctgcttgttaaaagtccgaaccagagacaccgggatctagagttgtctggagatcggggttggagtgtcgggcatttaaaagcacacctctccagggtctatcccgagaggcctcgacctgaagatcaaagactcatctactctggaaagttgctgcttgaccaccagtgcctccgggatcttctcccaaaggagaagcgtcatgtgctccatttagtgtgcaacgtcaagtctccttcaaaaatgccggaaatcaacgcgaaagttgccgagtctactgaagagccagccggaagcaataggggtcaatacccagaggactccagcagtgacgggcttagacagcgcgaggtcctccgcaacctctctagcccagggtgggaaaatatctccaggcaccatgtaggttggtttccattccggccacggcctgtccagaattttcctaacgatggccctcctcccgatgtggtcaaccaagatcctaacaacaatctacaggaaggaaccgaccctgagactgaagatcctaaccacctgcctccagaccgggacgttttagacggtgaacagacctctccaagcttcatgtccactgcttggttagtgtttaagactttcttcgcctccttattgccagaaggaccacctgctatcgcaaattag

SEQ ID NO: 24478 - DNA, 1173 bp, Artificial Sequence
  derived and/or modified sequence
atggagtccgagacagaacccgagccagtgactttactggtcaaatctccgaatcagagacacagagacttggaactgtccggtgatcggggatggtcagtaggtcacctgaaggctcatctgtccagggtctaccccgagcggcctcgccctgaggaccagcgcctcatttatagtggaaagttgctgttggatcatcagtgcctgagagatctcttaccgaaggaaaagcggcatgttctgcatctcgtgtgtaatgtgaagtctcctagtaaaatgcccgaaatcaacgcgaaggtggcagaatctacggaggagcccgcaggaagtaaccggggacagtatccagaagatagctcatctgacggactgcggcagcgagaagtcttacgaaatttgtcaagccccggatgggagaacatttcacgccctgaggccgcacagcaggctttccaggggctcggacctgggttcagtggctataccccatacggatggctccaactttcctggttccaacagatatatgccaggcagtattacatgcagtatctagccgctacagcagccagtggcgctttcgtaccacctccgtcagcccaagagatccctgtggtatccgctcccgctcctgccccaatacacaatcaattcccagctgagaatcaacccgcaaatcagaacgctgctccacaggtggttgtcaatccgggtgctaaccaaaacctccgcatgaatgcccaggggggtcccatcgtggaggaggatgatgagattaatagggattggctggactggacctacagtgccgctacgttctccgtgttcctgagcattttatatttttactcaagcctatccaggttcctgatggtcatgggggcaactgtcgtcatgtacctccaccacgtgggctggttcccattcagaccccgtcctgttcagaattttcctaacgatggcccaccaccagacgtcgtcaatcaggaccctaacaacaacctgcaggagggcactgatccggagaccgaagatcccaatcaccttccccctgatcgcgacgtgctcgacggcgagcaaacatcccccagcttcatgagcaccgcatggctggtgtttaaaaccttcttcgcgtctctgctgcctgaaggccctcctgctattgccaactag

SEQ ID NO: 24479 - DNA, 699 bp, Artificial Sequence
  derived and/or modified sequence
atggagagcgagaccgagcccgagcccgtgaccctgctggtgaagagccccaaccagagacacagagacctggagctgagcggcgacagaggctggagcgtgggccacctgaaggcccacctgagcagagtgtaccccgagagacccagacccgaggaccagagactgatctacagcggcaagctgctgctggaccaccagtgcctgagagacctgctgcccaaggagaagagacacgtgctgcacctggtgtgcaacgtgaagagccccagcaagatgcccgagatcaacgccaaggtggccgagagcaccgaggagcccgccggcagcaacagaggccagtaccccgaggacagcagcagcgacggcctgagacagagagaggtgctgagaaacctgagcagccccggctgggagaacatcagcagacaccacgtgggctggttccccttcagacccagacccgtgcagaacttccccaacgacggccccccccccgacgtggtgaaccaggaccccaacaacaacctgcaggagggcaccgaccccgagaccgaggaccccaaccacctgccccccgacagagacgtgctggacggcgagcagaccagccccagcttcatgagcaccgcctggctggtgttcaagaccttcttcgccagcctgctgcccgagggcccccccgccatcgccaactag

SEQ ID NO: 24480 - DNA, 1173 bp, Artificial Sequence
  derived and/or modified sequence
atggagagcgagaccgagcccgagcccgtgaccctgctggtgaagagccccaaccagagacacagagacctggagctgagcggcgacagaggctggagcgtgggccacctgaaggcccacctgagcagagtgtaccccgagagacccagacccgaggaccagagactgatctacagcggcaagctgctgctggaccaccagtgcctgagagacctgctgcccaaggagaagagacacgtgctgcacctggtgtgcaacgtgaagagccccagcaagatgcccgagatcaacgccaaggtggccgagagcaccgaggagcccgccggcagcaacagaggccagtaccccgaggacagcagcagcgacggcctgagacagagagaggtgctgagaaacctgagcagccccggctgggagaacatcagcagacccgaggccgcccagcaggccttccagggcctgggccccggcttcagcggctacaccccctacggctggctgcagctgagctggttccagcagatctacgccagacagtactacatgcagtacctggccgccaccgccgccagcggcgccttcgtgcccccccccagcgcccaggagatccccgtggtgagcgcccccgcccccgcccccatccacaaccagttccccgccgagaaccagcccgccaaccagaacgccgccccccaggtggtggtgaaccccggcgccaaccagaacctgagaatgaacgcccagggcggccccatcgtggaggaggacgacgagatcaacagagactggctggactggacctacagcgccgccaccttcagcgtgttcctgagcatcctgtacttctacagcagcctgagcagattcctgatggtgatgggcgccaccgtggtgatgtacctgcaccacgtgggctggttccccttcagacccagacccgtgcagaacttccccaacgacggccccccccccgacgtggtgaaccaggaccccaacaacaacctgcaggagggcaccgaccccgagaccgaggaccccaaccacctgccccccgacagagacgtgctggacggcgagcagaccagccccagcttcatgagcaccgcctggctggtgttcaagaccttcttcgccagcctgctgcccgagggcccccccgccatcgccaactag

SEQ ID NO: 24481 - protein, 487 aa, Artificial Sequence
  derived and/or modified sequence
MSNYSVSLVGPAPWGFRLQGGKDFNMPLTISSLKDGGKAAQANVRIGDVVLSIDGINAQGMTHLEAQNKIKGCTGSLNMTLQRASAAPKPEPVPVQKPTVTSVCSETSQELAEGQRRGSQGDSKQQNGPPRKHIVERYTEFYHVPTHSDASKKRLIEDTEDWRPRTGTTQSRSFRILAQITGTEHLKESEADNTKKANNSQEPSPQLASSVASTRSMPESLDSPTSGRPGVTSLTAAAAFKPVGSTGVIKSPSWQRPNQGVPSTGRISNSATYSGSVAPANSALGQTQPSDQDTLVQRAEHIPAGKRTPMCAHCNQVIRGPFLVALGKSWHPEEFNCAHCKNTMAYIGFVEEKGALYCELCYEKFFAPECGRCQRKILGEVISALKQTWHVSCFVCVACGKPIRNNVFHLEDGEPYCETDYYALFGTICHGCEFPIEAGDMFLEALGYTWHDTCFVCSVCCESLEGQTFFSKKDKPLCKKHAHSVNF

SEQ ID NO: 24482 - DNA, 1464 bp, Artificial Sequence
  derived and/or modified sequence
atgagcaactacagcgtgagcctggtgggccccgccccctggggcttcagactgcagggcggcaaggacttcaacatgcccctgaccatcagcagcctgaaggacggcggcaaggccgcccaggccaacgtgagaatcggcgacgtggtgctgagcatcgacggcatcaacgcccagggcatgacccacctggaggcccagaacaagatcaagggctgcaccggcagcctgaacatgaccctgcagagagccagcgccgcccccaagcccgagcccgtgcccgtgcagaagcccaccgtgaccagcgtgtgcagcgagaccagccaggagctggccgagggccagagaagaggcagccagggcgacagcaagcagcagaacggcccccccagaaagcacatcgtggagagatacaccgagttctaccacgtgcccacccacagcgacgccagcaagaagagactgatcgaggacaccgaggactggagacccagaaccggcaccacccagagcagaagcttcagaatcctggcccagatcaccggcaccgagcacctgaaggagagcgaggccgacaacaccaagaaggccaacaacagccaggagcccagcccccagctggccagcagcgtggccagcaccagaagcatgcccgagagcctggacagccccaccagcggcagacccggcgtgaccagcctgaccgccgccgccgccttcaagcccgtgggcagcaccggcgtgatcaagagccccagctggcagagacccaaccagggcgtgcccagcaccggcagaatcagcaacagcgccacctacagcggcagcgtggcccccgccaacagcgccctgggccagacccagcccagcgaccaggacaccctggtgcagagagccgagcacatccccgccggcaagagaacccccatgtgcgcccactgcaaccaggtgatcagaggccccttcctggtggccctgggcaagagctggcaccccgaggagttcaactgcgcccactgcaagaacaccatggcctacatcggcttcgtggaggagaagggcgccctgtactgcgagctgtgctacgagaagttcttcgcccccgagtgcggcagatgccagagaaagatcctgggcgaggtgatcagcgccctgaagcagacctggcacgtgagctgcttcgtgtgcgtggcctgcggcaagcccatcagaaacaacgtgttccacctggaggacggcgagccctactgcgagaccgactactacgccctgttcggcaccatctgccacggctgcgagttccccatcgaggccggcgacatgttcctggaggccctgggctacacctggcacgacacctgcttcgtgtgcagcgtgtgctgcgagagcctggagggccagaccttcttcagcaagaaggacaagcccctgtgcaagaagcacgcccacagcgtgaacttctag

SEQ ID NO: 24483 - DNA, 1464 bp, Artificial Sequence
  derived and/or modified sequence
atgtccaactacagcgttagtctcgtggggcctgccccatgggggttcagactccagggaggaaaggattttaatatgccactgaccatttcttcattgaaggatggaggtaaggctgcccaggctaacgttaggatcggcgatgtcgttttaagcatcgacggcatcaatgctcaggggatgacccacctcgaggctcagaataaaatcaaaggttgcacaggatccttaaatatgactctccagcgagcttccgccgcacctaagccggaaccagtccccgtgcaaaaaccaacggtcaccagtgtgtgcagcgaaacttcacaggagttagccgagggtcagcgcagaggttcacagggcgatagcaagcagcagaacggaccgccgagaaagcacattgtcgaacgctacactgaattttaccatgttcccactcatagtgatgcatccaaaaagaggctaatcgaggacactgaagattggaggccacggactggcactacacagagccggagttttcgcattctcgctcaaatcacgggcactgagcacctgaaggagtcagaagcagataatacaaaaaaagcaaacaatagtcaggagccttccccccagctcgctagttccgtggcttctactcgctccatgcctgaatccctggattcccctacttctggcaggcctggagtgacatcgctgacagccgctgctgccttcaagcccgttggcagcaccggtgtgattaaatcgccatcttggcagcgaccgaatcagggcgtccctagcaccggacgtatctcaaattctgccacttattccggcagtgttgcccccgccaactccgcactgggccagacacagcccagtgatcaggacactttagtgcagcgcgcagaacatattccagccgggaaacgcactcccatgtgtgcacactgtaaccaggtcatccggggcccttttttggttgcgctgggaaagtcatggcacccggaagagttcaactgcgcgcattgtaagaatactatggcctatatcggattcgtcgaagagaagggtgccctttactgcgagctatgctacgagaaatttttcgcccccgagtgcgggaggtgccagcgcaagattctaggagaggtcatctctgcactaaagcaaacttggcatgtgagttgcttcgtgtgcgttgcctgcggaaagcctatcaggaacaacgtgttccacttggaagacggtgagccttattgtgagacagattattacgccctgttcggcacaatctgtcacggatgcgagtttccaatcgaagccggcgacatgtttttagaggccttgggctacacttggcacgacacctgtttcgtgtgttctgtgtgctgtgaaagcctggaaggccagaccttcttcagtaagaaagataagcccctctgtaaaaagcatgctcattcggtaaacttttag

SEQ ID NO: 24484 - DNA, 1464 bp, Artificial Sequence
  derived and/or modified sequence
atgagcaactacagcgtgtccctggtgggccctgccccctggggcttccggctgcagggcggcaaggacttcaacatgcccctgaccatcagcagcctgaaggatggcggcaaggccgcccaggccaacgtgagaattggagatgtggtgctgagcattgatggcatcaatgcccagggcatgacccacctggaggcccagaacaagatcaagggctgcaccggcagcctgaacatgaccctgcagagggccagcgctgcccccaagccagagcctgtgcctgtgcagaagcccaccgtgacctctgtgtgcagcgagaccagccaggagctggccgagggccagaggcggggcagccagggcgacagcaagcagcagaatggaccacccaggaagcacatcgtggagcgctacacagagttctaccacgtgcccacccacagtgatgccagcaagaagaggctgattgaggacacagaggactggaggcccaggacaggcaccacccagagccgctccttccgcatcctggcccagatcactggaacagagcacctgaaggagagcgaggccgacaacaccaagaaggccaacaacagccaggagcccagcccccagctggccagctctgtggccagcaccaggtccatgcctgagagcctggacagccccaccagcggccggcctggggtgaccagcctgacagctgctgctgccttcaagcctgtgggcagcactggagtcatcaagagccccagctggcagaggcccaaccagggcgtgcccagcacaggccgcatcagcaacagcgccacctacagcggctctgtggccccagccaacagcgccctgggccagacccagcccagcgaccaggacaccctggtgcagagagctgagcacatcccagctgggaagaggacccccatgtgtgcccactgcaaccaggtgatccggggccccttcctggtggccctgggcaagtcctggcaccctgaggagttcaactgtgcccactgcaagaacaccatggcctacatcggctttgtggaggagaagggggccctgtactgtgagctgtgctatgagaagttctttgccccagaatgtggccgctgccagaggaagatcctgggggaggtgatcagcgccctgaagcagacctggcacgtgtcctgctttgtgtgtgtggcctgtgggaagcccatccggaacaacgtgttccacctggaggatggagagccctactgtgaaacagactactatgccctgtttggcaccatctgccacggctgtgagttccccatcgaggccggggacatgttcctggaggccctgggctacacctggcatgacacctgctttgtgtgcagcgtgtgctgtgagagcctggagggccagaccttcttcagcaagaaggacaagcccctgtgcaagaagcacgcccacagcgtgaacttctag

SEQ ID NO: 24485 - DNA, 1464 bp, Artificial Sequence
  derived and/or modified sequence
atgagcaactacagcgtgagcctggtgggccccgccccctggggcttccggctgcagggcggcaaggattttaacatgcccttgacaattagtagcttgaaagacgggggtaaggcggcgcaggcaaacgtgcgaatcggagacgtggtcctgtctatagatgggatcaacgcccagggaatgacgcatctagaggcacagaacaagatcaagggttgcactggaagtctgaatatgactctgcagcgagctagcgcagctcccaagccagaaccagttcctgttcagaaacctacagttacatccgtgtgttctgagacatcgcaggagttagctgaaggccagagacgcggatcacagggagacagcaagcagcagaatggcccaccgcggaagcacattgtcgagcggtatacggaattctatcatgtccccacgcacagtgacgcttcaaagaaaaggttgattgaggacacggaggactggcggcctaggaccggaactacccagtctcgatcttttagaatcttggctcaaattacaggaaccgagcacctgaaagagtctgaggctgataatacaaagaaagctaataacagtcaagaaccatcgccacagctggcaagcagcgtcgcttcaacccgatccatgcccgagtccctggactcgccaacttccggccgacctggggtcaccagcctgaccgccgcagctgccttcaagcctgtcggctcgactggtgtgattaaatctccctcttggcagcgacccaaccaaggcgtgcctagcacgggccggatatcgaacagcgccacgtattctggcagtgtcgctcccgctaatagtgctctggggcagacacagccatccgaccaggacacgctggttcaaagagcggagcatatcccggctggcaagagaacacccatgtgcgcccactgtaaccaggtaatcagaggtccctttctcgtcgcactgggcaagagttggcatccagaagagttcaattgcgctcactgtaaaaatactatggcttatattgggtttgtggaagaaaagggggccctgtattgcgaactgtgctacgagaagttcttcgcgccagaatgcggccggtgccaaagaaagatactcggcgaggtcatttcagcccttaaacaaacctggcatgtgtcctgcttcgtgtgcgtcgcctgtgggaaaccaatccggaacaatgtttttcatctggaggatggagagccctactgtgagaccgactattacgctttgttcggcacgatctgccacgggtgtgaatttccaatcgaggctggagatatgtttctcgaggcgctgggatacacatggcacgatacatgtttcgtgtgctccgtctgttgtgaaagcctggagggccagacattcttcagtaaaaaggacaagccactgtgcaaaaaacatgcccactccgtaaacttttag

SEQ ID NO: 24486 - DNA, 1464 bp, Artificial Sequence
  derived and/or modified sequence
atgagcaattactccgtttcactggttggtcccgctccatgggggttcagattacagggtggaaaggacttcaacatgcccctgacaatctcgagcctgaaggacgggggaaaagctgcgcaggctaatgtcaggatcggtgatgtcgtgctgtccatagatggaattaacgctcaagggatgactcatctcgaggctcaaaacaagattaaaggttgcaccggtagtctcaatatgacgttgcagcgggcttcagccgcaccaaagccagagcctgtgccagtacagaagcctaccgtcacttcagtttgctcagaaacctcacaggagctggccgaggggcagagaagaggcagccaaggtgattctaaacagcagaatggaccacctagaaagcacattgttgagaggtacaccgagttttaccacgtgccgacccactctgatgcctcgaagaagagactcatcgaagacaccgaggattggcggcctagaacaggaaccacgcagagtcggagttttcggatcttggcacagataactggtacagagcatctcaaggaatccgaagctgacaatactaaaaaagctaataattctcaggagccctccccccagctggctagcagtgtagcctccacacggtctatgccggagtctctcgactcaccgacatccggcaggcccggagttacatcgctgacggctgcagccgctttcaagcctgttggtagtaccggagttatcaaatcaccttcttggcagcgaccaaaccaaggtgtgccttcaacagggagaattagcaactcagctacgtactccggcagcgttgctcccgcaaatagcgccctgggccagacccaaccatctgaccaggacacattggtgcagcgcgctgaacacataccggcaggtaagagaacgcccatgtgtgcacactgtaatcaggtgatacgtggcccttttttggtcgccctgggtaaatcttggcatccagaagagtttaattgcgcacattgcaagaataccatggcttatatagggtttgtggaggagaagggagcactgtactgcgagctctgctatgagaagttctttgccccagagtgtggcaggtgccagagaaaaatccttggcgaggtgattagcgccttaaaacagacctggcatgtgtcttgctttgtgtgcgtggcctgcggaaagcctattagaaacaacgtttttcatcttgaggacggcgagccctattgtgaaacggattattatgccctgtttggaactatctgccacggctgcgagtttcctatcgaagccggtgacatgtttctggaggctctcggttatacatggcatgatacgtgtttcgtgtgctccgtctgttgcgagtccttagaaggacagactttcttctccaagaaggataagcctctgtgtaaaaagcacgctcacagcgtgaatttctag

SEQ ID NO: 24487 - DNA, 5774 bp, Artificial Sequence
  derived and/or modified sequence
agccaggaggcggaagttcccgcgggcggtggggacggcgccctcaccgcgagtcacttgtcagcccttgtctgaggcggaggcagccccgcgccgcgccggacccgagcatatttcattttctgtcattggactttgagccattagaaccatgagcaactacagtgtgtcactggttggcccagctccttggggtttccggctgcagggcggtaaggatttcaacatgcctctgacaatctctagtctaaaagatggcggcaaggcagcccaggcaaatgtaagaataggcgatgtggttctcagcattgatggaataaatgcacaaggaatgactcatcttgaagcccagaataagattaagggttgtacaggctctttgaatatgactctgcaaagagcatctgctgcacccaagcctgagccggttcctgttcaaaagcccacagtcaccagcgtgtgttccgagacttctcaggagctagcagagggacagagaagaggatcccagggtgacagtaaacagcaaaatggcccaccaagaaaacacattgtggagcgctatacagagttttatcatgtacccactcacagtgatgccagcaagaagagactgattgaggatactgaagactggcgtccaaggactggaacaactcagtctcgctctttccgaatccttgcccagatcactgggactgaacatttgaaagaatctgaagccgataatacaaagaaggcaaataactctcaggagccttctccgcagttggcttcctcggtagcttccacacggagcatgcccgagagcctggacagcccaacctctggcagaccaggggttaccagcctcacagctgcagctgccttcaagcctgtaggatccactggcgtcatcaagtcaccaagctggcaacggccaaaccaaggagtaccttccactggaagaatctcaaacagcgctacttactcaggatcagtggcaccagccaactcagctttgggacaaacccagccaagtgaccaggacactttagtgcaaagagctgagcacattccagcagggaaacgaactccgatgtgcgcccattgtaaccaggtcatcagaggaccattcttagtggcactggggaaatcttggcacccagaagaattcaactgcgctcactgcaaaaatacaatggcctacattggatttgtagaggagaaaggagccctgtattgtgagctgtgctatgagaaattctttgcccctgaatgtggtcgatgccaaaggaagatccttggagaagtcatcagtgcgttgaaacaaacttggcatgtttcctgttttgtgtgtgtagcctgtggaaagcccattcggaacaatgtttttcacttggaggatggtgaaccctactgtgagactgattattatgccctctttggtactatatgccatggatgtgaatttcccatagaagctggtgacatgttcctggaagctctgggctacacctggcatgacacttgctttgtatgctcagtgtgttgtgaaagtttggaaggtcagacctttttctccaagaaggacaagcccctgtgtaagaaacatgctcattctgtgaatttttgaaagtcaacagttcaggagaagagaaggaatttgaagagaaaaaggaaaattaaaattactaattaatttttagattcaatatttatatggagttttgaaaaataatagtggccctgaaggaataaattccagctttaaaaaccaagtctgaggaaatatttggcttcataaagtaaagagacggtttggcatttattattactttttcctgtattttatgcccataaaataagctttataaaaaccaatttcctgatggactattaaattcatcttagaataaattagtgaagaatttaattttagaataaataatccaatctgaaataattataccttctttccttgttaggtagttatgagtaaatctgcaaaaggcaatgaaaatgccttaaattttatcaataacagaattattgtatttaaaaaaaaactaatacttatctttaaaatagtaaataggattttaaacagagaattttatcagtaataggtgtcagtttttaaaaaattgcttgtaggctgagcgcggtggctcacgcctgtaatcccagcactttgggaggccaaggtgggtggaccacatgaggtcaggagtttgagatcagcctggccaacatggtgaaaccccatctctactaaaaatacaaaaattagccggacgcagtggcacgcgcctgtaatcccagctactcaagaggctgaggcacgagaatcacttgaacccgggagggagaggttgcagtgagccaagatcgtaccactgcactccagcctgggtgacagagtgagactctgtctccaaaaaaaaactttgcttgtatattatttttgccttacagtggatcattctagtaggaaaggacaataagattttttatcaaaatgtgtcatgccagtaagagatgttatattcttttctcatttcttccccacccaaaaataagctaccatatagcttataagtctcaaatttttgccttttactaaaatgtgattgtttctattcattgtgtatgcttcatcacctatattaggcaaattccatttttttcccttgtgctaaggtaaagatttaattaaataattttggcctctcatagttttctctctctttaaagagaataaatagagggccaggtgtggtggctcacgcctgtgatcccagcactttgggaggccaagacgggcggatcatgaggtcaagagatcaagatcatcctggccaacatggtgaaaccctgtctctactaaaaatacaaaaatgagctgggcatggtggggcgtgcctgtagtcccatgtacttgggaggctgaggcaggaaaattcttgaacccaggagacggaagttgcagtgagctgagatcacaccactgcactccagcctggtgacagagcaagactccggctcttaaaaaaaaaaaaaaaaaaaaaaaaagagagagagagaataaatagaaaagaatgtggctgggaattgtgaatcagaagattataccccccaattgtttttcaatccccttttctcaaataataaattagttaaatcagtttctgagttatgccactggctgatgaagagttgagaggtctctttgcagaatgatctttttgtttcgttttgtttcttcttctgcatttaaaaattaaaagattggtttgaggatgtgatgaaattgagactttttgtggttttctctcaataataagtgaaccaatttcaaatgtgatcacaaagtttggaaagcttttattcacagaggttgggtagtgttgggaggggagtttaattactcagattggcctgttatttgatttcctcctttgggaaaagaattatgtagataccacatggagacagggaaacaattgtggtaaaactgtggatcctgttgctatttgcccagtgagaaaacagattctggtatttgatttggtttttctctttgtttccagaatggatgaaagtccatgaacctcctaagttataatttaaatttgtttggggcaaggtgattttatagtcgagacagagccctaggtccttcctgccccatcactcacttacgacatcacttccattgtgtgcatgtttgttatagaggaggttttaggctacaatatttgtttaacctccctaagaactttcaaggcatctgtcctgaaagctgttaatttatggtctagcagatttatattatatgcagataataattaactggggataaaagaatggcaaggggtgacacaaagtagcaaactgaatacttctccaatagcaaccccaagctacctcctcaccctgcatcttggagggaggcaggaaatttcttttgaaataaagtgctggagctgaattctgcattatttatcgttgctgctgaaaccacctataaaagacttgctggctaatgtgcattgtcatataatgtacactgtcacatctttacagtcttgtatgttatagaatacaaaataagttgatggttttgtttggtgtgagctttttgtttgtttgtttagttttgccttcataggttatatgccaagatagtatttgataagtcaatgacatttggatgttttcttcaaagaattttatttgacccagatttcttataaagttatcttacattaaggatgtcattttcatcagaccttctttctacatattattcatgaagcataatgttgcatttctccaaattttatgcctgaaagggtagtgttgcttcctaaggtatcatgttgtctttgtgctttgtccatctcttccgtggcgaagctttatatctgttcctaaaacagttaatcctgtgaaataaatattgaacataatccagaagaatctctctgtttcccttggggaatgccatatttaattcaccagcagtaatcctttaataactggcagagcactttattcttctggtgagctccctgaatatttatttttctgattataaattttctatattagtagcattttttaattattacttcttcactatagagcatttacttttagtctctagatgtatattttggaatgctgtacttggcataacatagattaaaatcataatgcatgactaaaaactccttggatttatttcccattttaaaatttttagcggtaagttcagatttataatctttctctagacttccatggtctgaatgttgcctgctgaagtagcaacctaaaaagtatcccctgcttatgcttgtccagttggccctccatgtccataggcttcgcatctgtgattcagcccactgtgggtcaaaaatatttggggaaaaaaatggatggttgcgcctttgctgaacatgtacaaacttttttttgtcattaaacaatatagtataacaactatttacaaagcatttacattgtattagctattataggtaatctagagatgatttaaagtgtatggtaggatgtgcataggttatatgcaaatactacaccattttctataagggacttgaacatcatggactttagtatcctagggggttcttggaacccatcacccataggggcaccataggacaactatagtaccgtgtttatttcctattaattcaggttccgtttagagtctaaaactaaaacctaatcatttagtcacagtgtaaaaacaaatggaaataacagctcaaatcttcaaaatattactatagcattatgtttaaaataatctacaacaaaaatgtaccattttcaagcagtactacattaggagcccttttatagaaaataatttcttctttacccccgttccagtgtgaatctagtattctgttaacatttgtgtggcatttggagtttgtcatccccattgaagggagagccttctcagacatgaagcaagggaaacatactgaatagttttacacaaatttgatctggcttccatttgtccccctcatttcccaaatgtttaaatgtattggatttggattctcaatgtataagttgccttatctgttaatgtctatcttctgtctctttaattttgtatatctgctgttttgcttttggatacattttctaattagaagtcacatgataaatataatcagtatagtaataataccataatgtgcacatactcaataaataaatgactgcattgttgtaaatga

SEQ ID NO: 24488 - protein, 234 aa, Artificial Sequence
  derived and/or modified sequence
MSNYSVSLVGPAPWGFRLQGGKDFNMPLTISSLKDGGKAAQANVRIGDVVLSIDGINAQGMTHLEAQNKIKGCTGSLNMTLQRASAAPKPEPVPVQKPTVTSVCSETSQELAEGQRRGSQGDSKQQNGKIPPKRPPRKHIVERYTEFYHVPTHSDASKKRLIEDTEDWRPRTGTTQSRSFRILAQITGTEHLKESEADNTKKAKEKIPLHVFSPKYTKLRDWHHEVSARALNVQ

SEQ ID NO: 24489 - protein, 234 aa, Artificial Sequence
  derived and/or modified sequence
MSNYSVSLVGPAPWGFRLQGGKDFNMPLTISSLKDGGKAAQANVRIGDVVLSIDGINAQGMTHLEAQNKIKGCTGSLNMTLQRASAAPKPEPVPVQKPTVTSVCSETSQELAEGQRRGSQGDSKQQNGPVPRKIPPRKHIVERYTEFYHVPTHSDASKKRLIEDTEDWRPRTGTTQSRSFRILAQITGTEHLKESEADNTKKAKEKIPLHVFSPKYTKLRDWHHEVSARALNVQ

SEQ ID NO: 24490 - DNA, 705 bp, Artificial Sequence
  derived and/or modified sequence
atgagcaactacagcgtgagcctggtgggccccgccccctggggcttcagactgcagggcggcaaggacttcaacatgcccctgaccatcagcagcctgaaggacggcggcaaggccgcccaggccaacgtgagaatcggcgacgtggtgctgagcatcgacggcatcaacgcccagggcatgacccacctggaggcccagaacaagatcaagggctgcaccggcagcctgaacatgaccctgcagagagccagcgccgcccccaagcccgagcccgtgcccgtgcagaagcccaccgtgaccagcgtgtgcagcgagaccagccaggagctggccgagggccagagaagaggcagccagggcgacagcaagcagcagaacggcaagatcccccccaagagaccccccagaaagcacatcgtggagagatacaccgagttctaccacgtgcccacccacagcgacgccagcaagaagagactgatcgaggacaccgaggactggagacccagaaccggcaccacccagagcagaagcttcagaatcctggcccagatcaccggcaccgagcacctgaaggagagcgaggccgacaacaccaagaaggccaaggagaagatccccctgcacgtgttcagccccaagtacaccaagctgagagactggcaccacgaggtgagcgccagagccctgaacgtgcagtag

SEQ ID NO: 24491 - DNA, 705 bp, Artificial Sequence
  derived and/or modified sequence
atgagcaactacagcgtgagcctggtgggccccgccccctggggcttcagactgcagggcggcaaggacttcaacatgcccctgaccatcagcagcctgaaggacggcggcaaggccgcccaggccaacgtgagaatcggcgacgtggtgctgagcatcgacggcatcaacgcccagggcatgacccacctggaggcccagaacaagatcaagggctgcaccggcagcctgaacatgaccctgcagagagccagcgccgcccccaagcccgagcccgtgcccgtgcagaagcccaccgtgaccagcgtgtgcagcgagaccagccaggagctggccgagggccagagaagaggcagccagggcgacagcaagcagcagaacggccccgtgcccagaaagatcccccccagaaagcacatcgtggagagatacaccgagttctaccacgtgcccacccacagcgacgccagcaagaagagactgatcgaggacaccgaggactggagacccagaaccggcaccacccagagcagaagcttcagaatcctggcccagatcaccggcaccgagcacctgaaggagagcgaggccgacaacaccaagaaggccaaggagaagatccccctgcacgtgttcagccccaagtacaccaagctgagagactggcaccacgaggtgagcgccagagccctgaacgtgcagtag

SEQ ID NO: 24492 - DNA, 705 bp, Artificial Sequence
  derived and/or modified sequence
atgagcaactatagtgttagcctggtggggcccgcgccctggggatttagattgcagggcggaaaggactttaacatgccactaacgatatcctccttgaaagacggtggtaaagcggctcaagcaaatgtgagaatcggagacgtcgtactctcaattgacggaattaacgcccaaggaatgacacacctggaggctcaaaacaagataaagggatgcactgggagtttgaacatgaccctccaacgagcttccgcagcacccaaacccgagcctgtaccagtccagaaacctactgtgacgagcgtgtgtagtgagacctcccaagagctcgctgagggccaacggagggggagtcagggcgacagtaagcagcaaaatggcaagattcctccaaaacgccctcctcgaaagcacatcgtcgaacgatacaccgaattttatcatgtgcccactcattccgacgcctcaaagaagcgcttgattgaggacacggaagactggagaccaagaacggggaccacacagtctcgctcatttcgcattcttgcccaaattacaggcacagagcatttaaaggaatcggaggctgacaataccaagaaggcgaaggaaaagattccgcttcacgtgttctcaccaaagtacactaaactgcgcgattggcaccacgaggtatctgcaagagccctgaatgtgcagtag

SEQ ID NO: 24493 - DNA, 705 bp, Artificial Sequence
  derived and/or modified sequence
atgtccaattactccgtgagcctagtagggccagccccatggggcttcagactccaaggaggaaaagattttaatatgcctctgaccatctccagcttgaaggatggagggaaagctgctcaggccaacgtccggattggagatgtagtgctctccattgacggaatcaatgcccagggcatgacgcatctggaagcacaaaacaaaataaagggctgcaccgggtcattgaacatgactttgcaaagggctagcgccgctcccaaaccagaacccgtcccagtgcagaaacctacggtcaccagcgtgtgctcagaaacgtcgcaggaactggcagagggccagagacgcggatcccagggcgactctaaacagcagaatggcccggttccacgcaaaatacccccccgcaaacatattgtggagcgctacacagaattctaccacgtccctactcactcagacgcttctaaaaagagattgattgaggacactgaggactggcgaccacgtaccggcaccacccagagcaggagttttcgtattttggcacagattaccgggacagagcacctgaaggaatctgaagcagacaataccaagaaagctaaagaaaagatacccctacacgtgttctcacccaagtacacaaaactgagggactggcatcatgaagtgtccgccagggctctgaatgtgcagtag

SEQ ID NO: 24494 - DNA, 705 bp, Artificial Sequence
  derived and/or modified sequence
atgagcaactacagcgtgtccctggtgggccctgccccctggggcttccggctgcagggcggcaaggacttcaacatgcccctgaccatcagcagcctgaaggatggcggcaaggccgcccaggccaacgtgagaattggagatgtggtgctgagcattgatggcatcaatgcccagggcatgacccacctggaggcccagaacaagatcaagggctgcaccggcagcctgaacatgaccctgcagagggccagcgctgcccccaagccagagcctgtgcctgtgcagaagcccaccgtgacctctgtgtgcagcgagaccagccaggagctggccgagggccagaggcggggcagccagggcgacagcaagcagcagaatggcaagatcccccccaagaggcctcccaggaagcacatcgtggagcgctacacagagttctaccacgtgcccacccacagtgatgccagcaagaagaggctgattgaggacacagaggactggaggcccaggacaggcaccacccagagccgctccttccgcatcctggcccagatcactggaacagagcacctgaaggagagcgaggccgacaacaccaagaaggccaaggagaagatccccctgcacgtgttcagccccaagtacaccaagctgcgggactggcaccacgaggtgtctgcccgggccctgaatgtgcagtag

SEQ ID NO: 24495 - DNA, 705 bp, Artificial Sequence
  derived and/or modified sequence
atgagcaactacagcgtgtccctggtgggccctgccccctggggcttccggctgcagggcggcaaggacttcaacatgcccctgaccatcagcagcctgaaggatggcggcaaggccgcccaggccaacgtgagaattggagatgtggtgctgagcattgatggcatcaatgcccagggcatgacccacctggaggcccagaacaagatcaagggctgcaccggcagcctgaacatgaccctgcagagggccagcgctgcccccaagccagagcctgtgcctgtgcagaagcccaccgtgacctctgtgtgcagcgagaccagccaggagctggccgagggccagaggcggggcagccagggcgacagcaagcagcagaatggacctgtgcccaggaagatcccccccaggaagcacatcgtggagcgctacacagagttctaccacgtgcccacccacagtgatgccagcaagaagaggctgattgaggacacagaggactggaggcccaggacaggcaccacccagagccgctccttccgcatcctggcccagatcactggaacagagcacctgaaggagagcgaggccgacaacaccaagaaggccaaggagaagatccccctgcacgtgttcagccccaagtacaccaagctgcgggactggcaccacgaggtgtctgcccgggccctgaatgtgcagtag

SEQ ID NO: 24496 - DNA, 705 bp, Artificial Sequence
  derived and/or modified sequence
atgagcaactacagcgtgagcctggtgggccccgccccctggggctttagattgcaaggaggcaaggactttaacatgccacttactatctcatctctgaaagatggtgggaaggctgcgcaggccaatgttagaatcggagatgtggtgttgtctatagatggcataaatgcacagggtatgacccacctggaagcccagaataagatcaagggatgcacgggtagcctgaatatgacactacaaagggcaagcgccgcccccaaacctgagccggtcccagtacagaagcctacggtgacatctgtctgttcggaaacctcccaggagttggccgaaggacagcgccgcgggtcccagggggattccaaacaacaaaacggtaagatcccccctaaaaggcctcccagaaagcacattgtggaacggtataccgaattttatcatgtgccgacccacagtgatgcttccaaaaaacgcctgatcgaggacactgaggattggcgacccaggaccggtactacccaatctcgtagctttcgcattctagcgcagatcactgggaccgagcacctgaaggagtccgaggctgacaataccaaaaaagctaaggagaagatcccgctgcacgtgttcagcccaaagtacaccaaattgcgggactggcaccatgaggtgtcagcccgggctctcaatgtccagtag

SEQ ID NO: 24497 - DNA, 705 bp, Artificial Sequence
  derived and/or modified sequence
atgagcaactacagcgtgagcctggtgggccccgccccctggggcttccggcttcagggcggaaaggatttcaacatgcccttgaccatcagtagtctaaaggacggtgggaaggccgcccaagccaatgtgcggattggtgatgtggtgctttccattgatgggatcaacgctcagggaatgacacacctagaggcccagaacaaaattaagggatgtacgggaagtctcaacatgacactgcagcgggccagtgctgctccaaagcctgagccggtccctgtgcagaagcctaccgtgacaagcgtgtgctccgagacgagccaggagctggccgagggacagaggcgtggaagccagggggatagcaaacaacagaatggtcctgtgcccaggaagatccctccgaggaagcacattgtggagaggtacacagagttctatcatgtgcccactcacagtgatgctagcaagaagcggttaatagaggatacagaggattggaggccccgcacaggaaccactcaaagccgttcttttcggatcctagcacagattaccggtactgagcatctgaaggagtctgaggcggacaatactaagaaggctaaggagaaaatccccctccatgtcttctccccgaaatacacaaaactgcgggactggcaccatgaggtttcagcccgagcactaaatgtgcagtag

SEQ ID NO: 24498 - DNA, 705 bp, Artificial Sequence
  derived and/or modified sequence
atgagcaactacagcgtttctttagtggggccagccccatggggctttaggctgcagggaggcaaggactttaatatgccactcactatcagttcactcaaagacggcggaaaagcagctcaggctaatgtgcgtatcggcgacgtagtgttgtctatcgatggcataaacgcccagggaatgacccacctagaagcgcaaaataagatcaaagggtgtactggtagcctcaatatgacgttacagagggctagcgcagcacccaagccagagccagttcccgttcaaaagccgactgttacgtcggtgtgctccgagacttcacaagagttagcagaaggacagcgcaggggctcccagggcgactcgaaacagcagaacggcaaaatcccacccaagagacctccgaggaaacatatcgtcgaaaggtataccgagttctaccatgtcccaacacactccgacgcatctaagaagaggctaatagaggatacagaggactggcgacccaggaccggtacaactcagtcccgttctttcagaatcctggctcagataactggaaccgagcacctgaaggagtctgaggccgataatacaaaaaaggccaaggagaaaatccctctgcatgtgttttcaccaaagtatacaaaactccgcgattggcaccatgaagtgtcagctcgggctttgaacgtacagtag

SEQ ID NO: 24499 - DNA, 705 bp, Artificial Sequence
  derived and/or modified sequence
atgagcaattatagcgtttccttggtagggcctgcaccttggggcttccgcctccaggggggtaaagacttcaatatgcctctcactattagtagcctgaaagacggtgggaaggcagcccaggccaatgtcagaatcggagacgtagtcttatcgatcgatggaatcaacgcccagggtatgacccatttagaggcccagaacaagatcaagggctgcactggtagcctcaacatgactttacagagggcctctgctgccccaaagccggagcccgttcctgtgcagaagcccaccgtgacttctgtttgctcagagacctcacaggaactggccgagggtcagcgcagggggtcccagggagacagtaagcagcagaacggccctgtgcccagaaaaatccccccacggaaacatatcgtggagaggtacacagagttttatcacgtgccaactcatagcgacgcgtctaaaaagaggctcattgaggacaccgaggattggcggccaagaacaggtactacacaaagcaggagcttcagaatcctcgctcagattacaggcactgagcacctgaaggaatctgaagccgacaacaccaaaaaggccaaggagaagattcccctgcatgtgttcagtcctaagtatacgaaactgcgtgattggcatcacgaggtcagcgccagggcactgaatgttcaatag

SEQ ID NO: 24500 - DNA, 1990 bp, Artificial Sequence
  derived and/or modified sequence
agccaggaggcggaagttcccgcgggcggtggggacggcgccctcaccgcgagtcacttgtcagcccttgtctgaggcggaggcagccccgcgccgcgccggacccgagcatatttcattttctgtcattggactttgagccattagaaccatgagcaactacagtgtgtcactggttggcccagctccttggggtttccggctgcagggcggtaaggatttcaacatgcctctgacaatctctagtctaaaagatggcggcaaggcagcccaggcaaatgtaagaataggcgatgtggttctcagcattgatggaataaatgcacaaggaatgactcatcttgaagcccagaataagattaagggttgtacaggctctttgaatatgactctgcaaagagcatctgctgcacccaagcctgagccggttcctgttcaaaagcccacagtcaccagcgtgtgttccgagacttctcaggagctagcagagggacagagaagaggatcccagggtgacagtaaacagcaaaatgggaaaatcccacctaaacgcccaccaagaaaacacattgtggagcgctatacagagttttatcatgtacccactcacagtgatgccagcaagaagagactgattgaggatactgaagactggcgtccaaggactggaacaactcagtctcgctctttccgaatccttgcccagatcactgggactgaacatttgaaagaatctgaagccgataatacaaagaaggcaaaggaaaagataccccttcacgtctttagtcccaaatacacaaaattacgtgactggcaccatgaagtttcagcacgtgctcttaacgtacagtgatttatgagccttgccccccaagcagccagcacataccttttcatttactttttttttttcaacttcatagcaaaatctgtattaaatttgccttatgaaaaaatagaactttttctatacttttctaacaatttcctattgttgtgagaaaaggaagatgaacatgttttgtgctagttggtagctcacaaatgtaaaaccaaaaaaaaaaaaaaatagaaaattaagggactagatctatttgtggatttgtatctgtttttgttgtgattagggtagtaatcttggaaaacgaattattttcataagttgaatttggttagttggttggttgaagcagaggataatgagcaaataaagtccttgtctaatttggaaaatactttctttatattattaacatctcccaagattactttttaagttcattattatgttacattcaaagttgattgtaaattattctaaataagtaaatataaggaggcaagaataaacaaagactttattaaagaagagtgcgtgcattgtagatttaggtatcttttaaagtaggtactattcaggatggctctatgaagaggaggaggtccagatttggctcctgaaaaaggaaagaagagaattttacccctatttgcaatggagaaatacagtattctttggtttggttggatttgcaaatcctatttcctatcaaaggaaatatctctagtggatatttttagaatatagacaatttctaggtattaactaataagatatggaaaagatagctttgctttttttaatcagaagaacataaaataaattacaatatgaatgattgtgagacatcagagaaatattttacttagtgacgtaaactactgtgcactgctgctattcctaggaagctgtgttttgggcaatacatggaagctaaatatatgaccagaaatgctttctgccttgtaatatagtgtattatatattagagctaaatttagtaataaatgcattttgaagtttggaaaagtattgtaataaagttgcctttaacttagctttgtacttgttctgtttccttgaggctagacacagtgccatccaggacttattacagtataactgggtaaaataaacaattctctg

SEQ ID NO: 24501 - DNA, 856 bp, Artificial Sequence
  derived and/or modified sequence
agccaggaggcggaagttcccgcgggcggtggggacggcgccctcaccgcgagtcacttgtcagcccttgtctgaggcggaggcagccccgcgccgcgccggacccgagcatatttcattttctgtcattggactttgagccattagaaccatgagcaactacagtgtgtcactggttggcccagctccttggggtttccggctgcagggcggtaaggatttcaacatgcctctgacaatctctagtctaaaagatggcggcaaggcagcccaggcaaatgtaagaataggcgatgtggttctcagcattgatggaataaatgcacaaggaatgactcatcttgaagcccagaataagattaagggttgtacaggctctttgaatatgactctgcaaagagcatctgctgcacccaagcctgagccggttcctgttcaaaagcccacagtcaccagcgtgtgttccgagacttctcaggagctagcagagggacagagaagaggatcccagggtgacagtaaacagcaaaatgggccagttcccaggaaaatcccaccaagaaaacacattgtggagcgctatacagagttttatcatgtacccactcacagtgatgccagcaagaagagactgattgaggatactgaagactggcgtccaaggactggaacaactcagtctcgctctttccgaatccttgcccagatcactgggactgaacatttgaaagaatctgaagccgataatacaaagaaggcaaaggaaaagataccccttcacgtctttagtcccaaatacacaaaattacgtgactggcaccatgaagtttcagcacgtgctcttaacgtacagtga

SEQ ID NO: 24502 - protein, 214 aa, Artificial Sequence
  derived and/or modified sequence
MSNYSVSLVGPAPWGFRLQGGKDFNMPLTISSLKDGGKAAQANVRIGDVVLSIDGINAQGMTHLEAQNKIKGCTGSLNMTLQRASAAPKPEPVPVQKKTQVTNNPGTVKIPPKRPPRKHIVERYTEFYHVPTHSDASKKRLIEDTEDWRPRTGTTQSRSFRILAQITGTEHLKESEADNTKKAKEKIPLHVFSPKYTKLRDWHHEVSARALNVQ

SEQ ID NO: 24503 - protein, 214 aa, Artificial Sequence
  derived and/or modified sequence
MSNYSVSLVGPAPWGFRLQGGKDFNMPLTISSLKDGGKAAQANVRIGDVVLSIDGINAQGMTHLEAQNKIKGCTGSLNMTLQRASAAPKPEPVPVQKVTQKRESRSSRRTAPGLPPRKHIVERYTEFYHVPTHSDASKKRLIEDTEDWRPRTGTTQSRSFRILAQITGTEHLKESEADNTKKAKEKIPLHVFSPKYTKLRDWHHEVSARALNVQ

SEQ ID NO: 24504 - DNA, 645 bp, Artificial Sequence
  derived and/or modified sequence
atgagcaactacagcgtgagcctggtgggccccgccccctggggcttcagactgcagggcggcaaggacttcaacatgcccctgaccatcagcagcctgaaggacggcggcaaggccgcccaggccaacgtgagaatcggcgacgtggtgctgagcatcgacggcatcaacgcccagggcatgacccacctggaggcccagaacaagatcaagggctgcaccggcagcctgaacatgaccctgcagagagccagcgccgcccccaagcccgagcccgtgcccgtgcagaagaagacccaggtgaccaacaaccccggcaccgtgaagatcccccccaagagaccccccagaaagcacatcgtggagagatacaccgagttctaccacgtgcccacccacagcgacgccagcaagaagagactgatcgaggacaccgaggactggagacccagaaccggcaccacccagagcagaagcttcagaatcctggcccagatcaccggcaccgagcacctgaaggagagcgaggccgacaacaccaagaaggccaaggagaagatccccctgcacgtgttcagccccaagtacaccaagctgagagactggcaccacgaggtgagcgccagagccctgaacgtgcagtag

SEQ ID NO: 24505 - DNA, 645 bp, Artificial Sequence
  derived and/or modified sequence
atgagcaactacagcgtgagcctggtgggccccgccccctggggcttcagactgcagggcggcaaggacttcaacatgcccctgaccatcagcagcctgaaggacggcggcaaggccgcccaggccaacgtgagaatcggcgacgtggtgctgagcatcgacggcatcaacgcccagggcatgacccacctggaggcccagaacaagatcaagggctgcaccggcagcctgaacatgaccctgcagagagccagcgccgcccccaagcccgagcccgtgcccgtgcagaaggtgacccagaagagagagagcagaagcagcagaagaaccgcccccggcctgccccccagaaagcacatcgtggagagatacaccgagttctaccacgtgcccacccacagcgacgccagcaagaagagactgatcgaggacaccgaggactggagacccagaaccggcaccacccagagcagaagcttcagaatcctggcccagatcaccggcaccgagcacctgaaggagagcgaggccgacaacaccaagaaggccaaggagaagatccccctgcacgtgttcagccccaagtacaccaagctgagagactggcaccacgaggtgagcgccagagccctgaacgtgcagtag

SEQ ID NO: 24506 - DNA, 645 bp, Artificial Sequence
  derived and/or modified sequence
atgtcaaactatagcgtgtctctggtgggaccagccccgtgggggttcaggcttcaggggggcaaggacttcaacatgccattaactatcagctccctgaaagacggaggcaaggcggcccaggcaaacgtgagaattggcgatgtcgtgttatctattgatgggatcaacgcccagggcatgactcatcttgaggcgcaaaataagatcaaggggtgtacaggtagcctaaatatgactctgcagcgtgcttctgcagcccctaagcccgagcctgtgcccgttcagaaaaagacacaggtaactaacaaccccggcacagtcaaaatccctccgaaacgtcccccccggaagcatattgtggagaggtatacggaattttaccacgtccctactcacagcgacgcatccaaaaaacgcctgatcgaggacacagaagactggcggcctcgtaccggaactacgcagagtaggtcctttcggatcctagcacagatcaccgggacagagcaccttaaagagtccgaggctgacaacaccaagaaagccaaagagaagatacctctgcatgtgttctcccccaaatacaccaaactgcgcgattggcatcatgaggtatcagcgagagcgcttaacgtccagtag

SEQ ID NO: 24507 - DNA, 645 bp, Artificial Sequence
  derived and/or modified sequence
atgtcaaattatagtgtgagtctggtggggccggccccatggggctttaggctccagggggggaaggactttaacatgccactgacaatatcctcacttaaagacgggggtaaagccgctcaagccaatgtccggattggcgacgttgttctctcgattgacggcataaacgcccagggcatgacgcacttggaagcccagaataagattaaaggatgtaccgggtctctcaatatgactctccaacgagcctcagctgcaccgaagcccgagccagtgcccgtccagaaggtaacacaaaagcgcgagtcaagaagcagtcggcgaaccgcgcctggcttaccaccacggaaacatattgtcgaaagatataccgaattctaccacgttcctacacactccgatgcgtctaaaaagcggctgatagaagacacagaagattggagaccccgaacaggcaccacacagagcaggagtttccggattctggcccagattactgggaccgaacacctcaaggagtctgaggcggacaacaccaagaaagcaaaggagaagatacccctgcatgtattttcgcccaagtatacgaagctgagagactggcatcatgaagtcagcgcgagggcactgaatgtgcagtag

SEQ ID NO: 24508 - DNA, 645 bp, Artificial Sequence
  derived and/or modified sequence
atgagcaactacagcgtgtccctggtgggccctgccccctggggcttccggctgcagggcggcaaggacttcaacatgcccctgaccatcagcagcctgaaggatggcggcaaggccgcccaggccaacgtgagaattggagatgtggtgctgagcattgatggcatcaatgcccagggcatgacccacctggaggcccagaacaagatcaagggctgcaccggcagcctgaacatgaccctgcagagggccagcgctgcccccaagccagagcctgtgcctgtgcagaagaagacccaggtgaccaacaaccctggcaccgtgaagatcccccccaagaggcctcccaggaagcacatcgtggagcgctacacagagttctaccacgtgcccacccacagtgatgccagcaagaagaggctgattgaggacacagaggactggaggcccaggacaggcaccacccagagccgctccttccgcatcctggcccagatcactggaacagagcacctgaaggagagcgaggccgacaacaccaagaaggccaaggagaagatccccctgcacgtgttcagccccaagtacaccaagctgcgggactggcaccacgaggtgtctgcccgggccctgaatgtgcagtag

SEQ ID NO: 24509 - DNA, 645 bp, Artificial Sequence
  derived and/or modified sequence
atgagcaactacagcgtgtccctggtgggccctgccccctggggcttccggctgcagggcggcaaggacttcaacatgcccctgaccatcagcagcctgaaggatggcggcaaggccgcccaggccaacgtgagaattggagatgtggtgctgagcattgatggcatcaatgcccagggcatgacccacctggaggcccagaacaagatcaagggctgcaccggcagcctgaacatgaccctgcagagggccagcgctgcccccaagccagagcctgtgcctgtgcagaaggtgacccagaagcgggagagccgcagcagcagaagaacagcccctggcctgccccccaggaagcacatcgtggagcgctacacagagttctaccacgtgcccacccacagtgatgccagcaagaagaggctgattgaggacacagaggactggaggcccaggacaggcaccacccagagccgctccttccgcatcctggcccagatcactggaacagagcacctgaaggagagcgaggccgacaacaccaagaaggccaaggagaagatccccctgcacgtgttcagccccaagtacaccaagctgcgggactggcaccacgaggtgtctgcccgggccctgaatgtgcagtag

SEQ ID NO: 24510 - DNA, 645 bp, Artificial Sequence
  derived and/or modified sequence
atgagcaactacagcgtgagcctggtgggccccgccccctggggcttcagattgcaagggggcaaagatttcaacatgcctcttactattagctctttgaaggacgggggtaaggccgctcaggcgaacgttcgcatcggtgatgttgttttgagtattgacggtatcaacgcacaagggatgactcatctcgaggcgcaaaataaaattaagggctgtaccgggagcctgaacatgacccttcagagggcgtccgccgcacctaagcccgaaccggtgccggttcagaagaagacacaggtgacgaataatcccggcactgttaagattcccccaaagcggcccccacgcaagcatattgtggagcgctacaccgagttctatcacgtgcctactcattccgatgctagcaagaaacggcttatagaggataccgaggattggaggcccagaacaggaaccacccagagccggtcatttagaatcctggcccagataacagggaccgagcatctgaaggagtccgaggcggataatactaaaaaggccaaggagaagattcccctgcacgtgttttcgcctaagtatacaaagctacgtgattggcaccatgaagttagtgcacgtgccctgaacgtgcagtag

SEQ ID NO: 24511 - DNA, 645 bp, Artificial Sequence
  derived and/or modified sequence
atgagcaactacagcgtgagcctggtgggccccgccccctggggctttagactgcagggcggaaaggattttaacatgcccctcacaatctcttctctcaaggacggtggaaaggcagcccaggccaacgtgcgcatcggtgacgttgtgctttcaattgacggcatcaacgcccagggcatgacacatctcgaagctcaaaacaagatcaaaggatgcacagggtccctgaatatgaccttgcaaagagcttccgccgccccaaaacccgagcctgtgcccgtgcagaaggtcactcaaaaacgcgagtcacgaagctctaggcgcactgcacccggcctgccgcccaggaaacacattgtggaaagatacaccgaattctaccatgtgccaacacactctgacgcatccaaaaagagactgatcgaggacactgaagattggagaccccggaccggaaccacccagagccggtctttccggattctggcgcagatcactggcactgaacatctcaaggagtctgaggccgataatactaaaaaggcaaaggagaagattcctctgcacgtattttctcctaaatacacgaagttacgggattggcatcatgaagtgtccgctcgggctctcaacgtgcagtag

SEQ ID NO: 24512 - DNA, 645 bp, Artificial Sequence
  derived and/or modified sequence
atgagtaattactcagtatccctggttgggcctgccccatggggatttcgactgcagggagggaaggactttaatatgccactcactatctcctcccttaaggacgggggaaaggccgctcaggctaacgtgagaatcggggacgttgtcctgtcgattgatgggatcaacgcccagggaatgacgcatctggaggctcagaacaagatcaaaggatgcacaggctcactcaatatgacactccagcgggcttcagcagcccctaagcccgaaccagtccccgtgcagaaaaaaacccaggtaacaaacaatccaggaacagtgaagattccacctaagcgacccccacgcaagcacatagttgagagatataccgagttttaccacgtgccaacacactccgatgcaagcaaaaaacgacttatagaagacaccgaagactggcggccaagaacgggcacaacccagtcaaggagtttcaggatcctcgcgcagattaccgggactgagcatctcaaagaatccgaagccgataacaccaagaaagcgaaagagaaaatccccctccacgttttctccccgaagtacactaaattgcgcgactggcaccatgaggttagcgctcgagcactcaacgtgcagtag

SEQ ID NO: 24513 - DNA, 645 bp, Artificial Sequence
  derived and/or modified sequence
atgtcgaattacagcgtgtcgcttgtgggcccagcaccctggggctttagattacagggcggaaaagacttcaatatgcccctaactatctccagccttaaagacggtggtaaagccgctcaggcaaacgtccggattggtgatgtggtcctgtccatcgatggaatcaacgctcagggcatgacgcacttggaagctcaaaacaaaattaagggctgtacaggatctctgaatatgactctacagcgtgcctccgcggcacccaagccggagcctgtgcccgtgcagaaggtgacccagaaacgcgaatcccggagctctcgtcgcactgcccctggcctacctcctagaaaacacattgtagagagatacactgagttctaccacgtgcccactcatagcgacgcctcgaaaaaaagactcatcgaggataccgaagattggcgcccacgcacaggcacaactcagtcccgttctttccggatcttggcacagatcactggaacagagcatctcaaggaatccgaggcagataataccaagaaggccaaggagaaaatccctctccacgtgttcagtccaaagtatacaaaactccgtgattggcatcacgaggtcagcgcaagagccctgaatgttcagtag

SEQ ID NO: 24514 - DNA, 1930 bp, Artificial Sequence
  derived and/or modified sequence
agccaggaggcggaagttcccgcgggcggtggggacggcgccctcaccgcgagtcacttgtcagcccttgtctgaggcggaggcagccccgcgccgcgccggacccgagcatatttcattttctgtcattggactttgagccattagaaccatgagcaactacagtgtgtcactggttggcccagctccttggggtttccggctgcagggcggtaaggatttcaacatgcctctgacaatctctagtctaaaagatggcggcaaggcagcccaggcaaatgtaagaataggcgatgtggttctcagcattgatggaataaatgcacaaggaatgactcatcttgaagcccagaataagattaagggttgtacaggctctttgaatatgactctgcaaagagcatctgctgcacccaagcctgagccggttcctgttcaaaagaaaacacaagtgacaaataaccctggcactgtgaaaatcccacctaaacgcccaccaagaaaacacattgtggagcgctatacagagttttatcatgtacccactcacagtgatgccagcaagaagagactgattgaggatactgaagactggcgtccaaggactggaacaactcagtctcgctctttccgaatccttgcccagatcactgggactgaacatttgaaagaatctgaagccgataatacaaagaaggcaaaggaaaagataccccttcacgtctttagtcccaaatacacaaaattacgtgactggcaccatgaagtttcagcacgtgctcttaacgtacagtgatttatgagccttgccccccaagcagccagcacataccttttcatttactttttttttttcaacttcatagcaaaatctgtattaaatttgccttatgaaaaaatagaactttttctatacttttctaacaatttcctattgttgtgagaaaaggaagatgaacatgttttgtgctagttggtagctcacaaatgtaaaaccaaaaaaaaaaaaaaatagaaaattaagggactagatctatttgtggatttgtatctgtttttgttgtgattagggtagtaatcttggaaaacgaattattttcataagttgaatttggttagttggttggttgaagcagaggataatgagcaaataaagtccttgtctaatttggaaaatactttctttatattattaacatctcccaagattactttttaagttcattattatgttacattcaaagttgattgtaaattattctaaataagtaaatataaggaggcaagaataaacaaagactttattaaagaagagtgcgtgcattgtagatttaggtatcttttaaagtaggtactattcaggatggctctatgaagaggaggaggtccagatttggctcctgaaaaaggaaagaagagaattttacccctatttgcaatggagaaatacagtattctttggtttggttggatttgcaaatcctatttcctatcaaaggaaatatctctagtggatatttttagaatatagacaatttctaggtattaactaataagatatggaaaagatagctttgctttttttaatcagaagaacataaaataaattacaatatgaatgattgtgagacatcagagaaatattttacttagtgacgtaaactactgtgcactgctgctattcctaggaagctgtgttttgggcaatacatggaagctaaatatatgaccagaaatgctttctgccttgtaatatagtgtattatatattagagctaaatttagtaataaatgcattttgaagtttggaaaagtattgtaataaagttgcctttaacttagctttgtacttgttctgtttccttgaggctagacacagtgccatccaggacttattacagtataactgggtaaaataaacaattctctg

SEQ ID NO: 24515 - DNA, 796 bp, Artificial Sequence
  derived and/or modified sequence
agccaggaggcggaagttcccgcgggcggtggggacggcgccctcaccgcgagtcacttgtcagcccttgtctgaggcggaggcagccccgcgccgcgccggacccgagcatatttcattttctgtcattggactttgagccattagaaccatgagcaactacagtgtgtcactggttggcccagctccttggggtttccggctgcagggcggtaaggatttcaacatgcctctgacaatctctagtctaaaagatggcggcaaggcagcccaggcaaatgtaagaataggcgatgtggttctcagcattgatggaataaatgcacaaggaatgactcatcttgaagcccagaataagattaagggttgtacaggctctttgaatatgactctgcaaagagcatctgctgcacccaagcctgagccggttcctgttcaaaaggtcacccagaagagggagagcaggagctctagaagaacagctcctgggctcccaccaagaaaacacattgtggagcgctatacagagttttatcatgtacccactcacagtgatgccagcaagaagagactgattgaggatactgaagactggcgtccaaggactggaacaactcagtctcgctctttccgaatccttgcccagatcactgggactgaacatttgaaagaatctgaagccgataatacaaagaaggcaaaggaaaagataccccttcacgtctttagtcccaaatacacaaaattacgtgactggcaccatgaagtttcagcacgtgctcttaacgtacagtga

SEQ ID NO: 24516 - protein, 369 aa, Artificial Sequence
  derived and/or modified sequence
MPRAPKRQRCMPEEDLQSQSETQGLEGAQAPLAVEEDASSSTSTSSSFPSSFPSSSSSSSSSCYPLIPSTPEEVSADDETPNPPQSAQIACSSPSVVASLPLDQSDEGSSSQKEESPSTLQVLPDSESLPRSEIDEKVTDLVQFLLFKYQMKEPITKAEILESVIRNYEDHFPLLFSEASECMLLVFGIDVKEVDPTGHSFVLVTSLGLTYDGMLSDVQSMPKTGILILILSIVFIEGYCTPEEVIWEALNMMGLYDGMEHLIYGEPRKLLTQDWVQENYLEYRQVPGSDPARYEFLWGPRAHAEIRKMSLLKFLAKVNGSDPRSFPLWYEEALKDEEERAQDRIATTDDTTAMASASSSATGSFSYPE

SEQ ID NO: 24517 - protein, 161 aa, Artificial Sequence
  derived and/or modified sequence
MPRAPKRQRCMPEEDLQSQSETQGLEGAQAPLAVEEDASSSTSTSSSFPSSFPSSSSSSSSSCYPLIPSTPEEVSADDETPNPPQSAQIACSSPSVVASLPLDQSDEGSSSQKEESPSTLQVLPDSESLPRSEIDEKVTDLVQFLLFKYQMKEPITKAEIL

SEQ ID NO: 24518 - protein, 190 aa, Artificial Sequence
  derived and/or modified sequence
MPRAPKRQRCMPEEDLQSQSETQGLEGAQAPLAVEEDASSSTSTSSSFPSSFPSSSSSSSSSCYPLIPSTPEEVSADDETPNPPQSAQIACSSPSVVASLPLDQSDEGSSSQKEESPSTLQVLPDSESLPRSEIDEKVTDLVQFLLFKYQMKEPITKAEILESVIRNYEDHFPLLFSEASECMLLVFGID

SEQ ID NO: 24519 - DNA, 1110 bp, Artificial Sequence
  derived and/or modified sequence
atgccgcgagctccgaaaaggcagaggtgtatgcccgaggaggatctgcagtcgcaaagcgagacacagggcctagaaggcgcccaggcaccattggccgtcgaggaagacgcctcatcctccacttctacatcctcttcctttccgtcatcatttccatcctccagttcgtcctcttctagctcttgttatcctctcattccgtccaccccggaagaagtttctgctgatgatgaaacacccaatccaccacagtcagcccagatcgcttgctcctcaccctccgtggttgcgagtctgcctctggatcagtctgacgaaggtagctcttcccagaaggaggagtcaccaagcaccttgcaggtcttacctgactctgagtccctgccccgctcagaaattgatgagaaagtcaccgatctggtgcagttcctgctattcaaataccagatgaaggaaccaattacaaaagccgagattttagaatccgttatcagaaactatgaagaccacttccccctattattttctgaggcatcagagtgcatgttgctggtgttcggaatcgacgttaaggaagttgatcctacagggcatagctttgtcttggtgacgagcctgggccttacttacgacggaatgctttccgatgtccaatcgatgccaaaaaccgggattcttattttgattctgtcaatcgtgtttatagagggatactgcacaccagaggaggtcatctgggaggcgcttaacatgatggggctctatgatggcatggagcatttgatttatggcgaaccgcgcaaactcctgacacaggattgggtgcaggagaattacctcgaataccgccaagtaccaggcagtgaccctgcccggtacgagttcctttggggccccagagcccacgccgaaatacggaagatgagtttactgaagttcctggccaaggtcaatggttcagatcctcgcagttttccattatggtatgaagaggcattgaaagatgaagaggagagggcgcaggatcgtattgctactactgatgacaccacggccatggcctcagcgtcttctagcgcaaccggttcgttctcctatcctgagtag

SEQ ID NO: 24520 - DNA, 1110 bp, Artificial Sequence
  derived and/or modified sequence
atgcctcgcgccccgaagcggcagaggtgtatgccagaggaggatttacaaagtcaatccgaaacgcaggggctggaaggggcccaggcccccttagccgtggaggaggacgcatcttctagcaccagtacaagtagctcatttcccagcagtttcccctcaagcagcagcagtagctcttccagttgctaccccctgatcccctcaactcccgaggaggtctcagccgatgatgagacacccaatccaccacaatccgcccaaattgcatgctcgtctccttccgtggtggcaagtctccctttggatcaaagcgacgagggttcctcttctcagaaggaagagagtcctagtactctgcaagtccttcccgactccgagtcactgcctcgctcagaaatcgatgagaaggttacagatttggtgcagtttctgctttttaagtatcagatgaaagaacctataaccaaagccgagatcctggagtcagtcatccgcaattacgaggatcactttcctcttctgttctccgaagcaagtgagtgtatgctgcttgtgttcggaatcgatgtgaaagaggtcgaccctacaggccacagcttcgtactcgtaacatccttgggcctcacatacgatggaatgctgagcgatgtgcagagcatgcctaaaaccgggattctgattcttatcctgtccatagtcttcatcgaggggtactgtacacccgaggaggttatttgggaggccctgaatatgatgggtctctacgacggtatggagcacttgatctacggcgagccacgaaagctactcactcaggactgggtgcaggagaattacctggagtacagacaagttcccggctcagacccagctagatacgagttcctctggggccctagggcccatgccgagattcgcaaaatgtctctcctgaaatttctggctaaggtcaatgggtctgaccctcggtcttttccattatggtatgaagaggcccttaaagatgaagaggagagagcacaggacagaattgccactaccgacgatacgaccgccatggcaagtgcatcctccagcgccacaggctccttttcctaccctgaatag

SEQ ID NO: 24521 - DNA, 486 bp, Artificial Sequence
  derived and/or modified sequence
atgcccagggcccctaagaggcaaaggtgcatgccagaagaagaccttcagagtcagagcgagacccaggggctcgagggcgcccaagccccattggcagtggaggaggatgcgtcctcatctacgagtacatcctccagctttccttccagcttcccttcctcctcttcctccagctctagttcctgctatccgctgattccgagcacacccgaggaagtttcagcggacgatgaaactccaaacccaccccagagcgcccagattgcctgttccagcccatcagtcgtggcttcactgccactggatcagagcgacgaaggaagcagcagccagaaagaagagagtccgagcacgctgcaggtgctgcctgactctgagtccctgccacgcagtgaaattgatgagaaagtgaccgatctcgtgcagttcctcttgttcaagtatcagatgaaagaaccaattacaaaagcggagattctttag

SEQ ID NO: 24522 - DNA, 573 bp, Artificial Sequence
  derived and/or modified sequence
atgccacgagcgcccaaacgccagaggtgtatgcccgaggaggatctccagtcccagagcgagacacagggattggaaggggcacaggccccactcgctgttgaagaggatgccagctccagtacaagcacctcctcaagcttccccagcagcttcccttcatcttcatcgtcgagtagcagctcttgctaccctttaatcccttccacgcccgaggaagtgtccgccgatgacgaaacccccaacccaccccagagcgcacaaatcgcttgtagctcacccagtgtcgttgcctcactccccttagaccagtcagatgagggctcctcaagccaaaaggaggaaagcccaagcacccttcaggttctcccagactcagagagtttgcctaggtccgagattgacgaaaaagtcacagacctggtgcaattcctgctcttcaagtatcagatgaaagaaccgatcacaaaggccgagattctggagagtgtaatcagaaattacgaagatcattttcccctccttttttccgaggcttcggagtgcatgctccttgtgttcggaattgactag

SEQ ID NO: 24523 - DNA, 1110 bp, Artificial Sequence
  derived and/or modified sequence
atgccccgggcccccaagaggcagcgctgcatgcctgaggaggacctgcagagccagagcgagacccagggcctggagggcgcccaggcccccctggccgtggaggaggatgccagcagcagcaccagcaccagcagcagcttccccagcagcttccccagcagcagcagcagcagcagcagcagctgctaccccctcatccccagcaccccagaggaggtgtctgcagatgatgagacccccaaccccccccagagcgcccagatcgcctgcagcagccccagcgtggtggccagcctgcccctggaccagagtgatgagggcagcagcagccagaaggaggagagccccagcaccctgcaggtgctgcctgacagcgagagcctgcccaggagtgaaattgatgagaaggtgacagacctggtgcagttcctgctcttcaagtaccagatgaaggagcccatcaccaaggccgagatcctggagagcgtcatccggaactatgaggaccacttccccctgctcttcagcgaggccagcgagtgcatgctgctggtgtttggaattgatgtgaaggaggtggaccccaccggccacagctttgtgctggtgaccagcctgggcctgacctatgatggcatgctgagtgatgtgcagagcatgcccaagacaggcatcctgatcctgatcctgagcatcgtgttcatcgagggctactgcaccccagaggaggtgatctgggaggccctgaacatgatgggcctgtatgatggcatggagcacctgatctacggggagcccaggaagctgctgacccaggactgggtgcaggagaactacctggagtaccggcaggtgcccggcagtgaccctgcccgctatgagttcctgtggggcccccgggcccacgccgagatcaggaagatgagcctgctgaagttcctggccaaggtgaatggaagtgaccccaggagcttccccctgtggtatgaggaggccctgaaggatgaggaggagcgggcccaggacagaattgccaccacagatgacaccacagccatggccagcgccagcagcagcgccaccggcagcttctcctacccagagtag

SEQ ID NO: 24524 - DNA, 486 bp, Artificial Sequence
  derived and/or modified sequence
atgccccgggcccccaagaggcagcgctgcatgcctgaggaggacctgcagagccagagcgagacccagggcctggagggcgcccaggcccccctggccgtggaggaggatgccagcagcagcaccagcaccagcagcagcttccccagcagcttccccagcagcagcagcagcagcagcagcagctgctaccccctcatccccagcaccccagaggaggtgtctgcagatgatgagacccccaaccccccccagagcgcccagatcgcctgcagcagccccagcgtggtggccagcctgcccctggaccagagtgatgagggcagcagcagccagaaggaggagagccccagcaccctgcaggtgctgcctgacagcgagagcctgcccaggagtgaaattgatgagaaggtgacagacctggtgcagttcctgctcttcaagtaccagatgaaggagcccatcaccaaggccgagatcctgtag

SEQ ID NO: 24525 - DNA, 573 bp, Artificial Sequence
  derived and/or modified sequence
atgccccgggcccccaagaggcagcgctgcatgcctgaggaggacctgcagagccagagcgagacccagggcctggagggcgcccaggcccccctggccgtggaggaggatgccagcagcagcaccagcaccagcagcagcttccccagcagcttccccagcagcagcagcagcagcagcagcagctgctaccccctcatccccagcaccccagaggaggtgtctgcagatgatgagacccccaaccccccccagagcgcccagatcgcctgcagcagccccagcgtggtggccagcctgcccctggaccagagtgatgagggcagcagcagccagaaggaggagagccccagcaccctgcaggtgctgcctgacagcgagagcctgcccaggagtgaaattgatgagaaggtgacagacctggtgcagttcctgctcttcaagtaccagatgaaggagcccatcaccaaggccgagatcctggagagcgtcatccggaactatgaggaccacttccccctgctcttcagcgaggccagcgagtgcatgctgctggtgtttggaattgattag

SEQ ID NO: 24526 - DNA, 1591 bp, Artificial Sequence
  derived and/or modified sequence
gagaagcgaggttctcgttctgagggacaggcttgagatcggctgaagagagcgggcccaggctctgtgaggaggcaagggaggtgagaaccttgctctcagagggtgactcaagtcaacacagggaacccctcttttctacagacacagtgggtcgcaggatctgacaagagtccaggagctccagggactgtgaggtgaggccttggtctaaggcagtgttttcaggtcacagagcagaaagggcccagacagtgccaggagtcaaggttctcaggggacagggagagcaagaggtcaagagctgtgggacaccacagagcagcactgaaggagaagacctgcctgtgggtccccatcgcccaagtcctgcccacactcccacctgctaccctgatcagagtcatcatgcctcgagctccaaagcgtcagcgctgcatgcctgaagaagatcttcaatcccaaagtgagacacagggcctcgagggtgcacaggctcccctggctgtggaggaggatgcttcatcatccacttccaccagctcctcttttccatcctcttttccctcctcctcctcttcctcctcctcctcctgctatcctctaataccaagcaccccagaggaggtttctgctgatgatgagacaccaaatcctccccagagtgctcagatagcctgctcctccccctcggtcgttgcttcccttccattagatcaatctgatgagggctccagcagccaaaaggaggagagtccaagcaccctacaggtcctgccagacagtgagtctttacccagaagtgagatagatgaaaaggtgactgatttggtgcagtttctgctcttcaagtatcaaatgaaggagccgatcacaaaggcagaaatactggagagtgtcataagaaattatgaagaccacttccctttgttgtttagtgaagcctccgagtgcatgctgctggtctttggcattgatgtaaaggaagtggatcccactggccactcctttgtccttgtcacctccctgggcctcacctatgatgggatgctgagtgatgtccagagcatgcccaagactggcattctcatacttatcctaagcatagtcttcatagagggctactgcacccctgaggaggtcatctgggaagcactgaatatgatggggctgtatgatgggatggagcacctcatttatggggagcccaggaagctgctcacccaagattgggtgcaggaaaactacctggagtaccggcaggtgcctggcagtgatcctgcacggtatgagtttctgtggggtccaagggctcatgctgaaattaggaagatgagtctcctgaaatttttggccaaggtaaatgggagtgatccaagatccttcccactgtggtatgaggaggctttgaaagatgaggaagagagagcccaggacagaattgccaccacagatgatactactgccatggccagtgcaagttctagcgctacaggtagcttctcctaccctgaataaagtaagacagattcttcactgtgttttaaaaggcaagtcaaataccacatgattttactcatatgtggaatct

SEQ ID NO: 24527 - DNA, 2631 bp, Artificial Sequence
  derived and/or modified sequence
agagagaagcgaggttctcgttctgagggacaggcttgagatcggctgaagagagcgggcccaggctctgtgaggaggcaagggaggtgagaaccttgctctcagagggtgactcaagtcaacacagggaacccctcttttctacagacacagtgggtcgcaggatctgacaagagtccaggttctcaggggacagggagagcaagaggtcaagagctgtgggacaccacagagcagcactgaaggagaagacctgcctgtgggtccccatcgcccaagtcctgcccacactcccacctgctaccctgatcagagtcatcatgcctcgagctccaaagcgtcagcgctgcatgcctgaagaagatcttcaatcccaaagtgagacacagggcctcgagggtgcacaggctcccctggctgtggaggaggatgcttcatcatccacttccaccagctcctcttttccatcctcttttccctcctcctcctcttcctcctcctcctcctgctatcctctaataccaagcaccccagaggaggtttctgctgatgatgagacaccaaatcctccccagagtgctcagatagcctgctcctccccctcggtcgttgcttcccttccattagatcaatctgatgagggctccagcagccaaaaggaggagagtccaagcaccctacaggtcctgccagacagtgagtctttacccagaagtgagatagatgaaaaggtgactgatttggtgcagtttctgctcttcaagtatcaaatgaaggagccgatcacaaaggcagaaatactggagagtgtcataagaaattatgaagaccacttccctttgttgtttagtgaagcctccgagtgcatgctgctggtctttggcattgatgtaaaggaagtggatcccactggccactcctttgtccttgtcacctccctgggcctcacctatgatgggatgctgagtgatgtccagagcatgcccaagactggcattctcatacttatcctaagcatagtcttcatagagggctactgcacccctgaggaggtcatctgggaagcactgaatatgatggggctgtatgatgggatggagcacctcatttatggggagcccaggaagctgctcacccaagattgggtgcaggaaaactacctggagtaccggcaggtgcctggcagtgatcctgcacggtatgagtttctgtggggtccaagggctcatgctgaaattaggaagatgagtctcctgaaatttttggccaaggtaaatgggagtgatccaagatccttcccactgtggtatgaggaggctttgaaagatgaggaagagagagcccaggacagaattgccaccacagatgatactactgccatggccagtgcaagttctagcgctacaggtagcttctcctaccctgaataaagtaagacagattcttcactgtgttttaaaaggcaagtcaaataccacatgattttactcatatgtggaatctaaaaaaaaaaaaaaaaaaagttggtatcatggaagtagagagtagagcagtagttacattacaattaaataggaggaataagttctagtgttctattgcacagtaggatgactatagttaacattaagatattgtatattacaaaacagctagaaggaaggcttttcaatattgtcaccaaaaagaaatgataaatgcatgaggtgatggatacactacctgatttgatcattatactacatatacatgaatcagaacatcaaattgtacctcataaatatctacaattacatgtcagtttttgtttatgtttttgtttttttttaatttatgaaaacaaatgagaatggaaatcaatgatgtatgtggtggagggccaggctgaggctgaggaaaatacagtgcataacatctttgtcttactgttttctttggataacctggggacttcttttcttttcttcttggtattttattttctttttcttcttcttctttttttttttttaacaaagtctcactctattgctctggcaggagtgcagtggtgcagtctcggctcactgcaacttccgcctcctgggttcaagcgattctcctgcctcagtctcctgagtagctgggattacaagtgtgcaccaccatacccggctaattttgtattttttagtagagatggggtttcaccatgttggccaggctggtctcaaactcctgacctcaggtaatctgcccgcctcagcctcccaaagtgctgggataacaggtgtgagccactgcacccagcctcttcttggtattttaaaatgttgttacttttactagaatgtttatgagcttcagaatctaaggtcacacgttcgtttctgtttatccagtttaagaaacagttttgctattttgtaaaacaaattgggaacccttccatcatatttgtaatctgtaataaaataacatggaattggaatagtaattttcttggaaatatgaaaaaaatagtaaaatagagaaaataattttaagtgttagtatttttatttctttattatttttagtttatcatcctgcaaaattaaaagttatatccctggatcttgttaagtcgaaattaaactgtaataaatgaaa

SEQ ID NO: 24528 - DNA, 898 bp, Artificial Sequence
  derived and/or modified sequence
ggatcagagagaagcgaggttctcgttctgagggacaggcttgagatcggctgaagagagcgggcccaggctctgtgaggaggcaagggaggtgagaaccttgctctcagagggtgactcaagtcaacacagggaacccctcttttctacagacacagtgggtcgcaggatctgacaagagtccaggagctccagggactgtgaggtgaggccttggtctaaggcagtgttttcaggtcacagagcagaaagggcccagacagtgccaggagtcaaggttctcaggggacagggagagcaagaggtcaagagctgtgggacaccacagagcagcactgaaggagaagacctgcctgtgggtccccatcgcccaagtcctgcccacactcccacctgctaccctgatcagagtcatcatgcctcgagctccaaagcgtcagcgctgcatgcctgaagaagatcttcaatcccaaagtgagacacagggcctcgagggtgcacaggctcccctggctgtggaggaggatgcttcatcatccacttccaccagctcctcttttccatcctcttttccctcctcctcctcttcctcctcctcctcctgctatcctctaataccaagcaccccagaggaggtttctgctgatgatgagacaccaaatcctccccagagtgctcagatagcctgctcctccccctcggtcgttgcttcccttccattagatcaatctgatgagggctccagcagccaaaaggaggagagtccaagcaccctacaggtcctgccagacagtgagtctttacccagaagtgagatagatgaaaaggtgactgatttggtgcagtttctgctcttcaagtatcaaatgaaggagccgatcacaaaggcagaaatact

SEQ ID NO: 24529 - DNA, 798 bp, Artificial Sequence
  derived and/or modified sequence
tgaagagagcgggcccaggctctgtgaggaggcaagacacagtgggtcgcaggatctgacaagagtccaggagctccagggactgtgaggttctcaggggacagggagagcaagaggtcaagagctgtgggacaccacagagcagcactgaaggagaagacctgcctgtgggtccccatcgcccaagtcctgcccacactcccacctgctaccctgatcagagtcatcatgcctcgagctccaaagcgtcagcgctgcatgcctgaagaagatcttcaatcccaaagtgagacacagggcctcgagggtgcacaggctcccctggctgtggaggaggatgcttcatcatccacttccaccagctcctcttttccatcctcttttccctcctcctcctcttcctcctcctcctcctgctatcctctaataccaagcaccccagaggaggtttctgctgatgatgagacaccaaatcctccccagagtgctcagatagcctgctcctccccctcggtcgttgcttcccttccattagatcaatctgatgagggctccagcagccaaaaggaggagagtccaagcaccctacaggtcctgccagacagtgagtctttacccagaagtgagatagatgaaaaggtgactgatttggtgcagtttctgctcttcaagtatcaaatgaaggagccgatcacaaaggcagaaatactggagagtgtcataagaaattatgaagaccacttccctttgttgtttagtgaagcctccgagtgcatgctgctggtctttggcattgat

SEQ ID NO: 24530 - DNA, 1110 bp, Artificial Sequence
  derived and/or modified sequence
atgccccgggcccccaagcggcagcggtgcatgcccgaggaggacttgcagagccagtcagagactcagggcttagagggagctcaggcaccgctggcagtcgaagaagacgccagcagtagtacaagcacctcatctagttttcctagcagcttccccagttcttcctcctctagctcttcctcctgttatcccctgattccatctacaccggaagaggtgtccgccgatgacgaaacccccaatccgccccagagtgcccagattgcctgttctagtcccagcgtggtcgccagtctcccacttgaccaatcagacgaaggctcttcgagccagaaagaggaatctccttctaccctccaagtcttgcctgacagcgagtctctccctagatccgagattgacgagaaggtcaccgacttggtgcagttcctgctcttcaagtaccagatgaaggaaccaataaccaaagcagaaattctggaaagcgtcattagaaactacgaggaccactttccgctgctgttctcagaggcttctgagtgcatgctgctagtttttggcattgatgttaaggaagtcgatcccactgggcatagcttcgtccttgtaaccagtctggggttgacctatgacgggatgctatccgacgtgcaatccatgcccaaaactggaatcttgatcctgatcctcagcatcgtgtttattgagggctattgcacacctgaagaggtgatctgggaggctctgaatatgatggggctgtacgatggcatggagcatctgatttatggcgaaccacgaaaattgctgacccaggactgggtgcaagagaattatctcgaatacagacaggttccaggctctgaccctgcacgatacgagttcctctggggcccacgcgcccatgctgagattcgaaaaatgagcctcctgaaatttcttgccaaagttaacggcagcgatccgagaagctttcctctctggtacgaagaagccctgaaggacgaggaggagcgggcccaggatcgtatcgccactaccgacgataccacagcgatggctagtgcgtctagttccgccacaggctcctttagttacccagagtag

SEQ ID NO: 24531 - DNA, 1110 bp, Artificial Sequence
  derived and/or modified sequence
atgccccgggcccccaagcggcagcggtgcatgcccgaggaggaccttcagagtcagagtgaaactcagggcttggagggagcgcaggcccccctcgctgtcgaagaggatgccagcagtagcacctcaacgagttcctcttttccaagttcctttccgagttcatccagctcctcatcgagttcatgctacccccttataccaagtacacccgaggaagtgtctgccgacgatgagactcccaatccacctcagtcagcccagatcgcctgttcttctccatcagttgtcgcatctctgccgttggatcagtccgacgaggggtccagtagccagaaagaagaatctccctcgaccttgcaggtgctgcctgattcagaaagcctgcctcggtctgaaatagacgagaaagtgacagacctagtacaatttcttctcttcaaatatcagatgaaagaacccattactaaggcggaaattctagagtccgtgatcagaaactacgaagatcatttccctctgctgttttccgaagcctctgagtgcatgcttctggttttcggaatcgacgttaaagaagtcgaccccaccgggcattcttttgtgctggttacatctttaggtctgacatatgatggaatgcttagtgatgtgcagtctatgccaaagacaggaattctcatcctgatcctgtccatcgttttcattgagggctactgcacccctgaggaggtgatatgggaggctctgaatatgatgggcctctatgacggcatggaacatttgatctatggcgaaccacgtaagttgcttacacaggattgggtacaagagaactacctggagtaccgacaggtgcccggttccgaccctgcccggtatgaattcctttggggtccccgcgcacatgcggagatacgaaagatgagtctgctgaagtttcttgctaaggtgaatgggtctgaccccagaagctttcccctgtggtatgaagaagcacttaaagatgaggaagaacgtgcccaggatcgtatcgctacaacagacgacacaaccgctatggcaagcgccagctcatcggcgacggggagcttttcataccccgagtag

SEQ ID NO: 24532 - DNA, 486 bp, Artificial Sequence
  derived and/or modified sequence
atgccccgggcccccaagcggcagcggtgcatgcccgaggaggacctgcagtctcaatctgaaacccaggggttagaaggagctcaagcacctcttgcagtggaagaggacgcttcgtcgtccacttccacttcttccagtttcccctccagcttccctagcagctcaagctcatcttcatcaagctgctatcctctgatcccatcaacacccgaggaagtttccgccgacgatgagacgcctaatcccccccaatctgcacaaatcgcctgctcctctccatctgtggtggcctccctgccactcgatcagtcagatgaggggtcctcaagccagaaggaagagtcaccaagcactctgcaggttctacctgatagcgaaagcctgccacggtcagaaatcgacgagaaagttaccgatcttgttcagtttttactttttaagtatcagatgaaggaacccataacaaaagccgagattctgtag

SEQ ID NO: 24533 - DNA, 573 bp, Artificial Sequence
  derived and/or modified sequence
atgccccgggcccccaagcggcagcggtgcatgcccgaggaggacctgcagagccagagcgagacacaggggctggagggggcacaggcccccctggctgttgaagaagatgctagctcctccacatcaaccagcagctcgttcccatcctcgtttcctagttcctcttccagtagtagctccagttgttatcccttgattccaagtacacctgaagaagtgtccgcagacgatgaaacgcctaaccctccgcaatctgcacaaattgcctgttcctctcctagcgttgttgcgtctttgcctctcgatcagagcgatgagggctcatcgtcccagaaagaggaatctccaagcactttgcaggtgctcccagatagcgagagtctaccccgatccgagattgatgaaaaggttaccgacctggtccagttcctcctgtttaagtatcaaatgaaggaaccgattaccaaagcagagatcttggaaagtgtgattcgcaactacgaagaccattttccactcctcttttctgaagcctcagagtgtatgcttctcgtttttggtatcgactag

SEQ ID NO: 24534 - DNA, 1110 bp, Artificial Sequence
  derived and/or modified sequence
atgcctcgggctccaaagcggcagaggtgtatgcctgaggaagatcttcaatcacagtccgagactcagggactcgaaggagctcaagcccctctggcagtagaggaagatgcctcatcatccactagcacaagctcaagtttccctagctcttttccaagcagctcctccagtagctcctccagctgttatccactgatccctagtacacccgaggaggttagtgcggacgacgagacacctaacccgccacagtctgctcagatagcctgtagcagtccctctgtagtggcctcactgccgctcgatcaaagcgatgagggatcatcatcacagaaagaagagtcgccatctactttacaggtcctccccgactctgagtccctccccagaagtgagattgatgagaaagtcacggacctcgtgcagttcctcctgttcaagtatcagatgaaggaaccgatcactaaggccgagattctcgagagcgtcattagaaactacgaggatcacttccccctgctgttttccgaggcaagcgagtgtatgttgttggtgttcgggattgatgtgaaggaggtagaccccactggccattccttcgtgttagtgactagcctgggcctgacctacgacggaatgctgagtgacgtccagtccatgccaaaaaccggcatcttgatcctcattctgagcattgtcttcatcgaagggtattgcactccagaggaggtgatttgggaggccttaaacatgatgggtctctacgatgggatggagcacctcatatacggcgagccgaggaagttactcacacaggattgggtgcaggaaaattacctcgagtacaggcaggtgcctggaagcgatcccgctcgatacgagtttctctggggaccacgggctcacgccgagataaggaaaatgagtctgttgaagtttcttgctaaggtcaatggcagcgatcccagaagctttcctctttggtacgaggaagccctgaaggatgaggaagagagagcacaggataggatcgctactacagacgatacgacagctatggctagtgccagctctagtgctaccgggagctttagttaccccgagtag

SEQ ID NO: 24535 - DNA, 1110 bp, Artificial Sequence
  derived and/or modified sequence
atgccacgagcaccaaagagacaacgatgcatgcccgaagaagacctacaatctcagtcggagactcagggcttggagggagcacaggcacccctcgccgtggaagaggacgcatcaagctcaacctcgacgtcttcctcctttcctagtagctttccaagctcttctagcagctccagcagcagctgctacccgctcattccatcaacccctgaggaggtgtctgccgacgacgaaaccccaaatccaccccagagtgcccagatcgcatgttctagtccctctgtggtggcctcactgcccctggaccagtctgacgaggggagctccagccaaaaggaagagtctccttctacattacaggttttgccagacagtgagtcactgcccagatcggagatcgacgagaaggtcacagacctggtacagttcctcttgtttaaataccaaatgaaagaacccatcactaaggcggaaatcctcgaaagtgttatccgcaattatgaagaccattttcccctcctgttctcagaggcctccgaatgcatgctgctggttttcggcatcgatgtcaaggaagttgatcctacagggcattctttcgtcctcgtgacctctctaggactcacttatgatggcatgctgtccgatgtacagagtatgcccaaaactggaattctgattcttatattaagcatcgtatttatcgagggctactgcactccagaagaagttatctgggaggcgctcaatatgatggggctttacgacggaatggagcatctgatttacggcgaacctcgcaagctattgactcaagactgggtgcaggagaattacctggaatatcgacaagttcctgggtccgatcctgctcggtatgaattcttgtggggcccacgggcacacgctgagatccgaaagatgtctttgctgaaattcctcgcaaaggtcaacggaagcgacccaaggtccttccctctttggtatgaagaggccctgaaagatgaagaggaaagggcgcaggataggattgcgaccaccgatgacaccacagctatggccagcgcgtcctcatccgctacagggtcattcagctaccctgagtag

SEQ ID NO: 24536 - DNA, 486 bp, Artificial Sequence
  derived and/or modified sequence
atgccacgcgctcctaagcggcagaggtgtatgccagaggaggatctgcagtcacagagtgagacccagggtctcgagggggcacaggccccactggccgtcgaagaggacgctagttcctctacctctactagcagctcatttccttccagcttcccctcttcatccagtagctcatcatcttcatgctatccactaattccatcaacccctgaagaggttagtgccgatgacgagacacccaaccccccacaatctgcacagattgcctgctcttcaccgtcagtggtggctagcttacccctggatcaatcagacgagggatcctcttcccagaaggaggagtctccttccacgctgcaggtcctacccgattctgaatcgctccctcgaagtgaaatcgatgaaaaagtcacggacctggtgcagtttctgctgttcaagtaccagatgaaggagccaattactaaggccgaaattctgtag

SEQ ID NO: 24537 - DNA, 573 bp, Artificial Sequence
  derived and/or modified sequence
atgccacgagctccaaagcgtcaacggtgtatgccagaagaagacttgcagagtcagtcagagacacaagggctagaaggggcacaagcgcctttagcagttgaggaagacgcctcaagctcgacaagcacctcatcgagtttcccctcgagcttccccagcagcagcagttcatcctcatcatcttgttatcccctgattccttcgacgccagaagaggttagtgccgacgacgagaccccgaatcctccacagagcgcacagatcgcttgtagtagccctagcgtcgtcgcatccctccccttagatcagtcagatgagggatcctcctcccagaaggaggagtcaccttctacccttcaggttcttcctgacagcgaatcgcttcccagatctgaaatcgacgaaaaggtcaccgatctagtgcaattcctgttgtttaagtatcagatgaaggagcctatcaccaaagctgagatcctggaaagtgtgattagaaattatgaggaccacttccccctcctgttctctgaggcttccgagtgtatgctcctggtgttcgggattgactag

SEQ ID NO: 24538 - DNA, 1110 bp, Artificial Sequence
  derived and/or modified sequence
atgcccagagcccccaagagacagagatgcatgcccgaggaggacctgcagagccagagcgagacccagggcctggagggcgcccaggcccccctggccgtggaggaggacgccagcagcagcaccagcaccagcagcagcttccccagcagcttccccagcagcagcagcagcagcagcagcagctgctaccccctgatccccagcacccccgaggaggtgagcgccgacgacgagacccccaaccccccccagagcgcccagatcgcctgcagcagccccagcgtggtggccagcctgcccctggaccagagcgacgagggcagcagcagccagaaggaggagagccccagcaccctgcaggtgctgcccgacagcgagagcctgcccagaagcgagatcgacgagaaggtgaccgacctggtgcagttcctgctgttcaagtaccagatgaaggagcccatcaccaaggccgagatcctggagagcgtgatcagaaactacgaggaccacttccccctgctgttcagcgaggccagcgagtgcatgctgctggtgttcggcatcgacgtgaaggaggtggaccccaccggccacagcttcgtgctggtgaccagcctgggcctgacctacgacggcatgctgagcgacgtgcagagcatgcccaagaccggcatcctgatcctgatcctgagcatcgtgttcatcgagggctactgcacccccgaggaggtgatctgggaggccctgaacatgatgggcctgtacgacggcatggagcacctgatctacggcgagcccagaaagctgctgacccaggactgggtgcaggagaactacctggagtacagacaggtgcccggcagcgaccccgccagatacgagttcctgtggggccccagagcccacgccgagatcagaaagatgagcctgctgaagttcctggccaaggtgaacggcagcgaccccagaagcttccccctgtggtacgaggaggccctgaaggacgaggaggagagagcccaggacagaatcgccaccaccgacgacaccaccgccatggccagcgccagcagcagcgccaccggcagcttcagctaccccgagtag

SEQ ID NO: 24539 - DNA, 486 bp, Artificial Sequence
  derived and/or modified sequence
atgcccagagcccccaagagacagagatgcatgcccgaggaggacctgcagagccagagcgagacccagggcctggagggcgcccaggcccccctggccgtggaggaggacgccagcagcagcaccagcaccagcagcagcttccccagcagcttccccagcagcagcagcagcagcagcagcagctgctaccccctgatccccagcacccccgaggaggtgagcgccgacgacgagacccccaaccccccccagagcgcccagatcgcctgcagcagccccagcgtggtggccagcctgcccctggaccagagcgacgagggcagcagcagccagaaggaggagagccccagcaccctgcaggtgctgcccgacagcgagagcctgcccagaagcgagatcgacgagaaggtgaccgacctggtgcagttcctgctgttcaagtaccagatgaaggagcccatcaccaaggccgagatcctgtag

SEQ ID NO: 24540 - DNA, 573 bp, Artificial Sequence
  derived and/or modified sequence
atgcccagagcccccaagagacagagatgcatgcccgaggaggacctgcagagccagagcgagacccagggcctggagggcgcccaggcccccctggccgtggaggaggacgccagcagcagcaccagcaccagcagcagcttccccagcagcttccccagcagcagcagcagcagcagcagcagctgctaccccctgatccccagcacccccgaggaggtgagcgccgacgacgagacccccaaccccccccagagcgcccagatcgcctgcagcagccccagcgtggtggccagcctgcccctggaccagagcgacgagggcagcagcagccagaaggaggagagccccagcaccctgcaggtgctgcccgacagcgagagcctgcccagaagcgagatcgacgagaaggtgaccgacctggtgcagttcctgctgttcaagtaccagatgaaggagcccatcaccaaggccgagatcctggagagcgtgatcagaaactacgaggaccacttccccctgctgttcagcgaggccagcgagtgcatgctgctggtgttcggcatcgactag

SEQ ID NO: 24541 - protein, 400 aa, Artificial Sequence
  derived and/or modified sequence
MSKVSTMFSEDDFQSTERAPYGPQLQWSQDLPRVQVFREQANLEDRSPRRTQRITGGEQVLWGPITQIFPTVRPADLTRVIMPLEQRSQHCKPEEGLQAQEEDLGLVGAQALQAEEQEAAFFSSTLNVGTLEELPAAESPSPPQSPQEESFSPTAMDAIFGSLSDEGSGSQEKEGPSTSPDLIDPESFSQDILHDKIIDLVHLLLRKYRVKGLITKAEMLGSVIKNYEDYFPEIFREASVCMQLLFGIDVKEVDPTSHSYVLVTSLNLSYDGIQCNEQSMPKSGLLIIVLGVIFMEGNCIPEEVMWEVLSIMGVYAGREHFLFGEPKRLLTQNWVQEKYLVYRQVPGTDPACYEFLWGPRAHAETSKMKVLEYIANANGRDPTSYPSLYEDALREEGEGV

SEQ ID NO: 24542 - DNA, 1203 bp, Artificial Sequence
  derived and/or modified sequence
atgagcaaggtgagcaccatgttcagcgaggacgacttccagagcaccgagagagccccctacggcccccagctgcagtggagccaggacctgcccagagtgcaggtgttcagagagcaggccaacctggaggacagaagccccagaagaacccagagaatcaccggcggcgagcaggtgctgtggggccccatcacccagatcttccccaccgtgagacccgccgacctgaccagagtgatcatgcccctggagcagagaagccagcactgcaagcccgaggagggcctgcaggcccaggaggaggacctgggcctggtgggcgcccaggccctgcaggccgaggagcaggaggccgccttcttcagcagcaccctgaacgtgggcaccctggaggagctgcccgccgccgagagccccagccccccccagagcccccaggaggagagcttcagccccaccgccatggacgccatcttcggcagcctgagcgacgagggcagcggcagccaggagaaggagggccccagcaccagccccgacctgatcgaccccgagagcttcagccaggacatcctgcacgacaagatcatcgacctggtgcacctgctgctgagaaagtacagagtgaagggcctgatcaccaaggccgagatgctgggcagcgtgatcaagaactacgaggactacttccccgagatcttcagagaggccagcgtgtgcatgcagctgctgttcggcatcgacgtgaaggaggtggaccccaccagccacagctacgtgctggtgaccagcctgaacctgagctacgacggcatccagtgcaacgagcagagcatgcccaagagcggcctgctgatcatcgtgctgggcgtgatcttcatggagggcaactgcatccccgaggaggtgatgtgggaggtgctgagcatcatgggcgtgtacgccggcagagagcacttcctgttcggcgagcccaagagactgctgacccagaactgggtgcaggagaagtacctggtgtacagacaggtgcccggcaccgaccccgcctgctacgagttcctgtggggccccagagcccacgccgagaccagcaagatgaaggtgctggagtacatcgccaacgccaacggcagagaccccaccagctaccccagcctgtacgaggacgccctgagagaggagggcgagggcgtgtag

SEQ ID NO: 24543 - DNA, 1203 bp, Artificial Sequence
  derived and/or modified sequence
atgtctaaagtgtcaaccatgttcagtgaagacgactttcaaagcaccgagcgcgccccctacggaccccagcttcagtggagtcaagacctgccaagagtgcaagtttttcgtgagcaagccaatcttgaagacaggagcccaaggagaacccagcggattacaggcggcgaacaggtgttgtggggaccaatcactcagatcttccccaccgtgcgccctgcagacctaaccagggtcattatgcctttggagcaaaggtctcaacattgtaaacctgaagagggcctccaggctcaggaggaggatctgggacttgtaggggcccaggcgctccaggccgaggagcaggaggctgcttttttcagctcaacactgaacgtgggcacattggaggaattacccgcggcggagtctccttcccccccacaatccccccaggaggagtcattcagcccaacagccatggacgctatctttggatctttgagcgacgaaggtagcggcagccaagagaaggaaggaccttctaccagtcccgacctgattgaccctgagtccttcagccaggacatcttgcacgataaaatcatcgacttggttcatctcctactgcgaaaatatcgtgtcaagggcctcatcactaaagcagagatgctagggtccgtaatcaagaactacgaggactatttccctgagattttcagggaggcatccgtgtgtatgcagctgctgtttggcattgatgtgaaggaggttgacccaacctcacatagctacgtgctggttacaagcctgaacttgtcatacgatggaattcagtgtaatgaacagtccatgccaaagtccgggctccttataatcgtgctgggtgtgattttcatggagggcaattgcattccagaagaagttatgtgggaagtgctttccatcatgggagtgtatgccggaagggagcacttcctgtttggggagcctaagcgcttactgacacagaactgggttcaggagaaatacctcgtataccgacaggtccctggaactgatcctgcctgctatgaatttctgtggggccctcgcgcacatgcggaaacatccaaaatgaaggtgctggaatacatcgccaacgcgaatgggagagatcctacgagttatcccagcctgtatgaggatgcgttgcgcgaagagggagagggtgtttag

SEQ ID NO: 24544 - DNA, 1203 bp, Artificial Sequence
  derived and/or modified sequence
atgagcaaggtgtccaccatgttttctgaagatgacttccagagcacagagcgggccccctacggcccccagctgcagtggagccaggacctgccccgggtgcaggtgttccgggagcaggccaacctggaggacaggagccccaggaggacccagaggatcactggaggagagcaggtgctgtggggccccatcacccagatcttccccaccgtgcggcctgctgacctgaccagggtcatcatgcccctggagcagaggagccagcactgcaagccagaggagggcctgcaggcccaggaggaggacctgggcctggtgggcgcccaggccctgcaggccgaggagcaggaggccgccttcttcagcagcaccctgaatgtgggcaccctggaggagctgcctgctgctgagagccccagccccccccagagcccccaggaggagagcttcagccccacagccatggatgccatcttcggcagcctgagtgatgagggcagcggcagccaggagaaggagggccccagcaccagcccagacctgattgatcctgagagcttcagccaggacatcctgcatgacaagatcatcgacctggtgcacctgctgctgaggaagtacagagtgaagggcctcatcaccaaggccgagatgctgggcagcgtcatcaagaactatgaggactacttccctgagatcttccgggaggcctctgtgtgcatgcagctgctgtttggaattgatgtgaaggaggtggaccccaccagccacagctatgtgctggtgaccagcctgaacctgtcctatgatggcatccagtgcaatgagcagagcatgcccaagagcggcctgctgatcatcgtgctgggcgtcatcttcatggagggcaactgcatccctgaggaggtgatgtgggaggtgctgagcatcatgggcgtgtatgccggccgggagcacttcctgtttggagagcccaagaggctgctgacccagaactgggtgcaggagaagtacctggtgtaccggcaggtgcccggcacagatcctgcctgctatgagttcctgtggggcccccgggcccatgctgagaccagcaagatgaaggtgctggagtacatcgccaatgccaacggccgggaccccaccagctaccccagcctgtatgaagatgccctgcgggaggagggggagggcgtgtag

SEQ ID NO: 24545 - DNA, 1203 bp, Artificial Sequence
  derived and/or modified sequence
atgagcaaggtgagcaccatgttcagcgaggacgacttccagagcacagaacgagccccttatgggcctcagttacaatggagtcaagatctccctagagttcaggtgtttagggaacaggcaaacctagaggatcggtctccccgacgcacacaacgcatcaccggaggagagcaagtgttgtggggccccatcacccagatcttccctaccgtccggcccgccgacctcaccagagtaatcatgcctctggagcagaggagtcagcactgcaaacctgaggaaggactgcaagcgcaggaggaggacctgggactggtaggcgcccaggccctgcaggcggaagagcaggaggccgccttcttcagttccacccttaatgtcgggaccctggaggagctacctgccgcagaatctccatcacctcctcagagcccacaagaggaatcattttctcctacggcaatggatgccatctttggctcgctttccgacgaaggcagcggctcacaagagaaggaaggaccaagcacaagcccagaccttatcgacccagaatcctttagccaggatatactgcacgacaaaattatagacttggtgcatctgctcttacggaaatatcgggttaagggcctcattacaaaagctgaaatgttgggaagcgtgattaaaaattatgaggactatttccctgagatatttcgcgaggccagcgtttgcatgcaactattgtttggcatcgatgttaaggaggtggaccccactagccacagctacgttctagtcacatccctaaatctgtcctacgatggtatccagtgcaatgaacagagtatgccaaaaagtggtctgctcattattgtgctgggggtgatctttatggaaggtaattgtattcccgaagaggtgatgtgggaggtcctaagcatcatgggagtgtacgcgggccgagagcacttcctatttggcgaacccaaacggcttttaacgcagaattgggtacaagaaaaatatctcgtctacaggcaagtacccggaacagatcccgcctgctatgaatttctttgggggccccgagcacatgccgagacctcaaagatgaaggtcctggagtacatcgccaacgccaacggccgggaccccacctcgtaccctagcctgtatgaggatgcgctaagggaagaaggagagggagtgtag

SEQ ID NO: 24546 - DNA, 1845 bp, Artificial Sequence
  derived and/or modified sequence
tgcactctcaccagggcagggagctgtcttgacccccagtggaggctgacaatttttttcctgtgtacactggacccctttcatagaggtgggtgctatgcaagtggagctggtgactgatggctgaccattgatacaggctaggaataccaatgagcaaggtgagcactatgttctcagaggacgacttccagtcaacagaaagagccccatatggtccacaactacagtggtcccaggatctgccaagagtccaggtttttagagaacaggccaacctggaggacaggagtcccaggagaacccagaggatcactggaggagaacaagtgctgtggggccccatcacccagatatttcccacagttcggcctgctgacctaaccagagtcatcatgcctcttgagcaaagaagtcagcactgcaagcctgaggaaggccttcaggcccaagaagaagacctgggcctggtgggtgcacaggctctccaagctgaggagcaggaggctgccttcttctcctctactctgaatgtgggcactctagaggagttgcctgctgctgagtcaccaagtcctccccagagtcctcaggaagagtccttctctcccactgccatggatgccatctttgggagcctatctgatgagggctctggcagccaagaaaaggaggggccaagtacctcgcctgacctgatagaccctgagtccttttcccaagatatactacatgacaagataattgatttggttcatttattgctccgcaagtatcgagtcaaggggctgatcacaaaggcagaaatgctggggagtgtcatcaaaaattatgaggactactttcctgagatatttagggaagcctctgtatgcatgcaactgctctttggcattgatgtgaaggaagtggaccccactagccactcctatgtccttgtcacctccctcaacctctcttatgatggcatacagtgtaatgagcagagcatgcccaagtctggcctcctgataatagtcctgggtgtaatcttcatggaggggaactgcatccctgaagaggttatgtgggaagtcctgagcattatgggggtgtatgctggaagggagcacttcctctttggggagcccaagaggctccttacccaaaattgggtgcaggaaaagtacctggtgtaccggcaggtgcccggcactgatcctgcatgctatgagttcctgtggggtccaagggcccacgctgagaccagcaagatgaaagttcttgagtacatagccaatgccaatgggagggatcccacttcttacccatccctgtatgaagatgctttgagagaggagggagagggagtctgagcatgagatgcaaccagggccagcgggcagggaaatgggccaatgcatgcttcagggccacacccagcagtttccctgtcctgtgtgaaatcaggcccattcttccctctgtgtttgatgagagaagtcagtgttctcagtagtagaaggcacagtgaatggaagggaacacattgtatactgcctttaggtttctcttccatcgggtgacttggagatttctttttgtttccctttggtaattttcaaatattgttcctgtaataaaagttttagttagcttcaacatctaagtgtatggatgatactgaccacacatgttgttttgcttatccatttcaagtgcaagtgtttgccattttgtaaaacattttgggaaatcttccatcttgctgtgatttgcaataggtattttcttggagaatgtaagaacttaacaataaagctgaactggtgttgtgaaacagagaaataaaaggagaaggtcatt

SEQ ID NO: 24547 - DNA, 1203 bp, Artificial Sequence
  derived and/or modified sequence
atgagtaaagtgagcacaatgttcagtgaggatgacttccagagcacagagcgcgctccctacggccctcagctgcaatggtcccaggatctcccacgcgtgcaagtgtttcgtgaacaggcaaacctggaggaccgcagtcccagaaggactcagcgaatcactggaggggaacaggttctgtggggccctatcactcaaatctttccaacagtaagacctgccgacttaacccgcgtaattatgccactcgagcagagaagccagcactgcaagcccgaagaagggctgcaggctcaggaagaagaccttgggctggtcggcgcacaggccctgcaggccgaggagcaggaggccgcatttttttcttcaactctcaatgtgggcactctagaggaactcccagccgcagagagccctagcccaccacagtctcctcaggaggaatctttttccccgaccgctatggatgccatctttggttctctctcagacgaaggctctggaagccaggagaaagaaggaccttccacctccccagacctgatagaccctgagagcttcagccaggacattctgcatgataagatcatcgatcttgtccatcttctgcttaggaagtatcgcgtcaaagggctgatcacaaaagccgaaatgctcgggagtgtcattaagaactacgaagactacttccctgaaatcttccgcgaagccagcgtgtgtatgcagctccttttcggaattgacgtaaaggaggtggaccccacaagtcattcctatgtacttgtgacaagtctgaacctgtcttacgacgggatacagtgtaacgagcaatctatgcctaagagcgggttgcttattatcgtcctgggagttatttttatggaggggaactgtatcccagaggaagtgatgtgggaggtcttgtccattatgggagtgtatgccggacgtgaacacttcttgtttggtgaacctaaaagactgctgacccaaaactgggtgcaggaaaagtacttggtctatcgtcaagtgccagggacagaccccgcttgctacgaattcctgtggggccctagagcacacgcagaaacttccaagatgaaggtactggagtacattgcaaacgccaatggacgagatccaaccagttatcccagcctatacgaagatgccctgagagaggagggagagggtgtttag

SEQ ID NO: 24548 - DNA, 1203 bp, Artificial Sequence
  derived and/or modified sequence
atgtctaaggttagcactatgttttccgaggacgatttccagtctacagaacgggccccttacggccctcagttacaatggagccaggacctacccagagtccaggttttcagggaacaggccaatttagaagacagatcaccccgcaggactcagagaattacaggtggggagcaggtactctggggacctatcacacagatcttccctaccgtgagaccagcagatctgaccagggtgatcatgcccctcgagcaaagatctcagcattgcaaacccgaagaggggctgcaagcccaggaagaggatctgggactcgttggggcccaggcattacaggccgaggaacaggaggccgcattcttcagctcaacccttaacgtcggaacccttgaagaattgccagcagccgagtcaccctctccgccccagagtccccaggaggagtcattttcccccactgctatggacgccatattcgggtctttatctgacgagggatccgggtcccaagagaaagaagggcctagcacatccccagacttaattgacccagaatcttttagccaagacattctccatgacaaaatcatagacctggtgcatctacttctcaggaagtaccgggttaaggggctcatcacaaaagcagagatgctcggaagtgtgatcaaaaactatgaggactacttcccggaaatcttccgtgaggcctcagtgtgcatgcaactcttgttcgggatcgacgtcaaggaggtggatcccactagccattcctatgtcctggttaccagcctgaacctgtcttacgatgggattcaatgcaatgaacagagtatgcctaagagcggtctgttaatcattgtcctcggagtgatctttatggaagggaactgcatccctgaggaagtgatgtgggaagttctcagtatcatgggagtatatgccggccgcgagcatttcctgtttggagaacccaagcgacttctgacccaaaactgggttcaggaaaaatacctcgtctatcgccaagtgcctggcacagacccagcttgttatgagttcttatgggggccgagggcacacgccgaaacatctaaaatgaaggtattggaatacattgctaatgcgaatgggagagatccgacgagctatccttccctgtatgaggacgcacttcgtgaagagggggaaggcgtgtag

SEQ ID NO: 24549 - DNA, 1203 bp, Artificial Sequence
  derived and/or modified sequence
atgagcaaggtgagcaccatgttcagcgaggacgacttccagagcaccgaaagggcgccatatggccctcagctgcagtggtcgcaggacctccctcgcgtccaggtcttcagggagcaagctaatttagaggatcgtagccctcggagaacccagcggattacaggcggcgagcaggttttatgggggcccatcacccagatcttccccacggtgagaccagcagacctgacacgtgtgatcatgcctcttgagcaacgatcacaacattgcaaacccgaagagggcctccaggcccaggaggaggacttgggcttagtgggagctcaggcactgcaggcagaagagcaggaggcagcttttttcagcagtacattaaacgttggaaccctggaggaactgccagctgccgaatcaccttcccctcctcagtccccccaagaggagtccttctcccccaccgcgatggatgcaatcttcggtagtctctccgatgaaggttcaggatcccaggaaaaagaaggcccctccacttcccccgacctgatcgatcccgagtccttctctcaggacatcctccatgataagattattgatctggtgcacctcctgttacgtaagtaccgcgtgaaggggcttatcacaaaggccgaaatgctagggtcagtgatcaaaaattatgaagactacttccctgaaattttccgggaggcatccgtctgcatgcagctactttttggcatcgacgtgaaggaggtagaccctacctcccatagttacgtactggttacatctctcaatctgtcttatgacggtattcagtgcaacgagcagtccatgccgaagtccggacttctaatcatcgtgctcggcgtgatatttatggaagggaattgcatccccgaagaggtaatgtgggaggtactgtccatcatgggcgtttatgccggtcgcgaacattttttgttcggtgaacccaagcgcttgctcactcagaactgggtgcaagagaagtacctggtttaccgacaggtgcctggtacggaccctgcttgttatgagtttctgtgggggccccgcgctcacgccgagaccagcaagatgaaagtcctggaatatatcgcaaacgccaatggtcgagatcccacctcctatccttccctctacgaggatgccctgagagaggagggggagggggtgtag

SEQ ID NO: 24550 - DNA, 1203 bp, Artificial Sequence
  derived and/or modified sequence
atgagtaaagtctcaaccatgtttagtgaagacgatttccagtcaactgagcgagccccatacggaccacaacttcaatggagccaggacctgcctcgcgtgcaagtgtttagggagcaagccaatttggaagataggagtccccgacgcacacaaagaattactggaggcgaacaggtgttatggggtcccattactcagatcttccctacagtgaggccagctgacctgacgagggtgattatgcccctcgagcagcggagccagcattgtaagcctgaagagggactgcaagcccaggaagaggacttgggtttggtcggggcacaggccctccaggctgaggaacaagaggcagctttctttagcagcacactcaacgtcggtacgctggaagagctgcctgccgctgaaagccctagcccgcctcagagcccccaggaggagtctttctcacctacagccatggacgccatttttggttccttatcagatgagggttccggtagccaggagaaagaaggcccttctacaagccccgatcttattgatccagagtcattctcacaggacatcttacacgataaaatcatcgacctggtccacctgctcctaagaaaatatcgagtgaagggcttgataaccaaagcagagatgttaggtagtgtgattaaaaactatgaggactacttcccggagatctttagggaagcgtcagtttgcatgcaattactgtttggtattgacgttaaggaggttgacccgaccagtcactcttacgtattggtgactagcctaaatctaagttacgacggaatccaatgtaatgagcagagcatgccaaaaagtgggctgctgattatagtgctgggggtcatcttcatggagggtaattgcattcccgaagaagtgatgtgggaggtgctgtccatcatgggcgtttatgctggacgggagcacttcctatttggagaacccaaacggcttctcacgcagaattgggtccaggaaaagtacctcgtctataggcaggtgccaggcactgatcctgcatgctacgaatttttatgggggcctagagctcatgccgagacatccaaaatgaaggtcctcgagtacatagccaacgcgaacggccgagatccaacctcctatcctagcctctacgaggatgcgctgagagaggaaggggagggagtctag

SEQ ID NO: 24551 - protein, 317 aa, Artificial Sequence
  derived and/or modified sequence
MSSEQKSQHCKPEEGVEAQEEALGLVGAQAPTTEEQEAAVSSSSPLVPGTLEEVPAAESAGPPQSPQGASALPTTISFTCWRQPNEGSSSQEEEGPSTSPDAESLFREALSNKVDELAHFLLRKYRAKELVTKAEMLERVIKNYKRCFPVIFGKASESLKMIFGIDVKEVDPASNTYTLVTCLGLSYDGLLGNNQIFPKTGLLIIVLGTIAMEGDSASEEEIWEELGVMGVYDGREHTVYGEPRKLLTQDWVQENYLEYRQVPGSNPARYEFLWGPRALAETSYVKVLEHVVRVNARVRIAYPSLREAALLEEEEGV

SEQ ID NO: 24552 - protein, 230 aa, Artificial Sequence
  derived and/or modified sequence
MSSEQKSQHCKPEEGVEAQEEALGLVGAQAPTTEEQEAAVSSSSPLVPGTLEEVPAAESAGPPQSPQGASALPTTISFTCWRQPNEGSSSQEEEGPSTSPDAESLFREALSNKVDELAHFLLRKYRAKELVTKAEMLERVIKNYKRCFPVIFGKASESLKMIFGIDVKEVDPASNTYTLVTCLGLSYDGLLGNNQIFPKTGLLIIVLGTIAMEGDSASEEEIWEELGVMG

SEQ ID NO: 24553 - protein, 217 aa, Artificial Sequence
  derived and/or modified sequence
MSSEQKSQHCKPEEGVEAQEEALGLVGAQAPTTEEQEAAVSSSSPLVPGTLEEVPAAESAGPPQSPQGASALPTTISFTCWRQPNEGSSSQEEEGPSTSPDAESLFREALSNKVDELAHFLLRKYRAKELVTKAEMLERVIKNYKRCFPVIFGKASESLKMIFGIDVKEVDPASNTYTLVTCLGLSYDGLLGNNQIFPKTGLLIIVLGTIAMEGDSA

SEQ ID NO: 24554 - protein, 241 aa, Artificial Sequence
  derived and/or modified sequence
MSSEQKSQHCKPEEGVEAQEEALGLVGAQAPTTEEQEAAVSSSSPLVPGTLEEVPAAESAGPPQSPQGASALPTTISFTCWRQPNEGSSSQEEEGPSTSPDAESLFREALSNKVDELAHFLLRKYRAKELVTKAEMLERVIKNYKRCFPVIFGKASESLKMIFGIDVKEVDPASNTYTLVTCLGLSYDGLLGNNQIFPKTGLLIIVLGTIAMEGDSASEEEIWEELGVMGVYDGREHTVYG

SEQ ID NO: 24555 - protein, 172 aa, Artificial Sequence
  derived and/or modified sequence
MSSEQKSQHCKPEEGVEAQEEALGLVGAQAPTTEEQEAAVSSSSPLVPGTLEEVPAAESAGPPQSPQGASALPTTISFTCWRQPNEGSSSQEEEGPSTSPDAESLFREALSNKVDELAHFLLRKYRAKELVTKAEMLERVIKNYKRCFPVIFGKASESLKMIFGIDVKEVDP

SEQ ID NO: 24556 - DNA, 954 bp, Artificial Sequence
  derived and/or modified sequence
atgagcagtgagcaaaaaagtcagcactgcaagcccgaagaaggggtcgaagcacaggaggaagcattagggctagtgggtgcccaggcccctaccacagaagaacaggaggccgctgtgagcagcagctccccgcttgttccgggaacactggaggaagtcccagccgctgagtcagcaggacctccacagagtccacagggggcttccgcattgcccacgacaatatcgtttacctgttggcggcaacctaacgaaggctcaagcagccaggaggaggaaggcccgagtacaagcccggatgccgaatcactgtttcgagaggccctgtccaataaggtggacgaactggctcacttccttctgcggaagtaccgggccaaagaactcgtaaccaaagccgaaatgctagagagagtcatcaagaattataagaggtgctttcctgtgattttcggaaaggcaagtgagtctctgaaaatgatcttcggcattgatgttaaggaggtggacccagcaagcaacacctacacccttgtcacgtgtctggggttgtcctacgacggacttctgggcaacaaccagattttcccgaagaccgggctcctgatcatagtactcgggacaatcgccatggaaggagactctgctagcgaggaggagatttgggaagagctgggggtcatgggcgtgtatgacgggcgcgaacacactgtttatggcgagccacggaaattgttgacacaagactgggttcaagagaactatctggagtaccggcaggtgccaggaagcaatccggctagatatgaattcctgtggggccctagggccctagcagagacaagctatgtgaaagtcttagaacatgttgtgagggtgaatgcgagggtgcggattgcttatccttctctgcgggaagccgcactattagaagaggaggagggagtctag

SEQ ID NO: 24557 - DNA, 954 bp, Artificial Sequence
  derived and/or modified sequence
atgagctcagaacaaaaatcccaacattgcaaacctgaagagggcgtggaggctcaggaggaagcgctgggtctggtgggagcacaagccccgaccaccgaggagcaggaggccgccgtttccagtagctcccccctggtgcccgggaccctggaggaagtgccagctgcagagagcgccggcccacctcagtccccccaaggggcctccgctctgccgactaccatatcttttacttgctggcggcagccgaatgaaggaagttccagccaggaagaagagggccccagcacttctccagatgcggagagtctcttcagagaagctttaagcaataaagtagacgaactagcccatttcctgttacggaagtatcgggcaaaggagctggtaacaaaggctgagatgctggaacgcgttatcaaaaactacaaacgctgcttcccggtgatattcggcaaggcctctgaaagtctgaagatgattttcggcatcgacgtgaaggaagtggacccagcgtccaacacgtatactctagtgacctgcttggggttgtcttacgacggcctgctgggaaacaaccagattttccctaaaaccggtcttttgatcattgtgctgggtactatagccatggaaggagactctgcatcagaggaagaaatttgggaagaactcggagtgatgggggtgtacgatgggagggagcacacagtatacggcgagcccaggaaactactgacacaggattgggtgcaggagaactatctcgagtatcgccaggtccctggctcaaatcccgctaggtacgaattcctatggggcccccgggcactggccgagacatcctacgtgaaagtgctagaacatgtcgtgcgcgttaacgctagggtgagaattgcttatcctagtcttcgcgaagccgccctgttggaggaggaggagggagtgtag

SEQ ID NO: 24558 - DNA, 954 bp, Artificial Sequence
  derived and/or modified sequence
atgtcatctgagcaaaaaagtcagcactgtaagcccgaggagggcgtcgaggcacaggaggaagcattgggtcttgtcggggcgcaggcacctaccaccgaggagcaggaggcagccgtctcttctagctcccctctagttccaggtacgctagaagaagtaccagcagctgagagcgcagggccaccccagtcccctcaaggcgccagcgcactgccgactaccatttcttttacctgttggcgacagccgaacgaaggatccagcagtcaggaagaggagggtccaagcacatcaccagacgcggagagcctgtttcgagaagccttgtcaaataaggtggacgagctagcccacttcctgctgcgtaagtatagggcgaaggaactcgtcaccaaagcagaaatgctcgagagagtgatcaaaaactacaagaggtgctttcctgtgatatttggcaaggcctctgagagcctcaaaatgatctttggcattgacgtgaaagaagtggatcctgcttccaacacatacacactcgttacatgtttaggtctgtcttacgatggtctattgggtaataatcagatcttccccaagacaggtttgcttattattgtgttggggaccattgccatggagggagacagtgcctctgaagaggaaatttgggaggaactgggagtcatgggggtctacgatgggagagaacatacagtttatggtgagccccggaagctgctgacccaggattgggtgcaggaaaactacctggaataccgccaggtccctggctccaaccccgccaggtatgaattcctctggggtccaagagcactggcagagacttcctacgtgaaggtgttggaacatgttgtcagggttaacgcccgggtgaggatcgcctatccaagtttgagggaagcagccctgttagaagaagaagagggcgtttag

SEQ ID NO: 24559 - DNA, 954 bp, Artificial Sequence
  derived and/or modified sequence
atgtccagtgagcaaaagtcacagcactgtaaacccgaagagggcgtcgaggctcaggaagaagctctcggcctggttggagcccaggcacctacgacagaggaacaggaagctgccgtgagcagctcaagtcctctggtacccggcactctggaagaagtccccgcagccgaaagcgccggtcccccccaaagcccccagggggcttctgccttacctactacaatcagctttacctgctggagacaacccaatgaagggtcaagcagccaggaagaggagggcccgagtacttcccccgacgctgagtccctatttagagaggccctgtcaaataaggttgatgagctggcccactttctgttaagaaagtatagggccaaagaactggtgactaaagctgaaatgctcgagagggtaattaagaattataagcgatgtttcccagttattttcgggaaggcgtctgaaagtctgaaaatgatcttcggaattgatgttaaggaagtggaccctgcaagcaacacatataccttagtcacctgcctggggctatcttacgacggcctcctgggaaataatcagatctttccaaaaacgggcttactgattatcgtgctgggcaccatagcgatggaaggcgattccgcaagcgaggaagaaatatgggaggaattgggagtgatgggtgtttatgacgggcgggaacacactgtatacggtgagccacgaaaactgctgacccaagattgggttcaagagaattacctggaataccgccaggtgccaggatcaaatccagcgagatacgagttcctatggggaccacgcgcactcgccgagacctcctatgtaaaggtgctggagcacgtagtgcgggtgaacgcaagggtcagaatagcatatccaagcctgagagaagctgccttgttggaggaggaagagggcgtgtag

SEQ ID NO: 24560 - DNA, 954 bp, Artificial Sequence
  derived and/or modified sequence
atgtcctctgagcagaaaagtcagcactgtaagcctgaagagggagtagaggctcaggaggaggccctcggtctggttggggcacaggccccgacaaccgaggagcaggaagctgcagtgtccagttcttcacccttagtcccaggcactctagaggaagtgccagctgcggaatcagccggtccaccacaatcaccacagggggcaagtgccttacctaccacgatctctttcacatgttggcgacaacctaatgaggggtcatctagccaggaggaggaaggaccttccacttcgcccgatgcggaaagcctcttccgagaggctctgtcaaataaggtcgacgagctggcccatttcctgttacggaaatatagggccaaggagctggtcactaaagccgagatgctggagcgagtcattaagaactacaaacgatgcttcccggtgattttcggtaaggcatcagaatcgctcaaaatgatattcggaattgatgtgaaagaggtggatcctgcatctaatacatataccctcgtgacctgtctggggctaagttacgacggccttttaggaaataaccagatcttccctaagacaggtctgctaattatcgtactggggactattgctatggagggggatagtgcaagcgaagaagaaatctgggaagagctgggggtgatgggcgtatacgacgggcgggaacacacagtgtacggcgaaccccgtaagctgctgacgcaagactgggtgcaggagaattatcttgagtaccggcaagtgcccggctcgaaccctgcacggtatgaattcctctggggcccaagagccttagcagagacctcatacgtaaaagtgctcgaacacgtcgtcagagtgaatgcgagggttaggattgcttacccttctctccgtgaggccgcactgcttgaggaagaagagggcgtttag

SEQ ID NO: 24561 - DNA, 954 bp, Artificial Sequence
  derived and/or modified sequence
atgtctagtgagcagaaaagtcagcactgtaaacctgaggagggagtggaagctcaggaagaagccctgggtttagtgggtgctcaggctccaactacagaagaacaggaggctgctgtgtcttcttcttcacccctcgtccctggaaccctggaagaggtgcctgctgcagaatctgcagggcctccccaatccccccagggagccagcgccctgccaaccaccatcagcttcacttgctggcgacaaccgaatgaagggagttctagccaggaagaagaggggccgtctaccagcccagacgctgaatccctattccgggaagcactctccaataaggtggatgaactggctcattttctgctcagaaaatatcgcgccaaggaattagtgactaaagcagaaatgctagagcgggttattaaaaattataagagatgctttcctgttatcttcggaaaagcctcagaaagcctgaaaatgatctttggaattgacgtcaaggaggtggaccctgccagcaacacctacactctcgttacatgcctgggattgagctatgacggactgttaggaaataaccaaatttttcccaagactggcttgcttatcatcgttcttggtactatcgccatggagggtgattctgcatcagaggaggaaatctgggaagaactgggagtgatgggagtgtacgatgggagggagcataccgtgtacggagaaccccgtaaactgctgactcaagattgggtgcaggagaactacctggagtacaggcaggtacccggttcgaacccagcgagatacgagtttctttggggcccacgagcactggccgaaacatcctacgtgaaggtcctcgagcacgtagtgcgagtgaatgctagggtgcgcatagcttatccatcccttagagaggcagccttgctggaagaggaagagggcgtctag

SEQ ID NO: 24562 - DNA, 954 bp, Artificial Sequence
  derived and/or modified sequence
atgagctctgagcaaaaatcacaacattgtaagccagaggagggagtggaggcgcaagaggaggccttgggactggtgggagctcaggcgcctacaacagaagaacaggaggctgccgttagttcctcctctcccttggtacctggaacactagaggaagtgcccgcggctgaatccgcaggtccaccccagtccccgcaaggagcctctgcattaccgacgactatctcctttacctgctggcgccagcctaatgaaggctcaagttcgcaggaagaagaaggcccgagcacatcccccgacgcagagagtctgttcagagaggccttgtctaacaaagtagatgagctagctcactttttgcttcgaaaatacagagcaaaggaactcgtaactaaagctgaaatgctggaacgagtaataaagaattataagcgctgtttccccgtcatattcggcaaagcaagcgaatccctgaaaatgatatttgggatcgatgtgaaggaggtggatccggccagcaacacctacacccttgtcacctgcctgggtttaagttacgatgggctgcttggcaacaatcagatcttccccaaaaccgggctcttaattatcgtattgggtacaatagccatggagggagattccgcatctgaggaggagatctgggaggaattaggcgtgatgggcgtttacgatggccgtgagcacacagtgtacggggagccccgtaaattgctgacacaggattgggtgcaggaaaattacctggagtatcgccaggtcccggggtcgaaccctgccagatacgagtttttgtggggtccacgagccctggcagagaccagctacgttaaagtgctggaacatgtcgtccgagtcaacgcccgggtgcgcattgcatatcctagtcttcgggaagcagcactcttagaggaggaggaaggggtgtag

SEQ ID NO: 24563 - DNA, 693 bp, Artificial Sequence
  derived and/or modified sequence
atgtcatctgagcagaagagtcaacattgcaaaccggaggaaggtgtcgaagctcaagaagaagccctgggtctcgtgggggctcaggcgccaacaacagaggagcaggaggccgccgtctccagctcaagtcctttggtcccgggtacactggaagaggtgcccgccgccgaatctgccgggccacctcaatcccctcaaggcgcgagcgcgctgccaaccacaataagctttacgtgctggcggcagcccaacgagggttcgagctcgcaggaggaagaggggccctccacttcgcctgacgccgaaagtctgttcagggaagcactgagtaacaaagtggacgagctggctcacttcctgctgcgcaagtaccgagcaaaagagctcgtcaccaaagctgaaatgctagaacgcgttataaaaaactataaacgctgttttcctgtcattttcggaaaagcaagtgagagccttaaaatgatattcggtattgacgtgaaagaagttgatcctgcctctaacacgtacactcttgtaacctgtctgggcctctcatacgacggtctgttaggtaataatcagattttcccgaagacaggactgttgattatagtccttggcacaatcgccatggaaggggattcggcctccgaagaggagatatgggaggagctgggcgtgatgggctag

SEQ ID NO: 24564 - DNA, 654 bp, Artificial Sequence
  derived and/or modified sequence
atgtcttccgagcaaaagagccagcattgcaagcctgaagaaggcgtcgaggctcaagaagaggctttaggactcgtaggagcccaagctccaactacagaagagcaggaggccgccgtgtccagttcctcaccattggtcccaggaacccttgaggaagtaccagccgccgaaagcgccgggccaccacagagtccacagggcgcaagcgccctgccgacaacaatctctttcacatgttggaggcagcccaacgagggaagtagcagtcaggaagaggaggggccatccacttcgcctgacgcagagtcactcttccgagaagccctgagcaataaggtggacgagctagctcattttctgttgcgtaagtaccgagccaaagaactggtgactaaagcagaaatgttagaacgcgtgattaagaattacaaaagatgcttcccagtgatcttcggcaaagccagcgaatccttgaagatgatttttggcatcgatgtgaaggaagtcgaccccgcaagcaatacatatacattagtaacctgccttggcttatcctatgacggtcttttggggaacaatcagattttcccgaaaacgggtctgctcattattgtgttgggaacaatcgctatggaaggggactcggcgtag

SEQ ID NO: 24565 - DNA, 726 bp, Artificial Sequence
  derived and/or modified sequence
atgagcagtgaacagaagtctcagcactgtaaacctgaagagggggtggaggcccaggaagaagcactgggactcgtgggcgctcaagcaccaactacagaagagcaggaggccgcagtgagctcatccagcccgctggtgccggggacactggaggaggtgcccgcagcagagtctgccggacccccacagtccccccaaggcgctagcgccctgccaacaactatctcgttcacttgctggcgccagcccaatgaaggatccagttcacaggaagaggagggcccatccacatctcctgacgctgagtccctttttagagaagccctgagtaacaaggtggatgaactggcccacttccttcttaggaagtacagggctaaagagttagtcacaaaagccgagatgttagagcgtgtcattaaaaattataagaggtgttttccggtgatcttcggtaaggcctcagagtccctgaagatgatttttggtattgacgtaaaggaagtggatcccgcttcgaacacgtacacacttgttacctgtcttgggttgtcctacgacggtttgctggggaataaccagattttccctaagaccggtctgttgatcattgtgctgggcaccattgccatggagggtgattcggctagcgaggaggagatttgggaagaacttggggtcatgggggtctatgatggccgcgagcatacagtttatggttag

SEQ ID NO: 24566 - DNA, 519 bp, Artificial Sequence
  derived and/or modified sequence
atgtcctctgagcagaagtcacagcattgcaagccagaggaaggagtcgaggctcaagaagaggccctgggcctggtgggtgcacaggctccaaccactgaggagcaagaggcagcggtttcctcctcatcccccctggtgccaggcaccctggaggaggtgcctgctgccgagagcgccgggccccctcagtcccctcagggcgcctcagcactgccgactaccatttcattcacctgctggcgacagcccaacgaaggaagcagtagtcaagaggaggagggcccgtccacaagcccagacgcagaatctcttttcagggaagccctttccaacaaagtcgatgaactcgcccattttctcttaaggaaatatagggcaaaggaactggtcactaaagctgaaatgctcgaacgggtgatcaagaactataaaaggtgctttcccgtgattttcggaaaagcatcagagagcttaaaaatgatttttggaattgacgtgaaggaagttgacccctag

SEQ ID NO: 24567 - DNA, 726 bp, Artificial Sequence
  derived and/or modified sequence
atgtcatccgaacagaagtcccagcactgcaagccggaggaaggcgtcgaagcccaggaagaagcccttggcctagttggcgcgcaggcgcctactaccgaagaacaggaagcagcagtctcatcgagcagtccactggtcccaggaacgctagaggaggttccggccgctgagagtgccgggccgcctcagtcaccgcagggcgcttcagcccttccaaccacaatctcatttacatgctggcggcagcccaacgaaggctcctccagtcaggaagaggagggcccctctacgtcgccggatgccgaaagcctttttcgtgaagctcttagtaacaaagtagacgaactcgctcatttcctcctccggaagtatagggctaaggaattggtcaccaaggctgagatgctcgaacgagtgattaaaaactacaagcgttgcttccctgttattttcggcaaggcttctgagagtctcaaaatgatatttggaatcgacgtgaaagaagtggatcctgcttccaacacatatacactagtcacatgcctcggcctctcatatgacggactgctcggcaacaaccagatctttccaaagacaggcctgctcatcattgttctgggcacgatcgctatggaaggcgactcggcatccgaggaggaaatctgggaggagctcggcgtgatgggcgtgtacgatggtagagaacacaccgtgtacggttag

SEQ ID NO: 24568 - DNA, 726 bp, Artificial Sequence
  derived and/or modified sequence
atgagcagcgagcaaaagtcacaacattgcaaaccggaagagggagttgaagctcaggaagaagccctgggcctagtcggagcccaggccccgacaacagaggagcaggaagccgcagtctctagttcttctcctctggtgcccggcaccctcgaggaggtcccagccgccgagtcggccggcccccctcaaagtccccagggcgccagcgccctccccaccacaatttccttcacctgttggcgccagccgaacgagggatcttcaagtcaggaggaggagggaccctccacgagccctgacgcggaaagcttgttccgagaagcactaagcaacaaggtggatgagctggcacactttcttctgcgcaaatatagagccaaggagctcgtgaccaaggcagaaatgctcgagcgcgtaattaaaaactacaaacgatgttttcctgtgatattcgggaaagcttcagaaagcctgaagatgatctttgggattgacgttaaggaggttgatcctgccagcaacacatacaccctggtcacgtgcctgggtctctcttacgatgggctcttaggcaataatcagattttcccaaaaacaggactgctgattattgtgctgggaactatcgctatggaaggcgattctgcaagtgaggaagagatctgggaagaacttggagtgatgggcgtatatgacggtagggagcacacagtttacggatag

SEQ ID NO: 24569 - DNA, 654 bp, Artificial Sequence
  derived and/or modified sequence
atgtcctcagagcagaagtctcagcactgcaaaccagaagagggcgtggaagcccaggaggaggctcttggccttgtcggtgcacaggcacccacgactgaggagcaggaggccgccgtgtctagcagcagccccctggtgcccgggacgttagaggaagtgcctgctgctgaaagcgccggccccccacagtccccccagggagccagtgcactgcccactacaatctccttcacttgctggcgccagcccaatgagggaagcagctcccaggaggaagagggcccctctacatctcctgatgcagagtctctgttccgtgaggcgctcagtaacaaagtagatgaactcgctcactttctgctgagaaaataccgcgctaaggagttggttacaaaggccgagatgctcgagagggtcataaagaattacaaacgttgttttcccgtgattttcggtaaggcctccgaatccctgaaaatgatttttggaatagacgtgaaggaggtggatcccgccagcaacacttatacccttgtcacatgtctggggctgtcttacgacggccttctggggaataaccaaatcttccccaaaactggcctgctgatcatcgtactgggaacgatcgctatggagggtgattccgcttag

SEQ ID NO: 24570 - DNA, 726 bp, Artificial Sequence
  derived and/or modified sequence
atgagtagcgaacagaaatctcaacattgtaagcccgaagaaggggtcgaggcgcaagaggaggcgctcggactcgttggcgcccaggcccccaccacggaggagcaggaggctgccgtgtcttcaagttctcctcttgtgccaggtactcttgaagaagtccctgcggctgaatccgcaggaccaccgcaatcgcctcagggggcaagtgctctgcccaccacgattagcttcacgtgctggcgacagcctaatgagggcagctcttcacaagaggaggaggggccgagtaccagccccgatgcagagtcccttttccgtgaggccctgtcgaacaaggtggacgaattagcccactttctactgcggaagtatcgtgctaaggagctagttaccaaagcggagatgttagaacgagtcatcaagaactataaaagatgtttcccagttatctttggtaaagccagtgaatctctcaaaatgatttttggcattgacgtcaaggaggtcgacccagcttccaacacgtatacactggtgacctgcctgggtctctcctacgatggcctcttggggaacaatcaaatcttccccaaaaccggattactcattattgtgctgggcaccatcgctatggaaggggacagtgccagcgaagaggagatctgggaggagctaggtgtcatgggcgtctatgacggtcgtgaacacacagtgtacggctag

SEQ ID NO: 24571 - DNA, 954 bp, Artificial Sequence
  derived and/or modified sequence
atgagcagcgagcagaagagccagcactgcaagccagaggagggcgtggaggcccaggaggaggccctgggcctggtgggcgcccaggcccccaccacagaggagcaggaggccgctgtgagcagcagcagccccctggtgcccggcaccctggaggaggtgcctgctgctgagagcgctggccccccccagagcccccagggcgccagcgccctgcccaccaccatctccttcacctgctggaggcagcccaatgaaggcagcagcagccaggaggaggagggccccagcaccagcccagatgctgagagcctcttccgggaggccctgagcaacaaggtggatgagctggcccacttcctgctgaggaagtaccgggccaaggagctggtgaccaaggccgagatgctggagagggtcatcaagaactacaagcgctgcttccctgtgatctttgggaaggccagcgagagcctgaagatgatctttggaattgatgtgaaggaggtggaccctgccagcaacacctacaccctggtgacctgcctgggcctgtcctatgatggcctgctgggcaacaaccagatcttccccaagacaggcctgctgatcatcgtgctgggcaccatcgccatggagggggacagcgccagcgaggaggagatctgggaggagctgggcgtgatgggcgtgtatgatggccgggagcacacagtgtatggagagcccaggaagctgctgacccaggactgggtgcaggagaactacctggagtaccggcaggtgcccggcagcaacccagcccgctatgagttcctgtggggcccccgggccctggccgagaccagctatgtgaaggtgctggagcacgtggtgcgggtgaatgcccgggtgcgcatcgcctaccccagcctgcgggaggccgccctgctggaggaggaggagggcgtgtag

SEQ ID NO: 24572 - DNA, 693 bp, Artificial Sequence
  derived and/or modified sequence
atgagcagcgagcagaagagccagcactgcaagccagaggagggcgtggaggcccaggaggaggccctgggcctggtgggcgcccaggcccccaccacagaggagcaggaggccgctgtgagcagcagcagccccctggtgcccggcaccctggaggaggtgcctgctgctgagagcgctggccccccccagagcccccagggcgccagcgccctgcccaccaccatctccttcacctgctggaggcagcccaatgaaggcagcagcagccaggaggaggagggccccagcaccagcccagatgctgagagcctcttccgggaggccctgagcaacaaggtggatgagctggcccacttcctgctgaggaagtaccgggccaaggagctggtgaccaaggccgagatgctggagagggtcatcaagaactacaagcgctgcttccctgtgatctttgggaaggccagcgagagcctgaagatgatctttggaattgatgtgaaggaggtggaccctgccagcaacacctacaccctggtgacctgcctgggcctgtcctatgatggcctgctgggcaacaaccagatcttccccaagacaggcctgctgatcatcgtgctgggcaccatcgccatggagggggacagcgccagcgaggaggagatctgggaggagctgggcgtgatgggctag

SEQ ID NO: 24573 - DNA, 654 bp, Artificial Sequence
  derived and/or modified sequence
atgagcagcgagcagaagagccagcactgcaagccagaggagggcgtggaggcccaggaggaggccctgggcctggtgggcgcccaggcccccaccacagaggagcaggaggccgctgtgagcagcagcagccccctggtgcccggcaccctggaggaggtgcctgctgctgagagcgctggccccccccagagcccccagggcgccagcgccctgcccaccaccatctccttcacctgctggaggcagcccaatgaaggcagcagcagccaggaggaggagggccccagcaccagcccagatgctgagagcctcttccgggaggccctgagcaacaaggtggatgagctggcccacttcctgctgaggaagtaccgggccaaggagctggtgaccaaggccgagatgctggagagggtcatcaagaactacaagcgctgcttccctgtgatctttgggaaggccagcgagagcctgaagatgatctttggaattgatgtgaaggaggtggaccctgccagcaacacctacaccctggtgacctgcctgggcctgtcctatgatggcctgctgggcaacaaccagatcttccccaagacaggcctgctgatcatcgtgctgggcaccatcgccatggagggggacagcgcctag

SEQ ID NO: 24574 - DNA, 726 bp, Artificial Sequence
  derived and/or modified sequence
atgagcagcgagcagaagagccagcactgcaagccagaggagggcgtggaggcccaggaggaggccctgggcctggtgggcgcccaggcccccaccacagaggagcaggaggccgctgtgagcagcagcagccccctggtgcccggcaccctggaggaggtgcctgctgctgagagcgctggccccccccagagcccccagggcgccagcgccctgcccaccaccatctccttcacctgctggaggcagcccaatgaaggcagcagcagccaggaggaggagggccccagcaccagcccagatgctgagagcctcttccgggaggccctgagcaacaaggtggatgagctggcccacttcctgctgaggaagtaccgggccaaggagctggtgaccaaggccgagatgctggagagggtcatcaagaactacaagcgctgcttccctgtgatctttgggaaggccagcgagagcctgaagatgatctttggaattgatgtgaaggaggtggaccctgccagcaacacctacaccctggtgacctgcctgggcctgtcctatgatggcctgctgggcaacaaccagatcttccccaagacaggcctgctgatcatcgtgctgggcaccatcgccatggagggggacagcgccagcgaggaggagatctgggaggagctgggcgtgatgggcgtgtatgatggccgggagcacacagtgtatggatag

SEQ ID NO: 24575 - DNA, 519 bp, Artificial Sequence
  derived and/or modified sequence
atgagcagcgagcagaagagccagcactgcaagccagaggagggcgtggaggcccaggaggaggccctgggcctggtgggcgcccaggcccccaccacagaggagcaggaggccgctgtgagcagcagcagccccctggtgcccggcaccctggaggaggtgcctgctgctgagagcgctggccccccccagagcccccagggcgccagcgccctgcccaccaccatctccttcacctgctggaggcagcccaatgaaggcagcagcagccaggaggaggagggccccagcaccagcccagatgctgagagcctcttccgggaggccctgagcaacaaggtggatgagctggcccacttcctgctgaggaagtaccgggccaaggagctggtgaccaaggccgagatgctggagagggtcatcaagaactacaagcgctgcttccctgtgatctttgggaaggccagcgagagcctgaagatgatctttggaattgatgtgaaggaggtggacccctag

SEQ ID NO: 24576 - DNA, 954 bp, Artificial Sequence
  derived and/or modified sequence
atgagcagcgagcagaagagccagcactgcaagcccgaggagggcgtggaggcccaggaggaagccctgggcctggtcggcgcgcaagcccctaccactgaagagcaggaggctgcagtgtcaagctcttctcccttggtgcctggaacgctagaggaggtgcccgctgcagaaagtgcgggaccgccccagtcacctcaaggtgcatctgcattgccaacaaccatctcattcacctgctggcgccaacccaatgagggctcaagtagtcaggaggaggaaggaccctcgacgagtcctgacgctgaaagcttgttcagggaggccctgagtaataaagttgatgagctcgcacatttccttctccggaaataccgggcaaaagaactcgttaccaaggccgagatgttggaaagagtgatcaagaactataaacggtgtttcccagtgattttcggcaaagctagtgagagcttgaaaatgatctttggaatcgacgtcaaggaggtggatccggcctctaacacgtacacactggtgacctgtcttggacttagctatgacggcctcttggggaacaatcagatcttcccgaagacaggcctcctgatcatagtgctcggaacgatcgccatggagggcgattctgcgagcgaagaggagatttgggaggagctgggcgtgatgggggtctatgatgggagagagcatacagtgtacggtgaacctcgcaagctgcttacacaggactgggtgcaggagaactacttggagtaccgccaggtacctgggtctaacccagcccggtatgagtttctatggggcccccgtgccctcgctgaaacttcgtacgttaaagtgctggaacacgttgtcagagttaacgccagagtccgaattgcctatccttctctcagggaagccgcactgcttgaggaggaagaaggtgtttag

SEQ ID NO: 24577 - DNA, 954 bp, Artificial Sequence
  derived and/or modified sequence
atgagcagcgagcagaagagccagcactgcaagcccgaggagggcgttgaagcccaggaggaggccctcgggctggtgggcgcccaggccccaaccaccgaagaacaggaagcggcagtgagttcttcgtcacccttggtgcccgggacgctcgaagaagtaccagccgccgaatctgcaggcccgccgcaaagcccacagggagccagcgcactcccaacaaccatctctttcacctgttggcgacagccaaatgagggttcaagttcacaagaagaagaaggtcccagcacctctccagacgcagaaagtctatttagagaagccctttccaataaggtggatgagttggctcatttcctgctgcggaaatacagagcgaaggagttggtgacaaaggccgagatgctggagagagtgattaaaaattacaagaggtgctttcccgtcatcttcggaaaggcctcagagtcactcaaaatgatatttgggatcgacgtgaaggaggtggaccccgcctcaaacacatacacactagttacttgcctgggccttagctacgacggcctgctcggcaacaaccaaatattcccgaagactggcctcctgattatcgtcctgggtacgatcgccatggagggtgacagcgccagtgaggaagaaatttgggaggagctgggcgtcatgggggtctacgatggacgagagcacacggtatacggggagcctcgaaaattgttaacgcaagattgggtacaggagaattatctcgagtaccgccaggtgcccggcagcaaccccgctaggtatgaattcttgtggggcccacgtgcgctggccgaaacctcttatgtgaaagtattggagcacgtagtcagagttaatgctagggtgagaatcgcttacccctctctgcgcgaggctgccctgttagaagaagaagaaggagtatag

SEQ ID NO: 24578 - DNA, 954 bp, Artificial Sequence
  derived and/or modified sequence
atgagcagcgagcagaagagccagcactgcaagcccgaggagggcgtggaggctcaagaggaggctctcggtcttgtcggggctcaggcacctacaacagaagaacaggaagccgcagtaagctccagttctcccttggtgccaggcactcttgaggaggtccccgccgccgaaagcgcgggaccaccccagtcccctcaaggcgcatccgccttgccaacaaccatatccttcacctgttggcggcagcctaatgagggttccagttcacaggaagaagaaggcccgtcaacttctcccgacgctgagtcattgttccgggaggcattaagtaataaagttgacgaactggcacacttcctgctgcgaaagtacagggccaaagagttggtcaccaaggccgagatgctagaacgcgtcattaaaaattataagagatgcttccccgttatttttggaaaggcctcagagtccttgaagatgatctttggcattgacgtgaaggaagtcgaccctgcttctaacacttacacgttggtgacttgtctcggcttgtcttatgatggactgttgggcaataatcagatcttcccaaaaaccgggctgctgattattgtattaggcacgatcgctatggaaggagattccgcctccgaggaggagatttgggaggagctcggagtgatgggagtgtacgatgggagagaacatacagtatatggtgagcccaggaaactcctgacacaagattgggtgcaagaaaattatttggagtacagacaagtgccaggatctaatccagcccgttatgagttcctgtggggtcctcgggccctggctgagacgtcctatgtaaaggtgcttgaacatgttgtccgtgtcaatgcccgggtgcggattgcctatccttcccttcgggaggccgcacttctagaggaggaagaaggcgtctag

SEQ ID NO: 24579 - DNA, 954 bp, Artificial Sequence
  derived and/or modified sequence
atgagcagcgagcagaagagccagcactgcaagcccgaggagggcgtggaggcacaggaggaagctctggggctggtcggcgcacaggcccctaccacggaggaacaagaagctgcagtctcaagttcttcacccctggttccggggaccctggaagaggtccccgccgctgagtctgccggccccccacagtcccctcaaggtgcctccgcactacctaccacgatctcatttacgtgttggcggcaacccaacgaaggatctagctcccaggaggaagagggtccgagtaccagccctgatgctgaatcgctattccgagaggcccttagtaataaagtggacgaattagctcatttccttctgcgcaagtatcgggcaaaggagctggtgactaaagccgagatgctggagagggttatcaagaactataagcggtgcttccccgtcatattcgggaaagcttcagaatctctcaagatgatctttggaatagatgtgaaggaggtggatccggcctcaaacacttacacccttgttacctgcttaggactgtcatatgacggtctgctggggaacaatcaaatatttcctaaaactggactgctgattattgttctcgggacgattgctatggagggcgattcagcaagcgaagaggaaatctgggaggagctcggggttatgggagtttatgatggaagggaacacacggtctatggagaacctagaaagctgctcacacaagattgggttcaggaaaattacctagagtacaggcaggtgcccggcagtaatcctgccagatacgagtttctctggggtcctcgcgccctcgccgagacgagctacgtgaaagtcctggaacatgtggttcgagtgaacgcacgtgtgcggattgcctatccttctctgcgcgaggccgccctccttgaagaagaggaaggtgtgtag

SEQ ID NO: 24580 - DNA, 954 bp, Artificial Sequence
  derived and/or modified sequence
atgagcagcgagcagaagagccagcactgcaagcccgaggagggcgttgaggcacaggaggaagccctgggattggtcggtgcgcaagccccaaccaccgaggaacaggaggctgcggttagctcgtcctcccccttagtgcctggtaccttggaggaagttccggccgctgaatcggctgggcctcctcagtctcctcagggggctagtgcactcccaaccaccatctctttcacttgttggagacagccaaatgagggcagctcttcccaggaagaggagggcccgtcaacaagcccggatgctgagagccttttcagggaggccctgagcaacaaagttgatgagttggcacattttctactcaggaaatatcgcgctaaagagcttgttaccaaggccgaaatgctggaaagggttattaaaaattacaaacgctgcttccccgtcatcttcggtaaagccagtgagagtctgaaaatgatattcgggattgacgtgaaggaggtggaccccgcctctaatacttatacattggtaacctgcttgggactgtcatatgatggcctgttggggaacaatcagatctttcctaagaccggcctgctgattatcgtcctcggtacaatcgcaatggaaggcgattcagcatcagaggaggagatttgggaggagttgggggtcatgggcgtgtacgatggacgtgaacacactgtctatggggaaccacgcaagctgctgacacaagactgggtgcaagaaaattatctagaatataggcaggttcctggaagcaatccagccagatacgagtttctgtgggggcctcgggccctcgccgagaccagctatgtgaaagttttggagcatgtagtgagggttaatgctcgggtgagaatcgcatacccttctctgcgggaggccgcccttctggaagaagaggagggggtgtag

SEQ ID NO: 24581 - DNA, 954 bp, Artificial Sequence
  derived and/or modified sequence
atgagcagcgagcagaagagccagcactgcaagcccgaggagggcgtggaagcccaagaagaagccctgggactggtgggagcacaggcccccaccaccgaagaacaagaggccgccgtcagttctagctctccactggtgccaggcactttggaggaagtgcccgcagctgaatccgctgggcccccccagagcccacaaggtgcaagcgccttaccgacaactatcagtttcacctgttggcgtcagcctaacgagggcagttcatcacaggaggaagagggtcctagcaccagcccggatgccgaatccctttttagagaagctctctcgaataaagtcgacgagcttgctcattttttgctgcggaagtatcgggctaaggagttagtaactaaagctgaaatgttggaaagagtgatcaagaactataagcggtgctttcccgtcatatttggcaaggccagcgaatctctgaagatgatcttcggcatcgacgtgaaggaagtggaccccgcaagtaacacctacaccctagtgacctgcctgggccttagctatgatgggctcctgggaaacaaccagatcttccccaaaaccggtctcctaataattgtgttgggtactattgccatggaaggagactccgctagcgaagaagaaatctgggaggagctgggagtgatgggagtgtatgatgggagggaacacaccgtttatggcgaaccgcgaaagctcttgacccaagattgggtgcaggaaaattatcttgagtaccggcaggttcctgggtcaaacccagctcgctatgaattcctctggggtcccagagcactcgcagagacatcctatgtgaaggtgctagagcacgtggtcagagtcaacgctcgcgtgagaatagcctatccatccctgcgcgaggccgcgcttctggaggaagaggagggcgtctag

SEQ ID NO: 24582 - DNA, 954 bp, Artificial Sequence
  derived and/or modified sequence
atgagcagcgagcagaagagccagcactgcaagcccgaggagggcgtcgaggcccaggaagaggccctgggactggtgggtgcacaggctccgacgaccgaagaacaagaggcagcggtgtcatcctccagccctctggtgccagggacattggaggaggttcctgccgccgaaagcgcaggtccccctcagagtcctcagggagcttctgctctgcctacaaccatctcctttacatgttggagacagcccaatgaaggcagctcctcccaggaggaggagggaccgtccacatcacctgatgccgagtctcttttccgggaggccctttctaacaaagtcgatgagctagcacactttttattacgtaagtacagagcgaaagagttggtgacgaaggcagaaatgctggaaagagttatcaagaattacaagagatgctttcccgtcatctttggcaaagcaagcgaaagcctcaaaatgattttcggtattgacgtcaaggaggttgatcccgccagcaacacgtacaccttggtgacatgcctgggattatcatatgatggtttactgggcaataatcagatcttccccaagacagggttgctgatcatcgtgttgggaacgatagccatggagggggacagcgcatctgaagaagagatttgggaggagttgggcgtgatgggagtctacgacggaagagagcatacagtgtatggcgaaccgcgcaaactattgacccaggattgggttcaggagaattacttggagtatcgacaggtacctgggtccaacccagcgagatacgaatttttgtggggccctagagccctcgcagagacttcatacgtcaaggtgctcgagcatgtggtgcgtgtcaacgcccgggtgcgcatagcctacccctcactgagggaagctgcgcttctagaggaggaagaaggcgtgtag

SEQ ID NO: 24583 - DNA, 693 bp, Artificial Sequence
  derived and/or modified sequence
atgagcagcgagcagaagagccagcactgcaagcccgaggagggcgtggaggcccaggaagaagccctaggcctcgtgggcgcacaggctccaaccactgaggagcaagaggccgccgtctctagctccagcccactcgtgcctgggactctggaggaagttcccgcagctgagagtgcagggccaccacagtcaccgcagggggcgagcgccctgcccactacgatctcatttacttgctggcggcagcctaatgagggctcctcgagccaagaagaggaaggcccctccacttctccggacgctgaatctctcttcagggaggcgctcagcaataaggtagatgaactggcccattttctcctaaggaagtatagggccaaggaactcgtgaccaaggccgaaatgttagaaagggtgataaagaactataagcggtgcttccctgttatttttgggaaggcgtcagagtcccttaagatgatcttcggtattgacgtcaaagaagtggacccagcctccaacacatacactttggtgacatgcctgggcctgtcttacgacggactcctgggaaataaccagatctttccaaaaaccggcttattgatcatagtgctgggtaccatagcaatggagggagacagtgccagcgaggaggaaatctgggaggagcttggtgtgatggggtag

SEQ ID NO: 24584 - DNA, 654 bp, Artificial Sequence
  derived and/or modified sequence
atgagcagcgagcagaagagccagcactgcaagcccgaggagggcgtcgaagctcaggaggaggcgctagggcttgtgggagctcaggcgcccaccaccgaggaacaggaagccgccgtaagcagctcctctccattagtacccgggactctggaagaagtaccagctgccgagtccgccggccccccccagagccctcagggagcaagcgcccttcccaccactataagttttacttgttggaggcaacctaacgagggctcttcaagtcaagaggaggaaggaccatccaccagccctgatgccgagtcactcttccgcgaggctctgtcaaataaggtagatgagctcgctcattttctgctgcgtaaatatcgggctaaggagctggtgaccaaggctgagatgcttgagcgagtcatcaaaaactataagcgttgttttccagtcatctttggcaaagcaagtgagtccctgaagatgattttcggcattgacgttaaagaagtagatcccgcctcaaatacatatacgctggtaacctgtctgggcttatcgtatgatggcctcctggggaataatcaaatatttcctaagaccgggctactgataatagtgctgggtacaattgccatggaaggcgattctgcatag

SEQ ID NO: 24585 - DNA, 726 bp, Artificial Sequence
  derived and/or modified sequence
atgagcagcgagcagaagagccagcactgcaagcccgaggagggcgtggaggcccaggaggaagcgctgggccttgtgggcgcacaggccccaactaccgaggagcaagaagctgccgtgtcgagttcatcacctcttgtccccggtaccctggaggaggttcctgctgctgagagtgcaggcccaccccagtcaccacagggagccagcgccctccccaccacaatatctttcacatgctggcggcagcccaacgagggttcatcttctcaggaggaggagggcccgtctaccagccctgacgcagagtcactcttcagagaagctctatccaataaggtggacgagttagctcacttcctgctgcgtaaataccgggcaaaagaactggtcacaaaggctgaaatgctcgaacgtgtaatcaagaactacaagcgatgtttcccggtaatctttgggaaggcatccgaatctctgaagatgatcttcgggatcgatgtgaaagaagtggatcctgcaagcaatacctacactcttgtgacatgcctagggcttagctatgacgggctgctgggtaataatcagatcttccccaaaaccggccttctaattattgtgctcggaacgatcgcaatggagggggacagcgcaagtgaggaagaaatctgggaggaattaggcgtaatgggagtatatgacgggcgggaacacactgtttatggttag

SEQ ID NO: 24586 - DNA, 519 bp, Artificial Sequence
  derived and/or modified sequence
atgagcagcgagcagaagagccagcactgcaagcccgaggagggcgttgaggcacaagaggaagccttaggcctggtgggcgcacaggcgccaaccacggaagagcaagaggcagccgtgagctcaagcagtcccctggtccccggaactctggaggaagtcccggctgctgaatccgccggccccccccagtccccacagggcgcaagcgctctgccaaccactatcagcttcacttgctggcgccagccaaatgagggatcaagttctcaagaggaagagggccctagtacttcccccgacgctgagagcctcttccgagaagctctgtcgaataaggtggacgaactcgcccacttcctgctgaggaagtatcgggctaaggaactggtgactaaggctgagatgctcgagagagtgatcaagaattataaacggtgtttccccgttatcttcgggaaagcttctgaatcattaaagatgattttcggaatcgacgtgaaggaggtggacccctag

SEQ ID NO: 24587 - DNA, 726 bp, Artificial Sequence
  derived and/or modified sequence
atgagcagcgagcagaagagccagcactgcaagcccgaggagggcgtagaagctcaggaggaagccctggggctggtgggggcccaggcgccgacgacggaagaacaggaggcagccgtttcttcttcctctccgctggtacccggcacactggaagaggtccccgccgcagagtccgctggcccgccacagtccccgcagggagcatcggccctgcctaccacaatatcatttacctgttggaggcagcctaatgagggctcatccagccaggaagaggagggacccagtactagcccagatgccgaatccctctttcgagaggctctaagcaataaagtggatgaactagcccacttcctgctccgaaagtaccgcgcaaaagaactggtgacaaaggcggagatgctggaaagggtgattaaaaactacaaacggtgcttccctgtgatcttcggcaaggcaagtgagtcactgaagatgatttttggcattgacgtgaaagaggttgaccccgcttccaacacatataccctcgtgacttgtcttggtctgtcttacgatgggctgctgggtaacaaccagatattccccaagactggactgcttataatcgtgcttgggactatcgcaatggagggagactccgcttcggaggaggaaatctgggaggaattaggcgttatgggagtctacgacgggcgcgaacacaccgtgtatggctag

SEQ ID NO: 24588 - DNA, 726 bp, Artificial Sequence
  derived and/or modified sequence
atgagcagcgagcagaagagccagcactgcaagcccgaggagggcgtagaagctcaggaggaagccctcggactcgtgggagcccaagcacctactaccgaggaacaggaggctgctgtaagctctagctctcccctggtgccagggactcttgaggaggtccctgccgcagagagcgcaggacctcctcaatctcctcaaggcgcatcggctctacctaccaccattagctttacgtgttggcgccagcctaatgagggctcatcctcacaagaggaggagggacctagcacctcaccagacgccgagagtctgttccgtgaggcactcagtaacaaggtcgatgagctggcccattttctcttaagaaagtaccgggccaaagagctcgtgacgaaggccgagatgctggagcgggttattaagaactacaagagatgttttcccgtcatctttggtaaagcctccgaatctctgaagatgatcttcggcatcgatgtgaaagaagtggatcccgcgtccaacacctatacgttggttacttgtctgggtctgtcgtacgacggattactggggaacaaccagatctttcccaaaaccggtctcctgattattgtgctgggtaccattgccatggagggagactctgcctcggaggaggaaatttgggaggagctgggcgtgatgggcgtctacgatgggcgtgagcacaccgtgtacgggtag

SEQ ID NO: 24589 - DNA, 654 bp, Artificial Sequence
  derived and/or modified sequence
atgagcagcgagcagaagagccagcactgcaagcccgaggagggcgtagaagctcaggaagaagctctcgggctggtgggcgcacaggctccgacgactgaagagcaggaggcggcggtatcaagctccagtccccttgtccctggcaccctcgaggaagtgcctgcggcggaaagtgcaggaccgccccagagccctcagggtgcctcggccctgccaacaactatatcctttacttgctggcggcagcccaatgagggcagcagtagtcaggaggaggagggcccgtcaacaagtcccgacgccgagtctttgttccgagaggctctgagtaataaggtggacgaacttgcccattttctgctgagaaagtatcgcgctaaggagttagtgaccaaggcagaaatgctggagcgcgtgataaaaaactacaagagatgttttcccgtgatttttggtaaggcaagtgaaagcttaaagatgatctttggaatcgacgttaaagaggtggacccggctagtaatacatacactctcgtcacgtgcctcggcctgtcttatgacggcctcctgggtaataaccaaatttttcccaaaacaggactcttaatcatcgtcctgggaactattgccatggaaggggattccgcctag

SEQ ID NO: 24590 - DNA, 726 bp, Artificial Sequence
  derived and/or modified sequence
atgagcagcgagcagaagagccagcactgcaagcccgaggagggcgtagaggcccaagaggaggcacttggattggttggagcccaggctccaacgacggaggagcaggaggcggccgtttcctcatcctcgccacttgtccctgggactttggaggaagtccccgccgccgagagcgcagggccccctcagtcacctcagggggcctcagcactccctacaacaatatcctttacatgctggaggcagccaaatgagggttctagctcccaagaagaggaaggaccctctacgagtcccgatgctgagagcctgtttagagaagctctgtcaaataaagtagacgaattggcccactttcttcttcgcaagtacagagcgaaagagctagtgactaaagcggagatgttagagcgggtcattaagaattataagcggtgctttcctgtaatttttggcaaggcctccgagtctctgaagatgatcttcggtatcgatgtaaaggaggtggaccccgcttcaaatacttatacactggttacttgcctgggactgagctatgacgggctgttaggcaataatcagatctttccgaagacgggtctgctaataatcgttctcggcactattgccatggagggcgacagcgcaagcgaggaggagatctgggaagaactgggggttatgggcgtgtacgacggacgagaacatacagtgtacggctag

SEQ ID NO: 24591 - DNA, 954 bp, Artificial Sequence
  derived and/or modified sequence
atgtcctctgaacagaagagccagcattgcaagcccgaagaaggcgttgaggcacaagaggaagcactcggtctggtgggagcacaggcgcctacaaccgaagagcaggaggctgcagtatccagctcctcaccactggtcccaggcactctcgaagaggtgcccgctgctgaaagcgccggaccccctcagagtccccagggcgctagcgcattgccaacgactatctcctttacctgctggagacagccaaacgaaggtagttcctcacaggaggaggaaggaccctcaaccagccccgacgccgaaagcctgttcagggaagcactatctaacaaagtggatgagctggcccatttcctgctgcggaaatatcgcgctaaagagttagttacgaaggccgagatgttggagcgggtcataaaaaattacaagagatgcttccccgtgatctttggaaaggccagtgagtcacttaagatgatcttcggcatagacgtaaaggaagtggatcccgcatcgaatacatacacgctggtgacctgtctcggattgtcttatgatggccttctaggtaacaaccagatctttccaaaaaccggccttctcattatcgttcttggcactattgctatggaaggcgattcagcgtcagaggaagaaatttgggaggagctgggggtgatgggtgtgtacgatggcagggaacatactgtatatggggagccaagaaagttgcttacgcaggactgggtgcaggaaaattatttggaataccgacaggtcccaggctcaaatcctgcccgatacgaatttctgtgggggcctcgtgctctggcggaaaccagttacgtcaaggtgctggaacatgtggtaagagtcaacgcacgcgtgcggatcgcttaccctagtctgcgggaggccgcactgttggaggaggaggaaggtgtgtag

SEQ ID NO: 24592 - DNA, 954 bp, Artificial Sequence
  derived and/or modified sequence
atgtcaagtgagcagaaatcgcaacactgcaaacctgaagagggagtggaggcccaggaagaagcactcgggctcgttggtgcccaggccccaaccacagaggagcaggaggctgctgtttcctcttcctccccgctcgtgcctggtactctcgaagaagtccccgctgcagagagcgctggcccacctcaaagtcctcagggagcttctgccctgcctaccactatatctttcacgtgctggagacagccaaacgagggtagctccagtcaggaggaggaaggtccaagcacctccccggacgctgagtcattatttagagaggccttgtcaaataaggtggacgagcttgctcactttctactccggaaatacagagcaaaggaattggtgacaaaagcagagatgctagaaagggtgattaagaactacaagaggtgttttcccgtaatttttggtaaagcaagcgagtctctaaaaatgatttttggtatcgacgtcaaggaggtggaccctgcttcaaacacttatacgctcgtgacctgtctaggcctgagttacgatggacttttaggaaataatcaaatttttcctaaaaccggtctactaatcatcgtattaggcacaatcgccatggagggcgacagcgctagtgaggaggaaatttgggaagagttgggagttatgggtgtgtacgatggcagggaacatactgtttatggtgaaccacgcaaacttttaacacaggattgggtacaggagaattacctcgaatacagacaggtccctggcagcaaccctgctcggtacgagttcctgtggggacccagggccctcgccgagactagttacgtaaaggtactggaacatgttgtgagggttaatgccagagtgaggatcgcctatccgagcttacgagaggccgcacttttggaagaggaggagggcgtgtag

SEQ ID NO: 24593 - DNA, 954 bp, Artificial Sequence
  derived and/or modified sequence
atgtcatccgagcagaagagtcagcactgtaagccagaggaaggagtcgaagctcaggaagaagctctggggttggtcggggctcaagcacctactaccgaggaacaggaagcggcagtgagttcctcctcccccttagtccctggcaccctggaggaggtgccagccgcagaatcagcgggaccacctcagtctccgcagggcgctagcgctcttcctactaccatcagttttacctgttggcgccaaccgaacgagggctcctcatcacaggaagaggaaggtccttctaccagtcccgacgcagaatcactgtttagggaagctcttagcaataaggtggacgagctggctcactttttgctccgaaagtatagggctaaggaactggtcaccaaagcagagatgcttgaacgcgtgatcaagaactataagcgctgcttcccagttatttttggcaaagccagtgaatcactgaagatgatctttggaatcgacgtgaaggaagtggatccagcttctaatacctatactctcgtcacatgtctcggcttgtcttatgacggccttctgggtaacaaccaaatttttcctaagaccggtctcctgatcatcgtactgggcaccattgcaatggagggagactcagctagcgaggaagaaatctgggaagaattgggagtaatgggagtgtacgatggccgagaacacacagtgtacggcgaacccagaaagctcctgacgcaggactgggtgcaggaaaactacctggagtacaggcaggtacctgggagcaacccagcacgttacgagtttctatggggtcctagggcactcgccgagacgtcctatgtgaaagtgcttgagcacgtcgttcgtgtcaatgccagagtgaggattgcctacccctccttgcgggaggcagccctgttggaggaagaggagggcgtgtag

SEQ ID NO: 24594 - DNA, 954 bp, Artificial Sequence
  derived and/or modified sequence
atgtcaagtgaacagaagagtcagcactgcaaacctgaggaaggagtcgaggcgcaagaggaggctctgggcctggttggtgcccaggcgccaactactgaagagcaggaagccgctgtctcttcatcatctccccttgtgccagggacgctggaggaggtccccgctgctgaatcggccggtcctcctcagtcaccacagggggcttctgccttacccactaccatctccttcacttgctggagacagccaaatgagggaagtagttctcaagaggaagaggggcctagcacatcaccagatgcagaaagccttttccgcgaggccctgagtaacaaggtggatgaactggcacattttctgctgcgtaaatacagggccaaagagcttgtgacgaaggccgaaatgctagaacgtgttattaagaactataaacgatgttttcctgtaattttcggcaaggcgtccgagtccctcaagatgatctttggaatcgatgtgaaggaggttgatcctgcctcaaacacatacaccctggtgacttgcctaggtttatcttacgatgggctgcttggaaacaaccagatctttccaaaaacaggactgcttatcatcgtgctgggtaccatcgcaatggaaggcgattccgcttcagaagaggaaatctgggaggagctcggagtaatgggggtgtacgatgggagggagcatactgtgtatggcgaaccgcgaaaactgcttactcaagattgggtgcaggaaaattaccttgaatacaggcaagtccccggaagtaatccggcacgctacgaattcctatggggacccagggcgctggccgaaactagctatgttaaggtcctggagcacgtggtccgggtgaacgcccgagtaaggatagcttacccatcgctacgcgaggctgcactgctggaggaggaagagggggtgtag

SEQ ID NO: 24595 - DNA, 954 bp, Artificial Sequence
  derived and/or modified sequence
atgagctccgaacagaagagtcagcattgcaaacccgaagagggagttgaggcccaggaggaggccctggggctggttggcgcacaagcccctaccacagaggaacaagaagctgccgtgagcagctcttcacccctcgttcctggaactctggaggaggttccagctgcggagtcagcgggtccgcctcagtccccacagggtgcctcagcattgcccacaaccatcagctttacctgttggagacagcccaacgaaggatcatcttcccaagaggaggaaggaccctccacttctcccgacgccgaatcgctgttccgagaagctctcagcaacaaggtcgatgaactagcacattttctgctgaggaaatatagagccaaagagctcgtgaccaaggccgagatgcttgagcgcgtgataaaaaattataagaggtgcttcccggtcatcttcggcaaggcttctgaaagtctgaagatgatttttgggattgatgtgaaggaagttgatcccgcaagcaatacctacaccctcgtaacatgtctcggcctcagctatgacggccttctgggtaataatcaaatttttcccaagactggtctcctgattatagtgctcggaacaatcgccatggagggcgactctgcttctgaggaagagatttgggaggagctaggtgtgatgggagtgtacgatggcagagaacacacagtgtatggtgaaccccgaaagctcctcacccaggattgggtgcaggagaattacttggaatacaggcaagtccccggtagcaaccccgctcgctacgagtttctgtggggccctcgcgcactcgctgagacctcatacgttaaagtgctcgagcacgttgtaagagtaaatgcaagggttcgcatcgcatatccaagtctgcgtgaggctgctctcttggaggaagaagaaggtgtgtag

SEQ ID NO: 24596 - DNA, 954 bp, Artificial Sequence
  derived and/or modified sequence
atgtcgagtgagcagaagtcccagcactgcaaaccagaggagggtgtcgaagcccaggaggaggcactcggcctggtgggcgctcaggcgcctacaaccgaggagcaggaagccgctgtctcttcttcctctcccctggtccccggtaccttggaagaggtgcccgctgccgagagcgctggacctcctcagagcccccagggggcatccgccctgccgactacaatatccttcacttgttggagacagccaaacgaaggctcctcctcccaagaggaagaaggaccctcgacctcaccagacgccgagagtttatttcgagaggcgctgagtaacaaggtggatgagttagcccatttcctgctgcgcaagtaccgcgcaaaagagctagtgactaaggccgaaatgctggagcgagtgattaagaactataaaagatgtttcccagtgatttttggaaaggcttcagagagcctgaagatgattttcggtatagatgttaaagaggtggacccggctagcaacacttatacgcttgtgacatgcctgggactcagctacgacgggctcctgggtaataatcaaatcttcccgaagacaggactcttaattattgtactggggacaatcgcaatggaaggagattcggctagcgaagaagaaatttgggaagagctcggagtgatgggcgtgtatgacggacgagagcacaccgtgtacggtgaacctcgtaaactcctaacccaggattgggtgcaagaaaactatctggagtaccgacaggtgcccggatccaaccccgctcgatacgaattcctgtggggtcctcgcgcattggcagaaacaagttatgtcaaagttctggagcacgtggtgcgcgtgaacgctagagtgaggatagcctacccttcattgagagaggccgctcttctggaggaggaggagggcgtatag

SEQ ID NO: 24597 - DNA, 954 bp, Artificial Sequence
  derived and/or modified sequence
atgtcttcagagcagaagtcacagcactgtaaacctgaagagggagtcgaggcccaggaggaggctctggggttagtaggggcacaagccccaacaaccgaggaacaggaggcagctgtctcatcaagttccccgctggtcccgggaacactggaagaggtcccagcggctgaaagtgctggtccacctcagtctcctcagggtgccagtgctttgcccaccactatttcctttacttgctggcgccagcctaacgagggatccagttcacaggaagaggaaggtccttcaacaagccctgacgcagagtcgctgttcagagaggctctcagtaacaaagtcgacgagctggcccattttttattgcgcaagtaccgggctaaagaacttgtcacaaaggccgagatgttagagagagtcattaagaactacaaaagatgtttccctgtgatctttgggaaagcttctgaatccctgaaaatgattttcgggatcgatgtcaaggaggtggaccctgcctctaatacttacacgctggtcacatgtctcggcttatcttacgacggccttctgggaaataatcagatcttcccaaaaacaggcctgttgattatagttctggggacgatcgccatggagggggactccgcaagcgaggaggagatttgggaggagctgggtgtcatgggggtatacgatggacgggaacacacagtgtatggcgagccacgcaagctgctcacacaggattgggtgcaggagaactatctagagtaccggcaagtacctgggtccaatcccgcaaggtacgagttcctgtggggccctcgcgctttggcagagacctcttacgttaaagttctagaacacgtcgtcagggtgaacgcccgagtgaggatagcttacccgagtttgcgagaggctgccctcctggaagaagaggagggcgtatag

SEQ ID NO: 24598 - DNA, 693 bp, Artificial Sequence
  derived and/or modified sequence
atgtcaagcgagcagaaaagccaacactgtaaaccggaggaaggagtagaggcacaggaggaggccctgggccttgtgggcgctcaggctcctacaaccgaggagcaagaggccgctgtatcatcctctagtcccctggtaccgggaacactggaggaggtgccagccgctgaatcagcagggccaccacagtcccctcagggggcatcggcgttacctacaactatttcctttacttgttggaggcaacctaatgaagggagcagttcacaagaagaggagggcccatctacatcgcccgatgctgagtccttattccgggaagctctgtctaacaaggtagatgaactggcccattttttgcttcggaagtacagggcgaaagagcttgtaacaaaggccgagatgctggaacgcgtgatcaagaactataagcgatgctttccggtcatttttggtaaggccagtgagtcactgaaaatgatctttgggattgatgtgaaggaggtggacccagcttctaacacatacacactggtgacttgccttggcctcagttacgacggcctcttgggtaacaatcaaattttccccaagacagggcttcttattatcgtgctcggcacaatcgcaatggagggggactctgcgtccgaagaggagatttgggaggaactgggagtcatgggttag

SEQ ID NO: 24599 - DNA, 654 bp, Artificial Sequence
  derived and/or modified sequence
atgagcagcgaacagaaatcacagcactgcaaacccgaagaaggcgtggaggctcaggaagaagctcttgggcttgtcggagcgcaggcgcctacaacggaagaacaggaggccgctgtaagttccagttccccccttgtcccgggtacgctcgaggaagtaccagctgcagagagtgccggtcctccccagtcgccgcagggcgcatcggcccttcccacaaccatttctttcacgtgttggaggcagcccaatgaagggtcatcctctcaggaagaggagggacccagtaccagcccggatgccgagtcccttttccgcgaggccttgagcaacaaagtggatgaactggcccatttcctgctgcgaaaatacagagcgaaggaactcgtcaccaaagctgagatgctggaaagagtgataaagaactataagcgatgctttcctgttattttcggtaaggccagcgaaagtctgaaaatgatcttcggaattgacgtcaaggaagtggatcctgcctcgaatacgtacaccctcgttacttgtttgggcctgtcctacgacgggcttctgggcaataatcagatctttcctaagactggcctgttaatcattgtgctcgggactattgccatggagggcgattcagcctag

SEQ ID NO: 24600 - DNA, 726 bp, Artificial Sequence
  derived and/or modified sequence
atgtcttctgaacagaagagtcagcactgcaaaccagaggaaggagtggaagcacaggaagaggcactgggactggtgggtgctcaggcgccaaccactgaggagcaggaagccgcagtctcctccagctccccacttgtgccaggcacactcgaggaggtccccgctgcagagtctgcaggaccaccacagagcccacagggggcatcagctctcccgacaaccatcagtttcacgtgttggaggcaacctaacgagggatccagcagccaggaagaggagggcccttccacgagccctgacgctgagtctttgtttcgcgaggccctttctaacaaggttgatgagctcgcacacttcctgttgaggaagtatagggccaaagaactggtgactaaggccgaaatgctcgaaagggtcattaaaaactacaagaggtgttttcccgtaatcttcggtaaggcatcagaatctctgaagatgattttcggcattgatgtgaaggaggtcgacccagccagcaatacctacaccctcgtcacttgtctaggtctctcttacgacgggctcctcggcaataaccagatattcccaaagaccggattattgattatcgtgctgggaacgattgcaatggaaggggacagcgctagcgaggaggagatctgggaagagctgggagtgatgggtgtgtatgatggcagggagcacactgtttatggctag

SEQ ID NO: 24601 - DNA, 519 bp, Artificial Sequence
  derived and/or modified sequence
atgtcttccgagcagaagtctcagcactgcaagccagaagaaggggtggaagcccaagaggaagctctgggactcgtaggcgcacaagccccaaccacagaagagcaggaggcagctgtttcctcatcgagccccctggtcccaggaactctcgaggaagtacccgctgcggaatctgcaggtcctccacagtcacctcagggcgcttcagccctaccgactaccatttcttttacttgttggagacagccaaatgagggcagttcttcccaggaggaagaaggtcctagtactagtcctgatgccgagtcactgtttagggaagcgctctccaacaaggttgacgaactcgcccatttcctgctgaggaagtaccgcgctaaggagttggtcaccaaggccgagatgcttgagcgggttatcaagaattacaaacggtgcttccccgtaatttttggtaaagccagtgagtccttaaaaatgattttcggaatcgacgtcaaagaggttgatccgtag

SEQ ID NO: 24602 - DNA, 726 bp, Artificial Sequence
  derived and/or modified sequence
atgagttccgagcagaagagccagcactgtaaacctgaagaaggtgtcgaggcgcaggaggaagccctcgggctggtgggcgcacaggctccaaccacagaggaacaggaagccgctgtctcgtctagttcaccactggttcccggaacgctggaagaggttccagcagccgagagtgctggtccaccacagtccccccagggggcatccgctttacctaccacaatttcattcacttgttggagacagccgaacgaagggtctagcagccaggaggaggagggaccatcaacgtccccagatgccgaaagcttgtttagggaagcgctctccaataaggtggacgagctagcccactttctgctccgaaagtaccgggctaaggagctggttaccaaagccgaaatgctcgagcgggtgattaaaaattataagcgttgcttccctgtgattttcgggaaggcctctgaaagtctcaagatgattttcggtatcgacgtcaaggaggttgaccccgctagtaatacctatacgctcgttacctgcctggggctctcctacgacggcctcttgggcaataaccaaatcttcccaaagacaggcttgcttatcattgttctggggacaatcgcgatggaaggtgactcggcctccgaggaggagatctgggaagagttaggtgtcatgggcgtttatgatgggcgagaacacaccgtgtacggatag

SEQ ID NO: 24603 - DNA, 726 bp, Artificial Sequence
  derived and/or modified sequence
atgtctagtgagcagaaatcccagcattgcaagcccgaggagggtgtcgaagcgcaggaggaggccctgggcctggtcggggctcaagccccaactaccgaggaacaggaggctgcagtgagttcctcctctccacttgtacctggtacactggaagaggtgcctgcagccgagtcagcgggaccccctcagagcccacagggcgcatctgccctgcctacgaccattagctttacttgctggaggcagcccaatgaagggagttcgagccaggaggaggagggacccagtacctcccctgatgcagagtctttgttccgcgaagctttgagtaacaaagtggacgagctcgcccattttttactgcggaagtacagagccaaggaactcgtgacgaaggccgagatgctggagcgggtgattaagaactacaagaggtgtttccctgttatctttgggaaagcatctgagtcactcaagatgatctttggtattgacgtcaaggaggtggatcctgcctcaaacacttacaccttagttacctgtctgggcttgagctacgatggactcttaggtaataatcaaatttttcctaaaacaggccttcttattatcgtactcggcaccattgccatggagggcgatagtgcctctgaggaggagatctgggaggagctgggcgtcatgggggtctacgacggcagagaacacacagtgtacggttag

SEQ ID NO: 24604 - DNA, 654 bp, Artificial Sequence
  derived and/or modified sequence
atgagttcagagcaaaagagccaacactgtaaacctgaggagggagtcgaggcccaggaggaggctttgggccttgttggagcacaggccccaaccaccgaagagcaggaagctgctgtgagtagctcatcgccgctagttccagggaccctagaggaggtacccgctgctgaaagcgccggtcctccacagtctcctcagggcgcaagcgctcttccaactacgataagcttcacatgctggaggcagcccaacgagggctcctctagtcaggaagaagaagggccatcaacatccccagatgcggaaagcctattccgtgaggccctcagcaataaggtagatgaattggctcacttcctgttaaggaagtaccgcgcaaaggagctggtgacaaaggctgaaatgttggagagggttatcaagaattacaaacgatgtttcccagtgatcttcggaaaggcatcagagtcgttaaagatgattttcggcatcgacgttaaagaggtggaccccgctagcaacacgtacactctagtgacctgcctgggcttgtcttacgacggcttactgggcaacaatcagatctttcctaaaacgggactgcttatcattgttctcggaaccatagccatggaaggggactctgcgtag

SEQ ID NO: 24605 - DNA, 726 bp, Artificial Sequence
  derived and/or modified sequence
atgagcagtgagcagaagagtcagcattgcaaaccggaagagggcgtggaagcgcaggaggaggctctgggcttagttggcgcacaggctccgacaacagaggagcaggaggcagctgttagttcatctagtccacttgtgcccggtacgttggaggaagtgcctgccgctgagtcggctggaccaccacagtctccgcagggagcttccgcattacctaccacgatttcattcacatgctggagacagccaaatgagggttctagttcgcaagaagaggagggtccttcgacgagtccagacgccgagtcactgtttcgcgaggctctttcaaacaaagtcgatgaactcgcgcattttcttttgcgaaaataccgggctaaggaactcgtaacgaaagcagagatgttagagcgcgttattaagaactataaaagatgttttccagtaatctttggaaaggcttcagagtctcttaaaatgatttttgggattgacgtgaaggaggtggatccagcttcaaacacatacacccttgtcacctgcctgggcctgtcctacgatggactgctggggaataatcagatttttccaaagactggtttgcttattatcgttctcggaacaattgctatggagggggatagcgccagtgaggaagaaatttgggaggaactgggggttatgggggtgtatgatgggagggagcacacggtttatggatag

SEQ ID NO: 24606 - DNA, 954 bp, Artificial Sequence
  derived and/or modified sequence
atgagcagcgagcagaagagccagcactgcaagcccgaggagggcgtggaggcccaggaggaggccctgggcctggtgggcgcccaggcccccaccaccgaggagcaggaggccgccgtgagcagcagcagccccctggtgcccggcaccctggaggaggtgcccgccgccgagagcgccggccccccccagagcccccagggcgccagcgccctgcccaccaccatcagcttcacctgctggagacagcccaacgagggcagcagcagccaggaggaggagggccccagcaccagccccgacgccgagagcctgttcagagaggccctgagcaacaaggtggacgagctggcccacttcctgctgagaaagtacagagccaaggagctggtgaccaaggccgagatgctggagagagtgatcaagaactacaagagatgcttccccgtgatcttcggcaaggccagcgagagcctgaagatgatcttcggcatcgacgtgaaggaggtggaccccgccagcaacacctacaccctggtgacctgcctgggcctgagctacgacggcctgctgggcaacaaccagatcttccccaagaccggcctgctgatcatcgtgctgggcaccatcgccatggagggcgacagcgccagcgaggaggagatctgggaggagctgggcgtgatgggcgtgtacgacggcagagagcacaccgtgtacggcgagcccagaaagctgctgacccaggactgggtgcaggagaactacctggagtacagacaggtgcccggcagcaaccccgccagatacgagttcctgtggggccccagagccctggccgagaccagctacgtgaaggtgctggagcacgtggtgagagtgaacgccagagtgagaatcgcctaccccagcctgagagaggccgccctgctggaggaggaggagggcgtgtag

SEQ ID NO: 24607 - DNA, 693 bp, Artificial Sequence
  derived and/or modified sequence
atgagcagcgagcagaagagccagcactgcaagcccgaggagggcgtggaggcccaggaggaggccctgggcctggtgggcgcccaggcccccaccaccgaggagcaggaggccgccgtgagcagcagcagccccctggtgcccggcaccctggaggaggtgcccgccgccgagagcgccggccccccccagagcccccagggcgccagcgccctgcccaccaccatcagcttcacctgctggagacagcccaacgagggcagcagcagccaggaggaggagggccccagcaccagccccgacgccgagagcctgttcagagaggccctgagcaacaaggtggacgagctggcccacttcctgctgagaaagtacagagccaaggagctggtgaccaaggccgagatgctggagagagtgatcaagaactacaagagatgcttccccgtgatcttcggcaaggccagcgagagcctgaagatgatcttcggcatcgacgtgaaggaggtggaccccgccagcaacacctacaccctggtgacctgcctgggcctgagctacgacggcctgctgggcaacaaccagatcttccccaagaccggcctgctgatcatcgtgctgggcaccatcgccatggagggcgacagcgccagcgaggaggagatctgggaggagctgggcgtgatgggctag

SEQ ID NO: 24608 - DNA, 654 bp, Artificial Sequence
  derived and/or modified sequence
atgagcagcgagcagaagagccagcactgcaagcccgaggagggcgtggaggcccaggaggaggccctgggcctggtgggcgcccaggcccccaccaccgaggagcaggaggccgccgtgagcagcagcagccccctggtgcccggcaccctggaggaggtgcccgccgccgagagcgccggccccccccagagcccccagggcgccagcgccctgcccaccaccatcagcttcacctgctggagacagcccaacgagggcagcagcagccaggaggaggagggccccagcaccagccccgacgccgagagcctgttcagagaggccctgagcaacaaggtggacgagctggcccacttcctgctgagaaagtacagagccaaggagctggtgaccaaggccgagatgctggagagagtgatcaagaactacaagagatgcttccccgtgatcttcggcaaggccagcgagagcctgaagatgatcttcggcatcgacgtgaaggaggtggaccccgccagcaacacctacaccctggtgacctgcctgggcctgagctacgacggcctgctgggcaacaaccagatcttccccaagaccggcctgctgatcatcgtgctgggcaccatcgccatggagggcgacagcgcctag

SEQ ID NO: 24609 - DNA, 726 bp, Artificial Sequence
  derived and/or modified sequence
atgagcagcgagcagaagagccagcactgcaagcccgaggagggcgtggaggcccaggaggaggccctgggcctggtgggcgcccaggcccccaccaccgaggagcaggaggccgccgtgagcagcagcagccccctggtgcccggcaccctggaggaggtgcccgccgccgagagcgccggccccccccagagcccccagggcgccagcgccctgcccaccaccatcagcttcacctgctggagacagcccaacgagggcagcagcagccaggaggaggagggccccagcaccagccccgacgccgagagcctgttcagagaggccctgagcaacaaggtggacgagctggcccacttcctgctgagaaagtacagagccaaggagctggtgaccaaggccgagatgctggagagagtgatcaagaactacaagagatgcttccccgtgatcttcggcaaggccagcgagagcctgaagatgatcttcggcatcgacgtgaaggaggtggaccccgccagcaacacctacaccctggtgacctgcctgggcctgagctacgacggcctgctgggcaacaaccagatcttccccaagaccggcctgctgatcatcgtgctgggcaccatcgccatggagggcgacagcgccagcgaggaggagatctgggaggagctgggcgtgatgggcgtgtacgacggcagagagcacaccgtgtacggctag

SEQ ID NO: 24610 - DNA, 519 bp, Artificial Sequence
  derived and/or modified sequence
atgagcagcgagcagaagagccagcactgcaagcccgaggagggcgtggaggcccaggaggaggccctgggcctggtgggcgcccaggcccccaccaccgaggagcaggaggccgccgtgagcagcagcagccccctggtgcccggcaccctggaggaggtgcccgccgccgagagcgccggccccccccagagcccccagggcgccagcgccctgcccaccaccatcagcttcacctgctggagacagcccaacgagggcagcagcagccaggaggaggagggccccagcaccagccccgacgccgagagcctgttcagagaggccctgagcaacaaggtggacgagctggcccacttcctgctgagaaagtacagagccaaggagctggtgaccaaggccgagatgctggagagagtgatcaagaactacaagagatgcttccccgtgatcttcggcaaggccagcgagagcctgaagatgatcttcggcatcgacgtgaaggaggtggacccctag

SEQ ID NO: 24611 - protein, 798 aa, Artificial Sequence
  derived and/or modified sequence
MALQMFVTYSPWNCLLLLVALECSEASSDLNESANSTAQYASNAWFAAASSEPEEGISVFELDYDYVQIPYEVTLWILLASLAKIGFHLYHRLPGLMPESCLLILVGALVGGIIFGTDHKSPPVMDSSIYFLYLLPPIVLEGGYFMPTRPFFENIGSILWWAVLGALINALGIGLSLYLICQVKAFGLGDVNLLQNLLFGSLISAVDPVAVLAVFEEARVNEQLYMMIFGEALLNDGITVVLYNMLIAFTKMHKFEDIETVDILAGCARFIVVGLGGVLFGIVFGFISAFITRFTQNISAIEPLIVFMFSYLSYLAAETLYLSGILAITACAVTMKKYVEENVSQTSYTTIKYFMKMLSSVSETLIFIFMGVSTVGKNHEWNWAFICFTLAFCQIWRAISVFALFYISNQFRTFPFSIKDQCIIFYSGVRGAGSFSLAFLLPLSLFPRKKMFVTATLVVIYFTVFIQGITVGPLVRYLDVKKTNKKESINEELHIRLMDHLKAGIEDVCGHWSHYQVRDKFKKFDHRYLRKILIRKNLPKSSIVSLYKKLEMKQAIEMVETGILSSTAFSIPHQAQRIQGIKRLSPEDVESIRDILTSNMYQVRQRTLSYNKYNLKPQTSEKQAKEILIRRQNTLRESMRKGHSLPWGKPAGTKNIRYLSYPYGNPQSAGRDTRAAGFSDDDSSDPGSPSITFSACSRIGSLQKQEAQEIIPMKSLHRGRKAFSFGYQRNTSQEEYLGGVRRVALRPKPLFHAVDEEGESGGESEGKASLVEVRSRWTADHGHGRDHHRSHSPLLQKK

SEQ ID NO: 24612 - DNA, 2397 bp, Artificial Sequence
  derived and/or modified sequence
atggccctgcagatgttcgtgacctacagcccctggaactgcctgctgctgctggtggccctggagtgcagcgaggccagcagcgacctgaacgagagcgccaacagcaccgcccagtacgccagcaacgcctggttcgccgccgccagcagcgagcccgaggagggcatcagcgtgttcgagctggactacgactacgtgcagatcccctacgaggtgaccctgtggatcctgctggccagcctggccaagatcggcttccacctgtaccacagactgcccggcctgatgcccgagagctgcctgctgatcctggtgggcgccctggtgggcggcatcatcttcggcaccgaccacaagagcccccccgtgatggacagcagcatctacttcctgtacctgctgccccccatcgtgctggagggcggctacttcatgcccaccagacccttcttcgagaacatcggcagcatcctgtggtgggccgtgctgggcgccctgatcaacgccctgggcatcggcctgagcctgtacctgatctgccaggtgaaggccttcggcctgggcgacgtgaacctgctgcagaacctgctgttcggcagcctgatcagcgccgtggaccccgtggccgtgctggccgtgttcgaggaggccagagtgaacgagcagctgtacatgatgatcttcggcgaggccctgctgaacgacggcatcaccgtggtgctgtacaacatgctgatcgccttcaccaagatgcacaagttcgaggacatcgagaccgtggacatcctggccggctgcgccagattcatcgtggtgggcctgggcggcgtgctgttcggcatcgtgttcggcttcatcagcgccttcatcaccagattcacccagaacatcagcgccatcgagcccctgatcgtgttcatgttcagctacctgagctacctggccgccgagaccctgtacctgagcggcatcctggccatcaccgcctgcgccgtgaccatgaagaagtacgtggaggagaacgtgagccagaccagctacaccaccatcaagtacttcatgaagatgctgagcagcgtgagcgagaccctgatcttcatcttcatgggcgtgagcaccgtgggcaagaaccacgagtggaactgggccttcatctgcttcaccctggccttctgccagatctggagagccatcagcgtgttcgccctgttctacatcagcaaccagttcagaaccttccccttcagcatcaaggaccagtgcatcatcttctacagcggcgtgagaggcgccggcagcttcagcctggccttcctgctgcccctgagcctgttccccagaaagaagatgttcgtgaccgccaccctggtggtgatctacttcaccgtgttcatccagggcatcaccgtgggccccctggtgagatacctggacgtgaagaagaccaacaagaaggagagcatcaacgaggagctgcacatcagactgatggaccacctgaaggccggcatcgaggacgtgtgcggccactggagccactaccaggtgagagacaagttcaagaagttcgaccacagatacctgagaaagatcctgatcagaaagaacctgcccaagagcagcatcgtgagcctgtacaagaagctggagatgaagcaggccatcgagatggtggagaccggcatcctgagcagcaccgccttcagcatcccccaccaggcccagagaatccagggcatcaagagactgagccccgaggacgtggagagcatcagagacatcctgaccagcaacatgtaccaggtgagacagagaaccctgagctacaacaagtacaacctgaagccccagaccagcgagaagcaggccaaggagatcctgatcagaagacagaacaccctgagagagagcatgagaaagggccacagcctgccctggggcaagcccgccggcaccaagaacatcagatacctgagctacccctacggcaacccccagagcgccggcagagacaccagagccgccggcttcagcgacgacgacagcagcgaccccggcagccccagcatcaccttcagcgcctgcagcagaatcggcagcctgcagaagcaggaggcccaggagatcatccccatgaagagcctgcacagaggcagaaaggccttcagcttcggctaccagagaaacaccagccaggaggagtacctgggcggcgtgagaagagtggccctgagacccaagcccctgttccacgccgtggacgaggagggcgagagcggcggcgagagcgagggcaaggccagcctggtggaggtgagaagcagatggaccgccgaccacggccacggcagagaccaccacagaagccacagccccctgctgcagaagaagtag

SEQ ID NO: 24613 - DNA, 2397 bp, Artificial Sequence
  derived and/or modified sequence
atggccctgcagatgttcgtcacttactcaccttggaattgtctgttgctcctggtggccctggagtgctccgaggcaagtagtgacctcaacgagagtgcgaatagtactgctcaatatgctagcaatgcatggtttgccgcagcctctagtgaaccggaggaagggattagcgtgttcgaactggactatgattatgtacaaattccatacgaggtaaccctgtggatcctccttgcgtccctggcaaaaattgggttccatctgtaccacaggctcccggggttgatgcccgagtcatgcctgttaattctggtgggagccctcgtcggcggtataatattcggtaccgaccacaagagcccccctgtcatggattcctccatttattttttatacctgctccctccaatcgtcttggaggggggttactttatgcccacacggcccttttttgaaaatattggatctattctgtggtgggccgtgttgggggcactgataaatgccctcgggattggattgagcctgtacctgatttgccaggtcaaggccttcggcctgggagacgtaaacttactacaaaacctgctgttcgggtcccttatctcagcagtggatccagtggccgtattagccgtatttgaggaggctcgcgtaaacgagcagctgtacatgatgatatttggagaggcgctcctcaatgacggcatcacggttgtcctgtataatatgttaatagctttcacaaagatgcacaagttcgaggatattgagaccgtagatatcctggcaggttgcgctcggttcatcgtcgtaggattggggggtgtgctgttcggaatagtgttcgggttcatctctgcattcatcacaaggttcacgcagaacatcagtgcaattgaaccactgattgtgttcatgttctcttacctgtcttacctggctgctgaaaccttatacctgtccgggatccttgctataactgcctgtgcggttacaatgaaaaaatacgttgaagagaatgtctcccagaccagctacactacaattaagtattttatgaaaatgctgtcttccgtgagcgagaccttgatattcatattcatgggagtctccacagtcgggaaaaaccacgagtggaattgggccttcatctgtttcacgctggctttctgtcagatttggcgggccatcagcgtgttcgcactcttctacatctctaaccagtttcgcaccttccccttcagcatcaaggaccagtgtataattttctattcaggagttcgcggcgctggttcttttagcctcgcattcctccttcctctttccctgtttcctagaaaaaagatgttcgtcactgcaaccctggtggtgatttatttcacggtgtttatacaggggattaccgtcggtccactggtgcggtacctggatgtgaaaaagacgaacaaaaaggagtcaatcaatgaggaactgcatattcgcctcatggatcacctcaaggccggcattgaggatgtttgcgggcactggtctcactaccaggtgcgagacaagtttaagaagttcgaccaccgttatctccggaagattttaattcggaaaaaccttcccaagtcctccatagttagtttgtacaagaaactagaaatgaaacaagcaatcgagatggttgaaactggaatcctaagctctactgccttcagtatccctcaccaggcacagcgcatccagggcattaagcggcttagtcccgaggacgtcgagtccattagggatattctgacaagcaacatgtaccaggtgagacagcgcactctatcttacaacaagtataatctgaagccacagacatcagaaaagcaagccaaggagatcttaataaggaggcagaacacactacgggaatcaatgagaaagggacacagtttgccatggggcaaacccgcaggcacaaagaatatacgatacttgtcgtacccctacggaaatccacagagcgctggcagggacacaagggccgctgggttctctgacgatgacagtagcgaccccggatcccccagtatcaccttctcagcttgtagccgtataggcagcctacaaaaacaggaagcacaggaaatcattccaatgaagtcactgcaccgcggccgcaaggccttctcttttgggtaccaacggaatacatcccaggaagagtaccttggaggcgtccggagagttgctcttagacccaaacctctctttcatgccgtggacgaggaaggggaatctggcggagagtctgagggtaaggcctcgcttgtggaggtcaggtccagatggacagccgaccacgggcacggacgtgatcatcaccgctcacatagccccttgttgcaaaaaaaatag

SEQ ID NO: 24614 - DNA, 2397 bp, Artificial Sequence
  derived and/or modified sequence
atggccctgcagatgtttgtgacctacagcccctggaactgcctgctgctgctggtggccctggagtgcagcgaggccagcagtgacctgaatgaaagtgccaacagcacagcccagtatgccagcaatgcctggtttgctgctgccagcagcgagcctgaggagggcatctctgtgtttgagctggactatgactatgtgcagatcccctatgaggtgaccctgtggatcctgctggccagcctggccaagattggcttccacctgtaccaccggctgcccggcctgatgcctgagagctgcctgctgatcctggtgggcgccctggtgggcggcatcatctttggaacagaccacaagagcccccctgtgatggacagcagcatctacttcctgtacctgctgccccccatcgtgctggagggcggctacttcatgcccacccggcccttctttgaaaatattggcagcatcctgtggtgggccgtgctgggcgccctgatcaatgccctgggcatcggcctgagcctgtacctgatctgccaggtgaaggccttcggcctgggagatgtgaacctgctgcagaacctgctgtttggcagcctcatctctgctgtggaccctgtggccgtgctggccgtgtttgaggaggcccgggtgaatgagcagctgtacatgatgatctttggagaggccctgctgaatgatggcatcaccgtggtgctgtacaacatgctgattgccttcaccaagatgcacaagtttgaggacatcgagaccgtggacatcctggccggctgtgcccgcttcatcgtggtgggcctgggcggcgtgctgtttggcatcgtgtttggcttcatcagcgccttcatcacccgcttcacccagaacatcagcgccatcgagcccctgattgtgttcatgttctcctacctgagctacctggccgctgagaccctgtacctgagcggcatcctggccatcacagcctgtgctgtgaccatgaagaagtatgtggaggagaatgtgtcccagaccagctacaccaccatcaagtacttcatgaagatgctgagctctgtgtctgagaccctcatcttcatcttcatgggcgtgtccacagtgggcaagaaccacgagtggaactgggccttcatctgcttcaccctggccttctgccagatctggagggccatctctgtgtttgccctcttctacatcagcaaccagttccgcaccttccccttcagcatcaaggaccagtgcatcatcttctacagcggcgtgcggggggccggcagcttcagcctggccttcctgctgcccctgagcctcttccccaggaagaagatgtttgtgacagccaccctggtggtgatctacttcaccgtcttcatccagggcatcaccgtgggccccctggtgcgctacctggatgtgaagaagaccaacaagaaggagagcatcaatgaggagctgcacatccggctgatggaccacctgaaggccggcattgaagatgtgtgtggccactggagccactaccaggtgcgggacaagttcaagaagtttgaccaccgctacctgaggaagatcctgatcaggaagaacctgcccaagagcagcatcgtgtccctgtacaagaagctggagatgaagcaggccatcgagatggtggagaccggcatcctgagcagcacagccttcagcatcccccaccaggcccagaggatccagggcatcaagaggctgagcccagaagatgtggagagcatccgggacatcctgaccagcaacatgtaccaggtgcggcagaggaccctgagctacaacaagtacaacctgaagccccagaccagcgagaagcaggccaaggagatcctgatccggcggcagaacaccctgcgggagagcatgaggaagggccacagcctgccctggggcaagccagctggcaccaagaacatccgctacctgagctacccctacggcaacccccagagcgctggccgggacaccagggctgctggcttcagtgatgatgacagcagtgaccccggcagccccagcatcaccttcagcgcctgcagcagaattggcagcctgcagaagcaggaggcccaggagatcatccccatgaagagcctgcaccggggcaggaaggccttctcctttggctaccagaggaacaccagccaggaggagtacctgggcggcgtgagaagagtggccctgcggcccaagcccctcttccacgctgtggatgaggagggggagagcggcggggagagcgagggcaaggccagcctggtggaggtgcgcagccgctggacagctgaccacggccacggccgggaccaccacaggagccacagccccctgctgcagaagaagtag

SEQ ID NO: 24615 - DNA, 2397 bp, Artificial Sequence
  derived and/or modified sequence
atggccctgcagatgttcgtgacctacagcccctggaactgcctgttgcttctggttgccctggaatgttccgaagcctcgagcgatctgaacgaaagcgcaaattcgaccgcccaatatgccagcaacgcctggttcgcggcagccagcagtgaaccagaggaaggtatttccgtgttcgagctcgattatgactatgttcaaattccatacgaggttacactttggattttgctcgcttcactcgccaaaatcgggttccacctctatcatcgcctccctgggctgatgcccgaatcttgcctgctaatcctagtgggcgcgctcgtcggaggaattattttcggcaccgaccacaagtccccccccgtgatggattcttccatttattttctgtacctcctgccccctatcgttctcgaggggggatattttatgcctacgagacccttcttcgagaatatcggtagcatattgtggtgggctgttttgggagccctgatcaacgcgctgggcatcggattatcgttgtaccttatctgccaggtgaaagctttcggtctcggagatgtgaatctgctccagaatctgctcttcggctcacttatttccgcagtcgatcctgtggccgtgttagcagtgttcgaagaagcaagggtgaatgaacaactgtacatgatgatctttggggaggcactccttaatgacggcataactgtggtcctgtataacatgctaatcgctttcaccaagatgcacaagttcgaagacatcgaaaccgtagacatcctggctggatgtgcaaggttcatcgttgtcgggctgggtggggttttgttcggcatagtgttcggcttcattagcgcattcatcacccggttcacgcagaatatcagcgccatagagccactgatcgtgtttatgttctcctacctgtcatatctggctgctgagactctgtacctgagcggcatactggcaataaccgcgtgtgcggtcacgatgaaaaagtacgtggaagaaaatgtctcacaaacctcctacaccacaatcaagtatttcatgaagatgctctcttctgtctcagaaactctaatatttatatttatgggggtgagtaccgtgggtaaaaaccatgaatggaactgggcttttatctgcttcactcttgcattctgtcagatctggcgcgccatctccgtgtttgctctcttctacatttccaatcagtttcgcacctttccttttagcataaaggatcaatgtatcatcttctactcaggagttagaggtgcggggtccttctccctggccttcctcctgcctctctccctattcccacggaagaaaatgtttgtgaccgcaaccctcgtagtcatttacttcacagtgtttattcagggcatcactgttgggccactggtgaggtacctggatgttaagaagactaacaagaaagagtccatcaacgaggaactccacatacgcctgatggatcacctcaaggcggggatcgaggacgtgtgcggccactggtctcactaccaggtccgcgacaagttcaaaaagtttgaccacagatacctgcgaaagattctgattcgcaaaaatctgccaaagagctccatcgtgtctctttacaagaagttggagatgaaacaagctattgaaatggtcgagactggcatcttgtcttccaccgcgtttagtatcccacaccaggcccagagaatccaaggcatcaagcggctctctcccgaggatgtcgagtctatacgggatatcctgacgagtaacatgtatcaggtgcgccagcggactctctcttataataaatataacttgaaaccacaaactagcgaaaaacaggcaaaggaaattctaatcaggcgccagaacactctcagagaaagcatgaggaaaggccatagcctaccctggggaaaacctgcaggcaccaagaatattaggtacctgagttatccctacggtaatccacagtcagccggcagggacactcgagccgcggggttctccgatgatgactcaagcgatccagggagcccttctatcacgttttctgcctgctctcgcattggctccctgcagaaacaggaggcccaggagatcatccccatgaagtcgttgcaccgcggcaggaaagcatttagtttcggttaccagcggaatacttcacaagaagagtacctagggggggtccggcgggtcgcattacggccaaagcccctgtttcacgccgttgacgaggagggagagtccgggggcgagtcggagggcaaagccagtctcgtggaggtgagatcccggtggactgctgatcatgggcatgggcgggaccaccacaggagtcattctcccctcttgcagaagaagtag

SEQ ID NO: 24616 - DNA, 2397 bp, Artificial Sequence
  derived and/or modified sequence
atggccttgcagatgttcgtcacttatagtccctggaattgtctattgttgcttgtggctctggagtgttcagaggcaagcagtgaccttaacgaatcggctaattcaactgctcagtatgcatccaatgcgtggtttgctgctgcatcctctgaaccagaggaaggtattagcgtgttcgagctggactacgattacgtccagataccctatgaggtcacactgtggatcttattggcttcattggctaagatagggtttcatctgtatcacaggcttcccggactaatgcctgaaagttgtctcctcatactggttggggctctggtgggagggataatttttggaacagaccacaagtcccccccagtgatggatagttccatctactttctgtacctcctaccgccaattgtgctcgaaggaggctacttcatgcccacaagacccttcttcgaaaacatcggttcaatcttgtggtgggctgttcttggcgctctgatcaacgccctgggtatcggtctgtcactctacctgatttgccaggtgaaggcgttcgggctgggggatgtgaacctgcttcagaacctcctctttggatcgttaatatcagcagtcgatccagtggccgtgcttgccgttttcgaggaagctagagtgaacgaacagctatatatgatgatttttggtgaggccttgctgaacgacggcatcactgtggtcctttacaatatgttgattgccttcacaaagatgcacaagttcgaggacatagagactgtcgatattcttgcaggctgcgcacgcttcatcgtcgtgggcctcggcggagtgctattcgggatcgtcttcggattcatctcagcttttataacgcgattcacacagaatatctctgccattgagcctctcattgtttttatgtttagttacttgagctatctggccgcagaaactttgtatttgagcggcattctcgcaattacagcttgcgccgtgacgatgaagaaatatgtagaggagaacgtgtcccagacatcttacactaccatcaagtatttcatgaagatgttgtcgtcggtctcagaaacactcatattcatattcatgggagtctctacagtgggcaaaaaccacgagtggaactgggcctttatctgcttcacactcgctttttgtcaaatttggcgggcaatcagcgtttttgcactcttttacatcagtaaccagtttcgtacctttccattcagtatcaaagatcagtgcataattttttattcaggagttcgcggagccggaagcttttctttagcattcttgctccctcttagtctcttcccaagaaagaaaatgtttgtaacagccacgctcgtggtcatctatttcaccgtgttcatccaagggattacagtgggaccgctggtccggtatctggacgtcaaaaaaacaaataagaaggaatcgatcaatgaagagctgcacatccgtcttatggatcacctgaaagcaggcatcgaggatgtatgcggtcattggagccattaccaagtgcgtgataagttcaagaaatttgatcaccgatacttaagaaaaattctcattagaaagaacctccctaagagtagtatagtgtccctttataaaaaactggaaatgaagcaggccattgagatggtagagactggcattctctcctccactgccttctcaattccgcatcaggcacaaagaatacagggcataaagagactgtctcctgaggacgtggaaagtattagagatatcctaacgtccaacatgtaccaagtgcgacagcgaacactgtcctataataaatacaacctcaagccccaaacctccgagaagcaggccaaagagattttgatccgcaggcagaacacgttaagagaatctatgcgcaaaggccattcgctcccatggggaaagccagcaggaaccaagaatattcgctaccttagctatccttacggtaacccccaatccgccggtcgggatacaagggccgcaggattttctgacgatgactcttctgatcctgggtcaccgtctatcaccttcagcgcgtgtagtaggatcggcagccttcagaaacaggaggcacaggagatcatccccatgaagagcctccaccggggacgaaaagccttttctttcggctatcagcgcaacaccagccaggaggaataccttggcggagtgcggagggttgctctgcgccctaaacctctctttcacgccgtggatgaagaaggggaatctgggggagaatccgaaggcaaggcgtcacttgtggaagtgcgctcaagatggactgctgaccatggccacggcagagatcaccatcggagccacagccccctgttgcaaaaaaagtag

SEQ ID NO: 24617 - DNA, 4138 bp, Artificial Sequence
  derived and/or modified sequence
agacagggaaggtttcctttcctcattagaaggactccagtgatctgtggaatgagcactacagtatccttttaaattttcacccacaagacaaagccagtatgcagtgaaatgaggaaatgcctttaagtgaagagatttttatttctttcataaattgctcaagccatgattggatggaggtcctccaggtagctccatggactttaacaagtctattgaataactgcatttgagttggaagctgagttgcctgaacacaaacgatttaaaccagattagaaagtgtctacatacagagctcaataacacactcggaatcttcttgggaggacccacagactgtacctatattacttttgacccaggtggatgcagtcactctctagaagcctccccgacttcagatgtgtggcacacatccacacaggggtgtaggtaggagaagcccacaggaatggctctgcagatgttcgtgacttacagtccttggaattgtttgctactgctagtggctcttgagtgttctgaagcatcttctgatttgaatgaatctgcaaattccactgctcagtatgcatctaacgcttggtttgctgctgccagctcagagccagaggaagggatatctgtttttgaactggattatgactatgtgcaaattccttatgaggtcactctctggatacttctagcatcccttgcaaaaataggcttccacctctaccacaggctgccaggcctcatgccagaaagctgcctcctcatcctggtgggggcgctggtgggcggcatcatcttcggcaccgaccacaaatcgcctccggtcatggactccagcatctacttcctgtatctcctgccacccatcgttctggagggcggctacttcatgcccacccggcccttctttgagaacatcggctccatcctgtggtgggcagtattgggggccctgatcaacgccttgggcattggcctctccctctacctcatctgccaggtgaaggcctttggcctgggcgacgtcaacctgctgcagaacctgctgttcggcagcctgatctccgccgtggacccagtggccgtgctagccgtgtttgaggaagcgcgcgtgaacgagcagctctacatgatgatctttggggaggccctgctcaatgatggcattactgtggtcttatacaatatgttaattgcctttacaaagatgcataaatttgaagacatagaaactgtcgacattttggctggatgtgcccgattcatcgttgtggggcttggaggggtattgtttggcatcgtttttggatttatttctgcatttatcacacgtttcactcagaatatctctgcaattgagccactcatcgtcttcatgttcagctatttgtcttacttagctgctgaaaccctctatctctccggcatcctggcaatcacagcctgcgcagtaacaatgaaaaagtacgtggaagaaaacgtgtcccagacatcatacacgaccatcaagtacttcatgaagatgctgagcagcgtcagcgagaccttgatcttcatcttcatgggtgtgtccactgtgggcaagaatcacgagtggaactgggccttcatctgcttcaccctggccttctgccaaatctggagagccatcagcgtatttgctctcttctatatcagtaaccagtttcggactttccccttctccatcaaggaccagtgcatcattttctacagtggtgttcgaggagctggaagtttttcacttgcatttttgcttcctctgtctctttttcctaggaagaaaatgtttgtcactgctactctagtagttatatactttactgtatttattcagggaatcacagttggccctctggtcaggtacctggatgttaaaaaaaccaataaaaaagaatccatcaatgaagagcttcatattcgtctgatggatcacttaaaggctggaatcgaagatgtgtgtgggcactggagtcactaccaagtgagagacaagtttaagaagtttgatcatagatacttacggaaaatcctcatcagaaagaacctacccaaatcaagcattgtttctttgtacaagaagctggaaatgaagcaagccatcgagatggtggagactgggatactgagctctacagctttctccataccccatcaggcccagaggatacaaggaatcaaaagactttcccctgaagatgtggagtccataagggacattctgacatccaacatgtaccaagttcggcaaaggaccctgtcctacaacaaatacaacctcaaaccccaaacaagtgagaagcaggctaaagagattctgatccgccgccagaacaccttaagggagagcatgaggaaaggtcacagcctgccctggggaaagccggctggcaccaagaatatccgctacctctcctacccctacgggaatcctcagtctgcaggaagagacacaagggctgctgggttctcagatgatgacagcagtgatccaggatccccatccatcacgttcagcgcatgctctcggatagggtcacttcagaagcaagaggcacaagaaataataccaatgaagagcctacacagaggaaggaaggcattcagctttggttatcaaagaaacacaagccaagaagagtacttgggtggagtaaggagggtggccttaagacccaaacctctgtttcatgcagtggatgaggagggtgagtctggaggggagagtgagggcaaggcctctttggttgaggttcggtcgaggtggacagctgaccatggacacggcagggaccatcacaggtcccatagtcctttgctccaaaaaaaatagtgttattgtccacaagattgttttggtgtttctcaagagtctgtcttcctataactgtgaaaggaggatttctggaattcagaagagagctattgagtttgctgtgttgaagctattaaacatggatctataagcagcaggaagattttttccaaggactgggagcaaacttgcaggctctgccatgtacttattgtggggtacctttagatgaattccctgtgagtgagagaagttgatcaccccaggaattagtcactaagaattcctaagaactttctatcaaaagcattggatccaagccatatattgaaatacaagcgtgattaatcagtaattcacattgccgatatgcatatgcaacttataatcaaatagaactagaagagactttgaagtcacctgactcagccccttgtgtttacagacaaggacatgtagtccaaggttgcatggtgagttcacagtcggattgtcctccctccaaactgaaactaatttgattttgatttcatattcaatatgcaataattatgttctatcagagataaaatttgttatgaatttgctttatttaatcagtagcaatgatagatgtgatgcatactataggattaatctgtgaacaatgggtttacggtctatttcataattgaaatatttattttaaaaatgaatattagaaacaaaacagccataaacagagtttaatagcaatgatgttaacaacaagtatttataaggggtgcatttgtagggtgtgacattttaccctagggtataaaactatttttcttttattattattattattattattatactttaagttttagggtacatgtgcacattgtgcaggttagttacatatgtatacatgtgccatgctggtgtgctgcacccgctaactcgtcatctagcattaggtgtatctcccaatgctatccctcccccctccccccaccccacaacagtccccagagtgtgatgttccccttcctgtgtccatgtgatctcattgttcaattcccacctatgagtgagaatatgcggtgtttggttttttgttcttgggatagtttactgagaatgatgatttccaatttcatccatgtccctacaaaggacatgaactcatcattttttatggctgcatggtattccatggtgtatatgtgccacattttcttaatccagtctatcattgttggacatttgggttggttccaagtctttgctattgtgaataatgccgcaataaacatacgtgtgcatgtgtcttta

SEQ ID NO: 24618 - protein, 436 aa, Artificial Sequence
  derived and/or modified sequence
MSVSARSAAAEERSVNSSTMGQQKNLEGYVGFANLPNQVYRKSVKRGFEFTLMVVGESGLGKSTLINSLFLTDLYSPEYPGPSHRIKKTVQVEQSKVLIKEGGVQLLLTIVDTPGFGDAVDNSNCWQPVIDYIDSKFEDYLNAESRVNRRQMPDNRVQCCLYFIAPSGHGLKPLDIEFMKRLHEKVNIIPLIAKADTLTPEECQQFKKQIMKEIQEHKIKIYEFPETDDEEENKLVKKIKDRLPLAVVGSNTIIEVNGKRVRGRQYPWGVAEVENGEHCDFTILRNMLIRTHMQDLKDVTNNVHYENYRSRKLAAVTYNGVDNNKNKGQLTKSPLAQMEEERREHVAKMKKMEMEMEQVFEMKVKEKVQKLKDSEAELQRRHEQMKKNLEAQHKELEEKRRQFEDEKANWEAQQRILEQQNSSRTLEKNKKKGKIF

SEQ ID NO: 24619 - protein, 436 aa, Artificial Sequence
  derived and/or modified sequence
MSVSARSAAAEERSVNSSTMVQQKNLEGYVGFANLPNQVYRKSVKRGFEFTLMVVGESGLGKSTLINSLFLTDLYSPEYPGPSHRIKKTVQVEQSKVLIKEGGVQLLLTIVDTPGFGDAVDNSNCWQPVIDYIDSKFEDYLNAESRVNRRQMPDNRVQCCLYFIAPSGHGLKPLDIEFMKRLHEKVNIIPLIAKADTLTPEECQQFKKQIMKEIQEHKIKIYEFPETDDEEENKLVKKIKDRLPLAVVGSNTIIEVNGKRVRGRQYPWGVAEVENGEHCDFTILRNMLIRTHMQDLKDVTNNVHYENYRSRKLAAVTYNGVDNNKNKGQLTKSPLAQMEEERREHVAKMKKMEMEMEQVFEMKVKEKVQKLKDSEAELQRRHEQMKKNLEAQHKELEEKRRQFEDEKANWEAQQRILEQQNSSRTLEKNKKKGKIF

SEQ ID NO: 24620 - protein, 235 aa, Artificial Sequence
  derived and/or modified sequence
MSVSARSAAAEERSVNSSTMGQQKNLEGYVGFANLPNQVYRKSVKRGFEFTLMVVGESGLGKSTLINSLFLTDLYSPEYPGPSHRIKKTVQVEQSKVLIKEGGVQLLLTIVDTPGFGDAVDNSNCWQPVIDYIDSKFEDYLNAESRVNRRQMPDNRVQCCLYFIAPSGHGLKPLDIEFMKRLHEKVNIIPLIAKADTLTPEECQQFKKQIMKEIQEHKIKIYEFPETAKKKKKKK

SEQ ID NO: 24621 - DNA, 1311 bp, Artificial Sequence
  derived and/or modified sequence
atgagcgtgagcgccagaagcgccgccgccgaggagagaagcgtgaacagcagcaccatgggccagcagaagaacctggagggctacgtgggcttcgccaacctgcccaaccaggtgtacagaaagagcgtgaagagaggcttcgagttcaccctgatggtggtgggcgagagcggcctgggcaagagcaccctgatcaacagcctgttcctgaccgacctgtacagccccgagtaccccggccccagccacagaatcaagaagaccgtgcaggtggagcagagcaaggtgctgatcaaggagggcggcgtgcagctgctgctgaccatcgtggacacccccggcttcggcgacgccgtggacaacagcaactgctggcagcccgtgatcgactacatcgacagcaagttcgaggactacctgaacgccgagagcagagtgaacagaagacagatgcccgacaacagagtgcagtgctgcctgtacttcatcgcccccagcggccacggcctgaagcccctggacatcgagttcatgaagagactgcacgagaaggtgaacatcatccccctgatcgccaaggccgacaccctgacccccgaggagtgccagcagttcaagaagcagatcatgaaggagatccaggagcacaagatcaagatctacgagttccccgagaccgacgacgaggaggagaacaagctggtgaagaagatcaaggacagactgcccctggccgtggtgggcagcaacaccatcatcgaggtgaacggcaagagagtgagaggcagacagtacccctggggcgtggccgaggtggagaacggcgagcactgcgacttcaccatcctgagaaacatgctgatcagaacccacatgcaggacctgaaggacgtgaccaacaacgtgcactacgagaactacagaagcagaaagctggccgccgtgacctacaacggcgtggacaacaacaagaacaagggccagctgaccaagagccccctggcccagatggaggaggagagaagagagcacgtggccaagatgaagaagatggagatggagatggagcaggtgttcgagatgaaggtgaaggagaaggtgcagaagctgaaggacagcgaggccgagctgcagagaagacacgagcagatgaagaagaacctggaggcccagcacaaggagctggaggagaagagaagacagttcgaggacgagaaggccaactgggaggcccagcagagaatcctggagcagcagaacagcagcagaaccctggagaagaacaagaagaagggcaagatcttctag

SEQ ID NO: 24622 - DNA, 1311 bp, Artificial Sequence
  derived and/or modified sequence
atgagcgtgagcgccagaagcgccgccgccgaggagagaagcgtgaacagcagcaccatggtgcagcagaagaacctggagggctacgtgggcttcgccaacctgcccaaccaggtgtacagaaagagcgtgaagagaggcttcgagttcaccctgatggtggtgggcgagagcggcctgggcaagagcaccctgatcaacagcctgttcctgaccgacctgtacagccccgagtaccccggccccagccacagaatcaagaagaccgtgcaggtggagcagagcaaggtgctgatcaaggagggcggcgtgcagctgctgctgaccatcgtggacacccccggcttcggcgacgccgtggacaacagcaactgctggcagcccgtgatcgactacatcgacagcaagttcgaggactacctgaacgccgagagcagagtgaacagaagacagatgcccgacaacagagtgcagtgctgcctgtacttcatcgcccccagcggccacggcctgaagcccctggacatcgagttcatgaagagactgcacgagaaggtgaacatcatccccctgatcgccaaggccgacaccctgacccccgaggagtgccagcagttcaagaagcagatcatgaaggagatccaggagcacaagatcaagatctacgagttccccgagaccgacgacgaggaggagaacaagctggtgaagaagatcaaggacagactgcccctggccgtggtgggcagcaacaccatcatcgaggtgaacggcaagagagtgagaggcagacagtacccctggggcgtggccgaggtggagaacggcgagcactgcgacttcaccatcctgagaaacatgctgatcagaacccacatgcaggacctgaaggacgtgaccaacaacgtgcactacgagaactacagaagcagaaagctggccgccgtgacctacaacggcgtggacaacaacaagaacaagggccagctgaccaagagccccctggcccagatggaggaggagagaagagagcacgtggccaagatgaagaagatggagatggagatggagcaggtgttcgagatgaaggtgaaggagaaggtgcagaagctgaaggacagcgaggccgagctgcagagaagacacgagcagatgaagaagaacctggaggcccagcacaaggagctggaggagaagagaagacagttcgaggacgagaaggccaactgggaggcccagcagagaatcctggagcagcagaacagcagcagaaccctggagaagaacaagaagaagggcaagatcttctag

SEQ ID NO: 24623 - DNA, 1155 bp, Artificial Sequence
  derived and/or modified sequence
atggtggtgggcgagagcggcctgggcaagagcaccctgatcaacagcctgttcctgaccgacctgtacagccccgagtaccccggccccagccacagaatcaagaagaccgtgcaggtggagcagagcaaggtgctgatcaaggagggcggcgtgcagctgctgctgaccatcgtggacacccccggcttcggcgacgccgtggacaacagcaactgctggcagcccgtgatcgactacatcgacagcaagttcgaggactacctgaacgccgagagcagagtgaacagaagacagatgcccgacaacagagtgcagtgctgcctgtacttcatcgcccccagcggccacggcctgaagcccctggacatcgagttcatgaagagactgcacgagaaggtgaacatcatccccctgatcgccaaggccgacaccctgacccccgaggagtgccagcagttcaagaagcagatcatgaaggagatccaggagcacaagatcaagatctacgagttccccgagaccgacgacgaggaggagaacaagctggtgaagaagatcaaggacagactgcccctggccgtggtgggcagcaacaccatcatcgaggtgaacggcaagagagtgagaggcagacagtacccctggggcgtggccgaggtggagaacggcgagcactgcgacttcaccatcctgagaaacatgctgatcagaacccacatgcaggacctgaaggacgtgaccaacaacgtgcactacgagaactacagaagcagaaagctggccgccgtgacctacaacggcgtggacaacaacaagaacaagggccagctgaccaagagccccctggcccagatggaggaggagagaagagagcacgtggccaagatgaagaagatggagatggagatggagcaggtgttcgagatgaaggtgaaggagaaggtgcagaagctgaaggacagcgaggccgagctgcagagaagacacgagcagatgaagaagaacctggaggcccagcacaaggagctggaggagaagagaagacagttcgaggacgagaaggccaactgggaggcccagcagagaatcctggagcagcagaacagcagcagaaccctggagaagaacaagaagaagggcaagatcttctag

SEQ ID NO: 24624 - DNA, 708 bp, Artificial Sequence
  derived and/or modified sequence
atgagcgtgagcgccagaagcgccgccgccgaggagagaagcgtgaacagcagcaccatgggccagcagaagaacctggagggctacgtgggcttcgccaacctgcccaaccaggtgtacagaaagagcgtgaagagaggcttcgagttcaccctgatggtggtgggcgagagcggcctgggcaagagcaccctgatcaacagcctgttcctgaccgacctgtacagccccgagtaccccggccccagccacagaatcaagaagaccgtgcaggtggagcagagcaaggtgctgatcaaggagggcggcgtgcagctgctgctgaccatcgtggacacccccggcttcggcgacgccgtggacaacagcaactgctggcagcccgtgatcgactacatcgacagcaagttcgaggactacctgaacgccgagagcagagtgaacagaagacagatgcccgacaacagagtgcagtgctgcctgtacttcatcgcccccagcggccacggcctgaagcccctggacatcgagttcatgaagagactgcacgagaaggtgaacatcatccccctgatcgccaaggccgacaccctgacccccgaggagtgccagcagttcaagaagcagatcatgaaggagatccaggagcacaagatcaagatctacgagttccccgagaccgccaagaagaagaagaagaagaagtag

SEQ ID NO: 24625 - DNA, 1311 bp, Artificial Sequence
  derived and/or modified sequence
atgagcgtgtccgccagaagtgccgcagcagaggaacgttcagtgaatagcagcacaatgggccagcagaagaatctggaaggttacgtcggttttgccaatctccctaatcaggtatacagaaagtctgttaagagaggattcgagtttactctcatggtggtaggtgaatccgggctaggcaaatccactctgattaatagcctttttttaacagatctatacagccccgagtatccgggcccatcacacagaattaagaaaaccgttcaagtggagcagtctaaagtgcttatcaaagaaggcggtgtgcagttgctgttgactatagttgatacacccggattcggagatgctgttgacaactccaactgctggcagccagtaattgattacatagacagcaagttcgaagactatcttaatgcagagagccgggtaaacaggagacagatgcctgacaatcgagtgcagtgttgcctttatttcatcgcccccagtggccacgggctgaaaccgctggatatagagtttatgaagagacttcatgaaaaggtaaacataatacctctcatcgccaaggccgacacccttaccccagaggagtgtcagcagtttaagaagcagatcatgaaagagattcaagaacacaaaatcaaaatatatgaatttcccgagactgacgatgaggaggagaataagctggtcaaaaaaatcaaagataggctccctctggccgttgtgggctcgaatacgatcatcgaggtgaacggcaagagagtaagaggccggcagtatccgtggggcgtagctgaggtagaaaatggcgagcactgcgacttcaccattctgagaaacatgcttattagaacacacatgcaggacctgaaagatgtgacaaataatgtgcactacgaaaattatcgctccaggaagctggccgccgtgacatacaatggcgttgataataacaaaaataagggtcaattgactaagtctccgctggcacaaatggaagaggagcgtcgtgaacatgtggcaaagatgaaaaagatggagatggaaatggagcaggtctttgagatgaaagtgaaggaaaaagttcagaagttgaaggactccgaggcagaactgcaaagacgccatgaacagatgaaaaaaaaccttgaagcacagcataaagagctcgaggaaaagagaaggcagttcgaggatgagaaagctaattgggaggcacagcagcgcatactggaacaacaaaactccagtcggactctggagaagaataaaaagaagggaaagatcttttag

SEQ ID NO: 24626 - DNA, 1311 bp, Artificial Sequence
  derived and/or modified sequence
atgtctgtttcagcgcgctctgccgcagcggaagagcgaagcgtgaattctagcaccatggtacaacagaagaacttggaagggtatgtcggctttgccaacctacctaatcaggtgtaccgcaagagtgtcaagcgcgggtttgagttcaccctgatggtggtgggggagagcggactgggtaagagcaccctgattaacagtctgtttcttacagatctgtactctccagagtatcctggtccatctcatcggattaaaaaaaccgtccaggtggaacaatccaaagtgctcattaaagaaggtggagtgcagctcttactgactatagtggacacaccaggcttcggagacgcagttgacaactctaattgctggcagcccgtaattgattacatagacagcaaatttgaagattatctcaatgcagaatctagggttaatcgaagacagatgccagacaatcgggttcagtgctgtctgtactttatagcaccaagcggccacgggctgaaacccctggacatcgagtttatgaaacggctccacgagaaagtgaatataatccccctgatcgccaaagcagataccctgaccccagaggaatgtcaacagtttaaaaagcagatcatgaaggaaattcaggagcataaaattaagatatacgagttccctgaaaccgacgacgaggaagaaaataagctggtgaaaaagattaaggacaggctgcccctggcagtggtcgggagcaataccataattgaggtgaatggcaagagagtgcgggggagacagtacccctggggcgtggctgaagtggagaacggagaacattgcgacttcaccatcctccgaaatatgctcattcggacccacatgcaggatttgaaggatgtgacgaataacgttcattatgagaattaccgcagtcgaaaacttgccgcggtgacatacaatggcgtggataacaacaagaacaaaggacagctgaccaagagcccactcgcccagatggaagaagaacggcgggaacacgtggcaaagatgaaaaagatggagatggagatggaacaagtcttcgaaatgaaagtgaaggaaaaggtacagaagctgaaggatagcgaggccgagctccagaggagacacgagcagatgaaaaagaacttagaagctcaacacaaggagcttgaggagaaaaggcggcagtttgaagacgagaaagccaattgggaggcgcagcagcggattcttgaacagcaaaacagtagtagaaccctggaaaaaaataagaagaagggcaaaattttttag

SEQ ID NO: 24627 - DNA, 1155 bp, Artificial Sequence
  derived and/or modified sequence
atggtggtcggcgagtccggcctggggaaatcgaccctcatcaatagcctcttcttgactgacctgtactccccagaataccccggacctagccacagaatcaagaagaccgtccaagtggagcagagcaaggtgcttatcaaagaggggggcgtccagctgctgcttactatagtggatactcctggatttggggacgccgtggacaacagcaattgctggcagccggtcatagactacatcgatagcaaattcgaggattatctcaatgccgagtctagggtgaacaggagacagatgcccgataatcgggtgcagtgctgcttgtacttcatcgctcccagtggtcatggacttaaaccactcgatattgaattcatgaaacgtctccatgaaaaggtgaacattatcccactgattgcgaaggccgacacactcacaccagaagaatgccaacagttcaagaagcaaatcatgaaggagatccaggagcacaaaatcaagatatatgagtttccggagacagatgatgaggaggagaataagcttgttaagaaaatcaaggaccgattgcccttggcagtcgtggggagcaatacgattatcgaagtcaatgggaaacgagtgcggggccggcagtatccttggggtgtcgctgaggtggaaaatggggaacattgtgattttacaattcttaggaacatgctgattcgtacgcacatgcaagatttgaaggatgttacaaataacgtgcattacgaaaactacaggtcacgaaaattggcagccgttacatataacggggtcgacaataataagaataagggccagctgaccaaaagcccacttgctcagatggaggaggaacggagagagcacgttgccaagatgaagaagatggagatggaaatggagcaggtgttcgaaatgaaagtgaaggagaaggtacaaaagctcaaagactcggaggctgaacttcagcgacggcacgagcagatgaagaaaaacctggaggcgcagcacaaggagctggaagagaagcgtaggcagtttgaggatgaaaaagcaaactgggaggcacagcaacgaatcctggagcaacagaatagctctcggaccctggaaaaaaacaagaagaaagggaagattttttag

SEQ ID NO: 24628 - DNA, 708 bp, Artificial Sequence
  derived and/or modified sequence
atgtcagtctctgctcggtctgccgccgcagaggaacgttcagttaattccagcaccatgggccaacagaaaaatctggaaggatacgttggatttgccaatttaccaaatcaggtctataggaagtccgtgaagagagggttcgagttcactctgatggtggtcggggagagcggactcggaaaatctactttaataaacagtctcttcctgactgatttgtattcaccagaataccccggcccatcacatcgcattaagaaaaccgtgcaggtcgaacagtctaaggtcctcatcaaagaaggcggagtgcagctccttctgaccatcgtggacactccaggattcggagacgcggtggacaactccaattgttggcagccagtcatcgattatatcgactcaaaattcgaggattacttaaatgccgagagtcgagtgaaccgccgtcaaatgccagacaatcgcgtccagtgctgcctttacttcatcgcgccctcaggtcacggtctgaaacctctcgatattgagttcatgaaaaggctgcacgagaaggtgaacatcatccctctgatcgccaaggccgacaccctaacacccgaagagtgtcagcaatttaaaaagcagatcatgaaagagatacaggaacacaagataaagatctacgagtttccagaaacagccaagaagaagaagaaaaagaaatag

SEQ ID NO: 24629 - DNA, 1155 bp, Artificial Sequence
  derived and/or modified sequence
atggtagttggcgaatccggactgggaaaatccactttaattaattccttgttcttgactgacctttactctccagaatacccaggcccgtctcatcggatcaagaagactgtacaagttgaacagtccaaggttctaatcaaggaagggggcgtgcagcttttgttaaccattgttgatacccctggctttggcgatgcagtggataacagtaattgctggcaaccagtgattgattacatcgattctaagtttgaggactatctgaacgcagagtctagagtgaataggcggcagatgccagataacagagtgcagtgttgtctgtattttatcgccccatccgggcacggcctgaagcctctggatatcgagttcatgaagcgtcttcatgaaaaggttaacattattcccctgatcgcaaaggccgacacattgacacctgaagagtgtcagcaatttaagaaacaaatcatgaaggagatccaggaacataaaatcaagatttacgagtttcctgaaacggatgacgaggaggaaaataaactggtgaagaagatcaaggaccggctgccgcttgctgttgtaggcagtaacaccatcatcgaagttaatggcaagcgtgtacgcggacggcaatatccttggggcgtggctgaagttgagaacggcgagcattgcgacttcacaattttgagaaacatgctaatcaggactcatatgcaagatctcaaggacgtcacaaataatgtccactacgaaaactaccggagccgaaaactggccgctgtcacctacaatggcgtcgacaacaacaaaaacaaaggacagctcactaagtcgcccctcgctcagatggaggaagaaaggagagagcacgtggctaagatgaagaagatggaaatggagatggagcaagtctttgagatgaaggtcaaggagaaagtacaaaaattaaaagattccgaggccgagctgcaacgccgacatgagcaaatgaagaaaaatttggaggcccagcataaagaactcgaggagaaaaggcggcagtttgaggacgagaaggctaactgggaggcccagcaacgaatcctggagcagcagaactcatcaagaaccctcgaaaagaataaaaagaaaggcaaaattttttag

SEQ ID NO: 24630 - DNA, 1311 bp, Artificial Sequence
  derived and/or modified sequence
atgtctgtgtctgcccggtctgctgctgctgaggagaggtctgtgaacagcagcaccatgggccagcagaagaacctggagggctacgtgggctttgccaacctgcccaaccaggtgtacaggaagtctgtgaagaggggctttgagttcaccctgatggtggtgggggagagcggcctgggcaagagcaccctcatcaacagcctcttcctgacagacctgtacagccctgagtacccaggccccagccaccgcatcaagaagacagtgcaggtggagcagagcaaggtgctgatcaaggagggcggcgtgcagctgctgctgaccatcgtggacaccccaggctttggagatgctgtggacaacagcaactgctggcagcccgtcatcgactacatcgacagcaagtttgaggactacctgaatgctgagagccgggtgaacagacggcagatgccagacaacagagtgcagtgctgcctgtacttcatcgcccccagcggccacggcctgaagcccctggacatcgagttcatgaagaggctgcacgagaaggtgaacatcatccccctcatcgccaaggctgacaccctgaccccagaggagtgccagcagttcaagaagcagatcatgaaggagatccaggagcacaagatcaagatctatgagttccctgagacagatgatgaggaggagaacaagctggtgaagaagatcaaggaccggctgcccctggccgtggtgggcagcaacaccatcatcgaggtgaatggcaagagggtgcggggccggcagtacccctggggcgtggccgaggtggagaatggagagcactgtgacttcaccatcctgaggaacatgctgatccgcacccacatgcaggacctgaaggatgtgaccaacaacgtgcactatgagaactaccgcagcaggaagctggccgctgtgacctacaatggagtggacaacaacaagaacaagggccagctgaccaagagccccctggcccagatggaggaggagcggcgggagcacgtggccaagatgaagaagatggagatggagatggagcaggtgtttgagatgaaggtgaaggagaaggtgcagaagctgaaggacagcgaggccgagctgcagaggagacatgagcagatgaagaagaacctggaggcccagcacaaggagctggaggagaagaggcggcagtttgaagatgagaaggccaactgggaggcccagcagaggatcctggagcagcagaacagcagcaggaccctggagaagaacaagaagaagggcaagatcttctag

SEQ ID NO: 24631 - DNA, 1311 bp, Artificial Sequence
  derived and/or modified sequence
atgtctgtgtctgcccggtctgctgctgctgaggagaggtctgtgaacagcagcaccatggtgcagcagaagaacctggagggctacgtgggctttgccaacctgcccaaccaggtgtacaggaagtctgtgaagaggggctttgagttcaccctgatggtggtgggggagagcggcctgggcaagagcaccctcatcaacagcctcttcctgacagacctgtacagccctgagtacccaggccccagccaccgcatcaagaagacagtgcaggtggagcagagcaaggtgctgatcaaggagggcggcgtgcagctgctgctgaccatcgtggacaccccaggctttggagatgctgtggacaacagcaactgctggcagcccgtcatcgactacatcgacagcaagtttgaggactacctgaatgctgagagccgggtgaacagacggcagatgccagacaacagagtgcagtgctgcctgtacttcatcgcccccagcggccacggcctgaagcccctggacatcgagttcatgaagaggctgcacgagaaggtgaacatcatccccctcatcgccaaggctgacaccctgaccccagaggagtgccagcagttcaagaagcagatcatgaaggagatccaggagcacaagatcaagatctatgagttccctgagacagatgatgaggaggagaacaagctggtgaagaagatcaaggaccggctgcccctggccgtggtgggcagcaacaccatcatcgaggtgaatggcaagagggtgcggggccggcagtacccctggggcgtggccgaggtggagaatggagagcactgtgacttcaccatcctgaggaacatgctgatccgcacccacatgcaggacctgaaggatgtgaccaacaacgtgcactatgagaactaccgcagcaggaagctggccgctgtgacctacaatggagtggacaacaacaagaacaagggccagctgaccaagagccccctggcccagatggaggaggagcggcgggagcacgtggccaagatgaagaagatggagatggagatggagcaggtgtttgagatgaaggtgaaggagaaggtgcagaagctgaaggacagcgaggccgagctgcagaggagacatgagcagatgaagaagaacctggaggcccagcacaaggagctggaggagaagaggcggcagtttgaagatgagaaggccaactgggaggcccagcagaggatcctggagcagcagaacagcagcaggaccctggagaagaacaagaagaagggcaagatcttctag

SEQ ID NO: 24632 - DNA, 1155 bp, Artificial Sequence
  derived and/or modified sequence
atggtggtgggggagagcggcctgggcaagagcaccctcatcaacagcctcttcctgacagacctgtacagccctgagtacccaggccccagccaccgcatcaagaagacagtgcaggtggagcagagcaaggtgctgatcaaggagggcggcgtgcagctgctgctgaccatcgtggacaccccaggctttggagatgctgtggacaacagcaactgctggcagcccgtcatcgactacatcgacagcaagtttgaggactacctgaatgctgagagccgggtgaacagacggcagatgccagacaacagagtgcagtgctgcctgtacttcatcgcccccagcggccacggcctgaagcccctggacatcgagttcatgaagaggctgcacgagaaggtgaacatcatccccctcatcgccaaggctgacaccctgaccccagaggagtgccagcagttcaagaagcagatcatgaaggagatccaggagcacaagatcaagatctatgagttccctgagacagatgatgaggaggagaacaagctggtgaagaagatcaaggaccggctgcccctggccgtggtgggcagcaacaccatcatcgaggtgaatggcaagagggtgcggggccggcagtacccctggggcgtggccgaggtggagaatggagagcactgtgacttcaccatcctgaggaacatgctgatccgcacccacatgcaggacctgaaggatgtgaccaacaacgtgcactatgagaactaccgcagcaggaagctggccgctgtgacctacaatggagtggacaacaacaagaacaagggccagctgaccaagagccccctggcccagatggaggaggagcggcgggagcacgtggccaagatgaagaagatggagatggagatggagcaggtgtttgagatgaaggtgaaggagaaggtgcagaagctgaaggacagcgaggccgagctgcagaggagacatgagcagatgaagaagaacctggaggcccagcacaaggagctggaggagaagaggcggcagtttgaagatgagaaggccaactgggaggcccagcagaggatcctggagcagcagaacagcagcaggaccctggagaagaacaagaagaagggcaagatcttctag

SEQ ID NO: 24633 - DNA, 708 bp, Artificial Sequence
  derived and/or modified sequence
atgtctgtgtctgcccggtctgctgctgctgaggagaggtctgtgaacagcagcaccatgggccagcagaagaacctggagggctacgtgggctttgccaacctgcccaaccaggtgtacaggaagtctgtgaagaggggctttgagttcaccctgatggtggtgggggagagcggcctgggcaagagcaccctcatcaacagcctcttcctgacagacctgtacagccctgagtacccaggccccagccaccgcatcaagaagacagtgcaggtggagcagagcaaggtgctgatcaaggagggcggcgtgcagctgctgctgaccatcgtggacaccccaggctttggagatgctgtggacaacagcaactgctggcagcccgtcatcgactacatcgacagcaagtttgaggactacctgaatgctgagagccgggtgaacagacggcagatgccagacaacagagtgcagtgctgcctgtacttcatcgcccccagcggccacggcctgaagcccctggacatcgagttcatgaagaggctgcacgagaaggtgaacatcatccccctcatcgccaaggctgacaccctgaccccagaggagtgccagcagttcaagaagcagatcatgaaggagatccaggagcacaagatcaagatctatgagttccctgagacagccaagaagaagaagaagaagaagtag

SEQ ID NO: 24634 - DNA, 1311 bp, Artificial Sequence
  derived and/or modified sequence
atgagcgtgagcgcccggagcgccgccgccgaggagcggagcgtgaacagtagcacgatggggcaacaaaaaaacctcgagggttatgtgggatttgctaatttacctaatcaggtttatagaaaatctgtaaaaagggggttcgaattcaccctaatggtggttggcgaaagcgggttgggcaagtcaacgctcattaattccctatttttgaccgacctttattcaccagagtatcctgggccatcacaccgaatcaagaagaccgttcaggtggagcagagcaaggtgctgatcaaggagggcggcgtgcagcttctcctgacgatcgtggacacacccgggtttggggacgctgtcgataattcaaattgctggcagcccgtgatcgactacattgacagcaagtttgaggactacctcaacgccgaaagcagagtgaatagacgacagatgcctgataatcgggtgcagtgttgtttgtacttcatcgcgccctccggtcatggcctgaaaccacttgacatcgaatttatgaagcgtcttcacgagaaagtaaacattatcccgctgatagccaaggccgataccctaacccctgaggaatgtcaacagtttaagaagcagattatgaaagagattcaggagcacaaaattaaaatctacgaatttcccgagacagacgatgaggaagagaacaagcttgttaagaaaatcaaggacaggcttcctctggccgttgtagggagcaacaccatcatcgaagtgaatggtaagagagtccgtgggaggcaatatccgtggggagtagccgaggtcgaaaacggcgaacactgtgacttcacaatccttcggaacatgctgatcaggactcacatgcaggatttgaaggatgttacaaataacgtgcactacgagaactataggtctcgcaaattggcagcggtgacctacaatggtgtggataacaacaagaacaaggggcaacttactaaatccccgctagcccagatggaggaggaacgtagagagcatgtagcgaagatgaaaaagatggagatggagatggagcaggttttcgagatgaaggtgaaggagaaggtccaaaaattgaaagactctgaagccgagctgcaacgcagacatgagcagatgaagaaaaacttggaggcacaacataaagaactcgaggaaaagagacgccagttcgaggacgagaaagcgaactgggaagctcagcagcggatactggagcagcagaactctagtcggactctggagaagaacaagaagaagggaaaaatcttctag

SEQ ID NO: 24635 - DNA, 1311 bp, Artificial Sequence
  derived and/or modified sequence
atgagcgtgagcgcccggagcgccgccgccgaggagcggagcgtgaattcatccaccatggtacagcaaaaaaacctagaaggctacgttggttttgcaaacctgcctaaccaggtttacaggaaatcagtgaagaggggatttgaattcaccttgatggtagtgggagagtccgggttggggaagtccaccctgataaatagtctattcctcaccgatctgtattcacctgagtacccagggccctcccaccggataaagaaaactgtgcaggttgagcagagcaaggttttgattaaagagggaggggtgcagctgttacttaccatagtcgataccccaggcttcggcgatgcagtggataatagtaactgttggcagcctgtgatagactatattgactctaagtttgaagattacctgaacgcagaaagtagagtgaaccgcagacagatgccggacaacagggtccagtgctgtctgtattttatagctccatcagggcacgggttgaaacccctggatatcgagttcatgaagcgattgcatgagaaagttaacatcattccccttattgccaaagcggatacgttgacaccagaggagtgccaacagtttaaaaaacaaattatgaaagaaatccaggaacataaaatcaagatttatgagttccctgagacggatgatgaagaggagaacaaactcgtgaagaaaattaaagacagactgccgcttgcagtggtggggtcaaacaccatcatcgaagttaatggaaagcgcgtgcgcggcagacaatacccgtggggagtcgccgaagtggaaaatggggagcactgtgacttcactattcttagaaatatgttgatacggactcacatgcaggatttaaaagacgttactaataacgtgcattacgaaaattacaggtcccgcaagctggccgccgtgacgtacaacggcgttgacaataataaaaataaaggtcagctgacaaagtcacccctggcccagatggaggaagagaggagggagcacgtggccaaaatgaaaaagatggagatggaaatggagcaggttttcgaaatgaaggtcaaggaaaaggtccagaaactcaaggattccgaggcagaactccagcgtagacatgagcaaatgaaaaaaaatctcgaggcgcagcataaagagttagaggagaagaggaggcaatttgaggatgaaaaggctaactgggaggcccagcaacgtattctcgagcagcagaattcaagtcggaccttagaaaagaataagaagaaagggaaaattttctag

SEQ ID NO: 24636 - DNA, 1155 bp, Artificial Sequence
  derived and/or modified sequence
atggtggtgggcgagagcggcctgggcaagagcaccctgatcaactcactctttctgaccgacctctacagtcccgagtatcctggtccctcccaccgcatcaagaagacagtgcaggtggagcaaagtaaggtgctgatcaaagaaggaggggtccaacttctgcttaccattgtggatacccctggatttggtgacgcggtggacaactccaactgctggcagcctgttattgattacattgattctaagttcgaggactatctcaacgcagagtccagggtaaataggagacaaatgccagacaaccgggtacaatgctgtctgtactttatcgctcccagcgggcatggcctaaagccgttagatatcgagttcatgaagaggttgcacgagaaggtaaacattattcctttgatcgcaaaagctgacactttaacccccgaggagtgccagcaatttaagaagcagatcatgaaggagatccaggagcacaaaattaaaatctatgagttcccagagaccgacgatgaggaggagaacaagctcgttaagaagatcaaggaccgattgcccctggcagtcgttggatccaatactattatcgaggtaaacgggaagcgtgttcggggcaggcagtacccttggggggtggctgaagtcgaaaatggcgagcattgtgacttcaccatcttgcgcaatatgttgattaggactcatatgcaggatcttaaggacgtgaccaacaacgtgcattacgagaattacagatctcggaagctggctgcagtgacatataacggagtggacaataacaaaaataaagggcaattgaccaagagtccactggcccagatggaggaggagagacgagaacacgtcgccaaaatgaagaaaatggagatggagatggagcaagtgtttgagatgaaggtgaaagagaaggtgcagaagctgaaagatagcgaggccgaacttcaacgccggcatgagcaaatgaaaaagaacctcgaagctcagcataaagaactcgaagagaagaggcggcagttcgaggatgagaaggccaactgggaggcccagcaacgcatcctcgaacagcagaactcctctcggacactcgaaaaaaacaaaaagaaggggaaaattttttag

SEQ ID NO: 24637 - DNA, 708 bp, Artificial Sequence
  derived and/or modified sequence
atgagcgtgagcgcccggagcgccgccgccgaggagcggagcgtgaactcaagcacaatgggccagcagaagaatcttgagggatacgtcggttttgcaaacctcccaaatcaggtttacagaaaatcggtgaaacggggatttgagtttactcttatggttgtcggagaaagtggactcggaaagtccaccctgatcaactccctctttctgacggacctgtattcacctgagtaccccggtcccagtcaccggattaagaagaccgttcaggttgaacagtccaaggtgctgattaaggagggcggcgtgcagctgttgctgactatcgtagatacgccagggttcggcgatgcggttgacaactcaaactgttggcaaccagttattgattatattgactccaagtttgaggattacctgaatgcggaaagtcgcgtgaatcggagacaaatgcctgacaatcgtgtccagtgctgtttgtacttcattgcacccagcgggcacggcctgaaaccactcgatatcgagtttatgaagcgcctgcacgagaaggtgaacatcatccctctaattgcaaaagcagacacgctcacccccgaagagtgccagcaatttaagaagcagataatgaaagaaatccaagaacacaaaatcaaaatttacgaatttcccgagaccgcaaaaaaaaagaagaagaagaagtag

SEQ ID NO: 24638 - DNA, 1155 bp, Artificial Sequence
  derived and/or modified sequence
atggtggtgggcgagagcggcctgggcaagagcaccctgatcaactctctgtttctcactgacctgtacagcccagaataccctggccctagccacagaatcaaaaagaccgtgcaggtcgaacagtctaaggtgcttataaaggagggcggagtgcaactcctgctcaccattgtcgatactcccggattcggagacgctgtggacaacagcaactgctggcagcctgtgattgattacattgactcaaaattcgaggactacttgaacgctgaatctcgagtgaataggaggcagatgcctgacaatagggtccagtgttgtctgtacttcattgcaccgagcggtcatggcctgaagcccttagatattgaatttatgaagcgtttgcatgagaaggtgaatatcatccctctgattgcgaaagctgataccctgaccccagaggaatgccagcagtttaagaagcaaatcatgaaagagattcaggaacataaaatcaaaatttatgaatttcctgaaactgacgacgaggaggagaataaactcgtgaagaagatcaaggaccggcttccgctggcggtcgtaggatcaaacacaatcatagaagtgaacggcaaacgtgtgcgggggagacaatacccttggggagttgcagaggtcgaaaacggcgaacattgcgacttcacaattctgcgcaacatgctcatacggacacacatgcaggacttaaaagatgtgactaacaacgtccattacgagaactaccggtctcgtaaactggcggcagtgacttacaacggtgtcgacaacaacaagaataagggtcagctgaccaaatcaccactggcacaaatggaggaggagcgccgcgagcatgtagcaaagatgaagaagatggagatggagatggaacaggtgtttgaaatgaaggtgaaggagaaagtacaaaagctgaaggacagcgaggctgaattgcagagaagacatgagcagatgaagaaaaacttagaagcgcagcacaaggagttggaggagaagcgccgccagtttgaagatgaaaaggcgaattgggaagctcagcagagaatactggaacaacagaattcaagtcgcacccttgaaaaaaacaaaaaaaaagggaagattttctag

SEQ ID NO: 24639 - DNA, 1311 bp, Artificial Sequence
  derived and/or modified sequence
atgtcagttagcgctagaagcgctgccgcagaagagcggagtgttaatagttccacgatgggccagcaaaagaatcttgagggctacgtagggtttgccaacttacccaaccaggtgtaccggaagtctgtgaagagaggattcgagttcaccctgatggttgtgggagagtcgggcctaggaaagtcaacgttgattaattccctgttcctgactgatttatacagtcccgagtacccgggtcctagtcacaggattaaaaagactgtgcaggtcgagcagtctaaagttttgatcaaggagggaggggttcagctgcttttaacaattgttgatacccctgggttcggagacgcagtcgacaactccaattgctggcagcctgtgatcgactatattgactctaagtttgaggattacctcaatgcagaaagtcgagtgaatcgcaggcaaatgccagataatagggtgcagtgctgcctatactttatagctccatcagggcacggactgaagccactggacatcgaatttatgaagagacttcacgagaaggttaatataatccccctaattgcgaaagccgatactttgactccagaggaatgtcagcagtttaagaaacagattatgaaagaaattcaggaacataaaataaagatatacgagtttccagaaacagacgacgaggaggaaaataagctcgtgaaaaaaattaaagaccgcctccccctcgccgttgttggctccaacacaataatagaggtgaacggcaaaagggtgcggggtcgccagtacccctggggtgtcgccgaagtcgagaacggcgagcactgtgatttcacaatcctgcgcaatatgctgataaggacccacatgcaggacctgaaggatgtcaccaacaacgtccactacgaaaactacagatccagaaagcttgctgctgtgacttacaacggggtggataacaacaagaataaaggccagctcacgaaatcccccctcgctcaaatggaagaggagagaagggagcacgtcgcaaaaatgaagaagatggaaatggaaatggaacaggtctttgagatgaaggtgaaggagaaggttcaaaagctgaaagattcagaggcagaacttcagcggaggcacgagcagatgaaaaagaatttagaggctcaacataaggagctcgaggagaaacgccgtcagtttgaggatgagaaggcgaactgggaggcccagcaacggattctcgaacagcaaaattcttctcggactctcgagaagaacaaaaaaaaaggcaagatcttctag

SEQ ID NO: 24640 - DNA, 1311 bp, Artificial Sequence
  derived and/or modified sequence
atgagtgtatcggctcggagcgctgccgcagaggaacgttctgtcaactcctccaccatggtccagcaaaagaacctcgagggatacgtgggatttgctaacctcccgaaccaggtgtaccgtaaaagtgtaaaacgcggatttgaattcactttaatggttgtcggtgagtcagggctgggtaaatccactctgattaatagtttattccttaccgacttgtattcaccggaataccccggtccctcccatcgaatcaagaagaccgtgcaggtcgagcagtctaaagtgctaataaaggaaggcggtgttcaactgctgttgacaatagtcgataccccaggatttggagatgccgtagataactcgaactgctggcagcctgtaattgactatattgactctaagtttgaagactacctaaacgccgaaagtcgcgtcaacaggagacagatgccagacaacagagtccagtgttgcctgtatttcatagctccaagcggacacggcctgaaaccgctggacattgagtttatgaaaagactgcatgagaaagtgaatatcatccccctcatcgccaaggcagatactttaacccctgaagaatgccaacagttcaagaagcagatcatgaaggaaattcaggaacataagataaagatttacgagtttcccgagacagacgatgaggaagaaaacaaactggtgaaaaagatcaaggatcgactgcctctagccgtggtgggcagcaatactatcattgaagtgaacggcaaacgggttaggggcagacaatacccatggggtgtggcggaagtagaaaatggagagcactgcgacttcaccattttacggaatatgctgattagaactcacatgcaggatctcaaggatgtgacaaataacgtgcactacgagaactaccgctcacgaaagctagccgcagtgacttacaatggggtcgacaacaacaaaaacaagggacaactgactaagagccccctggcacagatggaggaggaacggagagaacacgtcgctaaaatgaaaaagatggagatggaaatggaacaagtgtttgagatgaaagtaaaagagaaggttcagaagcttaaggatagtgaggcagagttgcagcggagacatgagcaaatgaagaaaaatctggaagctcagcataaggaactggaagagaagcggaggcagtttgaggacgagaaagccaactgggaagcccagcagcggatcctggaacagcagaattctagccgcacactggagaagaataaaaaaaagggaaagattttctag

SEQ ID NO: 24641 - DNA, 1155 bp, Artificial Sequence
  derived and/or modified sequence
atggtggtaggcgaaagtggcctggggaaatccactctgatcaattcactgttcctgacagacctgtattcccccgagtatcccggaccctcgcaccgcattaaaaaaaccgtccaggtcgaacagtccaaggtactgattaaggagggaggggtccagctgcttctgacaatcgtggatacccctgggtttggtgacgctgtggataacagtaactgttggcagccagttattgattacatcgattcgaaatttgaggactacttgaacgcagagtcccgggtgaaccgccgtcagatgccagataaccgagtgcaatgttgtttatatttcattgccccttccggacacgggctcaaaccattggacatagagtttatgaagcgcctccatgaaaaggtaaacatcatccctctcatagcaaaagccgacacgttgacaccggaagagtgtcagcagttcaagaagcagatcatgaaggaaatccaggagcacaagattaaaatttacgaatttcccgagacagacgatgaagaagaaaataagttggtcaagaagatcaaggataggctgcctttggctgtggtcggcagcaacaccattatcgaagtcaatggtaagagggtacgaggcagacagtacccttggggggtcgctgaggtggaaaatggggagcattgcgacttcaccatcttaaggaatatgcttataaggacccacatgcaagacctgaaagacgtcacaaataacgtgcactacgaaaattatcgctccagaaaattggcagcagttacgtataatggtgtagacaataacaaaaacaagggccagctaacgaagagtcctctcgctcagatggaggaagagcgacgggagcacgtcgcaaaaatgaaaaaaatggagatggaaatggaacaagtcttcgaaatgaaagtcaaggaaaaggttcagaaattgaaagactcagaagccgagctgcagaggaggcacgaacagatgaagaaaaacttagaggcccaacataaggaactcgaggaaaagcgcaggcagtttgaggacgaaaaagccaattgggaggctcaacagcggatcctggaacagcagaattccagccggacacttgagaagaacaagaagaaggggaaaattttttag

SEQ ID NO: 24642 - DNA, 708 bp, Artificial Sequence
  derived and/or modified sequence
atgagtgtgagtgcccgttctgctgcagctgaagaaagatccgtaaattctagcaccatgggccagcaaaaaaacctcgaaggatacgtggggttcgcgaacctacctaaccaggtttataggaaaagcgtcaaaagaggctttgaatttaccctgatggtggtgggcgaaagcgggctgggcaaatccaccttaatcaactctctcttccttacagatctctacagccctgagtacccaggaccaagtcaccgcatcaaaaaaaccgtgcaagtagaacaatccaaggtgctcattaaggagggcggtgtgcagcttttgctaacaatcgtggacacccctggcttcggagacgcagtggacaacagtaactgttggcaacctgtgattgactatatcgacagcaagttcgaggattatctcaatgcagaatcaagagtaaatcgacggcagatgccagataacagagtccagtgttgtctgtacttcatagcaccctccggccatggccttaaacctctagatatagaatttatgaagaggctacacgaaaaggttaacataatacccctgattgctaaggcggataccttaactcctgaagaatgtcagcagtttaagaaacagatcatgaaagaaatccaggagcacaagattaagatctacgaattccctgagactgccaagaagaaaaagaagaagaaatag

SEQ ID NO: 24643 - DNA, 1155 bp, Artificial Sequence
  derived and/or modified sequence
atggtcgttggggaaagcggcttagggaagtcgacactgattaacagcctttttctcaccgacttgtacagccctgagtatcctggacctagccacaggatcaagaagaccgtacaggtggagcagtctaaagtcctgatcaaggagggcggagtccagctgcttctgacaatcgtggacaccccagggttcggggatgccgtggacaactctaattgttggcagccagtcatcgactacattgactcaaaattcgaagactacctgaatgctgaaagcagagtcaacagaaggcaaatgccggacaaccgggtgcagtgttgtctgtactttatcgcgccttctggccacggacttaagcctcttgatatcgagttcatgaaacgcctccatgagaaagtcaatattatacctctcattgctaaggcggacactttgacccccgaggagtgccagcagttcaagaaacagattatgaaggagattcaggagcacaaaatcaagatttacgaatttccggagaccgacgacgaagaggagaacaagctggttaaaaaaataaaggatcggcttccgttagcagtcgttggatcaaatactatcatagaggtaaatggtaaaagagtcaggggaagacaatatccctggggagttgcagaggtcgaaaacggcgagcactgcgacttcacaatcctgcggaatatgctgatcagaacacatatgcaagacttgaaggatgtgaccaataacgtgcattacgaaaattatcgatcccggaagcttgctgcagtcacgtataacggggtggacaacaataaaaacaaaggtcagctgacaaagagccctctcgctcaaatggaagaagaacggagagagcacgttgctaagatgaagaagatggaaatggaaatggaacaggtgttcgagatgaaagtgaaagagaaggtccaaaagctgaaagactctgaggcagaactgcagagaagacacgaacaaatgaagaagaatctcgaggctcagcataaggagttggaggaaaagagaagacaatttgaggacgaaaaggctaattgggaagcccagcagagaatacttgagcaacagaactcgtcaaggaccttagaaaagaataaaaaaaagggaaaaatcttttag

SEQ ID NO: 24644 - DNA, 2516 bp, Artificial Sequence
  derived and/or modified sequence
agcctcgtctgagggggcgggggacggaggagggagcgggagtcgagcgagagcctgtggaggagtccgcctgctgtagcgtgcgtaagcaaggcagctacgccgggcggctacgctgcggaatcggcgtaggcgcctttggagaatcggcgggctgcgctccgctggggctggtcgcggagggggggaggggatgtcggtcagtgcgagatccgctgctgctgaggagaggagcgtcaacagcagcaccatgggtcaacagaagaaccttgaaggctatgtgggatttgccaatctcccaaatcaagtatacagaaaatcggtgaagagaggttttgaattcacgcttatggtagtgggtgaatctggattgggaaagtcgacattaatcaactcattattcctcacagatttgtattctccagagtatccaggtccttctcatagaattaaaaagactgtacaggtggaacaatccaaagttttaatcaaagaaggtggtgttcagttgctgctcacaatagttgataccccaggatttggagatgcagtggataatagtaattgctggcagcctgttatcgactacattgatagtaaatttgaggactacctaaatgcagaatcacgagtgaacagacgtcagatgcctgataacagggtgcagtgttgtttatacttcattgctccttcaggacatggacttaaaccattggatattgagtttatgaagcgtttgcatgaaaaagtgaatatcatcccacttattgccaaagcagacacactcacaccagaggaatgccaacagtttaaaaaacagataatgaaagaaatccaagaacataaaattaaaatatacgaatttccagaaacagatgatgaagaagaaaataaacttgttaaaaagataaaggaccgtttacctcttgctgtggtaggtagtaatactatcattgaagttaatggcaaaagggtcagaggaaggcagtatccttggggtgttgctgaagttgaaaatggtgaacattgtgattttacaatcctaagaaatatgttgataagaacacacatgcaggacttgaaagatgttactaataatgtccactatgagaactacagaagcagaaaacttgcagctgtgacttataatggagttgataacaacaagaataaagggcagctgactaagagccctctggcacaaatggaagaagaaagaagggagcatgtagctaaaatgaagaagatggagatggagatggagcaggtgtttgagatgaaggtcaaagaaaaagttcaaaaactgaaggactctgaagctgagctccagcggcgccatgagcaaatgaaaaagaatttggaagcacagcacaaagaattggaggaaaaacgtcgtcagttcgaggatgagaaagcaaactgggaagctcaacaacgtattttagaacaacagaactcttcaagaaccttggaaaagaacaagaagaaagggaagatcttttaaactctctattgaccaccagttaacgtattagttgccaatatgccagcttggacatcagtgtttgttggatccgtttgaccaatttgcaccagttttatccataatgatggatttaacagcatgacaaaaattatttttttttttgttcttgatggagattaagatgccttgaattgtctagggtgttctgtacttagaaagtaagagctctaagtacctttcctacattttctttttttattaaacagatatcttcagtttaatgcaagagaacattttactgttgtacaatcatgttctggtggtttgattgtttacaggatattccaaaataaaaggactctggaagattttcattgaggataaattgccataatatgatgcaaactgtgcttctctatgataattacaatacaaaggttccattcagtgcagcatatacaataatgtaatttagtctaacacagttgaccctattttttgacacttccattgtttaaaaatacacatggaaaaaaaaaaaaccctatatgcttactgtgcacctagagcttttttataacaacgtctttttgtttgtttgttttggattctttaaatatatattattctcatttagtgccctctttagccagaatctcattactgcttcatttttgtaataacatttaatttagatattttccatatattggcactgctaaaatagaatatagcatctttcatatggtaggaaccaacaaggaaactttcctttaactccctttttacactttatggtaagtagcagggggggaaatgcatttatagatcatttctaggcaaaattgtgaagctaatgaccaacctgtttctacctatatgcagtctctttattttactagaaatgggaatcatggcctcttgaagagaaaaaagtcaccattctgcatttagctgtattcatatattgcatttctgtattttttgtttgtattgtaaaaaattcacataataaacgatgttgtgatgt

SEQ ID NO: 24645 - DNA, 2323 bp, Artificial Sequence
  derived and/or modified sequence
atgtcggtcagtgcgagatccgctgctgctgaggagaggagcgtcaacagcagcaccatggtacaacagaagaaccttgaaggctatgtgggatttgccaatctcccaaatcaagtatacagaaaatcggtgaagagaggttttgaattcacgcttatggtagtgggtgaatctggattgggaaagtcgacattaatcaactcattattcctcacagatttgtattctccagagtatccaggtccttctcatagaattaaaaagactgtacaggtggaacaatccaaagttttaatcaaagaaggtggtgttcagttgctgctcacaatagttgataccccaggatttggagatgcagtggataatagtaattgctggcagcctgttatcgactacattgatagtaaatttgaggactacctaaatgcagaatcacgagtgaacagacgtcagatgcctgataacagggtgcagtgttgtttatacttcattgctccttcaggacatggacttaaaccattggatattgagtttatgaagcgtttgcatgaaaaagtgaatatcatcccacttattgccaaagcagacacactcacaccagaggaatgccaacagtttaaaaaacagataatgaaagaaatccaagaacataaaattaaaatatacgaatttccagaaacagatgatgaagaagaaaataaacttgttaaaaagataaaggaccgtttacctcttgctgtggtaggtagtaatactatcattgaagttaatggcaaaagggtcagaggaaggcagtatccttggggtgttgctgaagttgaaaatggtgaacattgtgattttacaatcctaagaaatatgttgataagaacacacatgcaggacttgaaagatgttactaataatgtccactatgagaactacagaagcagaaaacttgcagctgtgacttataatggagttgataacaacaagaataaagggcagctgactaagagccctctggcacaaatggaagaagaaagaagggagcatgtagctaaaatgaagaagatggagatggagatggagcaggtgtttgagatgaaggtcaaagaaaaagttcaaaaactgaaggactctgaagctgagctccagcggcgccatgagcaaatgaaaaagaatttggaagcacagcacaaagaattggaggaaaaacgtcgtcagttcgaggatgagaaagcaaactgggaagctcaacaacgtattttagaacaacagaactcttcaagaaccttggaaaagaacaagaagaaagggaagatcttttaaactctctattgaccaccagttaacgtattagttgccaatatgccagcttggacatcagtgtttgttggatccgtttgaccaatttgcaccagttttatccataatgatggatttaacagcatgacaaaaattatttttttttttgttcttgatggagattaagatgccttgaattgtctagggtgttctgtacttagaaagtaagagctctaagtacctttcctacattttctttttttattaaacagatatcttcagtttaatgcaagagaacattttactgttgtacaatcatgttctggtggtttgattgtttacaggatattccaaaataaaaggactctggaagattttcattgaggataaattgccataatatgatgcaaactgtgcttctctatgataattacaatacaaaggttccattcagtgcagcatatacaataatgtaatttagtctaacacagttgaccctattttttgacacttccattgtttaaaaatacacatggaaaaaaaaaaaaccctatatgcttactgtgcacctagagcttttttataacaacgtctttttgtttgtttgttttggattctttaaatatatattattctcatttagtgccctctttagccagaatctcattactgcttcatttttgtaataacatttaatttagatattttccatatattggcactgctaaaatagaatatagcatctttcatatggtaggaaccaacaaggaaactttcctttaactccctttttacactttatggtaagtagcagggggggaaatgcatttatagatcatttctaggcaaaattgtgaagctaatgaccaacctgtttctacctatatgcagtctctttattttactagaaatgggaatcatggcctcttgaagagaaaaaagtcaccattctgcatttagctgtattcatatattgcatttctgtattttttgtttgtattgtaaaaaattcacataataaacgatgttgtgatgt

SEQ ID NO: 24646 - DNA, 2601 bp, Artificial Sequence
  derived and/or modified sequence
aagtcatgctcgaaatggagcgaggcggcggagctggggaggcggtaatctcgcgagatggaagccagcctccgctaggcccggaagcctcgtctgagggggcgggggacggaggagggagcgggagtcgagcgagagcctgtggaggagtccgcctgctgtagcgtgcgtaagcaaggcagctacgccgggcggctacgctgcggaatcggcgtaggcgcctttggagaatcggcgggctgcgctccgctggggctggtcgcggagggggggaggggatgtcggtcagtgcgagatccgctgctgctgaggagaggagcgtcaacagcagcaccatggcaacagaagaaccttgaaggctatgtgggatttgccaatctcccaaatcaagtatacagaaaatcggtgaagagaggttttgaattcacgcttatggtagtgggtgaatctggattgggaaagtcgacattaatcaactcattattcctcacagatttgtattctccagagtatccaggtccttctcatagaattaaaaagactgtacaggtggaacaatccaaagttttaatcaaagaaggtggtgttcagttgctgctcacaatagttgataccccaggatttggagatgcagtggataatagtaattgctggcagcctgttatcgactacattgatagtaaatttgaggactacctaaatgcagaatcacgagtgaacagacgtcagatgcctgataacagggtgcagtgttgtttatacttcattgctccttcaggacatggacttaaaccattggatattgagtttatgaagcgtttgcatgaaaaagtgaatatcatcccacttattgccaaagcagacacactcacaccagaggaatgccaacagtttaaaaaacagataatgaaagaaatccaagaacataaaattaaaatatacgaatttccagaaacagatgatgaagaagaaaataaacttgttaaaaagataaaggaccgtttacctcttgctgtggtaggtagtaatactatcattgaagttaatggcaaaagggtcagaggaaggcagtatccttggggtgttgctgaagttgaaaatggtgaacattgtgattttacaatcctaagaaatatgttgataagaacacacatgcaggacttgaaagatgttactaataatgtccactatgagaactacagaagcagaaaacttgcagctgtgacttataatggagttgataacaacaagaataaagggcagctgactaagagccctctggcacaaatggaagaagaaagaagggagcatgtagctaaaatgaagaagatggagatggagatggagcaggtgtttgagatgaaggtcaaagaaaaagttcaaaaactgaaggactctgaagctgagctccagcggcgccatgagcaaatgaaaaagaatttggaagcacagcacaaagaattggaggaaaaacgtcgtcagttcgaggatgagaaagcaaactgggaagctcaacaacgtattttagaacaacagaactcttcaagaaccttggaaaagaacaagaagaaagggaagatcttttaaactctctattgaccaccagttaacgtattagttgccaatatgccagcttggacatcagtgtttgttggatccgtttgaccaatttgcaccagttttatccataatgatggatttaacagcatgacaaaaattatttttttttttgttcttgatggagattaagatgccttgaattgtctagggtgttctgtacttagaaagtaagagctctaagtacctttcctacattttctttttttattaaacagatatcttcagtttaatgcaagagaacattttactgttgtacaatcatgttctggtggtttgattgtttacaggatattccaaaataaaaggactctggaagattttcattgaggataaattgccataatatgatgcaaactgtgcttctctatgataattacaatacaaaggttccattcagtgcagcatatacaataatgtaatttagtctaacacagttgaccctattttttgacacttccattgtttaaaaatacacatggaaaaaaaaaaaaccctatatgcttactgtgcacctagagcttttttataacaacgtctttttgtttgtttgttttggattctttaaatatatattattctcatttagtgccctctttagccagaatctcattactgcttcatttttgtaataacatttaatttagatattttccatatattggcactgctaaaatagaatatagcatctttcatatggtaggaaccaacaaggaaactttcctttaactccctttttacactttatggtaagtagcagggggggaaatgcatttatagatcatttctaggcaaaattgtgaagctaatgaccaacctgtttctacctatatgcagtctctttattttactagaaatgggaatcatggcctcttgaagagaaaaaagtcaccattctgcatttagctgtattcatatattgcatttctgtattttttgtttgtattgtaaaaaattcacataataaacgatgttgtgatgtaa

SEQ ID NO: 24647 - DNA, 898 bp, Artificial Sequence
  derived and/or modified sequence
agcctcgtctgagggggcgggggacggaggagggagcgggagtcgagcgagagcctgtggaggagtccgcctgctgtagcgtgcgtaagcaaggcagctacgccgggcggctacgctgcggaatcggcgtaggcgcctttggagaatcggcgggctgcgctccgctggggctggtcgcggagggggggaggggatgtcggtcagtgcgagatccgctgctgctgaggagaggagcgtcaacagcagcaccatggggcaacagaagaaccttgaaggctatgtgggatttgccaatctcccaaatcaagtatacagaaaatcggtgaagagaggttttgaattcacgcttatggtagtgggtgaatctggattgggaaagtcgacattaatcaactcattattcctcacagatttgtattctccagagtatccaggtccttctcatagaattaaaaagactgtacaggtggaacaatccaaagttttaatcaaagaaggtggtgttcagttgctgctcacaatagttgataccccaggatttggagatgcagtggataatagtaattgctggcagcctgttatcgactacattgatagtaaatttgaggactacctaaatgcagaatcacgagtgaacagacgtcagatgcctgataacagggtgcagtgttgtttatacttcattgctccttcaggacatggacttaaaccattggatattgagtttatgaagcgtttgcatgaaaaagtgaatatcatcccacttattgccaaagcagacacactcacaccagaggaatgccaacagtttaaaaaacagataatgaaagaaatccaagaacataaaattaaaatatacgaatttccagaaacagcaaaaaaaaaaaaaaaaaaaaaa

SEQ ID NO: 24648 - protein, 409 aa, Artificial Sequence
  derived and/or modified sequence
MAVYWCTEALPLSVTALLPIVLFPFMGILPSNKVCPQYFLDTNFLFLSGLIMASAIEEWNLHRRIALKILMLVGVQPARLILGMMVTTSFLSMWLSNTASTAMMLPIANAILKSLFGQKEVRKDPSQESEENTAAVRRNGLHTVPTEMQFLASTEAKDHPGETEVPLDLPADSRKEDEYRRNIWKGFLISIPYSASIGGTATLTGTAPNLILLGQLKSFFPQCDVVNFGSWFIFAFPLMLLFLLAGWLWISFLYGGLSFRGWRKNKSEIRTNAEDRARAVIREEYQNLGPIKFAEQAVFILFCMFAILLFTRDPKFIPGWASLFNPGFLSDAVTGVAIVTILFFFPSQRPSLKWWFDFKAPNTETEPLLTWKKAQETVPWNIILLLGGGFAMAKGCEESGLSVWIGGQL

SEQ ID NO: 24649 - DNA, 1230 bp, Artificial Sequence
  derived and/or modified sequence
atggctgtctactggtgcactgaggccctaccgctctctgtgactgccttactgccgatagttctttttccctttatggggatccttcctagcaataaggtgtgcccacagtactttctggacacgaattttctttttttgagcggacttatcatggcaagtgccattgaggagtggaaccttcaccggaggattgcccttaaaattttgatgctggtgggcgtgcaaccagcgcgcctaatcctaggcatgatggtcacaacatcttttctatccatgtggttatccaataccgccagcaccgccatgatgctacctattgccaatgcgatacttaagtcgctgttcggccagaaggaggtgagaaaagaccctagccaggagtctgaagagaacacagctgccgtccgccgaaatggtcttcacacagtgccaaccgaaatgcagtttttagctagtacagaggctaaagaccaccccggcgagactgaggtgcctctagatctgccagccgatagccgcaaagaggacgaatatcgacgaaatatttggaaagggttcctcatctctattccctatagcgcttctattggtggcacagcaacccttaccggaaccgctcctaatctgattttactgggccagctgaaatcatttttcccccagtgcgacgtggttaacttcggctcttggttcatctttgctttccccctcatgcttctgttcctcctcgccggatggctttggatctcattcctgtatggagggctgagttttagagggtggaggaagaataagtcagaaatccggactaatgcggaggaccgggccagggcggtcatacgggaggagtaccaaaatcttgggcccatcaagtttgccgaacaggcagtttttattctgttctgcatgttcgccatcctcttgttcacccgcgaccccaagttcatcccggggtgggcatctttgttcaaccccggctttctgtctgatgccgtgactggggttgcgatagtcactatattatttttttttccctctcagagacccagtctcaagtggtggtttgattttaaggctcctaatactgagactgagccattgctcacctggaaaaaggcccaggaaacagtgccatggaacattatcctgctgcttggcgggggattcgccatggctaaagggtgcgaagaatctggattgagcgtctggattggcggtcagctgtag

SEQ ID NO: 24650 - DNA, 1230 bp, Artificial Sequence
  derived and/or modified sequence
atggctgtgtactggtgcacagaggccctgcccctgtctgtgacagccctgctgcccatcgtgctcttccccttcatgggcatcctgcccagcaacaaggtgtgcccccagtacttcctggacaccaacttcctgttcctgagcggcctcatcatggccagcgccatcgaggagtggaacctgcacagaagaattgccctgaagatcctgatgctggtgggcgtgcagcctgcccggctcatcctgggcatgatggtgaccaccagcttcctgtccatgtggctgagcaacacagccagcacagccatgatgctgcccatcgccaatgccatcctgaagagcctgtttggccagaaggaggtgaggaaggaccccagccaggagagtgaagaaaatacagctgctgtgagaagaaatggcctgcacacagtgcccacagagatgcagttcctggccagcacagaggccaaggaccaccctggagaaacagaggtgcccctggacctgcctgctgacagcaggaaggaggatgagtacagaagaaacatctggaagggcttcctgatcagcatcccctacagcgccagcattggaggaacagccaccctgaccggcacagcccccaacctgatcctgctgggccagctgaagagcttcttcccccagtgtgatgtggtgaactttggctcctggttcatctttgccttccccctgatgctgctcttcctgctggccggctggctgtggatctccttcctgtatggaggcctgtccttccggggctggaggaagaacaagtctgagatccgcaccaatgctgaggaccgggcccgggctgtgatccgggaggagtaccagaacctgggccccatcaagtttgctgagcaggccgtgttcatcctcttctgcatgtttgccatcctgctcttcacccgggaccccaagttcatccctggctgggccagcctcttcaaccctggcttcctgagtgatgctgtgactggagtggccatcgtgaccatcctcttcttcttccccagccagaggcccagcctgaagtggtggtttgacttcaaggcccccaacacagaaacagagcccctgctgacctggaagaaggcccaggagaccgtgccctggaacatcatcctgctgctgggcggcggctttgccatggccaagggctgtgaggagagcggcctgtctgtgtggattggaggccagctgtag

SEQ ID NO: 24651 - DNA, 1230 bp, Artificial Sequence
  derived and/or modified sequence
atggccgtgtactggtgcaccgaggccctgcccctgagcgtgaccgcactgcttccaattgttctctttccttttatgggcattttaccaagcaataaagtttgtccgcaatactttctggataccaactttctctttctgagcggactcattatggcttccgccattgaggaatggaacctccacagacggatagcgctgaagatcctgatgcttgtaggcgtccagcccgctaggctcatcttgggaatgatggtgactacaagcttcttatctatgtggttgtcaaacactgccagtaccgccatgatgctgcccattgcgaatgcaattctcaagtccctcttcggtcagaaggaagtgcggaaggatccatcccaagagagcgaggagaacactgccgccgtgcgacgcaacggactgcacacggtgcctaccgagatgcagttcctggctagcacagaagccaaagaccacccgggggagaccgaagttcctctggatcttccggcggactctagaaaagaggacgagtatcggcggaacatttggaaggggttccttatcagcattccttactcagccagcatcggagggaccgcgacactgaccggcaccgcacccaatctgatcctcctcgggcagctaaagtcctttttcccgcagtgcgatgtagtgaacttcggcagttggttcattttcgcattccccctcatgttactgtttctcctagccggctggctttggatctccttcttgtatggtgggctgtccttccgcggatggagaaaaaataagagcgagatccgcactaacgccgaagatcgcgctcgcgccgtaatacgcgaggagtatcaaaatttaggcccaatcaagttcgccgagcaagccgtgttcatcctcttctgcatgttcgctatcttgctattcactcgcgatcctaagttcatcccaggatgggcctccctgtttaacccagggttcctttcagacgcagttacgggtgtggccatcgtgacgattctgttctttttccccagccaacgaccgagtttaaagtggtggttcgactttaaggcccccaacaccgaaacagaacccctgcttacgtggaagaaggcccaggagaccgtgccgtggaatatcatactcctcttgggaggcggattcgcaatggcaaaggggtgcgaggagtctgggttgtccgtgtggatcggtgggcagttgtag

SEQ ID NO: 24652 - DNA, 1230 bp, Artificial Sequence
  derived and/or modified sequence
atggccgtgtactggtgtactgaagcattgccccttagcgtgaccgcgctgctacccatagttctgtttccatttatgggtatattgccaagtaataaggtgtgccctcagtactttctcgacactaactttctcttcctgtccggcctaattatggcatccgcaatcgaggagtggaacctgcacagacgtatcgccctgaagatcctcatgctggtgggagtgcagccggcacggttgatcctcggcatgatggtcacaacaagtttcttgagcatgtggctctctaataccgccagcacggccatgatgctcccgatagctaacgccattctcaaatccttattcgggcagaaagaggttaggaaagatccgtcccaagaatccgaagaaaataccgcagccgtacggagaaacggcctccatacagtgccaacagagatgcagttcctagccagtaccgaagccaaagaccatcctggcgagactgaggtgccgctcgacctccccgcagatagtagaaaggaagacgaatatagacgtaatatatggaaaggatttttgatttcaatcccctactccgctagcataggtgggacagcaactttaacaggaacagcccctaatctcatattacttgggcagctcaaaagtttcttcccgcagtgtgacgtggtgaactttggttcttggttcatctttgccttcccgctcatgcttctgtttcttcttgcgggttggctatggatatctttcttgtacggaggattaagtttcagaggctggaggaagaacaaatcggagatccgcactaacgccgaggatcgcgcacgtgcggtcattcgggaggaataccagaacttgggtcctatcaagtttgccgagcaggcggtctttattctgttctgtatgttcgctatcctgctgtttactagggacccaaagttcattccaggctgggcctccctcttcaatccagggtttttatcggatgcagtcacaggcgtcgccattgtcactatcttgttcttttttccgagccagaggccgtccctgaaatggtggtttgattttaaagcaccaaatacagagactgaaccactcctgacttggaagaaagcacaggagacagtgccatggaacatcatcctactgctgggcggagggttcgcaatggcaaagggttgcgaggagtctggactgtctgtctggattggagggcagctgtag

SEQ ID NO: 24653 - DNA, 1230 bp, Artificial Sequence
  derived and/or modified sequence
atggccgtgtactggtgcaccgaggccctgcccctgagcgtgaccgccctgctgcccatcgtgctgttccccttcatgggcatcctgcccagcaacaaggtgtgcccccagtacttcctggacaccaacttcctgttcctgagcggcctgatcatggccagcgccatcgaggagtggaacctgcacagaagaatcgccctgaagatcctgatgctggtgggcgtgcagcccgccagactgatcctgggcatgatggtgaccaccagcttcctgagcatgtggctgagcaacaccgccagcaccgccatgatgctgcccatcgccaacgccatcctgaagagcctgttcggccagaaggaggtgagaaaggaccccagccaggagagcgaggagaacaccgccgccgtgagaagaaacggcctgcacaccgtgcccaccgagatgcagttcctggccagcaccgaggccaaggaccaccccggcgagaccgaggtgcccctggacctgcccgccgacagcagaaaggaggacgagtacagaagaaacatctggaagggcttcctgatcagcatcccctacagcgccagcatcggcggcaccgccaccctgaccggcaccgcccccaacctgatcctgctgggccagctgaagagcttcttcccccagtgcgacgtggtgaacttcggcagctggttcatcttcgccttccccctgatgctgctgttcctgctggccggctggctgtggatcagcttcctgtacggcggcctgagcttcagaggctggagaaagaacaagagcgagatcagaaccaacgccgaggacagagccagagccgtgatcagagaggagtaccagaacctgggccccatcaagttcgccgagcaggccgtgttcatcctgttctgcatgttcgccatcctgctgttcaccagagaccccaagttcatccccggctgggccagcctgttcaaccccggcttcctgagcgacgccgtgaccggcgtggccatcgtgaccatcctgttcttcttccccagccagagacccagcctgaagtggtggttcgacttcaaggcccccaacaccgagaccgagcccctgctgacctggaagaaggcccaggagaccgtgccctggaacatcatcctgctgctgggcggcggcttcgccatggccaagggctgcgaggagagcggcctgagcgtgtggatcggcggccagctgtag

SEQ ID NO: 24654 - protein, 388 aa, Artificial Sequence
  derived and/or modified sequence
MILWLHSLETARDHVLPIDYYFPPQKTCLICGDEASGCHYGALTCGSCKVFFKRAAEGKQKYLCASRNDCTIDKFRRKNCPSCRLRKCYEAGMTLGARKLKKLGNLKLQEEGEASSTTSPTEETTQKLTVSHIEGYECQPIFLNVLEAIEPGVVCAGHDNNQPDSFAALLSSLNELGERQLVHVVKWAKALPGFRNLHVDDQMAVIQYSWMGLMVFAMGWRSFTNVNSRMLYFAPDLVFNEYRMHKSRMYSQCVRMRHLSQEFGWLQITPQEFLCMKALLLFSIIPVDGLKNQKFFDELRMNYIKELDRIIACKRKNPTSCSRRFYQLTKLLDSVQPIARELHQFTFDLLIKSHMVSVDFPEMMAEIISVQVPKILSGKVKPIYFHTQ

SEQ ID NO: 24655 - DNA, 1167 bp, Artificial Sequence
  derived and/or modified sequence
atgatcctgtggctgcacagcctggagaccgccagagaccacgtgctgcccatcgactactacttccccccccagaagacctgcctgatctgcggcgacgaggccagcggctgccactacggcgccctgacctgcggcagctgcaaggtgttcttcaagagagccgccgagggcaagcagaagtacctgtgcgccagcagaaacgactgcaccatcgacaagttcagaagaaagaactgccccagctgcagactgagaaagtgctacgaggccggcatgaccctgggcgccagaaagctgaagaagctgggcaacctgaagctgcaggaggagggcgaggccagcagcaccaccagccccaccgaggagaccacccagaagctgaccgtgagccacatcgagggctacgagtgccagcccatcttcctgaacgtgctggaggccatcgagcccggcgtggtgtgcgccggccacgacaacaaccagcccgacagcttcgccgccctgctgagcagcctgaacgagctgggcgagagacagctggtgcacgtggtgaagtgggccaaggccctgcccggcttcagaaacctgcacgtggacgaccagatggccgtgatccagtacagctggatgggcctgatggtgttcgccatgggctggagaagcttcaccaacgtgaacagcagaatgctgtacttcgcccccgacctggtgttcaacgagtacagaatgcacaagagcagaatgtacagccagtgcgtgagaatgagacacctgagccaggagttcggctggctgcagatcaccccccaggagttcctgtgcatgaaggccctgctgctgttcagcatcatccccgtggacggcctgaagaaccagaagttcttcgacgagctgagaatgaactacatcaaggagctggacagaatcatcgcctgcaagagaaagaaccccaccagctgcagcagaagattctaccagctgaccaagctgctggacagcgtgcagcccatcgccagagagctgcaccagttcaccttcgacctgctgatcaagagccacatggtgagcgtggacttccccgagatgatggccgagatcatcagcgtgcaggtgcccaagatcctgagcggcaaggtgaagcccatctacttccacacccagtag

SEQ ID NO: 24656 - DNA, 1728 bp, Artificial Sequence
  derived and/or modified sequence
gcctatgcaaatgcctgcctgaagctgctggaggctggctttgtaccggactttgtacagggaaccagggaaacgaatgcagagtgctcctgacattgcctgtcactttttcccatgatactctggcttcacagtttggagactgccagggaccatgttttgcccattgactattactttccaccccagaagacctgcctgatctgtggagatgaagcttctgggtgtcactatggagctctcacatgtggaagctgcaaggtcttcttcaaaagagccgctgaagggaaacagaagtacctgtgcgccagcagaaatgattgcactattgataaattccgaaggaaaaattgtccatcttgtcgtcttcggaaatgttatgaagcagggatgactctgggagcccggaagctgaagaaacttggtaatctgaaactacaggaggaaggagaggcttccagcaccaccagccccactgaggagacaacccagaagctgacagtgtcacacattgaaggctatgaatgtcagcccatctttctgaatgtcctggaagccattgagccaggtgtagtgtgtgctggacacgacaacaaccagcccgactcctttgcagccttgctctctagcctcaatgaactgggagagagacagcttgtacacgtggtcaagtgggccaaggccttgcctggcttccgcaacttacacgtggacgaccagatggctgtcattcagtactcctggatggggctcatggtgtttgccatgggctggcgatccttcaccaatgtcaactccaggatgctctacttcgcccctgatctggttttcaatgagtaccgcatgcacaagtcccggatgtacagccagtgtgtccgaatgaggcacctctctcaagagtttggatggctccaaatcaccccccaggaattcctgtgcatgaaagcactgctactcttcagcattattccagtggatgggctgaaaaatcaaaaattctttgatgaacttcgaatgaactacatcaaggaactcgatcgtatcattgcatgcaaaagaaaaaatcccacatcctgctcaagacgcttctaccagctcaccaagctcctggactccgtgcagcctattgcgagagagctgcatcagttcacttttgacctgctaatcaagtcacacatggtgagcgtggactttccggaaatgatggcagagatcatctctgtgcaagtgcccaagatcctttctgggaaagtcaagcccatctatttccacacccagtgaagcattggaaaccctatttccccaccccagctcatgccccctttcagatgtcttctgcctgttataactctgcactactcctctgcagtgccttggggaatttcctctattgatgtacagtctgtcatgaacatgttcctgaattctatttgctgggctttttttttctctttctctcctttctttttcttcttccctccctatctaaccctcccatggcaccttcagactttgcttcccattgtggctcctatctgtgttttgaatggtgttgtatgcctttaaatctgtgatgatcctcatatggcccagtgtcaagttgtgcttgtttacagcactactctgtgccagccacacaaacgtttacttatcttatgccacgggaagtttagagagctaagattatctggggaaatcaaaacaaaaacaagcaaacaaaaaaaaaaa

SEQ ID NO: 24657 - DNA, 1167 bp, Artificial Sequence
  derived and/or modified sequence
atgatcctctggctccactcactcgaaactgcgcgggatcacgtcttgcccatcgattactatttcccccctcagaaaacttgtctgatttgcggggatgaggcttcaggatgccactatggcgctctcacctgtggttcctgtaaggtgttctttaaacgagctgccgagggaaaacaaaagtacctttgtgcttccagaaacgattgcaccatagacaaattccgcagaaaaaattgcccctcttgtcggctgcgtaagtgttatgaggccggcatgacgctgggtgcaaggaagttaaaaaagctaggcaacctaaagcttcaggaggagggcgaggcctcctctacaactagccctaccgaggaaacgacacagaagctgaccgtttcccatatcgaaggatatgaatgtcagccaatattcctgaacgtcctggaggccatagaacccggcgttgtatgtgccggacacgacaataatcagcctgattcctttgccgccctactctcttctttaaatgaactgggggagagacaactagtgcatgtcgtgaagtgggctaaagccctgcctggcttcaggaatcttcacgtcgatgaccagatggccgtcattcagtactcttggatgggtctaatggtgttcgcaatggggtggagaagcttcaccaatgttaatagccggatgttgtatttcgctccagatctggtcttcaatgagtaccggatgcataagagccgaatgtattcacagtgcgtgaggatgcggcacttaagccaggaatttggatggctgcagatcaccccacaggaattcctgtgtatgaaggctttactcctgtttagtatcatccctgtcgatgggcttaagaaccagaaattcttcgatgaattacgaatgaactatatcaaagagctggacaggatcatcgcatgcaagcgaaagaacccgacatcctgctcacgaagattctaccaattgactaagctgctggatagtgtccaacccatcgccagggagctgcaccagttcacgttcgacctgctgatcaagtcccacatggtgtccgtcgattttcccgagatgatggctgaaattatctccgtccaggtgccgaagattctctctgggaaagtcaagccaatctattttcacacccagtag

SEQ ID NO: 24658 - DNA, 1167 bp, Artificial Sequence
  derived and/or modified sequence
atgatcctgtggctgcacagcctggagacagcccgggaccacgtgctgcccatcgactactacttccccccccagaagacctgcctgatctgtggagatgaggccagcggctgccactacggggccctgacctgtggcagctgcaaggtgttcttcaagagagctgctgagggcaagcagaagtacctgtgtgccagcagaaatgactgcaccatcgacaagttccggaggaagaactgccccagctgccgcctgaggaaatgttatgaagctggcatgaccctgggcgccaggaagctgaagaagctgggcaacctgaagctgcaggaggagggggaggccagcagcaccaccagccccacagaggagaccacccagaagctgactgtgagccacatcgagggctatgagtgccagcccatcttcctgaatgtgctggaggccatcgagcccggggtggtgtgtgccggccatgacaacaaccagcctgacagctttgctgccctgctgagcagcctgaatgagctgggggagcggcagctggtgcacgtggtgaagtgggccaaggccctgcccggcttcaggaacctgcacgtggatgaccagatggccgtcatccagtacagctggatgggcctgatggtgtttgccatgggctggaggagcttcaccaacgtgaacagcaggatgctgtactttgccccagacctggtgttcaatgagtacaggatgcacaagagcaggatgtacagccagtgtgtgaggatgaggcacctgagccaggagtttggctggctgcagatcaccccccaggagttcctgtgcatgaaggccctgctgctcttcagcatcatccctgtggatggcctgaagaaccagaagttctttgatgagctgaggatgaactacatcaaggagctggaccgcatcatcgcctgcaagaggaagaaccccaccagctgcagccgccgcttctaccagctgaccaagctgctggacagcgtgcagcccatcgcccgggagctgcaccagttcacctttgacctgctgatcaagagccacatggtgtctgtggacttccctgagatgatggccgagatcatctctgtgcaggtgcccaagatcctgagcggcaaggtgaagcccatctacttccacacccagtag

SEQ ID NO: 24659 - DNA, 1167 bp, Artificial Sequence
  derived and/or modified sequence
atgatcctgtggctgcacagcctggagaccgcccgggaccacgtgctcccaattgactactacttcccccctcaaaaaacctgcctgatctgcggggacgaagcgtctggatgtcattatggcgccctgacatgtggctcatgcaaggtgttttttaaaagagcggctgagggcaagcaaaaatacctctgcgccagtcgcaacgactgtaccatcgataaatttcgtcgcaagaactgcccatcatgtcggctcaggaaatgctatgaagctgggatgactctcggcgcacggaagttgaaaaaactgggaaatctgaaactgcaagaggagggcgaggctagtagcaccacctccccaactgaggagaccacccaaaagctcactgttagccatattgagggatatgagtgtcagccaatctttctcaatgtgctagaagctattgaacccggcgtggtttgtgccgggcacgacaataaccaacccgacagctttgcggccctgctttcatccctgaacgagctgggagagcggcagctggtgcatgtcgtaaaatgggccaaggccctgcccggcttccggaatctccacgttgacgatcaaatggctgtgatacagtactcctggatggggttaatggtgtttgccatgggatggcgctccttcactaacgttaatagtaggatgctctacttcgccccagatctagtcttcaacgagtacaggatgcacaagagtagaatgtactcccaatgcgtgagaatgagacatctgagtcaggagttcggctggctgcagattacaccccaggaattcttgtgtatgaaagctctgctcctgttctcaatcatccccgtcgacgggctgaagaaccaaaaattcttcgatgaactgaggatgaattatataaaggaacttgaccgcattattgcttgcaaaagaaaaaatccaaccagctgttccaggcgcttttatcagctcacaaaactcctggactcggtgcagcccattgcccgcgagctgcatcaatttacattcgacctgctgatcaaaagtcatatggtctcagtggacttcccagaaatgatggccgaaattataagcgtgcaagtgcccaaaattttgtccggaaaagtgaaacccatctattttcacacgcagtag

SEQ ID NO: 24660 - DNA, 1167 bp, Artificial Sequence
  derived and/or modified sequence
atgattctctggctgcatagcctggagacagccagagaccacgtgttacctattgactattatttccctcctcagaagacttgcctgatctgcggcgatgaggctagtggctgccactatggagcattaacctgcggcagttgcaaggtgtttttcaaaagggctgctgagggaaaacagaagtacctgtgcgcttccagaaacgattgcactatcgacaagttccggcgaaagaattgcccaagttgcaggttgcggaagtgctatgaggcaggcatgactcttggcgctaggaagctcaaaaaactgggaaatctgaaactccaggaagagggcgaggcttcctcaacaacctctcccacggaggaaaccactcaaaaacttaccgtatcacacatagaggggtacgaatgccagcccatctttctcaatgtattggaggcaatagaacccggagtggtctgtgcgggtcatgacaataatcaacctgattctttcgctgctctcctttccagcctgaacgaactaggagaaagacagttagtgcacgttgtgaagtgggcaaaggcactgccaggcttccgtaatctccacgtcgacgaccagatggccgtcattcagtactcttggatgggactaatggtgtttgccatgggctggcgctcgttcacgaatgtgaacagccgcatgttgtactttgcccctgatctcgtgttcaacgagtatcggatgcacaagagtcgaatgtacagtcagtgcgtcagaatgcgacatctgagtcaggaattcggctggctgcaaatcacaccccaggaattcctgtgtatgaaggctctgctgctgttctctattattcctgtagatgggctcaaaaatcagaagttttttgatgaactccggatgaactacattaaagaactcgataggataattgcctgcaagcggaagaatcctactagctgctccaggaggttttaccagctgacaaagctgttggactctgtgcagccgatcgcaagggagctgcaccaatttacttttgaccttttaataaagagccatatggttagtgtcgatttccccgagatgatggccgaaattattagtgtgcaggtccccaagatcctgagcggaaaggtgaagcccatatattttcatacccagtag

SEQ ID NO: 24661 - protein, 1814 aa, Artificial Sequence
  derived and/or modified sequence
MMDLVLEEDVTVPGTLSGCSGLVPSVPDDLDGINPNAGLGNGLLPNVSEETVSPTRARNMKDFENQITELKKENFNLKLRIYFLEERMQQEFHGPTEHIYKTNIELKVEVESLKRELQEREQLLIKASKAVESLAEAGGSEIQRVKEDARKKVQQVEDLLTKRILLLEKDVTAAQAELEKAFAGTETEKALRLRLESKLSEMKKMHEGDLAMALVLDEKDRLIEELKLSLKSKEALIQCLKEEKSQMACPDENVSSGELRGLCAAPREEKERETEAAQMEHQKERNSFEERIQALEEDLREKEREIATEKKNSLKRDKAIQGLTMALKSKEKKVEELNSEIEKLSAAFAKAREALQKAQTQEFQGSEDYETALSGKEALSAALRSQNLTKSTENHRLRRSIKKITQELSDLQQERERLEKDLEEAHREKSKGDCTIRDLRNEVEKLRNEVNEREKAMENRYKSLLSESNKKLHNQEQVIKHLTESTNQKDVLLQKFNEKDLEVIQQNCYLMAAEDLELRSEGLITEKCSSQQPPGSKTIFSKEKKQSSDYEELIQVLKKEQDIYTHLVKSLQESDSINNLQAELNKIFALRKQLEQDVLSYQNLRKTLEEQISEIRRREEESFSLYSDQTSYLSICLEENNRFQVEHFSQEELKKKVSDLIQLVKELYTDNQHLKKTIFDLSCMGFQGNGFPDRLASTEQTELLASKEDEDTIKIGEDDEINFLSDQHLQQSNEIMKDLSKGGCKNGYLRHTESKISDCDGAHAPGCLEEGAFINLLAPLFNEKATLLLESRPDLLKVVRELLLGQLFLTEQEVSGEHLDGKTEKTPKQKGELVHFVQTNSFSKPHDELKLSCEAQLVKAGEVPKVGLKDASVQTVATEGDLLRFKHEATREAWEEKPINTALSAEHRPENLHGVPGWQAALLSLPGITNREAKKSRLPILIKPSRSLGNMYRLPATQEVVTQLQSQILELQGELKEFKTCNKQLHQKLILAEAVMEGRPTPDKTLLNAQPPVGAAYQDSPGEQKGIKTTSSVWRDKEMDSDQQRSYEIDSEICPPDDLASLPSCKENPEDVLSPTSVATYLSSKSQPSAKVSVMGTDQSESINTSNETEYLKQKIHDLETELEGYQNFIFQLQKHSQCSEAIITVLCGTEGAQDGLSKPKNGSDGEEMTFSSLHQVRYVKHVKILGPLAPEMIDSRVLENLKQQLEEQEYKLQKEQNLNMQLFSEIHNLQNKFRDLSPPRYDSLVQSQARELSLQRQQIKDGHGICVISRQHMNTMIKAFEELLQASDVDYCVAEGFQEQLNQCAELLEKLEKLFLNGKSVGVEMNTQNELMERIEEDNLTYQHLLPESPEPSASHALSDYETSEKSFFSRDQKQDNETEKTSVMVNSFSQDLLMEHIQEIRTLRKRLEESIKTNEKLRKQLERQGSEFVQGSTSIFASGSELHSSLTSEIHFLRKQNQALNAMLIKGSRDKQKENDKLRESLSRKTVSLEHLQREYASVKEENERLQKEGSEKERHNQQLIQEVRCSGQELSRVQEEVKLRQQLLSQNDKLLQSLRVELKAYEKLDEEHRRLRDGDKYPMESDNSFDLFDSSQAVTPKSVSETPPLSGNDTDSLSCDSGSSATSTPCVSRLVTGHHLWASKNGRHVLGLIEDYEALLKQISQGQRLLAEMDIQTQEAPSSTSQELGTKGPHPAPLSKFVSSVSTAKLTLEEAYRRLKLLWRVSLPEDGQCPLHCEQIGEMKAEVTKLHKKLFEQEKKLQNTMKLLQLSKRQEKVIFDQLVVTHKILRKARGNLELRPGGAHPGTCSPSRPGS

SEQ ID NO: 24662 - DNA, 5445 bp, Artificial Sequence
  derived and/or modified sequence
atgatggatctggtgctggaagaagacgtcactgtgcctggaacccttagcggctgttccggtctggtaccatccgttcctgacgacttggatgggatcaacccgaacgctggcctcgggaacggattactccctaacgtgagtgaggagaccgtttcgccaaccagggctcggaacatgaaggactttgaaaatcaaattacagagcttaagaaggagaattttaacctaaagctccgaatctactttctcgaagagagaatgcagcaggaattccacggacctactgagcatatttataagacaaacattgagcttaaggtggaggtcgaatcccttaagagagaactccaggaacgcgagcagctgcttattaaggcatctaaagcagtggagtctctggcagaagcagggggctctgaaatccagcgcgttaaggaagatgctcgaaaaaaagtacagcaggtagaggatttgctaacaaagaggatcttgttactggaaaaagacgtcacggccgcacaggctgagctcgagaaagctttcgctgggaccgagaccgaaaaggcccttaggctccggctggaatctaaactgtcagaaatgaaaaaaatgcacgagggggatctggcgatggcactggtgctggatgagaaggaccgcctcatcgaggaattgaaactgtctctgaaatcaaaggaagccttaattcagtgcctgaaagaggaaaagagccagatggcgtgcccagatgagaacgtgtcaagcggcgaactccgcggtctctgcgctgccccaagagaggaaaaagagcgcgagaccgaggctgcccagatggaacatcagaaggagaggaattctttcgaagagaggattcaagcactggaggaagacttgcgcgaaaaggagcgcgagatcgccactgaaaagaagaatagcctcaagcgcgacaaggcaattcaggggttgaccatggcccttaaatctaaagaaaagaaagtagaggagctaaattccgaaattgagaaattgtcagctgcatttgcgaaagcccgtgaagcacttcagaaggctcagacccaggagttccagggctcagaggattatgaaaccgcactttctggaaaggaggccttgagtgccgctttaaggagccagaaccttaccaagtccacggaaaaccataggctgcggagaagcattaaaaagatcacacaggagctgtcagacctccaacaggaacgagaaaggcttgagaaggacctggaggaagcccatcgggagaaaagtaaaggggattgtacaatacgggatctacgcaatgaggttgagaagctgcgcaacgaggtcaatgagcgggagaaggcaatggagaacagatacaagagcctgctgagcgaaagtaataaaaagctacacaaccaggagcaggttattaagcatctgactgaatccaccaatcagaaagacgttctactccaaaagttcaatgagaaggacctggaggtgatccagcagaattgttatttgatggctgccgaggacttggaattgcgctcggaaggtctgataacggagaagtgttcctctcaacagccccctggtagcaaaaccatctttagcaaggagaagaaacagagttccgactacgaggaactgattcaggtgctgaagaaggaacaggacatatacactcacctggtcaaatccttacaagagagtgattcaatcaacaatttacaggcagaactgaataagatttttgcccttcggaaacagctcgagcaggacgtattaagctatcaaaatctaagaaaaacccttgaagagcaaatcagtgagatccgacgtcgtgaggaagagagtttcagcctgtattctgaccaaacgtcctacctaagcatctgcctcgaggaaaataataggtttcaggtggagcacttctctcaagaggaacttaaaaaaaaagtttctgacttaatacagttggtcaaggagctgtacactgataaccaacatctgaagaagacaatctttgacctgtcatgtatggggttccagggtaacgggttccctgatagactggccagcaccgagcagacagaattgttggcttctaaggaagatgaggatactatcaaaatcggcgaagatgacgaaataaattttctgtccgaccagcacctccagcagtctaacgaaatcatgaaagatttgagcaagggtggatgtaagaacgggtacctcagacacaccgagtccaaaatatcggactgcgacggcgcacatgcccctgggtgtcttgaggagggagcctttatcaacctcttggccccgcttttcaacgaaaaggcaaccctattactggaatccagaccagatttgctcaaagtcgtcagagagctgctgctaggacaactgtttttgaccgagcaggaagtttctggagaacacctggacgggaagactgaaaagacacctaaacagaaaggcgagttggtgcatttcgtgcagacaaatagttttagtaagccccacgatgaactcaaactgtcatgcgaggctcaattagtcaaagccggcgaagtccccaaggtgggattgaaggatgcgtcggtgcagaccgtggccaccgaaggagacttactcagattcaagcacgaagcaacccgagaagcatgggaggagaaaccgatcaacaccgccctgtcagcagagcaccgtccagaaaacttgcacggagttcccggctggcaggccgcattactgtcactgcctggaataaccaatcgtgaggcaaagaagtctagattgcccatcctcataaaaccttccaggagtctgggcaacatgtaccggttgccggctacccaggaagtcgtaacacagctccagagccagatattggaactgcaaggggagttgaaggagtttaagacttgcaataagcagctccaccagaaacttattctagctgaggctgttatggaaggacgtccaacacctgataagacgcttctgaacgcccagcctcctgtgggtgcagcttaccaggatagccccggagagcagaagggcattaagaccacctccagtgtctggcgcgataaggagatggacagtgaccaacagaggagctacgagatagattccgagatatgtcctccagatgacttagcctctctgccctcttgtaaagagaaccccgaagatgtcctgagtccaacctcggtggcgacttatctaagttccaagagtcagccatccgcaaaggtttctgttatgggcaccgaccagtccgaaagtattaatacttctaatgaaacagaatacctcaaacagaagatccacgacctcgaaacggaactggagggctaccagaacttcatcttccaacttcaaaagcatagccagtgtagtgaggccattataactgtgttatgcggcacggagggggcccaggatggcctctctaagccaaaaaacggttctgacggcgaggagatgacctttagctcactgcatcaggtgcggtacgttaagcatgtcaaaatacttggcccgttggcacctgagatgatcgatagccgcgtgctggaaaatctgaagcagcagcttgaggaacaggaatataagcttcagaaggaacagaacctcaatatgcagctttttagcgagattcataaccttcaaaacaaatttagggatctttcccctcccagatatgattcactggtccagtcccaagcccgcgagttaagcttacaaaggcagcagataaaggacggtcacggcatttgcgtgatcagcagacagcacatgaataccatgattaaggccttcgaggaattgctccaggctagtgacgtggattattgcgttgccgaaggtttccaggagcagctgaaccagtgtgccgagttactcgagaaactggagaagctctttctcaatgggaaaagtgtcggagtggaaatgaacacccaaaacgagttgatggagcgcattgaagaggacaatctaacctaccaacatctgctgccggagagccccgagccttcagccagccatgcgctgagcgactacgagacatccgagaaatccttcttctctcgggaccagaagcaggacaacgaaacagagaagacctccgtgatggtgaattcgtttagtcaggacctcctcatggagcacatacaggaaatccgcaccttacgcaaaagattggaagagtcgattaagactaatgagaaactgagaaaacagttggaaaggcaggggtctgaattcgtgcaaggatcaaccagcatctttgctagtggctccgaactccactctagcctgacttccgagatccactttctgagaaagcagaatcaagccctgaacgccatgttgatcaaaggcagccgcgacaagcagaaggaaaacgataagttgagggaatccctctcccgcaagaccgtgagcctggaacacctccaaagagagtacgccagcgttaaagaggaaaatgagcgtcttcaaaaagaaggatccgaaaaggagcgacacaatcagcagctgatccaggaagttaggtgctctggccaagaactctctcgtgtgcaggaagaagtgaaacttcggcagcagttattgtcccagaatgataagcttttgcagtccctaagagtagagctgaaggcttacgaaaaactggacgaggaacacagaaggctacgggacggcgacaagtaccctatggaaagtgataattctttcgatctgtttgactcatctcaagccgtgactcccaaaagtgtttctgagacaccacccttatctgggaacgacaccgatagcttgtcctgtgattccggatctagcgccacgagtaccccctgtgtaagcaggctcgtaaccggccaccatctatgggcctccaagaacgggcgccatgtgcttggccttatagaagactatgaagccctgctgaagcagatatcccaaggccaaaggctccttgccgagatggatattcagacccaagaagctccgtcatccacctcacaagaactgggcaccaagggcccccacccggctcccttgtcaaaatttgtttcgtcagtgagcacagctaaacttacccttgaagaagcatatcggaggctgaagctcctgtggagagtatcactgccagaagatgggcaatgtcctctccattgcgaacaaattggcgaaatgaaggctgaagtgacaaaactgcacaagaagctgtttgaacaggaaaagaaactgcagaacacaatgaagctgctgcaactgtccaaaaggcaggagaaggtgatcttcgatcagctcgttgttacacataagatattgagaaaggcacgaggaaatctcgaactgcgacccggcggagctcacccgggtacgtgttctccatcccgcccaggttcttag

SEQ ID NO: 24663 - DNA, 5445 bp, Artificial Sequence
  derived and/or modified sequence
atgatggacctggtgctggaggaggatgtgacagtgcccggcaccctgagcggctgcagcggcctggtgcccagcgtgcctgatgacctggatggcatcaaccccaatgccggcctgggcaatggcctgctgcccaacgtgtctgaggagaccgtgagccccacccgggccaggaacatgaaggactttgagaaccagatcacagagctgaagaaggagaacttcaacctgaagctgcgcatctacttcctggaggagaggatgcagcaggagttccacggccccacagagcacatctacaagaccaacatcgagctgaaggtggaggtggagagcctgaagcgggagctgcaggagcgggagcagctgctgatcaaggccagcaaggctgtggagagcctggccgaggccggcggcagcgagatccagagggtgaaggaggatgccaggaagaaggtgcagcaggtggaggacctgctgaccaagaggatcctgctgctggagaaggatgtgacagctgcccaggccgagctggagaaggcctttgctggaacagaaacagagaaggccctgcggctgcggctggagagcaagctgtctgagatgaagaagatgcatgaaggagacctggccatggccctggtgctggatgagaaggaccggctgattgaggagctgaagctgagcctgaagagcaaggaggccctgatccagtgcctgaaggaggagaagagccagatggcctgcccagatgaaaatgtgagcagcggggagctgcggggcctgtgtgccgccccccgggaggagaaggagcgggagacagaggccgcccagatggagcaccagaaggagagaaattcctttgaggagcgcatccaggccctggaggaggacctgcgggagaaggagcgggagatcgccacagagaagaagaacagcctgaagagggacaaggccatccagggcctgaccatggccctgaagagcaaggagaagaaggtggaggagctgaacagcgagattgagaagctgtctgctgcctttgccaaggcccgggaggccctgcagaaggcccagacccaggagttccagggctctgaagattatgaaacagccctgagcggcaaggaggccctgtctgctgccctgcggagccagaacctgaccaagagcacagagaaccaccggctgcggcgcagcatcaagaagatcacccaggagctgagtgacctgcagcaggagcgggagcggctggagaaggacctggaggaggcccaccgggagaagagcaaaggagactgcaccatccgggacctgagaaatgaggtggagaagctgagaaatgaggtgaatgaaagagagaaggccatggagaaccgctacaagagcctgctgtctgagagcaacaagaagctgcacaaccaggagcaggtgatcaagcacctgacagagagcaccaaccagaaggatgtgctgctgcagaagttcaatgagaaggacctggaggtgatccagcagaactgctacctgatggctgctgaggacctggagctgcggtctgagggcctcatcacagagaagtgcagcagccagcagcccccaggcagcaagaccatcttcagcaaggagaagaagcagagcagtgactatgaggagctgatccaggtgctgaagaaggagcaggacatctacacccacctggtgaagagcctgcaggagagtgacagcatcaacaacctgcaggccgagctgaacaagatctttgccctgaggaagcagctggagcaggatgtgctgagctaccagaacctgaggaagaccctggaggagcagatcagcgagatcagaagaagagaggaggagagcttcagcctgtacagcgaccagaccagctacctgagcatctgcctggaggagaacaaccgcttccaggtggagcacttcagccaggaggagctgaagaagaaggtgtctgacctgatccagctggtgaaggagctgtacacagacaaccagcacctgaagaagaccatctttgacctgagctgcatgggcttccagggcaatggcttcccagaccggctggccagcacagagcagacagagctgctggccagcaaggaggatgaggacaccatcaagattggagaagatgatgagatcaacttcctgagtgaccagcacctgcagcagagcaatgagatcatgaaggacctgagcaaaggaggctgcaagaatggctacctgcggcacacagagagcaagatcagtgactgtgatggagcccacgcccctggctgcctggaggagggcgccttcatcaacctgctggcccccctcttcaatgagaaggccaccctgctgctggagagcaggccagacctgctgaaggtggtgcgggagctgctgctgggccagctgttcctgacagagcaggaggtgtctggagagcacctggatggcaagacagagaagacccccaagcagaagggggagctggtgcactttgtgcagaccaacagcttcagcaagccccatgatgagctgaagctgagctgtgaggcccagctggtgaaggccggggaggtgcccaaggtgggcctgaaggatgcctctgtgcagacagtggccacagaaggagacctgctgcgcttcaagcatgaggccacccgggaggcctgggaggagaagcccatcaacacagccctgtctgctgagcacaggcctgagaacctgcatggagtgcccggctggcaggccgccctgctgagcctgcccggcatcaccaaccgggaggccaagaagagccggctgcccatcctgatcaagcccagccgcagcctgggcaacatgtaccgcctgcctgccacccaggaggtggtgacccagctgcagagccagatcctggagctgcagggcgagctgaaggagttcaagacctgcaacaagcagctgcaccagaagctgatcctggccgaggccgtgatggagggccggcccaccccagacaagaccctgctgaatgcccagccccctgtgggcgccgcctaccaggacagccctggagagcagaagggcatcaagaccaccagctctgtgtggagggacaaggagatggacagcgaccagcagaggagctatgaaattgattctgagatctgccccccagatgacctggccagcctgcccagctgcaaggaaaatccagaagatgtgctgagccccacctctgtggccacctacctgagcagcaagagccagcccagcgccaaggtgtctgtgatgggcacagaccagagcgagagcatcaacaccagcaatgaaacagagtacctgaagcagaagatccatgacctggagacagagctggagggctaccagaacttcatcttccagctgcagaagcacagccagtgcagcgaggccatcatcaccgtgctgtgtggcacagagggcgcccaggacggcctgagcaagcccaagaatggaagtgatggagaggagatgaccttcagcagcctgcaccaggtgcgctacgtgaagcacgtgaagatcctgggccccctggcccctgagatgattgacagccgggtgctggagaacctgaagcagcagctggaggagcaggagtacaagctgcagaaggagcagaacctgaacatgcagctgttcagcgagatccacaacctgcagaacaagttccgggacctgagccccccaagatatgacagcctggtgcagagccaggcccgggagctgagcctgcagaggcagcagatcaaggatggccacggcatctgtgtgatcagccggcagcacatgaacaccatgatcaaggcctttgaggagctgctgcaggccagtgatgtggactactgtgtggccgagggcttccaggagcagctgaaccagtgtgccgagctgctggagaagctggagaagctgttcctgaatggcaagtctgtgggcgtggagatgaacacccagaatgagctgatggagcgcatcgaggaggacaacctgacctaccagcacctgctgcctgagagccctgagcccagcgccagccacgccctgagtgactatgagaccagcgagaagagcttcttcagccgggaccagaagcaggacaatgaaacagagaagacctctgtgatggtgaacagcttcagccaggacctgctgatggagcacatccaggagatccgcaccctgaggaagaggctggaggagagcatcaagaccaatgagaagctgaggaagcagctggagcggcagggcagcgagtttgtgcagggcagcaccagcatctttgccagcggcagcgagctgcacagcagcctgaccagcgagatccacttcctgaggaagcagaaccaggccctgaatgccatgctgatcaagggcagccgggacaagcagaaggaaaatgacaagctgcgggagagcctgagcaggaagacagtgtccctggagcacctgcagcgggagtatgcctctgtgaaggaggagaatgaaaggctgcagaaggagggcagcgagaaggagcggcacaaccagcagctgatccaggaggtgcgctgcagcggccaggagctgagccgggtgcaggaggaggtgaagctgcggcagcagctgctgagccagaatgacaagctgctgcagagcctgcgggtggagctgaaggcctatgagaagctggatgaggagcaccggcggctgagagatggagacaagtaccccatggagagtgacaacagctttgacctgtttgacagcagccaggccgtgacccccaagtctgtgtctgagaccccacccctgtctggaaatgacacagacagcctgagctgtgacagcggcagcagcgccaccagcaccccctgtgtgtcccggctggtgacaggccaccacctgtgggccagcaagaatggaagacatgtgctgggcctgattgaagattatgaggccctgctgaagcagatcagccagggccagaggctgctggccgagatggacatccagacccaggaggcccccagcagcaccagccaggagctgggcaccaagggcccccacccagcccccctgagcaagtttgtgtcctctgtgtccacagccaagctgaccctggaggaggcctaccgccgcctgaagctgctgtggagggtgtccctgcctgaagatggccagtgccccctgcactgtgagcagattggagagatgaaggccgaggtgaccaagctgcacaagaagctgtttgagcaggagaagaagctgcagaacaccatgaagctgctgcagctgagcaagaggcaggagaaggtgatctttgaccagctggtggtgacccacaagatcctgaggaaggcccggggcaacctggagctgcggcctggaggagcccaccctggcacctgcagccccagccggcccggcagctag

SEQ ID NO: 24664 - DNA, 5445 bp, Artificial Sequence
  derived and/or modified sequence
atgatggacctggtgctggaggaggacgtgaccgtgcccggcaccctctccgggtgcagcggactggttccctcagtgcccgatgatctggacggcattaacccaaacgccggtttgggaaatggcctgctgcctaatgtgtcagaagagactgtcagccctacccgcgcaagaaatatgaaagatttcgaaaaccaaataactgagctgaagaaggagaatttcaatctgaagctgcgaatctattttctcgaggaacggatgcagcaggaatttcatggacctactgaacacatctataagacaaatattgaattaaaagtggaggtagaaagcttgaagagggagcttcaagaaagagaacagctgctgataaaggcaagcaaggccgttgaatcactcgccgaggctgggggttccgagattcagagagtcaaggaggatgcaaggaaaaaggtgcagcaggtcgaggacttactgacgaagagaatcctgctgctcgaaaaagacgtcaccgctgctcaggcagagctggagaaagcctttgccggcacggaaacagagaaagctctgaggctgcgcttagagagtaagctgtctgaaatgaaaaagatgcatgagggcgatctcgcaatggcattggtgctcgatgaaaaggatcggctaatcgaggagctgaagctttccctcaagagtaaagaggctttgatccagtgcctgaaggaagagaaatcacagatggcatgcccggacgaaaatgtctcttccggggaactgcggggattatgcgccgcacctagggaggaaaaagagcgcgaaacagaagcagcccaaatggagcatcaaaaagagagaaactctttcgaagagaggattcaagctctggaagaggatttacgggagaaagagcgcgagatcgcgacagaaaagaagaattccctgaaaagagataaagctattcaggggctcacaatggccctcaagagtaaggaaaaaaaagtcgaggaactgaactctgagatcgaaaagttgtcagcagcatttgccaaggctcgcgaagccctgcagaaagcacagacccaggagttccaggggagtgaggattacgaaactgcccttagtggaaaggaagccttatccgccgcactccgttcacagaatctaacaaagtccaccgagaaccatcgtctccgcagatctatcaagaagatcacacaggagctgtccgacctccagcaggagcgggaacgcctggaaaaggacctggaagaggctcatcgggaaaagtcaaagggcgactgcaccatccgagatctgagaaacgaggtcgagaagttgcggaatgaggttaacgaaagggagaaagctatggagaacaggtacaagagcctgctgtctgagtccaacaaaaaactgcacaaccaggaacaggtgattaagcacctcaccgaatctacaaaccagaaggacgttctcctgcagaagtttaatgaaaaggatctagaagtgatacagcaaaattgttaccttatggcagcggaagatcttgaactgagatcagaggggctgattaccgaaaaatgttcctcccaacagccgcccgggagcaaaaccatattttccaaggagaagaaacaaagctctgattatgaagagcttatccaagtgctgaagaaagagcaggacatttatacacaccttgtgaaatcgctgcaagagtcagattctattaacaacctgcaagctgagctgaacaagatttttgctctcagaaaacagttggaacaggacgtattgtcctaccagaacctgcgtaagaccctggaggagcaaattagtgagattagacggagagaggaggagtctttctctctatacagtgaccagacgagctacctgtcaatctgtttggaagagaataaccgattccaggttgaacatttcagccaggaggaactgaagaagaaagttagcgatttaatccaactggttaaggagctctacacggataatcagcacttaaaaaaaaccatctttgatttgagctgtatggggtttcagggtaatggattccccgatcggctggcaagcacagaacagacagagttactggcctctaaagaggacgaggacaccatcaaaattggcgaagacgacgagattaactttctctctgaccaacaccttcaacagtctaacgaaatcatgaaggacctcagcaagggcggatgcaagaacggatacctgcgccacacagagagtaaaatcagcgattgtgacggggcacacgcccccggctgcttggaagagggcgcattcataaacctgctggcaccactgttcaacgaaaaggctactctccttctggagagcagacccgacctattaaaagttgtgcgggagctcctcctgggccagctctttttgacagagcaggaggtcagcggtgagcacctggacgggaagacagaaaagacacctaaacagaaaggtgagttagtgcatttcgtacaaacaaattcgttttctaagccccacgatgaattgaaactcagctgcgaggcccagcttgtcaaggctggcgaggtgccaaaggtcggccttaaagatgcctccgtccagactgtcgctactgagggagacctcctccgtttcaaacatgaggccactcgagaagcttgggaggagaagccgatcaatacggccctctcagccgagcaccgacctgagaaccttcatggcgtgccgggttggcaagcagccctcctatcactcccaggcattacgaatagagaggcgaagaagagcaggctccctatcctgattaagccaagtaggtccctgggcaacatgtatagactgccagctacacaggaggtcgtgacacagctgcaaagccaaattctggaactccagggagaactcaaagagtttaagacgtgtaacaagcagctccatcagaagctgattctagctgaggccgttatggaaggacggcccaccccagacaagacactgctgaacgcccagccccccgtgggtgccgcctatcaggacagccctggagagcagaaaggcatcaagacgactagtagtgtgtggagggataaggagatggattccgatcaacagagaagttacgaaatcgattctgaaatatgtccacctgacgacctggcctctctgccctcctgcaaggagaaccctgaggacgtgctgtctcccacttcagtggccacctacctaagtagtaaaagccagccatccgcaaaagtttcagtgatggggacggatcaatccgagagcatcaacactagcaatgagactgagtacctcaaacagaaaattcacgacctcgagaccgaactagagggttatcagaacttcatttttcaattacagaagcacagccagtgcagtgaagcaatcatcactgtgctatgcgggacagaaggggcgcaggatggcctgagcaaacctaagaatggaagcgatggagaggagatgacgttttccagtctgcaccaggtcagatacgtaaagcatgtgaagatcttaggccccctcgcgcccgagatgatcgactcacgagttctggagaacttaaaacaacagttggaagaacaagagtacaaattgcagaaggaacagaacttgaatatgcagctcttctcagaaattcacaacctgcagaataagttccgagaccttagcccgcctcgatatgatagcctggtccaatcccaggcacgggaactgagcttacagagacagcagattaaggacgggcatggaatctgtgtcatttccaggcagcacatgaatactatgataaaggctttcgaggaactgctgcaagcgagtgatgttgattattgcgtggccgaaggttttcaagaacagctgaaccagtgtgctgagctgctcgagaagctagagaagcttttcttgaacgggaagagcgtaggggttgaaatgaacactcaaaatgagctaatggagcgaattgaggaggacaacctgacataccaacatttgctgcctgagtccccagaaccctctgcttctcatgctctctctgactacgagacttccgaaaagtccttcttctctcgggaccagaaacaagacaatgaaaccgaaaagacatcagtgatggtgaattcgtttagtcaggatttgctcatggaacatattcaagagattagaacgctgcggaaaaggcttgaggaatccataaaaactaatgagaagttgagaaaacagctcgaaaggcaggggtccgaattcgtccagggatccacttcgatatttgccagcggctcagaacttcatagttcactgacaagcgaaattcacttccttcgcaagcagaaccaggcacttaacgccatgttgatcaagggcagcagagataaacagaaagagaatgataagctgcgtgagagcctatcccgcaaaaccgtgtcccttgagcatttacagcgcgaatacgcctcggtgaaagaggagaacgaacggctacagaaggagggaagcgagaaagaacgccataatcagcagctgatccaggaagtcagatgcagtggacaggagctgtcccgggtgcaagaagaggtaaaattaaggcagcagttactgagtcagaacgacaaactgctgcaatccttaagggttgagcttaaggcgtatgaaaaacttgatgaggaacatagaagactgcgtgatggggacaagtatccgatggagtcagacaactcttttgacctgttcgatagtagccaggccgttaccccaaagtcagtcagcgagactcctccactcagcggtaacgacactgactcactgtcatgcgatagcgggagcagcgcaacttcaaccccttgcgtttcgcggttggtcaccggccatcacttgtgggcctccaagaacggacgtcatgttctaggactcattgaagactacgaggccttgttgaaacagattagccagggccagagattgctggccgaaatggatattcaaacccaggaggcacccagctctacttctcaggaactaggtacaaaaggtcctcacccagccccccttagcaagttcgtgtcctcagtgtcaaccgccaagctgacgctggaagaggcttacagaaggctcaagttgctttggcgcgtgtccttgccggaggatggccagtgtcctctgcactgcgaacagattggcgaaatgaaggccgaggtgacgaagttgcacaagaagttgttcgaacaggaaaaaaagctccagaatacgatgaagctgctccaattaagtaaacgccaggaaaaggtgatatttgatcagctcgtggtgacacataaaattctgagaaaggctcggggaaatctggaactgcgcccaggcggcgcccatcccgggacgtgctccccaagtcgtccaggatcatag

SEQ ID NO: 24665 - DNA, 5444 bp, Artificial Sequence
  derived and/or modified sequence
atgatggatctcgttttggaggaggatgtcacagtaccaggcacgctgtccgggtgctcaggtttggtaccaagcgtgcccgatgacctggacggaattaacccaaacgctggcctgggaaacggactcttgccaaacgtcagcgaagagactgtcagccctacgagggctagaaatatgaaggactttgagaaccaaatcacagagttgaaaaaggagaattttaatttaaaactaagaatttacttcctggaggagaggatgcagcaggagtttcatggtcctacggagcatatctacaaaacaaatattgaattaaaggtcgaagtagagtctttgaagcgggagctgcaggaacgggagcaactacttataaaggcaagcaaagccgtcgagtctttggccgaggctggcggatccgagatacagcgtgttaaggaagatgctagaaagaaagttcagcaggtggaggatttgttgacgaaacgtattctgctccttgagaaggatgtcaccgccgcacaggcagagttggagaaagcctttgccggaacagaaacggagaaagctctgcggctgaggctagaatccaaactgagcgagatgaagaagatgcacgaaggggacctagcaatggctctcgttctcgacgagaaagaccggctaatcgaagagctgaagcttagtctgaaaagtaaggaggctctaattcaatgtctgaaggaggaaaaaagccagatggcctgtccagacgagaacgtttcgtccggtgaacttcgcggactgtgtgccgctccgagagaagaaaaggagcgggagaccgaggctgcacagatggaacatcagaaggagcgcaattccttcgaggagcggatccaggccctagaggaggacctccgggagaaagaacgcgaaattgcgacagaaaagaagaatagcctgaagcgcgataaggctatccagggcttgaccatggccttgaagtccaaagaaaagaaggtggaggagctgaattcggaaatcgagaagttgtccgcagccttcgcaaaagctcgcgaggcactgcagaaagcccagacacaggagtttcaagggtccgaagactatgagaccgccctgagcggaaaagaagctctgtccgcagcccttcggagccagaacctgactaagagtacagaaaaccataggctgcggcgtagtatcaaaaaaatcacgcaggaactcagtgacctgcaacaggaaagggagaggctggagaaggacctcgaggaggcccatagagagaaaagcaagggcgactgtactatcagggatctccgcaatgaggtggagaaactgagaaacgaggtcaatgaaagggagaaggccatggaaaatagatataaaagcctattatcagagtccaacaaaaagctgcacaatcaggagcaggtgataaagcatctgacagagtcaaccaatcagaaggacgtcttgttgcagaagttcaatgagaaggacctggaggtcattcagcaaaactgttatctgatggccgcagaagacctagaactgaggtccgagggactaatcacagaaaagtgcagctctcaacagccaccgggtagcaagactattttctccaaggagaaaaagcaaagctcagattacgaagaactcatccaggtattgaagaaggagcaggatatctatactcacctggtcaagagtttgcaagaatctgacagcattaacaacctgcaggctgaattgaataaaatctttgccctgaggaagcagctggagcaggacgtgctttcataccagaatctcaggaagactctcgaggagcagatctccgaaattaggcggagagaagaggagagctttagcttatattcagatcagacctcatacctgtctatctgcttagaagaaaataatcgcttccaagtcgaacatttctctcaagaagaactgaaaaagaaggtgtccgatctcatccagctagtgaaggagctgtacaccgataaccagcaccttaagaagacaatttttgacttgtcttgcatgggattccaaggcaatggctttcccgacagactcgcctctaccgaacagactgagctcctcgcctccaaggaggacgaagacacgattaagattggcgaggacgacgaaattaactttcttagtgaccagcatctgcagcagagcaacgagatcatgaaagatctgagtaaaggaggatgcaaaaacggctatctcaggcacacagagtcaaagatttccgactgtgatggcgctcatgcaccgggttgcctcgaggagggtgcgtttatcaacctgttagcacccttgttcaacgagaaagctacattgttgcttgagtcgcgaccggatttgctcaaagttgtgagggaattgcttctggggcaactgtttctgacggagcaggaggtgagtggcgaacaccttgacggcaagaccgaaaagactcccaagcagaaaggcgaattggtccatttcgttcagactaattcattctcgaaaccccatgatgagttgaaactctcctgcgaggctcagctagtcaaagccggtgaagtgccaaaggtgggcctcaaagacgccagtgttcagacagtcgccactgagggcgacctcctgcgcttcaaacacgaggctaccagagaggcctgggaagaaaaaccaatcaatacagcgttatccgcagaacacaggcctgagaatctgcatggggtacccggatggcaggccgcactgcttagcctgccaggtatcacaaaccgggaagctaaaaaaagccgcctgcctattcttattaagcccagtaggtcactcggcaatatgtacaggctgcctgccactcaggaggtggtgactcagttacagagtcaaattctagaactacagggcgaactcaaggagttcaagacctgcaataagcagctgcaccaaaagctgatactggccgaggccgtcatggagggccgacccaccccagacaaaaccctgctgaatgcgcagccgcctgttggcgctgcttatcaagactcaccaggcgagcaaaaagggattaaaaccacaagttccgtttggagagacaaagagatggacagtgatcagcaaagatcttacgaaattgatagtgaaatctgtccccctgatgacctggcaagtttgccaagctgtaaggagaacccagaagatgtgctgtctccaacttctgtggccacttacctcagttccaagtctcaaccgtcggctaaggtgtcagtcatgggcacagatcagagtgaaagcatcaacacttctaatgaaacagaatatctgaagcaaaaaatccatgacctggaaacggagttggaaggctatcaaaacttcattttccagctccagaagcacagtcagtgttctgaggccatcatcacagtgctctgcggtaccgaaggcgcacaagacggcctgtctaagcccaagaacggaagcgatggagaggagatgacgttcagctcattacaccaggtccgctatgtcaagcatgtgaagatcctcggcccacttgccccagaaatgatcgacagcagagtgctagaaaatcttaaacaacagttggaggaacaggagtacaagcttcaaaaagagcagaacctgaatatgcagttgttttctgagatccataatcttcagaataaattcagggacttgtctcctcccagatacgactcattggtgcagagtcaggcaagagagttgtccttacagagacagcagattaaagacggacacggaatttgtgtgattagcaggcagcacatgaacactatgattaaggccttcgaggagctcctgcaggcttcagatgttgactactgcgttgcagagggatttcaggagcaacttaatcagtgcgccgagctcttagagaagctggaaaagttgttccttaatggcaagtcagtcggcgttgaaatgaacacacaaaatgaattaatggaaaggattgaggaggataatctgacctatcagcacttgctccctgagtcccctgaaccttctgctagtcacgcgcttagcgactacgagacatctgaaaaaagcttctttagccgtgaccagaagcaggacaacgaaactgagaagacaagcgtcatggtcaactctttcagccaggacctgctcatggagcatatacaggaaattcgcaccctccgcaaaagactcgaggaaagcattaaaaccaacgaaaaactgcggaagcagctggaaagacagggttctgaatttgtgcagggttccacctctatcttcgcctccggctctgaacttcattcttcactgaccagcgaaatacacttccttaggaaacaaaaccaggctttgaatgcaatgctcataaagggctcccgcgacaagcagaaggagaacgataagctgcgtgaatcattgagtcggaagacagtatccctggagcatctgcagcgggagtacgccagcgttaaagaagagaatgagcgcttgcaaaaagaaggcagcgagaaggagaggcataaccaacagctgattcaggaggtgcgctgtagtggccaggagcttagtcgggtccaggaagaagtgaaactgcggcagcaattactgtcccagaacgataagttgctgcagagtcttagagtagaattaaaggcttacgagaagcttgacgaagaacatcgaagactcagagatggagataagtatcctatggagtcagataattctttcgacctcttcgactccagccaggccgtgacccccaagtccgtttccgaaactccacctcttagtggaaatgatactgacagcctctcatgtgactctggctctagcgcaacatcaaccccgtgcgttagcagactggtgactggtcaccacctatgggcttcaaagaatgggcgtcatgttctgggcctgatcgaagactatgaggctctgctcaagcagatatctcagggtcagagactattagccgaaatggatattcaaacccaggaggcacctagttcaaccagccaggagctgggcactaaaggtccccatcccgctccgctctccaagtttgtaagctcagtctccactgccaaactgactctggaagaggcttaccgaagactcaaactcctgtggagggtcagcttgccagaggatgggcagtgcccattacactgcgaacagattggagaaatgaaagccgaagtgacaaagttacacaaaaaattgtttgagcaagaaaagaaactgcagaacacaatgaaacttctacagctgtccaaaagacaggaaaaggtgattttcgaccagcttgtggtgacacacaagatcctgcgaaaagctcgcggaaatctggaactgagacccggaggagcccaccctggcacatgctctccgtcacgcccaggcagcta

SEQ ID NO: 24666 - DNA, 5985 bp, Artificial Sequence
  derived and/or modified sequence
ggaagaagcgccgggaaagatggcggcgtctgtggtttgaattccagcggcgccgccagagtctgaacaagagctggggtggagggggcggggacctggggagcccggcgggtcgctatcgcggggggtactagtggcgccgccgccacagacaccaacgctgtcgccacctctgtagccatgatggacttggtgttggaagaggacgtcaccgtccctgggacgctcagcggctgcagtggccttgttcccagtgtaccagatgacctggatggcatcaaccccaatgctgggttgggaaatggtctgctcccaaatgtgtcagaagaaacagtgtctcccaccagagcacggaacatgaaggactttgaaaatcaaatcactgaattgaagaaagaaaactttaacctaaagctccgcatctatttccttgaggaaagaatgcaacaggaatttcatggccccactgaacatatctacaaaactaacattgagctcaaggtggaagtagaaagtctgaagcgggaactccaggagagagagcagctgctcatcaaagcctccaaagcagttgagagcttagctgaagcaggtggctctgaaatccagcgggtgaaagaagatgctcgaaagaaggtgcagcaggtggaagatctcctaactaaaagaatactccttttggaaaaggatgtgacagccgcccaggcagaactggaaaaggcctttgcagggacagagacggagaaggctcttcggttgcgtttggaaagcaagctttcagagatgaagaagatgcacgagggggacttggcgatggctctggtcctggatgagaaagacagactgattgaggagttgaagctgtctttgaagagcaaagaagctttaattcagtgccttaaagaggagaaatctcagatggcatgtcctgatgagaatgtgtcatctggagagctccgaggactttgtgctgctccaagggaagaaaaggagagagaaactgaggctgcacaaatggagcatcagaaggagagaaacagctttgaagagaggatccaggcacttgaagaggacctgagagagaaggaaagagaaattgctacagagaagaaaaatagtctaaagagggataaagccattcagggtttaaccatggcattaaaatcaaaggaaaaaaaggttgaagaacttaactctgaaattgaaaagctcagtgctgcctttgctaaagccagagaggccctacagaaagcacagacccaggaatttcaggggtctgaagactatgagactgctctatcaggaaaggaagccctttcggctgcgctgcgctcacaaaacctcaccaagagtacagagaaccacagactgcgtagaagcattaagaagatcacccaggagctgagtgacttgcagcaggagagggagagactggagaaggacctggaggaagcccatcgagagaagagcaaaggagactgcaccatccgtgatcttagaaatgaagttgaaaaattacgcaatgaagtgaatgaaagagagaaagcaatggaaaatcgttacaagagtcttctgagtgaaagcaataaaaaattgcacaatcaagagcaagtgatcaaacatctaacagaaagtaccaatcagaaggacgtgttgcttcagaaattcaatgaaaaagatttggaagtaatacagcagaactgctatttaatggctgcagaggatcttgagctcaggagtgaaggcttaataacagaaaagtgctcttctcaacagccaccaggcagcaaaaccatcttctctaaggaaaagaaacaatcatcagactatgaagagctgattcaggtcttaaagaaagagcaggacatctatacccatctggtcaaatctctgcaggaatcagacagtatcaacaacctgcaggctgagttaaacaagatttttgccctgcggaagcaactggagcaggatgtgctttcatatcagaatttgcggaagaccttggaggagcagatcagcgaaattcggaggcgggaagaagaatcattttcactttatagtgatcaaacatcttatctaagtatttgccttgaagaaaacaatcggtttcaagtggaacatttttctcaagaagaacttaagaaaaaggtcagtgaccttatacagctagtgaaggagctgtatacagacaaccagcacctgaagaaaaccatttttgatctctcctgcatgggtttccagggaaatgggtttccagatagacttgcgtctacagaacaaacagagcttctggctagcaaggaggacgaggacacgatcaaaattggggaggatgacgagattaatttcctgagtgaccagcatttgcagcagagtaatgagattatgaaagacctttccaaaggaggctgcaaaaatggatacttaaggcacacggagtctaagatttcagattgtgatggggcccacgcacctggctgcctagaagaaggtgcattcataaacctgcttgcccctttgttcaatgagaaggccacattattactggaatccaggccagaccttctgaaagtggtacgggaactgcttctgggacaactattcttgacagagcaggaagtttctggagaacaccttgatggtaaaactgagaagacacctaagcaaaaaggtgaacttgtacattttgtccaaaccaactcattttccaagccacatgatgaactgaagttgtcttgtgaggcccagctagtaaaggcaggcgaagtgcccaaggtaggactgaaagatgcctcagtgcagactgtggccacggagggcgacctgctgagattcaagcatgaagcaacaagagaggcttgggaagagaaaccgatcaacactgcactcagcgcagagcatcggccagagaacctgcacggggtgcctgggtggcaggctgccctcctttccctccctggtattaccaacagagaggctaagaagtcccgcttgccaatcctaataaaaccatcccggtcattaggaaatatgtatcgtctccctgccacccaggaggtggtgacgcagctgcagagccagatcttggagctgcagggggagctgaaggagtttaaaacttgtaataagcaacttcaccaaaagttaattctggctgaagcagtgatggaggggaggccaacgcccgacaaaacgttgctgaatgctcagccccctgtgggagcagcctaccaggacagcccaggagagcagaaaggaattaaaaccacatcttctgtctggagagacaaggaaatggacagtgatcagcaaagaagctacgagattgactctgagatttgcccacctgatgaccttgccagcttgccatcatgcaaagaaaatcctgaagatgttctgagcccaacttcagtagctacttacctgagttccaagagtcagccttctgctaaagtcagtgtgatggggactgatcagtcagagagcattaatacctcaaatgagacagaatacttaaaacagaaaatccatgacttggaaactgagctggaaggctaccagaatttcatatttcagcttcaaaagcactcccagtgcagtgaggccataattacagttttgtgtgggacagaaggggcccaggatggcttgagcaagcccaagaatggttctgatggggaagaaatgaccttttcaagtttgcaccaagtgcgatacgtgaaacacgtgaaaatcctcggtccgctggccccagagatgattgacagcagggtgctggagaacctcaaacagcagctggaggaacaggaatacaagctgcagaaggagcagaatttgaacatgcaacttttcagtgagatccataatctgcagaataagttcagagatctctcacctcccagatacgattcattagttcagtcccaagccagggagctctcccttcaacggcagcagattaaggatggccatggcatctgtgtcatctcccgtcaacacatgaacaccatgattaaggcatttgaggagttgctgcaggccagtgatgtggattactgtgtggccgagggtttccaggaacagctgaatcaatgtgctgagctgctggagaaattggaaaagctatttctcaacggaaaatcagttggagtggaaatgaacacccagaatgaactgatggagaggattgaggaagacaacttaacctaccaacatcttctgcctgaatctcctgagccttcagcctctcatgcgctctctgattatgaaacatctgaaaagtccttcttctcacgagaccagaagcaagataatgagacagagaagacttcagttatggtgaacagtttttctcaagacttactaatggaacacatacaggaaattcgaactttgagaaagcgtttagaagaatctattaaaacaaatgagaagctacggaaacagttggaacggcaaggatctgaatttgttcaaggttctacaagcatttttgcttctggttcagagcttcatagttctctaacatcagaaattcatttcttgaggaagcagaaccaggccctcaatgcaatgctcattaaaggatccagagataaacagaaggagaatgacaaattacgagagtccctctccaggaagaccgtgagcctggagcaccttcagcgggagtatgccagcgtgaaggaagaaaatgaaaggctgcagaaagaaggcagcgagaaggagagacacaaccagcagctgatccaggaggtccgctgcagcggccaggagctgagcagggtgcaggaggaggtgaagttgaggcagcagctgctctcacagaatgacaagctattgcagtctctccgagtggagctgaaggcgtatgagaagctggatgaagagcacaggagactgagagatggtgacaaatatcccatggaaagtgataattcatttgatctgtttgattcctcccaggcagtgacaccaaaatcagtttcagagactcctccactctctgggaatgacacggactccctctcctgcgacagtggcagttcggcaactagcactccgtgtgtgtcccgcctggtcactggccaccacctgtgggccagcaagaatggccgccatgtcctgggcctgattgaggactatgaggccctgctcaaacagatcagccagggacagaggctccttgctgaaatggacattcaaacccaagaggctcccagctccacaagtcaagagctgggaacaaagggtccacacccagcaccactgagcaagtttgtgagcagtgtgagcacggccaagctgaccctggaagaggcctacaggcggctgaagcttctctggagagtctcactccccgaggatggccagtgcccccttcactgtgagcagattggagaaatgaaggcagaggtcaccaaactacataaaaaattgtttgaacaagaaaagaagttgcaaaacaccatgaagcttttgcagctgagcaagcgccaggaaaaagtcatctttgatcaattggtcgtaacccacaaaatccttcggaaggccagaggaaacctggagcttaggcctgggggagcccatccaggaacatgcagtcccagcagaccaggctcctgagaagaactttcagccaataaagcttgtgcttcccccaccgagctcacgctgtctctttgttccaagtgtggttcctatttattgaggaagaaagagctgtctggccaaaggaaatctattttttcccttcatgttttctctctgaaagttggcttgagagttgttgtcagaaaggtgcaggtgctccacaaacgggtggtaaaaaggcctcgagctcttggatgttgtatttcagatcaggggcaggcaccggagttgaggctgtgcgccttggtgggcttcacgtcttcccctggatttgcttagtactcagccagtgccacagtttgaagattctcattaaatgattcatttcatttc

SEQ ID NO: 24667 - DNA, 5445 bp, Artificial Sequence
  derived and/or modified sequence
atgatggacctggtgctggaggaggacgtgaccgtgcccggcaccctgagcggctgcagcggcctggtgcccagcgtgcccgacgacctggacggcatcaaccccaacgccggcctgggcaacggcctgctgcccaacgtgagcgaggagaccgtgagccccaccagagccagaaacatgaaggacttcgagaaccagatcaccgagctgaagaaggagaacttcaacctgaagctgagaatctacttcctggaggagagaatgcagcaggagttccacggccccaccgagcacatctacaagaccaacatcgagctgaaggtggaggtggagagcctgaagagagagctgcaggagagagagcagctgctgatcaaggccagcaaggccgtggagagcctggccgaggccggcggcagcgagatccagagagtgaaggaggacgccagaaagaaggtgcagcaggtggaggacctgctgaccaagagaatcctgctgctggagaaggacgtgaccgccgcccaggccgagctggagaaggccttcgccggcaccgagaccgagaaggccctgagactgagactggagagcaagctgagcgagatgaagaagatgcacgagggcgacctggccatggccctggtgctggacgagaaggacagactgatcgaggagctgaagctgagcctgaagagcaaggaggccctgatccagtgcctgaaggaggagaagagccagatggcctgccccgacgagaacgtgagcagcggcgagctgagaggcctgtgcgccgcccccagagaggagaaggagagagagaccgaggccgcccagatggagcaccagaaggagagaaacagcttcgaggagagaatccaggccctggaggaggacctgagagagaaggagagagagatcgccaccgagaagaagaacagcctgaagagagacaaggccatccagggcctgaccatggccctgaagagcaaggagaagaaggtggaggagctgaacagcgagatcgagaagctgagcgccgccttcgccaaggccagagaggccctgcagaaggcccagacccaggagttccagggcagcgaggactacgagaccgccctgagcggcaaggaggccctgagcgccgccctgagaagccagaacctgaccaagagcaccgagaaccacagactgagaagaagcatcaagaagatcacccaggagctgagcgacctgcagcaggagagagagagactggagaaggacctggaggaggcccacagagagaagagcaagggcgactgcaccatcagagacctgagaaacgaggtggagaagctgagaaacgaggtgaacgagagagagaaggccatggagaacagatacaagagcctgctgagcgagagcaacaagaagctgcacaaccaggagcaggtgatcaagcacctgaccgagagcaccaaccagaaggacgtgctgctgcagaagttcaacgagaaggacctggaggtgatccagcagaactgctacctgatggccgccgaggacctggagctgagaagcgagggcctgatcaccgagaagtgcagcagccagcagccccccggcagcaagaccatcttcagcaaggagaagaagcagagcagcgactacgaggagctgatccaggtgctgaagaaggagcaggacatctacacccacctggtgaagagcctgcaggagagcgacagcatcaacaacctgcaggccgagctgaacaagatcttcgccctgagaaagcagctggagcaggacgtgctgagctaccagaacctgagaaagaccctggaggagcagatcagcgagatcagaagaagagaggaggagagcttcagcctgtacagcgaccagaccagctacctgagcatctgcctggaggagaacaacagattccaggtggagcacttcagccaggaggagctgaagaagaaggtgagcgacctgatccagctggtgaaggagctgtacaccgacaaccagcacctgaagaagaccatcttcgacctgagctgcatgggcttccagggcaacggcttccccgacagactggccagcaccgagcagaccgagctgctggccagcaaggaggacgaggacaccatcaagatcggcgaggacgacgagatcaacttcctgagcgaccagcacctgcagcagagcaacgagatcatgaaggacctgagcaagggcggctgcaagaacggctacctgagacacaccgagagcaagatcagcgactgcgacggcgcccacgcccccggctgcctggaggagggcgccttcatcaacctgctggcccccctgttcaacgagaaggccaccctgctgctggagagcagacccgacctgctgaaggtggtgagagagctgctgctgggccagctgttcctgaccgagcaggaggtgagcggcgagcacctggacggcaagaccgagaagacccccaagcagaagggcgagctggtgcacttcgtgcagaccaacagcttcagcaagccccacgacgagctgaagctgagctgcgaggcccagctggtgaaggccggcgaggtgcccaaggtgggcctgaaggacgccagcgtgcagaccgtggccaccgagggcgacctgctgagattcaagcacgaggccaccagagaggcctgggaggagaagcccatcaacaccgccctgagcgccgagcacagacccgagaacctgcacggcgtgcccggctggcaggccgccctgctgagcctgcccggcatcaccaacagagaggccaagaagagcagactgcccatcctgatcaagcccagcagaagcctgggcaacatgtacagactgcccgccacccaggaggtggtgacccagctgcagagccagatcctggagctgcagggcgagctgaaggagttcaagacctgcaacaagcagctgcaccagaagctgatcctggccgaggccgtgatggagggcagacccacccccgacaagaccctgctgaacgcccagccccccgtgggcgccgcctaccaggacagccccggcgagcagaagggcatcaagaccaccagcagcgtgtggagagacaaggagatggacagcgaccagcagagaagctacgagatcgacagcgagatctgcccccccgacgacctggccagcctgcccagctgcaaggagaaccccgaggacgtgctgagccccaccagcgtggccacctacctgagcagcaagagccagcccagcgccaaggtgagcgtgatgggcaccgaccagagcgagagcatcaacaccagcaacgagaccgagtacctgaagcagaagatccacgacctggagaccgagctggagggctaccagaacttcatcttccagctgcagaagcacagccagtgcagcgaggccatcatcaccgtgctgtgcggcaccgagggcgcccaggacggcctgagcaagcccaagaacggcagcgacggcgaggagatgaccttcagcagcctgcaccaggtgagatacgtgaagcacgtgaagatcctgggccccctggcccccgagatgatcgacagcagagtgctggagaacctgaagcagcagctggaggagcaggagtacaagctgcagaaggagcagaacctgaacatgcagctgttcagcgagatccacaacctgcagaacaagttcagagacctgagcccccccagatacgacagcctggtgcagagccaggccagagagctgagcctgcagagacagcagatcaaggacggccacggcatctgcgtgatcagcagacagcacatgaacaccatgatcaaggccttcgaggagctgctgcaggccagcgacgtggactactgcgtggccgagggcttccaggagcagctgaaccagtgcgccgagctgctggagaagctggagaagctgttcctgaacggcaagagcgtgggcgtggagatgaacacccagaacgagctgatggagagaatcgaggaggacaacctgacctaccagcacctgctgcccgagagccccgagcccagcgccagccacgccctgagcgactacgagaccagcgagaagagcttcttcagcagagaccagaagcaggacaacgagaccgagaagaccagcgtgatggtgaacagcttcagccaggacctgctgatggagcacatccaggagatcagaaccctgagaaagagactggaggagagcatcaagaccaacgagaagctgagaaagcagctggagagacagggcagcgagttcgtgcagggcagcaccagcatcttcgccagcggcagcgagctgcacagcagcctgaccagcgagatccacttcctgagaaagcagaaccaggccctgaacgccatgctgatcaagggcagcagagacaagcagaaggagaacgacaagctgagagagagcctgagcagaaagaccgtgagcctggagcacctgcagagagagtacgccagcgtgaaggaggagaacgagagactgcagaaggagggcagcgagaaggagagacacaaccagcagctgatccaggaggtgagatgcagcggccaggagctgagcagagtgcaggaggaggtgaagctgagacagcagctgctgagccagaacgacaagctgctgcagagcctgagagtggagctgaaggcctacgagaagctggacgaggagcacagaagactgagagacggcgacaagtaccccatggagagcgacaacagcttcgacctgttcgacagcagccaggccgtgacccccaagagcgtgagcgagaccccccccctgagcggcaacgacaccgacagcctgagctgcgacagcggcagcagcgccaccagcaccccctgcgtgagcagactggtgaccggccaccacctgtgggccagcaagaacggcagacacgtgctgggcctgatcgaggactacgaggccctgctgaagcagatcagccagggccagagactgctggccgagatggacatccagacccaggaggcccccagcagcaccagccaggagctgggcaccaagggcccccaccccgcccccctgagcaagttcgtgagcagcgtgagcaccgccaagctgaccctggaggaggcctacagaagactgaagctgctgtggagagtgagcctgcccgaggacggccagtgccccctgcactgcgagcagatcggcgagatgaaggccgaggtgaccaagctgcacaagaagctgttcgagcaggagaagaagctgcagaacaccatgaagctgctgcagctgagcaagagacaggagaaggtgatcttcgaccagctggtggtgacccacaagatcctgagaaaggccagaggcaacctggagctgagacccggcggcgcccaccccggcacctgcagccccagcagacccggcagctag

SEQ ID NO: 24668 - protein, 350 aa, Artificial Sequence
  derived and/or modified sequence
MEGVAVVTAGSVGAAKTEGAAALPPPPPVSPPALTPAPAAGEEGPAPLSETGAPGCSGSRPPELEPERSLGRFRGRFEDEDEELEEEEELEEEEEEEEEDMSHFSLRLEGGRQDSEDEEERLINLSELTPYILCSICKGYLIDATTITECLHTFCKSCIVRHFYYSNRCPKCNIVVHQTQPLYNIRLDRQLQDIVYKLVINLEEREKKQMHDFYKERGLEVPKPAVPQPVPSSKGRSKKVLESVFRIPPELDMSLLLEFIGANEGTGHFKPLEKKFVRVSGEATIGHVEKFLRRKMGLDPACQVDIICGDHLLEQYQTLREIRRAIGDAAMQDGLLVLHYGLVVSPLKIT

SEQ ID NO: 24669 - DNA, 1053 bp, Artificial Sequence
  derived and/or modified sequence
atggagggggtggctgtagtgacagctgggtctgtgggggccgccaaaaccgagggagccgccgctttacctcccccccctccagtatctccacctgcactgacacccgcacccgccgcaggggaagagggcccagcacctctgtctgaaacaggggcacccggctgcagcggcagcagacctcctgaattggagcctgagagaagtctcggccgattcagaggcagattcgaagatgaggacgaggaactcgaagaggaagaggaacttgaagaggaggaagaagaagaggaagaggacatgtcacacttctccttgcgcctagagggaggacgtcaggacagcgaagatgaggaggaaaggctgatcaatctgagcgagcttacaccttacatactctgcagcatttgcaaaggatacctgatcgatgccactacaattactgagtgtctgcatacattttgcaaatcctgcattgttcggcacttctattattctaatagatgtcccaaatgcaatatagtcgttcatcagactcagcctctttacaacattcgactagatagacaactgcaggacatcgtgtacaaactggtgataaatctcgaggaacgagaaaagaaacaaatgcacgacttctacaaggagcggggattggaagtgccaaagcccgccgtccctcagccagtacctagttcaaagggtcgatccaaaaaggtgttggaatcagtgtttagaataccaccagagctggatatgtccctgctgctggaattcatcggagcaaacgaaggcaccggccattttaagccgttggaaaagaaatttgtacgggtgagtggcgaagccacaattgggcatgtcgaaaaatttctgagacggaagatggggctggacccagcatgtcaggtagacatcatttgcggggaccaccttttggaacaataccagacactgagggagatcaggagagctatcggagatgctgctatgcaagatggcctgctggtcctgcattacggcctggtggtgtctccgcttaagatcacttag

SEQ ID NO: 24670 - DNA, 1053 bp, Artificial Sequence
  derived and/or modified sequence
atggagggcgtggccgtggtgacagctggctctgtgggcgccgccaagacagaaggagctgctgccctgcccccacctcctcctgtgtccccaccagccctgaccccagccccagctgctggggaggagggccctgcccccctgtctgaaacaggagcccctggctgcagcggcagcaggcctcctgagctggagcctgagaggagcctgggccgcttccggggccgctttgaagatgaagatgaggagctggaggaggaggaggagctggaggaggaggaggaggaggaggaggaggacatgagccacttcagcctgcggctggagggcggccggcaggacagtgaagatgaggaggagcggctcatcaacctgtctgagctgaccccctacatcctgtgcagcatctgcaagggctacctgattgatgccaccaccatcacagaatgtctgcacaccttctgcaagagctgcatcgtgcgccacttctactacagcaaccgctgccccaagtgcaacatcgtggtgcaccagacccagcccctgtacaacatccggctggaccggcagctgcaggacatcgtgtacaagctggtgatcaacctggaggagcgggagaagaagcagatgcatgacttctacaaggagcggggcctggaggtgcccaagccagctgtgccccagcctgtgcccagcagcaagggccgcagcaagaaggtgctggagagcgtcttccgcatccccccagagctggacatgagcctgctgctggagttcatcggggccaatgaaggcaccggccacttcaagcccctggagaagaagtttgtgcgggtgtctggagaggccaccatcggccacgtggagaagttcctgcggaggaagatgggcctggaccctgcctgccaggtggacatcatctgtggggaccacctgctggagcagtaccagaccctgcgggagatcagaagagccatcggagatgctgccatgcaggacggcctgctggtgctgcactacggcctggtggtgagccccctgaagatcacctag

SEQ ID NO: 24671 - DNA, 1053 bp, Artificial Sequence
  derived and/or modified sequence
atggagggcgtggccgtggtgaccgccggcagcgtgggcgccgccaagaccgaaggagcagcagctctgccaccccctccacccgtctcccctccagcacttactcccgcccccgcagcgggagaagagggccccgccccactttccgagaccggcgcgccaggctgcagcgggtcccggccacctgagctggagcccgaacggtccttgggtcgattcagagggcgtttcgaggatgaagatgaggaactggaggaagaggaggaactggaagaggaagaagaggaggaggaggaggatatgagccactttagcctgcgtttagaaggagggaggcaggattcagaggatgaggaggaacgccttattaacctgagtgagctcacaccctacattctctgcagtatttgtaaaggctacttaattgacgctacaacaattactgagtgtctgcacacgttctgtaagtcgtgcattgtccgccacttttactatagcaacagatgccctaaatgtaacattgttgtccatcagacgcaaccgctctacaacatccgcctggatcggcagctgcaggacattgtgtacaagttagtgattaacttggaagagagagagaagaaacagatgcacgacttctataaagagagggggctggaagtcccgaagcctgcagtgccccagcctgttccttcctccaagggtagatccaagaaggtcctggaatccgtgtttcgcattccccctgagctggacatgtccttgctgttagaatttataggagctaacgaaggaacaggacactttaagcccctcgagaagaagttcgtgcgggtgagcggggaggccaccattggccacgtggaaaagtttttgcgcaggaaaatggggctggacccggcttgccaggttgacataatttgtggagaccatttgcttgaacagtaccagactctccgcgaaattaggcgggccattggtgatgcagcaatgcaggacggattactggtactccactacggtctggtcgtctccccccttaagatcacctag

SEQ ID NO: 24672 - DNA, 2230 bp, Artificial Sequence
  derived and/or modified sequence
ggcgtccgaggccggccgaactcccgcgctctcccgccgcctcgcctcgcctggtgtctctcccgaccatggagggggtcgcggtggtgacggcgggcagcgtaggcgctgccaaaaccgagggagctgcagccttgccgcctccgcctcctgtctccccgcccgccctcacccctgcacccgcagcgggtgaggagggaccggcgcctctgtctgagacgggggctcccggctgctccggctcccggccccctgagctggagccggagcgcagcctgggccgcttcagaggccgcttcgaggacgaggacgaggagttggaagaagaagaggagctggaggaggaagaagaggaggaggaggaggacatgagtcacttctcgttgaggctggagggaggccggcaggactcggaggacgaggaggagcgcctgattaatctctctgagctgaccccatacatcttgtgttccatttgcaaaggttacttaatagatgcaactaccatcacagaatgtcttcataccttttgtaaaagctgcatcgtaagacatttttactacagcaacagatgtccaaaatgcaatatagtagtacatcagacacaacctctttataacataaggttggaccgacagttacaagacatagtgtacaaattagtgatcaatctagaggaaagagaaaaaaagcaaatgcatgatttctataaagaaagaggtctagaagtacctaaacctgctgttccacagccagtcccttcaagcaaaggaagatctaaaaaagtcctagaatcagtgtttcgtattccacctgaacttgatatgtctttattactggagttcattggtgctaatgaaggcacgggacattttaagccattggaaaagaagtttgttcgagtttcaggagaagcaactattggacatgtagaaaaattcctcagaagaaaaatgggtcttgatccagcttgtcaggtagatataatctgtggtgatcacctgttggagcagtatcaaactctaagggaaatccgacgtgcaataggtgatgcagcaatgcaggatggtctgcttgtccttcattatggtcttgtggtttctcctctgaagataacttgaagattctaggcacattatgaggagggaaacaaaggaggcttctgcaggactgcatctcaccaaagatttccatgaaatgtaattgctaccactttgctgttcaagacataacttacctatttttagcaccaagaattatagcgtttataagtacaacttggaacgatggaatgcatctgttactagagactgtatataaaaagcagccaaagctcaggggaaatttttcaaaaattgaattttaaaatttcttatgattttaaataccttgacattgattttgcttcccatctttgaagtaattggttagttttctttgttcagccatttcaagttggtggttgggatatctgctctctgggatggcatcagttgggcagtcatctttttggaagagaagtgtgcttttgagtggaagattcaaagccagtctttgttaaactgcagggtgtactctcaaagaccaaaactattggccacttttgtatgttgccagcatattttgaacttgtacctttttttatactagcaacactacaaaggagaagttactcatttcaaaatggatgaattgttattatgtgtgaagagactctgagtttatgatctgtgccataaaatttcagtgtaataagacttcttcaatacatcttccaataaggggtgcttctttgtgacagtatttttatttctgacattcattttatttgggtacatagtgtggttgttgataccttgcaatagtattgcttctgaaagtaataaaaaattttaggagaatttgagaagtttacagaattacttattcattgttttcttagtaagtcagtttaatgtttatttttctcattatttcatcactgcaataaagaataagggtgtttgagctcacctccatgcaaagacttcagttttaaaacattatttgcctaaaattagcattgtgatgctttctgaaagaaatattttataaatcctgtttaacagcagaatttctgaatgtgtagagactactacaaaattggaaaaagattggcaattctttgtaaagaatttgtgaattgtgtataaatttattctaacatttaataaaaatgtattttaaccta

SEQ ID NO: 24673 - DNA, 1053 bp, Artificial Sequence
  derived and/or modified sequence
atggaaggtgtggctgtggtgacggccggaagcgtcggggctgctaagaccgagggggcagcagccctcccacctcctccacctgtgagtcccccagctctcacacctgcgcctgccgcaggagaggagggcccagctcctctttctgaaactggcgctcccggatgtagtggcagtcgtccgcctgaattagaacccgaaagatctttaggcagattcagaggccgttttgaggacgaagacgaggagttggaagaagaggaagagctagaggaggaggaagaggaagaggaggaggatatgagccacttctccctaaggctggagggaggtcgacaggacagtgaagacgaggaggagaggctgattaatctgtctgaactaactccatatatcctctgttcaatctgcaaaggctatctcatcgatgccaccactataacagagtgtcttcacacgttttgtaaatcctgcattgtacgacatttctactacagcaaccgctgtcctaaatgtaacatcgtggtgcaccagacgcaaccgctgtacaatatccggctggataggcagctgcaggacatagtctacaaattggtcattaacctggaggagcgcgagaaaaagcagatgcatgatttctacaaggagaggggtctcgaggtcccaaaacctgctgtcccacagcccgtaccgagctccaagggtcgaagtaagaaggttctggagagcgtgttccggattcctcctgagttggacatgagccttttactcgaatttattggggcaaatgagggtacagggcacttcaaacctctggagaaaaaattcgtgcgcgtgagcggcgaggccactattggccacgttgagaaatttctgcgcaggaagatgggactggatcctgcttgccaggtggacatcatatgtggtgatcacctcctagaacaataccagactctgcgagaaataaggagggcaatcggcgacgccgctatgcaggacggtctcctggtacttcactacggcctcgttgtgagtccattgaagatcacttag

SEQ ID NO: 24674 - DNA, 1053 bp, Artificial Sequence
  derived and/or modified sequence
atggagggcgtggccgtggtgaccgccggcagcgtgggcgccgccaagaccgagggcgccgccgccctgcccccccccccccccgtgagcccccccgccctgacccccgcccccgccgccggcgaggagggccccgcccccctgagcgagaccggcgcccccggctgcagcggcagcagaccccccgagctggagcccgagagaagcctgggcagattcagaggcagattcgaggacgaggacgaggagctggaggaggaggaggagctggaggaggaggaggaggaggaggaggaggacatgagccacttcagcctgagactggagggcggcagacaggacagcgaggacgaggaggagagactgatcaacctgagcgagctgaccccctacatcctgtgcagcatctgcaagggctacctgatcgacgccaccaccatcaccgagtgcctgcacaccttctgcaagagctgcatcgtgagacacttctactacagcaacagatgccccaagtgcaacatcgtggtgcaccagacccagcccctgtacaacatcagactggacagacagctgcaggacatcgtgtacaagctggtgatcaacctggaggagagagagaagaagcagatgcacgacttctacaaggagagaggcctggaggtgcccaagcccgccgtgccccagcccgtgcccagcagcaagggcagaagcaagaaggtgctggagagcgtgttcagaatcccccccgagctggacatgagcctgctgctggagttcatcggcgccaacgagggcaccggccacttcaagcccctggagaagaagttcgtgagagtgagcggcgaggccaccatcggccacgtggagaagttcctgagaagaaagatgggcctggaccccgcctgccaggtggacatcatctgcggcgaccacctgctggagcagtaccagaccctgagagagatcagaagagccatcggcgacgccgccatgcaggacggcctgctggtgctgcactacggcctggtggtgagccccctgaagatcacctag

SEQ ID NO: 24675 - protein, 369 aa, Artificial Sequence
  derived and/or modified sequence
MFCTSGGNSASVMSMRPVPGSLSSLLHLHNRQRQPMPASMPGTLPNPTMPGSSAVLMPMERQMSVNSSIMGMQGPNLSNPCASPQVQPMHSEAKMRLKAALTHHPAAMSNGNMNTMGHMMEMMGSRQDQTPHHHMHSHPHQHQTLPPHHPYPHQHQHPAHHPHPQPHHQQNHPHHHSHSHLHAHPAHHQTSPHPPLHTGNQAQVSPATQQMQPTQTIQPPQPTGGRRRRVVDEDPDERRRKFLERNRAAATRCRQKRKVWVMSLEKKAEELTQTNMQLQNEVSMLKNEVAQLKQLLLTHKDCPITAMQKESQGYLSPESSPPASPVPACSQQQVIQHNTITTSSSVSEVVGSSTLSQLTTHRTDLNPIL

SEQ ID NO: 24676 - DNA, 1110 bp, Artificial Sequence
  derived and/or modified sequence
atgttctgcacaagcggaggaaactctgccagcgtgatgtctatgaggcccgtccccgggagcctatcctcattactgcacctccataaccgccagaggcagcccatgccagcctctatgcctggtactttgccgaatcccacaatgccagggtcttcggccgtgctgatgccaatggaaaggcaaatgagcgtaaatagtagcattatgggtatgcagggccccaacctgtccaatccttgcgcaagtcctcaggtgcaacctatgcatagtgaggctaaaatgcggctcaaagccgcactgactcaccaccctgcggctatgagtaacggtaacatgaacactatgggccatatgatggagatgatgggctcaaggcaggatcaaaccccccatcatcacatgcactctcatcctcaccaacatcaaacacttccaccccatcacccctaccctcaccagcaccagcaccccgctcatcatcctcacccacagccccatcaccagcagaaccaccctcaccaccacagtcacagccacctacacgcccatcctgcacaccatcagacttctccccatcctccactccatacgggtaaccaggcacaggtaagccccgcaacgcaacagatgcagcctacccaaacaatccagccgccgcagccaacaggggggaggagacggagggtggttgacgaagaccctgacgaacggcgccgcaagttcctcgaaagaaacagagccgcggccacacgttgcaggcagaaacgtaaagtgtgggtcatgagtcttgagaaaaaggctgaagaattaacacagactaatatgcagctccagaacgaagtaagcatgctgaaaaatgaagttgcccaactgaaacagctgctgttgacacacaaggattgcccaattactgccatgcagaaagaatcacagggctatctctcgccggagtccagtccgcccgcatccccagtgcccgcatgttctcaacagcaggtgattcagcacaatactataacaacctcgtctagtgtgtccgaagtcgtcggttcaagcaccctgtcccagctcacaactcatagaaccgacctgaaccccatactgtag

SEQ ID NO: 24677 - DNA, 1110 bp, Artificial Sequence
  derived and/or modified sequence
atgttctgcaccagcggcggcaacagcgcctctgtgatgtccatgaggcctgtgcccggcagcctgagcagcctgctgcacctgcacaaccggcagaggcagcccatgcctgcctccatgcctggcaccctgcccaaccccaccatgcctggcagcagcgctgtgctgatgcccatggagcggcagatgtctgtgaacagcagcatcatgggcatgcagggccccaacctgagcaacccctgtgccagcccccaggtgcagcccatgcacagcgaggccaagatgaggctgaaggccgccctgacccaccaccctgctgccatgagcaatggaaacatgaacaccatgggccacatgatggagatgatgggcagccggcaggaccagaccccccaccaccacatgcacagccacccccaccagcaccagaccctgcccccccaccacccctacccccaccagcaccagcacccagcccaccacccccacccccagccccaccaccagcagaaccacccccaccaccacagccacagccacctgcacgcccacccagcccaccaccagaccagcccccacccccccctgcacacaggcaaccaggcccaggtgtccccagccacccagcagatgcagcccacccagaccatccagcccccccagcccactggaggaagaagaagaagagtggtggatgaagatcctgatgagaggaggaggaagttcctggagaggaacagagctgctgccacccgctgccggcagaagaggaaggtgtgggtgatgagcctggagaagaaggccgaggagctgacccagaccaacatgcagctgcagaatgaggtgtccatgctgaagaatgaggtggcccagctgaagcagctgctgctgacccacaaggactgccccatcacagccatgcagaaggagagccagggctacctgagccctgagagcagccccccagccagccctgtgcctgcctgcagccagcagcaggtgatccagcacaacaccatcaccaccagcagctctgtgtctgaggtggtgggcagcagcaccctgagccagctgaccacccacaggacagacctgaaccccatcctgtag

SEQ ID NO: 24678 - DNA, 1110 bp, Artificial Sequence
  derived and/or modified sequence
atgttctgcaccagcggcggcaacagcgccagcgtgatgagcatgcgccccgtgcccggaagtctctcttcgcttcttcacttgcacaataggcagcggcagccgatgcccgcaagcatgccagggactctgccaaatccaaccatgcctgggtcctcggccgtcctgatgccaatggaaaggcagatgagcgtgaattcctcgattatgggcatgcagggacctaacctgtctaatccctgtgcctcaccccaggtgcagcctatgcatagcgaggcgaagatgagactcaaagcagctctcacccaccaccctgctgcaatgtctaacgggaatatgaacacaatgggccacatgatggaaatgatgggcagcaggcaagaccagaccccccaccaccatatgcatagccaccctcaccagcatcagactcttcctcctcatcacccctatcctcaccagcaccaacatcctgcccatcatccacatccccagccccatcatcaacagaaccaccctcatcaccatagccatagtcacctgcacgcccaccctgcacaccaccaaaccagcccgcatcctccgctgcatacagggaaccaagcccaggtgtccccagccacccagcaaatgcagccaactcagacaatccaaccccctcagcccaccggaggcaggcgtcgtcgtgtcgttgacgaggaccctgatgaacggagacgtaagtttctcgagagaaatcgagctgctgccacaagatgtcggcagaagaggaaggtgtgggtgatgtcgctcgagaagaaagccgaggaactgactcaaaccaacatgcagctgcagaacgaggtttcgatgctgaagaatgaagtggctcagctgaagcagttgctgctcacccataaggactgtccgattacggcgatgcagaaagaatcacagggttatctttcccctgagtcctcccccccagccagtcctgtcccagcttgcagccaacagcaggttatacaacacaacacaattacaacgagcagtagcgtgtcagaggtcgttggctccagtacactttcgcaactaactacccacaggactgaccttaatcctatactctag

SEQ ID NO: 24679 - DNA, 1110 bp, Artificial Sequence
  derived and/or modified sequence
atgttttgtacgtcaggaggtaactccgcctcggtgatgtcaatgcggccagtccccggatccttaagctctctgctccatctgcataaccgtcagcgccaaccaatgccagcctccatgcctggtactctgcccaaccccacgatgcctgggtcttcagccgtgctcatgccaatggaacgccagatgtctgtaaacagttctataatgggcatgcaaggccctaacctaagcaacccttgcgctagcccacaggttcagcctatgcatagcgaggcaaagatgcggttaaaagcagcgttgactcaccaccccgcagccatgtccaatggtaatatgaatacaatgggccacatgatggaaatgatgggatcccgccaggatcaaacgcctcatcaccatatgcattcacatccacatcaacatcaaacacttcccccacaccatccatatccccaccaacaccagcaccccgctcaccatccccatccacaaccacaccaccagcagaaccacccacaccaccactcccattcccacctgcatgctcaccctgcccaccatcagacctccccacaccccccactgcacaccggaaatcaagcccaagtttcccccgcaacacagcaaatgcaacctacccagaccatccaaccaccccagccaaccggtggacgcaggcgacgggttgttgacgaggatcccgatgagcggagaagaaagttcctcgagcggaatagagctgctgctactcggtgtaggcagaagcgaaaagtgtgggttatgagcttagagaagaaggccgaggaactaacccagaccaatatgcagctgcaaaacgaggtatctatgctgaagaatgaggtcgcccaattgaaacagttgctcctgacccacaaggattgtcccatcacagctatgcagaaagaaagccagggatacctcagtcctgaaagttccccaccagctagcccagtgcctgcctgtagtcaacagcaagtgatccagcacaataccatcacaaccagcagcagcgtgtcagaggtggtgggctcttctaccttgtcccagctcacaacacatcgtactgacttaaaccctatcctgtag

SEQ ID NO: 24680 - DNA, 2001 bp, Artificial Sequence
  derived and/or modified sequence
agagagcaagtgagcgagagcccagccggagggagagccagagctaggcgcaaaagaagggccagcacattacatcatcgcttggcctggaatcaaatgggaaggatatgactcactcaagctagttaagctttggctcaaattctacacacactcattccagagctctcatgttctgcacctcaggagggaattcagcctcagtgatgtccatgaggcctgtcccaggctctctatcttctctgctacatctccacaacagacagagacagcccatgccagcctccatgcctgggaccctgcccaaccctacaatgccaggatcttccgccgtcttgatgccaatggagcgacaaatgtcagtgaactccagcatcatggggatgcaaggtccaaatctcagcaacccctgtgcttctccccaggtccagccaatgcattcagaagccaaaatgaggttgaaggctgcattgactcaccaccctgctgccatgtcaaatgggaacatgaacaccatgggacacatgatggagatgatgggctcccggcaggaccagacgccacaccatcacatgcactcgcacccgcatcagcaccagacactgccaccccatcacccttacccacaccagcaccagcacccagcacaccatcctcaccctcaaccccatcaccagcagaaccatccacatcaccactcccattcccaccttcatgcacacccagcacatcaccagacctcgccacatccgcccctgcacaccggcaaccaagcacaggtttcaccagcaacacaacagatgcagccaacccagacaatacagccaccccagcccacaggggggcgccggcgaagggtggtagacgaggatccggacgagaggcggcggaaatttctggaacggaaccgggcagctgccacccgctgcagacagaagaggaaggtctgggtgatgtcattggaaaagaaagcagaagaactcacccagacaaacatgcagcttcagaatgaagtgtctatgttgaaaaatgaggtggcccagctgaaacagttgttgttaacacataaagactgcccaataacagccatgcagaaagaatcacaaggatatctaagtccagagagtagccctcctgctagtcctgtcccagcttgctcccagcaacaagtcatccagcataataccatcactacttcctcatcggtcagcgaggtggtaggaagctccaccctcagccagctcaccactcacagaacagacctgaatccgattctttaaaatgcaccatcagacctggcctccaagaagagctgtagcgtaccatgcgtcctttcttttaagggcatttttagaattaactcagacctggaagactcctcagttcttcaaagactggctttcatttttatagttattatggaaatgttgtcttttatacttagttatataagaaaaaagggagttatgcaattaatatctatcagcttgggaaacgctttggtgcttttctccagttttctggtaccagttacttgtttataaactgaaccttttctgtatatagccatggtttcattcttatcagtccaaccctttgcctgaaacattgaatcttgttaaaccacagcttttagctaaaatgaggtatacctagatgtcaagtaagacagatccaaggtaactgggtaggaaatcttttgacatcttaactcatgttgagtttgtgctgtggtgtcaccagaattccagataaacacacagcctttcccatacctttttttttcttactataaaatattataagatccattgatgtccaaataataccaccaagcatctcttcacctctcctcctcttggtccacttgctaatgcccagttttcttctccatttccactttttcttaggctccctatttactattcattttgacttccttctgttttatttttttccctttagcattgcatgtgaataagaaaataatgtttaaagaaa

SEQ ID NO: 24681 - DNA, 1110 bp, Artificial Sequence
  derived and/or modified sequence
atgttctgcaccagcggcggcaacagcgccagcgtgatgagcatgagacccgtgcccggcagcctgagcagcctgctgcacctgcacaacagacagagacagcccatgcccgccagcatgcccggcaccctgcccaaccccaccatgcccggcagcagcgccgtgctgatgcccatggagagacagatgagcgtgaacagcagcatcatgggcatgcagggccccaacctgagcaacccctgcgccagcccccaggtgcagcccatgcacagcgaggccaagatgagactgaaggccgccctgacccaccaccccgccgccatgagcaacggcaacatgaacaccatgggccacatgatggagatgatgggcagcagacaggaccagaccccccaccaccacatgcacagccacccccaccagcaccagaccctgcccccccaccacccctacccccaccagcaccagcaccccgcccaccacccccacccccagccccaccaccagcagaaccacccccaccaccacagccacagccacctgcacgcccaccccgcccaccaccagaccagcccccacccccccctgcacaccggcaaccaggcccaggtgagccccgccacccagcagatgcagcccacccagaccatccagcccccccagcccaccggcggcagaagaagaagagtggtggacgaggaccccgacgagagaagaagaaagttcctggagagaaacagagccgccgccaccagatgcagacagaagagaaaggtgtgggtgatgagcctggagaagaaggccgaggagctgacccagaccaacatgcagctgcagaacgaggtgagcatgctgaagaacgaggtggcccagctgaagcagctgctgctgacccacaaggactgccccatcaccgccatgcagaaggagagccagggctacctgagccccgagagcagcccccccgccagccccgtgcccgcctgcagccagcagcaggtgatccagcacaacaccatcaccaccagcagcagcgtgagcgaggtggtgggcagcagcaccctgagccagctgaccacccacagaaccgacctgaaccccatcctgtag

SEQ ID NO: 24682 - DNA, 381 bp, Artificial Sequence
  derived and/or modified sequence
atgggcatgcggttgcaactccttcgggacaggcgtatttcatccagaggcccaggactgcatcgagcaaaagcagatccccaacagcagaagcgactcaccactggactgatgacgcaagcagagactcagaaggaagctcagcagaggcaggccgcgatgagaaaaacggctctatggcatacgggacatctgcaacctaagacgcatacccatactggcatgcacactcagacccacagggaacgggagcgcaatacccagcggctgagagacagggagaggagggaaaatgggagacacactcatactcacacagaaacgcacacccaacgccataccgaagaagccctgaaacacaccccaccaggcaatccctag

SEQ ID NO: 24683 - protein, 110 aa, Artificial Sequence
  derived and/or modified sequence
MKCEETHAPNSNWVYVMLPSKKTVRMPSVTQRLRDPDINPCLSESDASTRCLDENNYDRERCSTYFLRYKNCRRFWNSIVMQRRKNGVKPFMPTAAERDEILRAVGNMPY

SEQ ID NO: 24684 - protein, 94 aa, Artificial Sequence
  derived and/or modified sequence
MLPSKKTVRMPSVTQRLRDPDINPCLSESDASTRCLDENNYDRERCSTYFLRYKNCRRFWNSIVMQRRKNGVKPFMPTAAERDEILRAVGNMPY

SEQ ID NO: 24685 - DNA, 333 bp, Artificial Sequence
  derived and/or modified sequence
atgaaatgtgaggagactcatgcacccaatagtaattgggtctatgtgatgttgccctccaagaagacggtccgaatgccttctgttacacagcgtttaagagatccagacatcaacccttgcctgagcgaatccgatgcttccacgcgctgtctggatgagaacaactatgatagagagcgatgttctacttactttctgcggtataagaattgtagaaggttttggaattccatcgttatgcagaggaggaaaaatggagtaaagccattcatgcccacagctgccgagcgtgacgagatcctgcgggcagtcgggaatatgccatactag

SEQ ID NO: 24686 - DNA, 285 bp, Artificial Sequence
  derived and/or modified sequence
atgctgcccagtaagaagacggtgcggatgcctagcgtaacacagaggctgcgggaccccgatattaatccctgtctgagcgaatctgacgcctcaacccggtgtctcgatgaaaataattacgacagggagcggtgttctacctatttcctcaggtataaaaattgtcggaggttctggaactcgatcgttatgcagagaagaaagaacggcgtgaagccattcatgcctactgccgctgaacgcgatgagatactccgtgccgttggaaacatgccctattag

SEQ ID NO: 24687 - DNA, 333 bp, Artificial Sequence
  derived and/or modified sequence
atgaagtgtgaggagacccacgcccccaacagcaactgggtgtatgtgatgctgcccagcaagaagacagtgaggatgcccagcgtgacccagaggctgcgggaccctgacatcaacccctgcctgtctgagagtgatgccagcacccgctgcctggatgagaacaactatgaccgggagcgctgcagcacctacttcctgcgctacaagaactgccgccgcttctggaacagcatcgtgatgcagaggaggaagaatggagtgaagcccttcatgcccacagctgctgagagagatgagatcctgcgggctgtgggcaacatgccctactag

SEQ ID NO: 24688 - DNA, 285 bp, Artificial Sequence
  derived and/or modified sequence
atgctgcccagcaagaagacagtgaggatgcccagcgtgacccagaggctgcgggaccctgacatcaacccctgcctgtctgagagtgatgccagcacccgctgcctggatgagaacaactatgaccgggagcgctgcagcacctacttcctgcgctacaagaactgccgccgcttctggaacagcatcgtgatgcagaggaggaagaatggagtgaagcccttcatgcccacagctgctgagagagatgagatcctgcgggctgtgggcaacatgccctactag

SEQ ID NO: 24689 - DNA, 333 bp, Artificial Sequence
  derived and/or modified sequence
atgaagtgcgaggagacccacgcccccaacagcaactgggtgtacgtgatgctcccatccaagaaaacagtgcgaatgccgagtgtgactcagcggctgcgggatcctgacattaacccttgcttgagtgagtctgatgcctctactaggtgccttgatgaaaacaactatgacagggagaggtgctctacttactttctgaggtacaagaattgcagacggttttggaattccatcgtgatgcagaggaggaaaaacggcgtgaagccattcatgccgacagccgccgagcgagatgagatcctcagggcagtcgggaatatgccctattag

SEQ ID NO: 24690 - DNA, 285 bp, Artificial Sequence
  derived and/or modified sequence
atgctgcccagcaagaagaccgtgcggatgcccagcgtgacccagaggctgagggaccctgatattaatccttgtctatcagaatccgacgcttctaccagatgtctggatgagaataattacgaccgggagagatgtagtacgtattttcttaggtacaagaattgccgcaggttttggaatagtatagtgatgcagcgcagaaaaaatggagttaagccatttatgccaaccgctgctgagcgggatgaaatcctgagggctgtaggcaatatgccttactag

SEQ ID NO: 24691 - DNA, 333 bp, Artificial Sequence
  derived and/or modified sequence
atgaaatgcgaggagacacacgctccaaatagtaactgggtctacgtcatgctccccagtaaaaagacagtgagaatgccatctgtcacccaacggttgagagatcccgacattaatccctgcctgagcgagagtgatgctagtacgcgatgcctagacgagaacaattatgacagggaaagatgtagcacttactttttaaggtacaagaattgtcgacgcttctggaactccatcgtgatgcagcgacggaagaacggcgttaagccttttatgcccaccgccgcagagagagacgagattctgcgcgcagttggcaatatgccatattag

SEQ ID NO: 24692 - DNA, 285 bp, Artificial Sequence
  derived and/or modified sequence
atgctcccaagtaaaaaaaccgtgaggatgccttcagtgacgcagcgtcttcgggacccggatattaatccatgtctttcagaatcagatgcctcaactcgctgccttgacgaaaacaattatgaccgggagcggtgcagtacatacttcctgcggtacaaaaattgtagaaggttttggaactcaattgtgatgcagagacgtaaaaacggcgtgaagccctttatgcccactgccgctgaacgagacgaaattttacgtgctgtggggaacatgccatattag

SEQ ID NO: 24693 - DNA, 1684 bp, Artificial Sequence
  derived and/or modified sequence
gctacttaaggtcctgctgcgtgagccattgacgtgtttggagctggagacggcctgggtgctggcgaagcggaggccggagttaatacacgaggaactcatgcaaaggaggggactttcggaaatccaaacttagagtgccttgtatttagaatccggaaggaaaaggaaatgaaatgtgaagaaactcatgcaccaaactcgaactgggtatatgtgatgttacctagtaagaagactgttagaatgccctcggtaacacagaggctgagagatcctgacataaatccttgtttgtcggaatctgatgcttccaccagatgtctggatgaaaataactatgacagggaaaggtgttccacttacttcttgaggtacaaaaactgccggagattctggaattctatcgtgatgcagagaagaaagaacggagtgaagccatttatgcctacggcagcagaaagagatgaaatcttgagagcagtgggaaatatgccctattgaatgtttgcattaaaagtgtttatataacttagaagcagatgaatatttctaataaatgattgctgtaatatttaagactgtacacccctcacccagacagaccttaagttcttcaagtggagacagtgaagtcaccccgtgtcctttttgcttgctctcagtgccatgccgatggtatgttgctgttggctgtgttgtggcatgagtttgcatgactttctggaggcatggagttaggtaaggctacatgagaaattgagcttttccactgggttttgaaagaagagtatgatgtgaacaagtaaagactgaatggggctgagatgaaggcaatgtttccaaggaaaggaaatgttatgagcaagagtgtgaggcaagagaagctggaaccacattcagagagtatcctgtagattgctccacctagaatctcaggtgggtggagcagtggtgggagaagactggaaaggtaagttgaaggtaaggaatgtgtggtgggcctcagatcccaggctcattcctcaaatcacttcttacttccctcacttatctttgtttaaataaggttagtacattcactaggggcaaatgggtttttctaaataaatgacataaaaaagaactggttgtctttctttaaagaaagtcttagttacaggattctgtgattaaaatccttaaatattgggttgccttctgcagctgtagtatcagtttttgaaccacagtaatgggaagaaagacaaatggattcccttagaagtaagatttctatttgcaggatgagttgggcagggaaaagggtcagggttcatcaggtgaactcaacactgggatgagactagaacttcactttatgatataaacacaatacgattattcaatgtggtgactggggtagactgtgaagcagccctccttatgcccactgccttttagaatcgtttgttttattcatggtagttttatgaagacatactattattgaatgaaatttaatgtgtacttgaaaacattgcttttgtcccttctcttcatctggtcttgggtcaagaacattgttttaatggctgccgacaatgaactgtctgtctgagtctaaaaccaagctcaggtttctaagccacatgaccttgattgttaaatgtagttatatttgaataaaaaatgaatcatttcc

SEQ ID NO: 24694 - DNA, 1535 bp, Artificial Sequence
  derived and/or modified sequence
cgctacttaaggtcctgctgcgtgagccattgacgtgtttggagctggagacggcctgggtgctggcgaagcggaggccggagtaagaagactgttagaatgccctcggtaacacagaggctgagagatcctgacataaatccttgtttgtcggaatctgatgcttccaccagatgtctggatgaaaataactatgacagggaaaggtgttccacttacttcttgaggtacaaaaactgccggagattctggaattctatcgtgatgcagagaagaaagaacggagtgaagccatttatgcctacggcagcagaaagagatgaaatcttgagagcagtgggaaatatgccctattgaatgtttgcattaaaagtgtttatataacttagaagcagatgaatatttctaataaatgattgctgtaatatttaagactgtacacccctcacccagacagaccttaagttcttcaagtggagacagtgaagtcaccccgtgtcctttttgcttgctctcagtgccatgccgatggtatgttgctgttggctgtgttgtggcatgagtttgcatgactttctggaggcatggagttaggtaaggctacatgagaaattgagcttttccactgggttttgaaagaagagtatgatgtgaacaagtaaagactgaatggggctgagatgaaggcaatgtttccaaggaaaggaaatgttatgagcaagagtgtgaggcaagagaagctggaaccacattcagagagtatcctgtagattgctccacctagaatctcaggtgggtggagcagtggtgggagaagactggaaaggtaagttgaaggtaaggaatgtgtggtgggcctcagatcccaggctcattcctcaaatcacttcttacttccctcacttatctttgtttaaataaggttagtacattcactaggggcaaatgggtttttctaaataaatgacataaaaaagaactggttgtctttctttaaagaaagtcttagttacaggattctgtgattaaaatccttaaatattgggttgccttctgcagctgtagtatcagtttttgaaccacagtaatgggaagaaagacaaatggattcccttagaagtaagatttctatttgcaggatgagttgggcagggaaaagggtcagggttcatcaggtgaactcaacactgggatgagactagaacttcactttatgatataaacacaatacgattattcaatgtggtgactggggtagactgtgaagcagccctccttatgcccactgccttttagaatcgtttgttttattcatggtagttttatgaagacatactattattgaatgaaatttaatgtgtacttgaaaacattgcttttgtcccttctcttcatctggtcttgggtcaagaacattgttttaatggctgccgacaatgaactgtctgtctgagtctaaaaccaagctcaggtttctaagccacatgaccttgattgttaaatgtagttatatttgaataaaaaatgaatcattt

SEQ ID NO: 24695 - DNA, 1550 bp, Artificial Sequence
  derived and/or modified sequence
ctggagacggcctgggtgctggcgaagcggaggccggagttaatacacgaggaactcatgcaaaggaggggactttcggaaatccaaacttagagtgccttgtatttagaatccggaaggaaaaggaaatgaaatgtgaagaaactcatgcaccaaactcgaactgggtatatgtgatgttacctagtaagaagactgttagaatgccctcggtaacacagaggctgagagatcctgacataaatccttgtttgtcggaatctgatgcttccaccagatgtctggatgaaaataactatgacagggaaaggtgttccacttacttcttgaggtacaaaaactgccggagattctggaattctatcgtgatgcagagaagaaagaacggagtgaagccatttatgcctacggcagcagaaagagatgaaatcttgagagcagtgggaaatatgccctattgaatgtttgcattaaaagtgtttatataacttagaagcagatgaatatttctaataaatgattgctgtaatatttaagactgtacacccctcacccagacagaccttaagttcttcaagtggagacagtgaagtcaccccgtgtcctttttgcttgctctcagtgccatgccgatggtatgttgctgttggctgtgttgtggcatgagtttgcatgactttctggaggcatggagttaggtaaggctacatgagaaattgagcttttccactgggttttgaaagaagagtatgatgtgaacaagtaaagactgaatggggctgagatgaaggcaatgtttccaaggaaaggaaatgttatgagcaagagtgtgaggcaagagaagctggaaccacattcagagagtatcctgtagattgctccacctagaatctcaggtgggtggagcagtggtgggagaagactggaaaggtaagttgaaggtaaggaatgtgtggtgggcctcagatcccaggctcattcctcaaatcacttcttacttccctcacttatctttgtttaaataaggttagtacattcactaggggcaaatgggtttttctaaataaatgacataaaaaagaactggttgtctttctttaaagaaagtcttagttacaggattctgtgattaaaatccttaaatattgggttgccttctgcagctgtagtatcagtttttgaaccacagtaatgggaagaaagacaaatggattcccttagaagtaagatttctatttgcaggatgagttgggcagggaaaagggtcagggttcatcaggtgaactcaacactgggatgagactagaacttcactttatgatataaacacaatacgattattcaatgtggtgactggggtagactgtgaagcagccctccttatgcccactgccttttagaatcgtttgttttattcatggtagttttatgaagacatactattattgaatgaaatttaatgtgtacttgaaaacattgcttttgtcccttctcttcatctggtcttgggtcaagaacattgttttaatggctgccgacaatgaactgtc

SEQ ID NO: 24696 - DNA, 536 bp, Artificial Sequence
  derived and/or modified sequence
gtgtttggagctggagacggcctgggtgctggcgaagcggaggccggaggtgagtggttcccccgccctacctccgaagcggccgcagaaaagcggggagagaggggtgcccttgggccgtagcggggcccgaatgcacttctgcggcgcggaggcgctcccgccaggcttcgccgcagcgcggacctcttcccgttgctcttcctcccgccacacgggtctgttcgctccgggggcgaggaagatgacctctgcctagtccgggcaaccccagctcttcttccactctcctgtgtagcctctgaagcgcagttaccggccccacccccagttccctgcgttttcctcgccccttgtctctctcggcatggtctcggcacagcaagtaagaagactgttagaatgccctcggtaacacagaggctgagagatcctgacataaatccttgtttgtcggaatctgatgcttccaccagatgtctggatgaaaataactatgacagggaaaggtgttccacttacttcttgaggtacaa

SEQ ID NO: 24697 - DNA, 333 bp, Artificial Sequence
  derived and/or modified sequence
atgaagtgcgaggagacccacgcccccaacagcaactgggtgtacgtgatgctgcccagcaagaagaccgtgagaatgcccagcgtgacccagagactgagagaccccgacatcaacccctgcctgagcgagagcgacgccagcaccagatgcctggacgagaacaactacgacagagagagatgcagcacctacttcctgagatacaagaactgcagaagattctggaacagcatcgtgatgcagagaagaaagaacggcgtgaagcccttcatgcccaccgccgccgagagagacgagatcctgagagccgtgggcaacatgccctactag

SEQ ID NO: 24698 - DNA, 285 bp, Artificial Sequence
  derived and/or modified sequence
atgctgcccagcaagaagaccgtgagaatgcccagcgtgacccagagactgagagaccccgacatcaacccctgcctgagcgagagcgacgccagcaccagatgcctggacgagaacaactacgacagagagagatgcagcacctacttcctgagatacaagaactgcagaagattctggaacagcatcgtgatgcagagaagaaagaacggcgtgaagcccttcatgcccaccgccgccgagagagacgagatcctgagagccgtgggcaacatgccctactag

SEQ ID NO: 24699 - DNA, 258 bp, Artificial Sequence
  derived and/or modified sequence
atgccgagcgtcacccagaggctgagggacccagacattaatccctgcctgtcagagagcgacgcttcaacgaggtgtctggacgagaataactacgaccgggaacggtgctccacttacttcctcagatataaaaactgccgacggttttggaacagcatagtaatgcagcggcgcaagaacggcgtcaagcctttcatgcctacggcagcagagagagatgaaattttgagggcagtcggcaacatgccatattag

SEQ ID NO: 24700 - DNA, 135 bp, Artificial Sequence
  derived and/or modified sequence
atgccatctgtcacacagagattacgggaccccgatattaacccctgtctgagtgaaagcgacgcaagtaccaggtgtctggatgagaataactatgaccgggaacggtgttctacctatttcctgcggtactag

SEQ ID NO: 24701 - DNA, 258 bp, Artificial Sequence
  derived and/or modified sequence
atgcccagcgtgacccagaggctgcgggaccctgacatcaacccctgcctgtctgagagtgatgccagcacccgctgcctggatgagaacaactatgaccgggagcgctgcagcacctacttcctgcgctacaagaactgccgccgcttctggaacagcatcgtgatgcagaggaggaagaatggagtgaagcccttcatgcccacagctgctgagagagatgagatcctgcgggctgtgggcaacatgccctactag

SEQ ID NO: 24702 - DNA, 135 bp, Artificial Sequence
  derived and/or modified sequence
atgcccagcgtgacccagaggctgcgggaccctgacatcaacccctgcctgtctgagagtgatgccagcacccgctgcctggatgagaacaactatgaccgggagcgctgcagcacctacttcctgcgctactag

SEQ ID NO: 24703 - DNA, 258 bp, Artificial Sequence
  derived and/or modified sequence
atgcccagcgtgacccagcggctgcgggaccccgacatcaacccctgcctgagtgaatctgatgctagcactaggtgcctggatgagaataactacgaccgtgagcgatgcagtacatatttcctccgttacaaaaattgccgacggttctggaatagtatcgtaatgcaaaggaggaagaacggagtcaaaccgttcatgcccacagcagcagaaagagacgagattttacgcgcagtcggtaacatgccctattag

SEQ ID NO: 24704 - DNA, 135 bp, Artificial Sequence
  derived and/or modified sequence
atgcccagcgtgacccagcggctgcgggaccccgacatcaacccctgtctgtccgaatcagatgcgagcaccagatgtctcgatgagaacaattacgatcgcgagagatgctcgacatattttctgcgatattag

SEQ ID NO: 24705 - DNA, 258 bp, Artificial Sequence
  derived and/or modified sequence
atgccttctgtgacccaacgacttcgagatccagacattaatccttgccttagcgaatcagatgcgtcaaccagatgcctggatgagaataactacgatagagaacggtgtagtacatactttctccgctacaagaactgccgtaggttttggaattccatcgtcatgcagcgcaggaaaaatggagttaagcctttcatgcccacggctgccgagagggacgaaattttacgagctgtcggtaacatgccatactag

SEQ ID NO: 24706 - DNA, 135 bp, Artificial Sequence
  derived and/or modified sequence
atgcccagtgtaacacagcgcctgagggatcctgatataaatccttgcctgagcgagtccgatgccagtaccaggtgtttagacgagaataattacgaccgcgagcggtgtagtacttactttttgcgctattag

SEQ ID NO: 24707 - DNA, 258 bp, Artificial Sequence
  derived and/or modified sequence
atgcccagcgtgacccagagactgagagaccccgacatcaacccctgcctgagcgagagcgacgccagcaccagatgcctggacgagaacaactacgacagagagagatgcagcacctacttcctgagatacaagaactgcagaagattctggaacagcatcgtgatgcagagaagaaagaacggcgtgaagcccttcatgcccaccgccgccgagagagacgagatcctgagagccgtgggcaacatgccctactag

SEQ ID NO: 24708 - DNA, 135 bp, Artificial Sequence
  derived and/or modified sequence
atgcccagcgtgacccagagactgagagaccccgacatcaacccctgcctgagcgagagcgacgccagcaccagatgcctggacgagaacaactacgacagagagagatgcagcacctacttcctgagatactag

SEQ ID NO: 24709 - protein, 119 aa, Artificial Sequence
  derived and/or modified sequence
MVLPLPWLSRYHFLRLLLPSWSLAPQGSHGCCSQNPKASMEEQTSSRGNGKMTSPPRGPGTHRTAELARAEELLEQQLELYQALLEGQEGAWEAQALVLKIQKLKEQMRRHQESLGGGA

SEQ ID NO: 24710 - protein, 119 aa, Artificial Sequence
  derived and/or modified sequence
MVLPLPWLSRYHFLRLLLPSWSLAPQGSHGCCSQNPKASMEEQTNSRGNGKMTSPPRGPGTHRTAELARAEELLEQQLELYQALLEGQEGAWEAQALVLKIQKLKEQMRRHQESLGGGA

SEQ ID NO: 24711 - protein, 119 aa, Artificial Sequence [sequence omitted]

SEQ ID NO: 24712 - DNA, 360 bp, Artificial Sequence
  derived and/or modified sequence
atggttctgccacttccttggttaagcagataccacttccttcggctgttactgccatcttggagcctcgccccccaggggtctcatggttgttgttcacaaaacccaaaagcctccatggaagaacagacttccagcagaggaaatggcaaaatgactagcccccctcgcgggcccgggacccatcgtacagcagaactagccagagcagaggagcttctcgagcagcagctcgagctctatcaagccctgctcgagggacaggagggcgcctgggaggcccaggcactggtcctgaagatacagaaactaaaggagcagatgagacggcaccaggagagtcttggcggaggggcatag

SEQ ID NO: 24713 - DNA, 360 bp, Artificial Sequence
  derived and/or modified sequence
atggtgttaccacttccttggctgtccagatatcatttcctgagattgcttctccctagctggtctctggcccctcaggggagtcatgggtgttgctcccagaatcccaaggcgagtatggaagaacagacaaactcccgggggaacggtaagatgacctctcctcccaggggaccaggaacccaccgcacggcagaacttgccagagcagaggagcttctggaacaacaactggagctgtatcaggcactgctcgagggccaggagggcgcctgggaggctcaagcactcgtgctgaagatccaaaagctgaaggagcagatgagaaggcaccaagaatctctcggcggaggcgcttag

SEQ ID NO: 24714 - DNA, 360 bp, Artificial Sequence
  derived and/or modified sequence
atggtgctgccactcccttggctgagcaggtaccacttcctcaggcttctgctgccatcttggtctctggcacctcagggaagtcacggctgctgctctcaaaaccctaaagcctccatggaagagcagaccaactccagaggaaatggcaaaatgacttcaccccctcgggggcctgggacacatcggaccgctgaactggcaagagctgaggagttgctggagcagcagcttgaactttatcaggcacttttagagggtcaagaaggtgcctgggaggctcaggctttggtgctaaaaatacagaaactgaaggagcagatgcgacgacatcaagaatccctcggtgggggcgcctag

SEQ ID NO: 24715 - DNA, 360 bp, Artificial Sequence
  derived and/or modified sequence
atggtcctacctctcccctggttgagcagataccactttctgaggctcttattgccatcttggtcacttgctcctcagggctctcatggctgttgctctcaaaatcccaaggccagcatggaggagcagacaagttctaggggaaacggaaagatgacaagtcctccacggggaccaggcacgcaccggaccgcagagctcgccagagcagaggagctgctggaacagcagctcgagttatatcaagccctgcttgagggccaggagggcgcttgggaggcacaagcattagtgctgaaaatccaaaaactgaaggaacagatgagaagacatcaagagtccctcggggggggtgcctag

SEQ ID NO: 24716 - DNA, 360 bp, Artificial Sequence
  derived and/or modified sequence
atggttctgccactcccttggctgagtagataccatttcctccggttgctcctacctagctggtccttggccccacaaggctcccatggctgctgcagccagaaccccaaagctagcatggaagagcaaacctcatctagggggaatggcaagatgacttccccacctcgtggacccgggactcatcgcacggctgagcttgcacgcgcagaggaactgctcgaacagcagctcgaactctatcaggcgctcctggaaggacaggaaggagcctgggaagctcaggctttggtccttaagattcaaaagctcaaggagcagatgcggcgccaccaggagtccttaggagggggagcctag

SEQ ID NO: 24717 - DNA, 360 bp, Artificial Sequence
  derived and/or modified sequence
atggtgctccctctgccctggttaagtagataccactttttgcgcctgctcctgccatcttggtccctagcaccccagggtagccacgggtgttgcagtcagaatcccaaggcaagtatggagaagcagaccaacagtaggggaaatggcaaaatgacatcacccccacgtggtcccggaactcacaggactgcagaattggcacgcgcagaggagttactagaacagcagcttgagctgtaccaggcactgcttgaaggacaagaaggagcctgggaggcacaagctctggtgctgaagatacaaaaattaaaagaacagatgcgcagacatcaagaatcccttggaggaggggcctag

SEQ ID NO: 24718 - DNA, 360 bp, Artificial Sequence
  derived and/or modified sequence
atggtccttcctctcccctggctcagtaggtatcacttcctccgcttgctgttgccaagctggtccctagcaccacaaggcagtcatggatgctgctcacagaatcctaaggcctctatggaagagcagacaaactcaagaggcaatggaaagatgactagtccacctaggggacccggcactcaccgaacagctgaactagctagggcagaggaactgctcgaacagcagctcgagctctaccaggcactgctggaaggccaggagggagcatgggaggctcaggctctggttcttaagattcaaaagttgaaggagcagatgaggcgccaccaggaatctctgggcggtggcgcttag

SEQ ID NO: 24719 - DNA, 360 bp, Artificial Sequence
  derived and/or modified sequence
atggtgctgcccttgccttggttgtcgcggtaccattttctgagactgctgctacctagctggagtctggcaccccagggctctcacgggtgctgtagtcagaatccaaaggcttctatggaggagcagacaaattcccggggtaacggcaagatgacctcgccaccccggggaccaggaacacacagaactgctgagctcgccagggctgaggagttgctggaacagcaactggagttatatcaggccctactggaaggacaggagggggcatgggaggcccaggctctggtgttgaagattcagaaattgaaagaacagatgcgtaggcaccaggaatctctcggaggtggagcttag

SEQ ID NO: 24720 - DNA, 360 bp, Artificial Sequence
  derived and/or modified sequence
atggtgctgcccctgccctggctgagccgctaccacttcctgcggctgctgctgcccagctggagcctggccccccagggcagccacggctgctgcagccagaaccccaaggcctccatggaggagcagaccagcagcagaggaaatggcaagatgaccagccccccccggggccctggcacccacaggacagctgagctggcccgggcagaggagctgctggagcagcagctggagctgtaccaggccctgctggagggccaggagggcgcctgggaggcccaggccctggtgctgaagatccagaagctgaaggagcagatgagaagacaccaggagagcctgggcggcggggcctag

SEQ ID NO: 24721 - DNA, 360 bp, Artificial Sequence
  derived and/or modified sequence
atggtgctgcccctgccctggctgagccgctaccacttcctgcggctgctgctgcccagctggagcctggccccccagggcagccacggctgctgcagccagaaccccaaggcctccatggaggagcagaccaacagcagaggaaatggcaagatgaccagccccccccggggccctggcacccacaggacagctgagctggcccgggcagaggagctgctggagcagcagctggagctgtaccaggccctgctggagggccaggagggcgcctgggaggcccaggccctggtgctgaagatccagaagctgaaggagcagatgagaagacaccaggagagcctgggcggcggggcctag

SEQ ID NO: 24722 - DNA, 360 bp, Artificial Sequence
  derived and/or modified sequence
atggtgctgcccctgccctggctgagccgctaccacttcctgcggctgctgctgcccagctggagcctggccccccagggcagccacggctgctgcagccagaaccccaaggcctccatggagaagcagaccaacagcagaggaaatggcaagatgaccagccccccccggggccctggcacccacaggacagctgagctggcccgggcagaggagctgctggagcagcagctggagctgtaccaggccctgctggagggccaggagggcgcctgggaggcccaggccctggtgctgaagatccagaagctgaaggagcagatgagaagacaccaggagagcctgggcggcggggcctag

SEQ ID NO: 24723 - DNA, 955 bp, Artificial Sequence
  derived and/or modified sequence
aaacactagatcaaaaaaaaaaaatcacagacctgtggtaggctgggcaccagtgctctaaagcaagttctgcctaaactggcagggacatttttcacatcaggaacaggagttgttcctggactctgtctggggccaggctgggagagacgtggggcagagtggggcaggggcaggggcagggctgggggctggggcctgggcagggccaggcactcaagtgaggccaagtcctggagcgaaccagttcctggtggccgttggacagctcacacagctccctgccaggtcacccgccatggtcctccctctgccctggctctctcggtaccatttccttcgcctccttctgccctcctggtccttggcaccccagggctcccatgggtgctgctcccaaaaccccaaagcaagcatggaagagcagaccagctccagaggaaatgggaagatgacgtcccctcccaggggccctgggacccaccgcacagctgagctggcccgagctgaagagttgttggagcagcagctggagctgtaccaggccctccttgaagggcaggagggagcctgggaggcccaagccctggtgctcaagatccagaagctgaaggaacagatgaggaggcaccaagagagccttggaggaggcgcctaagtttcccccagtgcccacagcaccctccggcgctgaaaatacacgcaccacccaccaggagccttgggatcataaacaccccagcgtcttcccaggccagagaaagtggaagagaccacaaagcgcaggcaattggcaggcagtgggggagccagggctctgcagtcttagtcccattcccctttgatctcacagcaggcagggcacccaggccttataggaattcaccctggaccatgccctaaaataacctcaccccaaatacaataaagggacgaagcacttatagataccaca

SEQ ID NO: 24724 - DNA, 955 bp, Artificial Sequence
  derived and/or modified sequence
aaacactagatcaaaaaaaaaaaatcacagacctgtggtaggctgggcaccagtgctctaaagcaagttctgcctaaactggcagggacatttttcacatcaggaacaggagttgttcctggactctgtctggggccaggctgggagagacgtggggcagagtggggcaggggcaggggcagggctgggggctggggcctgggcagggccaggcactcaagtgaggccaagtcctggagcgaaccagttcctggtggccgttggacagctcacacagctcccggccaggtcacccgccatggtcctccctctgccctggctctctcggtaccatttccttcgcctccttctgccctcctggtccttggcaccccagggctcccatgggtgctgctcccaaaaccccaaagcaagcatggaagagcagaccaactccagaggaaatgggaagatgacgtcccctcccaggggccctgggacccaccgcacagctgagctggcccgagctgaagagttgttggagcagcagctggagctgtaccaggccctccttgaagggcaggagggagcctgggaggcccaagccctggtgctcaagatccagaagctgaaggaacagatgaggaggcaccaagagagccttggaggaggtgcctaagtttcccccagtgcccacagcaccctccggcactgaaaatacacgcaccacccaccaggagccttgggatcataaacaccccagcgtcttcccaggccagagaaagtggaagagaccacaaaccgcaggcaattggcaggcagtgggggagccagggctctgcagtcttagtcccattcccctttgatctcacagcaggcagggcacccaggccttataggaattcaccctggaccatgccctaaaataacctcaccccaaatacaataaagggacgaagcacttatagataccaca

SEQ ID NO: 24725 - DNA, 955 bp, Artificial Sequence
  derived and/or modified sequence
aaacactagatcaaaaaaaaaaaatcacagacctgtggtaggctgggcaccagtgctctaaagcaagttctgcctgaactggcagggacatttttcacatcaggaacaggagttgttcctggactctgtctggggccaggctgggagagacgtggggcagagtggggcaggggcaggggcagggctgggggctggggcctgggcagggccaggcactcaagtgaggccaagtcctggagcgaaccagttcctggtggccgttggacagctcacacagctcccggccaggtcacccgccatggtcctccctctgccctggctctctcggtaccatttccttcgcctccttctgccctcctggtccttggcaccccagggctcccatgggtgctgctcccaaaaccccaaagcaagcatggaagagcagaccaactccagaggaaatgggaagatgacgtcccctcccaggggccctgggacccaccgcacagctgagctggcccgagctgaagagttgttggagcagcagctggagctgtaccaggccctccttgaagggcaggagggagcctgggaggcccaagccctggtgctcaagatccagaagctgaaggaacagatgaggaggcaccaagagagccttggaggaggtgcctaagtttcccccagtgcccacagcaccctccggcactgaaaatacacgcaccacccaccaggagccttgggatcataaacaccccagcgtcttcccaggccagagaaagtggaagagaccacaaaccgcaggcaattggcaggcagtgggggagccagggctctgcagtcttagtcccattcccctttgatctcacagcaggcagggcacccaggccttataggaattcaccctggaccatgccctaaaataacctcaccccaaatacaataaagggacgaagcacttatagataccaca

SEQ ID NO: 24726 - DNA, 955 bp, Artificial Sequence
  derived and/or modified sequence
aaacactagatcaaaaaaaaaaaatcacagacctgtggtaggctgggcaccagtgctctaaagcaagttctgcctaaactggcagggacatttttcacatcaggaacaggagttgttcctggactctgtctggggccaggctgggagagacgtggggcagagtggggcaggggcaggggcagggctgggggctggggcctgggcagggccaggcactcaagtgaggccaagtcctggagcgaaccagttcctggtggccgttggacagctcacacagctccctgccaggtcacccgccatggtcctccctctgccctggctctctcggtaccatttccttcgcctccttctgccctcctggtccttggcaccccagggctcccatgggtgctgctcccaaaaccccaaagcaagcatggaagagcagaccagctccagaggaaatgggaagatgacgtcccctcccaggggccctgggacccaccgcacagctgagctggcccgagctgaagagttgttggagcagcagctggagctgtaccaggccctccttgaagggcaggagggggcctgggaggcccaagccctggtgctcaagatccagaagctgaaggaacagatgaggaggcaccaagagagccttggaggaggcgcctaagtttcccccagtgcccacagcaccctccggcgctgaaaatacacgcaccacccaccaggagccttgggatcataaacaccccagcgtcttcccaggccagagaaagtggaagagaccacaaagcgcaggcaattggcaggcagtgggggagccagggctctgcagtcttagtcccattcccctttgatctcacagcaggcagggcacccaggccttataggaattcaccctggaccatgccctaaaataacctcaccccaaatacaataaagggacgaagcacttatagataccaca

SEQ ID NO: 24727 - DNA, 955 bp, Artificial Sequence
  derived and/or modified sequence
aaacactagatcaaaaaaaaaaaatcacagacctgtggtaggctgggcaccagtgctctaaagcaagttctgcctaaactggcagggacatttttcacatcaggaacaggagttgttcctggactctgtctggggccaggctgggagagacgtggggcagagtggggcaggggcaggggcagggctgggggctggggcctgggcagggccaggcactcaagtgaggccaagtcctggagcgaaccagttcctggtggccgttggacagctcacacagctcccggccaggtcacccgcgatggtcctccctctgccctggctctctcggtaccatttccttcgcctccttctgccctcctggtccttggcaccccagggctcccatgggtgctgctcccaaaaccccaaagcaagcatggaaaagcagaccaactccagaggaaatgggaagatgacgtcccctcccaggggccctgggacccaccgcacagctgagctggcccgagctgaagagttgttggagcagcagctggagctgtaccaggccctccttgaagggcaggagggagcctgggaggcccaagccctggtgctcaagatccagaagctgaaggaacagatgaggaggcaccaagagagccttggaggaggtgcctaagtttcccccagtgcccacagcaccctccggcactgaaaatacacgcaccacccaccaggagccttgggatcataaacaccccagcgtcttcccaggccagagaaagtggaagagaccacaaaccgcaggcaattggcaggcagtgggggagccagggctctgcagtcttagtcccattcccctttgatctcacagcaggcagggcacccaggccttataggaattcaccctggaccatgccctaaaataacctcaccccaaatacaataaagggacgaagcacttatagataccaca

SEQ ID NO: 24728 - DNA, 360 bp, Artificial Sequence
  derived and/or modified sequence
atggtgctgcccctgccctggctgagccggtaccacttcctgcggcttcttctccctagttggagtctggccccccaaggcagtcacggctgctgcagtcagaatccaaaggcttcaatggaagaacaaacatctagcaggggtaatgggaagatgactagccctcctcggggtccagggacccacagaactgcagaactggctagagccgaagagctgttagagcaacagcttgagctgtaccaagcgctgctcgagggtcaggaaggcgcatgggaagctcaggctctggtgctgaaaatccagaaacttaaagaacagatgaggcggcaccaggagtctctgggtggtggggcatag

SEQ ID NO: 24729 - DNA, 360 bp, Artificial Sequence
  derived and/or modified sequence
atggtgctgcccctgccctggctgagccggtaccacttcctgcggttactgctgccatcatggagccttgcaccccaagggtctcatggctgctgtagccaaaatcccaaagcctcaatggaagaacagactaactctcggggcaatggaaagatgacttcccccccgagagggcctgggacccatcggactgccgagctggctcgcgccgaagagttgctggagcagcagctcgaactttatcaagcattactggaagggcaagagggagcctgggaggctcaggctttagtgctcaaaattcagaaactgaaggagcagatgaggagacatcaggaaagcctgggcggaggagcctag

SEQ ID NO: 24730 - DNA, 360 bp, Artificial Sequence
  derived and/or modified sequence
atggtgctgcccctgccctggctgagccggtaccacttcctgcggttattgctgccctcatggagcctggccccccagggctctcatggctgttgtagtcaaaatccgaaagcatcaatggaagagcagacaaactcacgaggaaacggaaagatgacttccccgcccaggggcccagggacccacagaaccgccgagcttgcgcgggccgaggagctgctggagcaacaattagaactttaccaggcgctgctggaggggcaggagggcgcatgggaagctcaggcactggtcttaaagattcagaagctcaaggagcagatgaggcgccatcaggagtcgctaggcggcggggcttag

SEQ ID NO: 24731 - DNA, 360 bp, Artificial Sequence
  derived and/or modified sequence
atggtgctgcccctgccctggctgagccggtaccacttcctgcggcttctgcttccttcgtggtccctggcacctcaaggctctcacggatgctgctcccaaaatcctaaggcttccatggaggagcagacttcatcacgcgggaatggaaaaatgaccagcccacctagagggcccggcacccatcgcaccgctgagttagcccgagcagaggaattgctcgaacagcaactcgaattatatcaggcactgctcgagggccaagagggggcttgggaggcccaggcactggtgctgaagattcaaaagctgaaagagcagatgaggcggcatcaggagtcactgggaggcggtgcctag

SEQ ID NO: 24732 - DNA, 360 bp, Artificial Sequence
  derived and/or modified sequence
atggtgctgcccctgccctggctgagccggtaccacttcctgcggctgctactccctagctggagccttgcacctcagggatctcacggctgctgctcccaaaaccctaaagcttccatggaggagcaaacctcttcgcgtggaaacggaaagatgacttctccaccgagagggcctggtacacacagaactgccgaactggcacgagctgaagaactcctggaacagcaattagaactgtatcaggccctgctcgaggggcaagagggggcctgggaagctcaggccctggttctaaagattcagaagttaaaggagcagatgaggcgtcaccaagagtctctgggaggaggagcctag

SEQ ID NO: 24733 - DNA, 360 bp, Artificial Sequence
  derived and/or modified sequence
atggtgctgcccctgccctggctgagccggtaccacttcctgcggctgctgctgcctagctggtccctcgctccacagggctcacacggctgttgttctcagaatcctaaggcttctatggagaagcagaccaattcccgtggcaacggtaagatgacaagccccccaagaggccccgggacccacaggactgcagaactggcccgggccgaggaactgctagaacaacaactagagctgtaccaggccctcttagagggccaggagggggcttgggaggcccaggctctggtgctcaagattcagaagctgaaagagcaaatgcgacgccaccaggaaagtttgggcgggggagcttag

SEQ ID NO: 24734 - DNA, 360 bp, Artificial Sequence
  derived and/or modified sequence
atggtgctgcccctgccctggctgagccggtaccacttcctgcggctcctgctgccatcctggtctttggcgccacaaggaagccacggctgctgctcacagaaccccaaggcatccatggaggaacagacaaattcccgcgggaacggcaagatgacgtctcctccccggggcccaggtactcatcgaaccgccgaactagccagagcggaggagttgctcgagcagcagttagagctttaccaggccctcctggaaggacaggaaggtgcttgggaagctcaggcgctggtcctgaaaatccaaaaattgaaagaacaaatgcgccggcaccaagagagtcttgggggaggggcatag

SEQ ID NO: 24735 - DNA, 360 bp, Artificial Sequence
  derived and/or modified sequence
atggtgctgcccctgccctggctgagccggtaccacttcctgcggcttctcctcccttcatggagtttggctccgcagggctcgcatggatgctgttctcagaaccctaaagcgtccatggaagagcagacgaattcacgggggaatgggaaaatgacaagtcctccgcggggcccaggaactcatcgtaccgccgagttggcacgggcagaggaactgcttgagcagcaactcgaattgtatcaggcacttctagagggccaggaaggagcctgggaggcacaggccttagtgctcaagatccaaaaactcaaggaacagatgcggcggcaccaggagagtctggggggtggcgcttag

SEQ ID NO: 24736 - DNA, 360 bp, Artificial Sequence
  derived and/or modified sequence
atggtgttacccctgccctggctgagtagataccacttcctacgactattgctcccatcttggagcctggccccacaaggctctcatggttgttgctcacagaacccaaaagcatctatggaggaacagacctcttccagaggtaatggcaagatgactagcccaccgagagggcctggtacgcatcgtacagcagagttggcacgcgcagaagaattgttggagcagcaactagagctgtaccaggcgctgttggagggtcaggagggggcttgggaggcacaagccctggtgctgaaaatacagaaacttaaagagcagatgcgcagacaccaggagtctttaggtgggggagcctag

SEQ ID NO: 24737 - DNA, 360 bp, Artificial Sequence
  derived and/or modified sequence
atggtgctgcccctgccctggttatctcggtatcatttcctacggctgctcctgcccagctggtcactggcgccacagggatcacacggctgttgctcccagaacccaaaggcaagtatggaagagcagactaactcaagaggaaatggcaaaatgaccagtcctcctcggggacctggtacacacagaactgctgagctcgccagggcagaagaactccttgaacagcagctggaattatatcaagccttattagaggggcaggagggtgcttgggaagctcaggctctggtcttaaagattcagaagctcaaagagcaaatgcgaagacaccaggaaagcctcggagggggtgcctag

SEQ ID NO: 24738 - DNA, 360 bp, Artificial Sequence
  derived and/or modified sequence
atggtactccccttaccatggctgtccagataccatttcctccgattgctcctgcccagttggagcttggctccacaggggagccacggctgctgcagccaaaaccccaaagcgtccatggaggagcaaactaatagcaggggcaatggcaagatgacatcgccgcctagaggtccaggtacccaccgtacagcggagcttgccagagctgaggagctactggagcagcaacttgagctgtaccaagccttgctggaggggcaagagggcgcatgggaggcccaagccttggttcttaagattcagaaactaaaagagcagatgcggcgacaccaggaatccctgggaggaggagcgtag

SEQ ID NO: 24739 - DNA, 360 bp, Artificial Sequence
  derived and/or modified sequence
atggtcttgccactgccctggctctccaggtatcactttttaagacttcttcttccgtcctggagtctcgctccccagggaagccacgggtgttgctctcagaaccctaaagcgtccatggaggagcaaacgtcatccaggggaaacggaaaaatgaccagcccaccacgtggaccaggaacgcaccgcacggccgagcttgccagggctgaggaattactagaacagcagctggaactctatcaggccctccttgagggacaggagggcgcttgggaggctcaggccctggtgttgaaaattcaaaagcttaaggagcagatgcgacgccaccaagagagtctgggcggtggtgcatag

SEQ ID NO: 24740 - DNA, 360 bp, Artificial Sequence
  derived and/or modified sequence
atggtattgccactcccatggctttctcgttaccacttcctgaggcttttgctgccttcctggagtcttgcccctcaggggagtcacggatgttgctcccagaaccccaaagcaagcatggaagaacaaacgagtagccggggaaacggaaaaatgacttccccacccaggggcccaggcacacatcgcacggcagaactcgcacgtgccgaggagctgctcgagcaacagctggaactttaccaggccctcctggagggacaggaaggcgcttgggaggctcaggcactcgtgcttaagatccagaagctcaaggagcagatgagaagacaccaagagtcgttagggggaggggcatag

SEQ ID NO: 24741 - DNA, 360 bp, Artificial Sequence
  derived and/or modified sequence
atggtgctccccctgccgtggctgtcacggtaccattttttaaggctcctgctgccctcttggtccttagctccccagggatcacatggctgttgctcccagaatccaaaggcttctatggaaaagcaaacaaactctcggggaaacggcaagatgacgagtccccctcgagggcctgggactcacaggaccgccgaacttgccagggctgaggagctcctggaacaacaacttgagctctatcaagctttactggagggccaagaaggcgcttgggaggcgcaggccttggtcctgaaaattcagaagttgaaagaacagatgcggagacaccaggagtcccttgggggtggtgcctag

SEQ ID NO: 24742 - DNA, 360 bp, Artificial Sequence
  derived and/or modified sequence
atggtgctacccctgccttggctgagtcgttaccatttcttgagactcttgctgccctcatggagtcttgctccacaaggatctcacggatgctgctctcagaaccccaaggcttcaatggaagaacagacaaatagtcgcggtaacggcaagatgacaagccccccacggggacctggtacccatcgaacagcagagttagccagggctgaagaattgctagagcagcagctagaattgtatcaggcccttcttgaggggcaggagggcgcttgggaggcgcaggctctcgtcctgaagattcagaagctgaaggagcaaatgcggcgacatcaggagtcgcttggcggaggcgcatag

SEQ ID NO: 24743 - DNA, 360 bp, Artificial Sequence
  derived and/or modified sequence
atggtgctcccccttccctggctgtctaggtaccattttctgcggctgttactgcccagctggagcctagcaccacagggctcccacggttgttgtagccagaaccccaaagcaagcatggaggagcagactaacagtcgagggaacgggaaaatgacctccccgcctcgcggtccaggcacccaccgcacagccgagctggcgagggcggaggaactgctcgagcagcaactggagctgtaccaggctctgttggaaggacaggaaggggcatgggaagcgcaggcccttgttctgaagattcagaagttgaaggagcagatgaggcgtcaccaggagagcctggggggtggggcttag

SEQ ID NO: 24744 - DNA, 360 bp, Artificial Sequence
  derived and/or modified sequence
atggtgctgcccctgccctggctgagcagataccacttcctgagactgctgctgcccagctggagcctggccccccagggcagccacggctgctgcagccagaaccccaaggccagcatggaggagcagaccagcagcagaggcaacggcaagatgaccagcccccccagaggccccggcacccacagaaccgccgagctggccagagccgaggagctgctggagcagcagctggagctgtaccaggccctgctggagggccaggagggcgcctgggaggcccaggccctggtgctgaagatccagaagctgaaggagcagatgagaagacaccaggagagcctgggcggcggcgcctag

SEQ ID NO: 24745 - DNA, 360 bp, Artificial Sequence
  derived and/or modified sequence
atggtgctgcccctgccctggctgagcagataccacttcctgagactgctgctgcccagctggagcctggccccccagggcagccacggctgctgcagccagaaccccaaggccagcatggaggagcagaccaacagcagaggcaacggcaagatgaccagcccccccagaggccccggcacccacagaaccgccgagctggccagagccgaggagctgctggagcagcagctggagctgtaccaggccctgctggagggccaggagggcgcctgggaggcccaggccctggtgctgaagatccagaagctgaaggagcagatgagaagacaccaggagagcctgggcggcggcgcctag

SEQ ID NO: 24746 - DNA, 360 bp, Artificial Sequence
  derived and/or modified sequence
atggtgctgcccctgccctggctgagcagataccacttcctgagactgctgctgcccagctggagcctggccccccagggcagccacggctgctgcagccagaaccccaaggccagcatggagaagcagaccaacagcagaggcaacggcaagatgaccagcccccccagaggccccggcacccacagaaccgccgagctggccagagccgaggagctgctggagcagcagctggagctgtaccaggccctgctggagggccaggagggcgcctgggaggcccaggccctggtgctgaagatccagaagctgaaggagcagatgagaagacaccaggagagcctgggcggcggcgcctag

SEQ ID NO: 24747 - DNA, 645 bp, Artificial Sequence
  derived and/or modified sequence
atggaggcccccgcccacggcctggagccctgcggctggggcgcctgctggctggtgtgctacaccgtgggcagaagagccggcagctggctgagaagctgggccggccccccctggagattccccgagaccaagcccagcgtgagcagcgtgcagggcagaagactggaggccagaagaagagtggcccagaccgccgacggcgtggacgccgacctgtggaaggacggcctgttcaagagcaaggtgaccagatacctgtgcttcaccagaagcttcagcaaggagaacagccacctgggcaacgtgctggtggacatgaagctgatcgacatcaaggacaccctgcccgtgggcttcatccccatccaggagaccgtggacacccaggaggtggccttcagaaagaagagactgtgcatcaagttcatccccagagacagcaccgaggccgccatctgcgacatcagaatcatgggcagaaccaagcaggcccccccccagtacaccttcatcggcgagctgaacagcatgggcatctggtacagaatgggcagagtgcccagaaaccacgacagcagccagcccaccacccccagccagagcagcgccgccagcacccccgcccccaacctgcccagatag

SEQ ID NO: 24748 - DNA, 666 bp, Artificial Sequence
  derived and/or modified sequence
atgagaagctgcttctgcgtgagaagaagcagagaccccccccccccccagcccccccccccccccccccagagaggcaccgaccagagcaccatgcccgaggtgaaggacctgagcgaggccctgcccgagaccagcatggaccccatcaccggcgtgggcgtggtggccagcagaaacagagcccccaccggctacgacgtggtggcccagaccgccgacggcgtggacgccgacctgtggaaggacggcctgttcaagagcaaggtgaccagatacctgtgcttcaccagaagcttcagcaaggagaacagccacctgggcaacgtgctggtggacatgaagctgatcgacatcaaggacaccctgcccgtgggcttcatccccatccaggagaccgtggacacccaggaggtggccttcagaaagaagagactgtgcatcaagttcatccccagagacagcaccgaggccgccatctgcgacatcagaatcatgggcagaaccaagcaggcccccccccagtacaccttcatcggcgagctgaacagcatgggcatctggtacagaatgggcagagtgcccagaaaccacgacagcagccagcccaccacccccagccagagcagcgccgccagcacccccgcccccaacctgcccagatag

SEQ ID NO: 24749 - DNA, 876 bp, Artificial Sequence
  derived and/or modified sequence
aagatggaggcaccagctcatgggctggagccctgtgggtggggggcctgctggctggtgtgctacacagtggggcgacgagcagggagctggctcagatcgtgggctggtccaccctggcgctttccagagacaaagccctcagtgtccagtgttcaggggaggcggctggaagcaagaaggagggttgcacagacagcagatggtgtggatgctgacctctggaaagacggcttatttaaatccaaggttaccagatacctgtgtttcacaagatcattttccaaagaaaatagtcatctggggaacgtgttagtagatatgaagctcattgacatcaaggacacactgcctgtgggcttcatcccaattcaggagacggtggacacacaggaagtggcttttaggaagaagaggctgtgcattaaatttattccacgggattcaacggaagctgcgatttgtgacattcggatcatgggccggaccaagcaggccccgcctcagtacacgtttattggggaactgaacagcatggggatctggtatcgaatgggcagagtaccaagaaatcatgactcatctcaacccacaacgccttcccagtcatcagctgcctccaccccagcccccaaccttcccaggtgaggccttgtcggggtgtcttgcgttgtcctgtggtcttaggtccctgcacaacattttagaacaccaccacttagtgtctgctgaaatactgcaaagtacagctgaataattgtagaagcaatatatctttagaggagatttttaaaaatccacttggaaatctttgcattacatgaatgcaaaggccattctatagtctattttgtgcgtgttctgcaggcttctaaa

SEQ ID NO: 24750 - DNA, 2679 bp, Artificial Sequence
  derived and/or modified sequence
cggtgaggctcgcgctcgagctgcggcgccggctcctgccgcctgggccccgggcccggcccctcccgcgccgcccgggcgatgagaagctgcttctgcgtgagacggagccgggacccgccgccgccgcagccaccgccgccgccgccccagcggggaacagaccagtccaccatgcctgaagtcaaagacctctcagaagccttgccagaaacgtcaatggatcccatcacgggagtcggggtggtggcttctcggaaccgagccccgacaggctatgacgtagttgcacagacagcagatggtgtggatgctgacctctggaaagacggcttatttaaatccaaggttaccagatacctgtgtttcacaagatcattttccaaagaaaatagtcatctggggaacgtgttagtagatatgaagctcattgacatcaaggacacactgcctgtgggcttcatcccaattcaggagacggtggacacacaggaagtggcttttaggaagaagaggctgtgcattaaatttattccacgggattcaacggaagctgcgatttgtgacattcggatcatgggccggaccaagcaggccccgcctcagtacacgtttattggggaactgaacagcatggggatctggtatcgaatgggcagagtaccaagaaatcatgactcatctcaacccacaacgccttcccagtcatcagctgcctccaccccagcccccaaccttcccaggtgaggccttgtcggggtgtcttgcgttgtcctgtggtcttaggtccctgcacaacattttagaacaccaccacttagtgtctgctgaaatactgcaaagtacagctgaataattgtagaagcaatatatctttagaggagatttttaaaaatccacttggaaatctttgcattacatgaatgcaaaggccattctatagtctattttgtgcgtgttctgcaggcttctaaaattgcagattatgcaacttaaaattggctccctattcaaaagagctgctagctacacacagacacgtgctgtatagccatggggttgggatcactggccttaaggtcaaattccttctctgtcttggccagcaactcatttgaaacccaggagggtaggtgagttcttatattcttcattttcatataatttctttttccaatgagctataaagtaagaaatgggtagtttgggtatgagagaatagtgaggagtttttcaggaaatgctagttttaacaattgtctccgcaaagaaacttgggtgagccaactgtttgctctgcaactgatttcagtcataacagaggtagtaacagtctctacactttctgcaaaaagaatcctgtcaaataaaaatcctgtgcatcactaggagtaaactaagggcaaggaacaaacagcactgatggattaagcttgagaaagggattgcaaaagtaaataaaacaagaacggtgaggcagcaacacttagggattgacataacgtaaatgagaatggatctccaagcttccacgtgggtgaatagagatgaacaaaatctgtcaggaaccggacagaagagtcaccagtaggtcttcctgggccatccacaatacagcctgccctccgggacataccaccagctctctgtactctgttcctctgtgccaagcctccgtctcacttggaagaatgtgctgtaatgaggctccaaagccctgaggactctgtcctctgggacatccccctataaagacaatctggtccttctcatgacagtttcacaaaccaagagtggtatttaaacttaactacccctggaattgcctgaaactttagaagtagttttcagtttcatttggcataaaaagataggaatctctaataagcctcccagagttgcagggtgaacagttgagtctctgttgggttcaagagtgtgaggttcgcactgcccatcagcacttgttcctcacttctgagccagagcgctgtcagctccgccctggagggcactgctgagggtcactgtctcctgtgctcaaggctatatcaggtgtgtcacctgtgctggggagtcagctaagtccatcacctgtgtgtcggggtcctccatcacctgtgctgaggcccatcacttgtacttggagcagctcaagtgtgggctccttgcagaggctggaaagcccccacaggagcagttgccctgaagttgttacagctgctccctgctgacatcatgtggtctagaagggcccagaaatgggcaccacctcaggcaggttttgactttctgtggttaaagaaagaacaccagttctctcagataaagcagagagagctctcagaagcctgctggtgactgtgagagcaaagtcacttgcacctgaagcaagacagccgagaacaccgagccaccggcagcctggtgggtttggagggtagtgcgtcagaaccagatgtttataaggcttatgtattttatcacctctgctgtacagtttatggtttacaatggctgcaaggaaatcggatcagttttgttttacttgccaaataaaacaaatgtcaaaatagtcaatataaaatgtattctaatttggctgagttaagtcagccaatatgcaacaggataattgaatgttcattagtgcttccaagtaaaagccatttgtctgtc

SEQ ID NO: 24751 - DNA, 645 bp, Artificial Sequence
  derived and/or modified sequence
atggaggcccctgcccacggactagagccctgcggatggggtgcttgttggttagtctgctatactgtaggcaggagagctggaagctggctacgcagctgggctggacccccatggcgtttccctgagacaaagccatctgttagtagcgtccaaggccgcaggctcgaggcacggcgcagagtcgcacaaaccgctgatggcgtcgatgccgatttgtggaaggacgggcttttcaaaagtaaagtgacccgatacctgtgttttaccaggagcttctccaaagagaatagtcacctggggaacgttctggtcgatatgaaactgatagatatcaaggacaccctaccggtgggattcatccccatccaggaaaccgtggatacccaggaagttgccttcaggaagaaacgactgtgcattaaatttattcctagggattcaactgaagctgccatttgcgatattcgaatcatgggccgaactaaacaggccccccctcagtatacatttataggcgagctgaattctatggggatctggtaccggatgggacgagtaccgcgaaaccacgattcctcccagcccactaccccgtcccagtcttcggccgcgtccactcctgcacccaacctccctcgctag

SEQ ID NO: 24752 - DNA, 666 bp, Artificial Sequence
  derived and/or modified sequence
atgcggtcgtgcttctgcgtgaggcggagcagggatccgcctcctccccagccaccccctccaccgccccagcgcggaaccgaccaatccaccatgccagaggtcaaggatctgtcggaggctcttcctgagacgtcaatggacccaatcactggtgttggggtggtcgcctcccggaatcgcgccccaaccggctacgatgtagtggctcaaacagccgacggcgtggatgctgatctctggaaggacggcctgttcaagagcaaggttactcgatacctgtgctttacccggagctttagcaaggaaaacagccacctaggcaatgtgctagtggacatgaaacttattgacatcaaggacacattgccagttggctttatccctatacaggaaacggttgacacacaggaggttgcattcagaaaaaaacgcctttgtattaagtttatacctcgggactctactgaagccgctatttgcgacattagaatcatgggccgcactaagcaggccccaccgcaatacacatttatcggggaacttaactcaatgggcatttggtatcgcatgggcagggtccctaggaatcacgacagctctcagcccacgactccctcacagagtagcgctgcatcaactcccgctcctaacttgccccgatag

SEQ ID NO: 24753 - DNA, 645 bp, Artificial Sequence
  derived and/or modified sequence
atggaggccccagcccacggcctggagccctgtggctggggcgcctgctggctggtgtgctacacagtgggcagaagagctggctcctggctgcgctcctgggccggccccccctggaggtttcctgagaccaagcccagcgtgtcctctgtgcagggccggcggctggaggcccggcggcgggtggcccagacagcagatggagtggatgctgacctgtggaaggatggcctcttcaagagcaaggtgacccgctacctgtgcttcaccaggagcttcagcaaggagaacagccacctgggcaatgtgctggtggacatgaagctgattgacatcaaggacaccctgcctgtgggcttcatccccatccaggagaccgtggacacccaggaggtggccttcaggaagaagaggctgtgcatcaagttcatcccccgggacagcacagaagctgccatctgtgacatccgcatcatgggccgcaccaagcaggccccaccccagtacaccttcatcggggagctgaacagcatgggcatctggtacaggatgggccgggtgcccagaaatcatgacagcagccagcccaccacccccagccagagcagcgctgccagcaccccagcccccaacctgcccaggtag

SEQ ID NO: 24754 - DNA, 666 bp, Artificial Sequence
  derived and/or modified sequence
atgaggagctgcttctgtgtgcggcgcagccgggaccccccaccaccccagcccccacctcctccaccccagaggggcacagaccagagcaccatgcctgaggtgaaggacctgtctgaggccctgcctgagacctccatggaccccatcactggagtgggcgtggtggccagcaggaacagagcccccaccggctatgatgtggtggcccagacagcagatggagtggatgctgacctgtggaaggatggcctcttcaagagcaaggtgacccgctacctgtgcttcaccaggagcttcagcaaagaaaacagccacctgggcaatgtgctggtggacatgaagctgattgacatcaaggacaccctgcctgtgggcttcatccccatccaggagaccgtggacacccaggaggtggccttcaggaagaagaggctgtgcatcaagttcatcccccgggacagcacagaggccgccatctgtgacatccgcatcatgggccgcaccaagcaggccccaccccagtacaccttcatcggggagctgaacagcatgggcatctggtacaggatgggccgggtgcccaggaaccacgacagcagccagcccaccacccccagccagagcagcgctgccagcaccccagcccccaacctgcccaggtag

SEQ ID NO: 24755 - DNA, 645 bp, Artificial Sequence
  derived and/or modified sequence
atggaggcccccgcccacggcctggagccctgcggctggggcgcctgctggttagtatgctacacagtgggccgccgggccggctcatggctgcgcagctgggcagggcccccctggaggttccctgagaccaagccctcagtgagctctgtgcagggacgccgtttggaggccagacggagagtagcccaaaccgcagacggggtggacgccgacctgtggaaggatgggctctttaaatcaaaggtgactcgttatctctgttttactcgctcatttagtaaggagaattcccacctgggaaacgtgctggtcgacatgaagttaattgacatcaaggacacactgccagtcggcttcatccccatccaggagacagtagacacgcaggaagtggcatttaggaaaaagcgactctgcatcaaatttatacctagggattcaacggaggcagccatctgtgatatcagaattatggggcgcacaaagcaggccccccctcagtacaccttcattggcgagctcaactcaatgggcatctggtaccgcatggggagggtcccccgcaaccatgattcgtctcagccgactactccgtctcagagtagcgccgcttccactcccgctccaaatttgccaaggtag

SEQ ID NO: 24756 - DNA, 666 bp, Artificial Sequence
  derived and/or modified sequence
atgcggagctgcttctgcgtgcggcggagccgggaccccccccccccccaaccgcccccgcccccccctcagcgcggcaccgaccagagcacaatgcctgaggtgaaagacctcagcgaggctctacccgaaacgtctatggatccaattacgggggttggagtggtggccagtaggaatagagcaccaactggatatgacgtggtcgcacagactgcagacggggtcgacgcagacctgtggaaggacggtctgttcaaatcaaaagttactcgttacctgtgcttcacacggagtttctctaaggaaaacagccatttgggaaacgttcttgttgacatgaaacttatagacatcaaagataccctgcccgtcggttttattcccatccaggaaacggtcgatacccaggaggttgcctttcggaagaaacgtctgtgcataaagtttatccctcgcgacagcacggaagccgcaatctgtgatattcgcatcatgggcagaacgaaacaggcgccgccacaatatacatttatcggagagttgaatagtatggggatctggtatcggatgggtcgggtcccgagaaatcacgattcttctcagccaactacaccaagtcagtcttcagcggcaagtacgccagccccaaatctgcctcgctag

SEQ ID NO: 24757 - DNA, 645 bp, Artificial Sequence
  derived and/or modified sequence
atggaggcccctgcacatggcctcgagccttgtggctggggtgcctgttggttggtttgctatacagtgggaaggcgcgctggatcctggttgcgctcctgggcagggccaccttggagattccccgagacaaaaccaagtgttagcagtgtccaagggcgaaggttggaagcgagacgtcgtgtcgcccaaacagctgatggggttgatgcagacctgtggaaagacggtctgtttaaatctaaggtcactaggtacctgtgctttactcgctcgttttcaaaggagaactcccacctcggaaacgtgctcgtcgatatgaaactgattgacatcaaggacactcttcccgtgggctttatccctatccaggagacggtggatacccaggaggtagcctttagaaagaagcgcttgtgtataaagttcataccccgagattcaacggaggccgcaatttgcgacattaggataatgggtagaaccaaacaggctccccctcagtacacctttatcggggaactgaattcaatgggtatctggtataggatggggcgagtacccagaaaccatgactcttcccagcctactactccctctcagagctctgctgcctcaacacccgctccaaatttgccacgatag

SEQ ID NO: 24758 - DNA, 666 bp, Artificial Sequence
  derived and/or modified sequence
atgaggtcctgtttttgtgttagacgttctcgggatccaccccctcctcagcccccaccacctcctcctcagaggggtacggatcagtctactatgcccgaggttaaggacttgagtgaagctctgccggaaacatctatggatcccatcactggtgtcggagtcgtggctagcagaaatcgagctcctactggctatgacgtcgtcgctcagaccgctgatggagtggatgctgacttgtggaaagatggcttattcaaaagtaaggtgaccaggtatctgtgcttcacaaggagtttctcaaaggagaattcccacctgggaaatgtgcttgtggatatgaaactgatcgatatcaaggatacgctaccagttggcttcattcctatacaggaaaccgtggatacacaggaagttgcattcaggaaaaagagactctgtatcaaatttatcccacgcgacagcactgaagccgctatctgtgatatccggatcatgggcagaaccaagcaggcgcctcctcagtatacctttataggagagctcaactccatgggcatatggtaccgtatgggaagggtgcctagaaaccacgatagcagccagccaacaacaccgtcgcagtcttcggccgctagcactcccgcaccaaatctcccgagatag

SEQ ID NO: 24759 - protein, 333 aa, Artificial Sequence
  derived and/or modified sequence
MTENSDKVPIALVGPDDVEFCSPPAYATLTVKPSSPARLLKVGAVVLISGAVLLLFGAIGAFYFWKGSDSHIYNVHYTMSINGKLQDGSMEIDAGNNLETFKMGSGAEEAIAVNDFQNGITGIRFAGGEKCYIKAQVKARIPEVGAVTKQSISSKLEGKIMPVKYEENSLIWVAVDQPVKDNSFLSSKVLELCGDLPIFWLKPTYPKEIQRERREVVRKIVPTTTKRPHSGPRSNPGAGRLNNETRPSVQEDSQAFNPDNPYHQEGESMTFDPRLDHEGICCIECRRSYTHCQKICEPLGGYYPWPYNYQGCRSACRVIMPCSWWVARILGMV

SEQ ID NO: 24760 - DNA, 1002 bp, Artificial Sequence
  derived and/or modified sequence
atgaccgagaacagcgacaaggtgcccatcgccctggtgggccccgacgacgtggagttctgcagcccccccgcctacgccaccctgaccgtgaagcccagcagccccgccagactgctgaaggtgggcgccgtggtgctgatcagcggcgccgtgctgctgctgttcggcgccatcggcgccttctacttctggaagggcagcgacagccacatctacaacgtgcactacaccatgagcatcaacggcaagctgcaggacggcagcatggagatcgacgccggcaacaacctggagaccttcaagatgggcagcggcgccgaggaggccatcgccgtgaacgacttccagaacggcatcaccggcatcagattcgccggcggcgagaagtgctacatcaaggcccaggtgaaggccagaatccccgaggtgggcgccgtgaccaagcagagcatcagcagcaagctggagggcaagatcatgcccgtgaagtacgaggagaacagcctgatctgggtggccgtggaccagcccgtgaaggacaacagcttcctgagcagcaaggtgctggagctgtgcggcgacctgcccatcttctggctgaagcccacctaccccaaggagatccagagagagagaagagaggtggtgagaaagatcgtgcccaccaccaccaagagaccccacagcggccccagaagcaaccccggcgccggcagactgaacaacgagaccagacccagcgtgcaggaggacagccaggccttcaaccccgacaacccctaccaccaggagggcgagagcatgaccttcgaccccagactggaccacgagggcatctgctgcatcgagtgcagaagaagctacacccactgccagaagatctgcgagcccctgggcggctactacccctggccctacaactaccagggctgcagaagcgcctgcagagtgatcatgccctgcagctggtgggtggccagaatcctgggcatggtgtag

SEQ ID NO: 24761 - DNA, 1002 bp, Artificial Sequence
  derived and/or modified sequence
atgaccgagaacagtgataaagtcccaatcgcactagtggggcctgacgacgtggaattctgttcacctcccgcctatgccacacttacagtcaagccaagctctccggccaggttgctgaaagtcggggctgttgtgctgatttcaggcgctgtccttctgctcttcggcgcaatcggcgccttctacttctggaaggggtccgactcacatatttataacgtgcattacacaatgagtattaatggtaaactgcaggatgggtctatggaaattgatgccgggaataatctggaaaccttcaagatgggaagtggggccgaagaagccatcgctgtaaatgattttcagaacggaatcacaggcattaggtttgctggtggcgagaaatgttatatcaaggcccaggtcaaggcacggattcctgaagttggtgctgtaactaagcaatctatcagttccaagctagagggaaaaatcatgcccgtgaagtacgaagagaatagtttaatctgggtagccgttgaccaaccggtgaaagacaattcgttcctcagttctaaagtactggaactgtgcggggacctgcccattttttggctgaaacccacctatcctaaggaaattcagcgagaacgcagggaggtggttaggaaaattgtacccacgacgacaaaaaggccacattctgggccccggtcaaatcctggtgccggccgactcaataacgaaacgcgccccagtgtacaggaagacagtcaggcctttaaccccgataacccctatcatcaagagggagagtctatgacgttcgacccgagacttgaccatgagggaatttgctgcatagagtgtcgtcgatcttacactcactgccagaaaatttgtgaacccttaggcgggtattacccttggccctacaactaccagggatgcagatcggcgtgccgggtgataatgccctgttcatggtgggttgctagaatcctgggaatggtttag

SEQ ID NO: 24762 - DNA, 1002 bp, Artificial Sequence
  derived and/or modified sequence
atgacagaaaattctgacaaggtgcccatcgccctggtgggcccagatgatgtggagttctgcagccccccagcctatgccaccctgactgtgaagcccagcagccctgcccggctgctgaaggtgggcgctgtggtgctgatctctggagctgtgctgctgctgtttggagccatcggggccttctacttctggaagggcagtgacagccacatctacaacgtgcactacaccatgagcatcaacgggaagctgcaggacggctccatggagattgatgctggcaacaacctggagaccttcaagatgggcagcggggctgaggaggccatcgctgtgaatgacttccagaatggcatcaccggcatccgctttgctggaggagagaagtgctacatcaaggcccaggtgaaggcccgcatccctgaggtgggcgctgtgaccaagcagagcatcagcagcaagctggagggcaagatcatgcctgtgaagtatgaggagaacagcctcatctgggtggccgtggaccagcctgtgaaggacaacagcttcctgagcagcaaggtgctggagctgtgtggggacctgcccatcttctggctgaagcccacctaccccaaggagatccagcgggagcggcgggaggtggtgaggaagatcgtgcccaccaccaccaagaggccccacagcggccccaggagcaaccctggggccggccgcctgaacaatgagacccggcccagcgtgcaggaggacagccaggccttcaacccagacaacccctaccaccaggagggggagagcatgacctttgacccccggctggaccacgagggcatctgctgcatcgagtgccgccgcagctacacccactgccagaagatctgtgagcccctgggcggctactacccctggccctacaactaccagggctgccgcagcgcctgcagggtcatcatgccctgctcctggtgggtggcccgcatcctgggcatggtgtag

SEQ ID NO: 24763 - DNA, 1002 bp, Artificial Sequence
  derived and/or modified sequence
atgaccgagaacagcgacaaggtgcccatcgccctggtgggccccgacgatgtggaattttgctctccacccgcgtatgccactctaaccgtgaaaccatctagtccagctaggctgcttaaggtgggcgccgtggtactgatttctggggctgtgctgctgttgttcggtgccatcggggcgttttatttttggaaagggtcggacagtcacatttataacgtgcactacaccatgagtattaatgggaagctgcaggacgggtcgatggagattgatgcgggaaataacctcgagactttcaagatggggtcaggtgccgaggaggcaattgccgtgaacgacttccaaaacggtattaccgggatacgttttgctggaggggagaaatgttacataaaggcgcaggttaaagcgcgcatccctgaagtgggagccgtcaccaagcagtcaatctcctcgaaactggaggggaaaataatgcccgtgaaatacgaggagaactctctgatctgggttgccgttgaccagccagtaaaggacaacagctttctgtcctcgaaagtgctggagctttgcggcgatctccccattttctggttgaaacctacctacccaaaggaaattcagcgcgaacggcgcgaggttgttcggaagattgttccaacgaccaccaaacgcccacactctggtcccagaagtaatcctggcgccggtcgactgaacaatgagacaaggccctcagtccaggaggactcccaggcctttaacccagacaacccgtatcaccaggaaggagagagcatgactttcgatccccggctcgaccatgagggaatatgctgcatcgaatgcaggcgatcttatacccattgccagaaaatctgcgagcccctcgggggctattatccctggccctataactaccaggggtgtagatcagcctgcagagtcatcatgccttgtagctggtgggtagcccgcattttggggatggtatag

SEQ ID NO: 24764 - DNA, 1002 bp, Artificial Sequence
  derived and/or modified sequence
atgactgagaactccgacaaggtgccaatcgctttagtcggccctgacgatgtcgagttctgctctcccccagcctatgcgacgctgactgtaaagccatcctcccccgctcggctcctcaaagttggggcagtggtactcatctccggcgcagtgttgctgctattcggagccataggagccttctatttctggaagggctctgacagtcacatctataacgtacattacacgatgagcatcaacggcaagctccaggatggctcaatggaaatcgacgcgggtaataatcttgaaacctttaagatgggctctggcgctgaggaagccattgcagtgaacgattttcagaacgggataactggaatcagattcgcaggaggtgagaagtgttatatcaaagcacaagtgaaagctaggatcccagaggttggtgccgtcactaagcagtccatctcaagtaagttagaaggtaaaataatgcccgtgaaatacgaagagaactctctgatctgggtggcggtcgaccagccagtaaaggataattcttttctgagctccaaagtcctcgagttgtgtggggatctacccattttttggcttaagccaacatacccaaaagagatccagagagagaggcgcgaagtggtcaggaaaatcgtccccaccactacgaagagacctcattctgggcctagatcaaatcccggagctggtcgccttaataacgaaactcggccatcagttcaggaggacagtcaggcattcaatcctgataacccctatcaccaggagggcgagagtatgacattcgacccacggctggatcacgaaggcatctgctgtatcgagtgccggaggtcatatacccattgccagaagatctgcgagcccctggggggatattacccgtggccgtacaattaccaggggtgtcgttcagcctgccgcgtaatcatgccttgcagctggtgggtcgccaggattctgggcatggtctag

SEQ ID NO: 24765 - DNA, 717 bp, Artificial Sequence
  derived and/or modified sequence
atgattggaccgatcatcgataagctggagaaggtggccgtcagaggcggcgataaaaagttaaaaccagagtacgacattatgtgtaaggttaaatcctgggtgattgatcagaaaaagcctgtgcgcttctaccacgactggaatgacaaggagatcgaggtgcttaacaagcatctgtttttaacctctaaacctatggtttacctggtgaatttatccgaaaaagattacatcaggaagaagaacaaatggctgattaaaataaaggaatgggtggacaaatatgacccgggcgcactggttattccattttccggcgcgctcgagcttaagctccaagaactgtccgcggaggagagacagaaatatctggaggcaaacatgacccagagcgcactgccaaagataattaaagcagggttcgccgcattgcaactggagtacttttttacggccggccccgatgaagtccgtgcctggacaatcaggaaggggactaaagcccctcaagcagccggcaagatccacacagactttgaaaaggggtttattatggctgaggttatgaaatatgaggacttcaaggaggagggatcagagaatgccgtgaaggctgccgggaaatacagacagcaggggcgcaattacatagtggaggatggagatattatcttttttaaattcaatacacctcagcagccaaagaagaagtag

SEQ ID NO: 24766 - DNA, 312 bp, Artificial Sequence
  derived and/or modified sequence
atgataggacccatcatcgataaattggagaaggtggccgtccggggaggagataagaagctgaaaccggaatacgacataatgtgcaaggtgaagtcttgggtcattgaccagaagaaacccgtgcgtttctaccacgattggaatgataaggaaatcgaagttctgaacaaacacctgttccttacgtcgaaacccatggtctacctggtcaatttatctgaaaaggactacatcagaaagaaaaacaaatggcttattaagataaaggagtgggtggacaagtacgatccaggagccctggttatctag

SEQ ID NO: 24767 - DNA, 717 bp, Artificial Sequence
  derived and/or modified sequence
atgattggccccatcatcgacaagctggagaaggtggccgtgcggggcggggacaagaagctgaagccagaatatgacatcatgtgcaaggtgaagtcctgggtgattgaccagaagaagcctgtgcgcttctaccatgactggaatgacaaggagattgaggtgctgaacaagcacctgttcctgaccagcaagcccatggtgtacctggtgaacctgtctgagaaggactacatcaggaagaagaacaagtggctgatcaagatcaaggagtgggtggacaagtatgaccccggggccctggtgatccccttcagcggggccctggagctgaagctgcaggagctgtctgctgaggagcggcagaagtacctggaggccaacatgacccagagcgccctgcccaagatcatcaaggccggctttgctgccctgcagctggagtacttcttcaccgctggcccagatgaggtgcgggcctggaccatcaggaagggcaccaaggccccccaggccgccggcaagatccacacagactttgagaagggcttcatcatggccgaggtgatgaagtatgaggacttcaaggaggagggctctgaaaatgctgtgaaggctgctgggaagtaccggcagcagggcaggaactacatcgtggaggatggagacatcatcttcttcaagttcaacaccccccagcagcccaagaagaagtag

SEQ ID NO: 24768 - DNA, 312 bp, Artificial Sequence
  derived and/or modified sequence
atgattggccccatcatcgacaagctggagaaggtggccgtgcggggcggggacaagaagctgaagccagaatatgacatcatgtgcaaggtgaagtcctgggtgattgaccagaagaagcctgtgcgcttctaccatgactggaatgacaaggagattgaggtgctgaacaagcacctgttcctgaccagcaagcccatggtgtacctggtgaacctgtctgagaaggactacatcaggaagaagaacaagtggctgatcaagatcaaggagtgggtggacaagtatgaccccggggccctggtgatctag

SEQ ID NO: 24769 - DNA, 717 bp, Artificial Sequence
  derived and/or modified sequence
atgatcggccccatcatcgacaagctggagaaggtggccgtgcggggcggagacaagaagttgaaaccagaatacgatatcatgtgcaaagtgaagagttgggtcatcgatcagaaaaaacctgtccgtttctatcatgattggaatgataaggagattgaagtgctgaacaagcacctgttcctgacgtccaagccaatggtatatttagtgaacttatccgaaaaggattacatacgcaaaaaaaataagtggttgattaaaattaaagaatgggtcgataaatacgacccgggggctctggtgattcccttcagcggcgcactggaactgaaactacaggaactctccgcagaggaaagacagaagtatcttgaagctaacatgactcagtctgccctgcctaaaataattaaagctggattcgctgctttgcagcttgaatatttcttcacagcgggtcccgatgaagtacgtgcttggacaatccgcaaagggactaaagcccctcaggcagcagggaaaattcacacagatttcgagaaaggattcattatggcggaagtgatgaagtacgaagattttaaggaggaaggttccgaaaatgccgtgaaggccgcaggtaaatatagacagcaagggcggaattacattgtagaggatggcgatattatcttcttcaagttcaatacccctcagcagcccaagaaaaaatag

SEQ ID NO: 24770 - DNA, 312 bp, Artificial Sequence
  derived and/or modified sequence
atgatcggccccatcatcgacaagctggagaaggtggccgtgcggggcggagacaagaagcttaagccggaatatgatattatgtgtaaagtgaaaagctgggtcatcgaccaaaagaaaccagtgcgcttttaccacgactggaacgataaggagatcgaagttttaaataagcatctcttcttaacgagcaagcccatggtttatcttgtcaaccttagcgagaaggattatatcaggaaaaagaacaagtggttgatcaaaattaaagaatgggtggacaaatacgatcccggcgccctggtcatctag

SEQ ID NO: 24771 - DNA, 717 bp, Artificial Sequence
  derived and/or modified sequence
atgatcggtcccattattgacaagctggaaaaggtagccgtgcggggaggtgataaaaagcttaagcctgagtacgatataatgtgtaaggtgaagagctgggtgatagaccagaagaaaccagtgcgcttctatcacgattggaatgataaagagattgaagtgcttaataagcacttgttcctcacttctaagccgatggtataccttgtgaatctcagtgaaaaggactatatccgaaaaaaaaacaaatggctgatcaaaatcaaggagtgggtggataagtatgaccccggagccctggtcatacctttctcgggcgctctggaacttaagctccaagagctgtccgcagaggaaaggcagaagtatctggaagcaaatatgacacaatccgccctgcccaaaatcattaaagccggatttgctgcactgcaactggaatacttcttcaccgctgggccagatgaagtgagagcatggacaatccggaaaggtaccaaggcaccgcaggcggctggaaaaatccataccgattttgagaagggttttatcatggcagaggttatgaagtacgaagacttcaaggaggagggctctgagaacgctgtgaaggcggctggaaagtacagacagcaaggccgaaactacatcgtggaggatggcgacattatttttttcaagttcaatacgccacaacagcccaagaagaagtag

SEQ ID NO: 24772 - DNA, 312 bp, Artificial Sequence
  derived and/or modified sequence
atgatcgggccaatcattgacaagctggaaaaagtcgccgtgcgcggtggggacaaaaagttgaaacctgagtacgacatcatgtgcaaagtgaagtcctgggtaatcgaccaaaagaaacctgtcagattttatcatgactggaatgacaaagagatcgaagtcttgaataaacacttatttttaacaagcaagccaatggtgtacctcgtgaatcttagcgagaaagattacatccggaaaaagaataagtggttgattaagatcaaagaatgggttgacaagtacgaccccggtgctctcgtgatctag

SEQ ID NO: 24773 - DNA, 717 bp, Artificial Sequence
  derived and/or modified sequence
atgatcggccccatcatcgacaagctggagaaggtggccgtgagaggcggcgacaagaagctgaagcccgagtacgacatcatgtgcaaggtgaagagctgggtgatcgaccagaagaagcccgtgagattctaccacgactggaacgacaaggagatcgaggtgctgaacaagcacctgttcctgaccagcaagcccatggtgtacctggtgaacctgagcgagaaggactacatcagaaagaagaacaagtggctgatcaagatcaaggagtgggtggacaagtacgaccccggcgccctggtgatccccttcagcggcgccctggagctgaagctgcaggagctgagcgccgaggagagacagaagtacctggaggccaacatgacccagagcgccctgcccaagatcatcaaggccggcttcgccgccctgcagctggagtacttcttcaccgccggccccgacgaggtgagagcctggaccatcagaaagggcaccaaggccccccaggccgccggcaagatccacaccgacttcgagaagggcttcatcatggccgaggtgatgaagtacgaggacttcaaggaggagggcagcgagaacgccgtgaaggccgccggcaagtacagacagcagggcagaaactacatcgtggaggacggcgacatcatcttcttcaagttcaacaccccccagcagcccaagaagaagtag

SEQ ID NO: 24774 - DNA, 312 bp, Artificial Sequence
  derived and/or modified sequence
atgatcggccccatcatcgacaagctggagaaggtggccgtgagaggcggcgacaagaagctgaagcccgagtacgacatcatgtgcaaggtgaagagctgggtgatcgaccagaagaagcccgtgagattctaccacgactggaacgacaaggagatcgaggtgctgaacaagcacctgttcctgaccagcaagcccatggtgtacctggtgaacctgagcgagaaggactacatcagaaagaagaacaagtggctgatcaagatcaaggagtgggtggacaagtacgaccccggcgccctggtgatctag

SEQ ID NO: 24775 - protein, 325 aa, Artificial Sequence
  derived and/or modified sequence
MAEVPPGPSSLLPPPAPPAPAAVEPRCPFPAGAALACCSEDEEQQQLNGLISPELRHLRAAASLKSKVLSVAEVAATTATPDGGPRATATKGAGVHSGERPPHSLSSNARTAVPSPVEAAAASDPAAARNGLAEGTEQEEEEEDEQVRLLSSSLTADCSLRSPSGREVEPGEDRTIRYVRYESELQMPDIMRLITKDLSEPYSIYTYRYFIHNWPQLCFLAMVGEECVGAIVCKLDMHKKMFRRGYIAMLAVDSKYRRNGIGTNLVKKAIYAMVEGDCDEVVLETEITNKSALKLYENLGFVRDKRLFRYYLNGVDALRLKLWLR

SEQ ID NO: 24776 - protein, 362 aa, Artificial Sequence
  derived and/or modified sequence
MAEVPPGPSSLLPPPAPPAPAAVEPRCPFPAGAALACCSEDEEDDEEHEGGGSRSPAGGESATVAAKGHPCLRCPQPPQEQQQLNGLISPELRHLRAAASLKSKVLSVAEVAATTATPDGGPRATATKGAGVHSGERPPHSLSSNARTAVPSPVEAAAASDPAAARNGLAEGTEQEEEEEDEQVRLLSSSLTADCSLRSPSGREVEPGEDRTIRYVRYESELQMPDIMRLITKDLSEPYSIYTYRYFIHNWPQLCFLAMVGEECVGAIVCKLDMHKKMFRRGYIAMLAVDSKYRRNGIGTNLVKKAIYAMVEGDCDEVVLETEITNKSALKLYENLGFVRDKRLFRYYLNGVDALRLKLWLR

SEQ ID NO: 24777 - DNA, 978 bp, Artificial Sequence
  derived and/or modified sequence
atggccgaggtgccccccggccccagcagcctgctgcccccccccgccccccccgcccccgccgccgtggagcccagatgccccttccccgccggcgccgccctggcctgctgcagcgaggacgaggagcagcagcagctgaacggcctgatcagccccgagctgagacacctgagagccgccgccagcctgaagagcaaggtgctgagcgtggccgaggtggccgccaccaccgccacccccgacggcggccccagagccaccgccaccaagggcgccggcgtgcacagcggcgagagacccccccacagcctgagcagcaacgccagaaccgccgtgcccagccccgtggaggccgccgccgccagcgaccccgccgccgccagaaacggcctggccgagggcaccgagcaggaggaggaggaggaggacgagcaggtgagactgctgagcagcagcctgaccgccgactgcagcctgagaagccccagcggcagagaggtggagcccggcgaggacagaaccatcagatacgtgagatacgagagcgagctgcagatgcccgacatcatgagactgatcaccaaggacctgagcgagccctacagcatctacacctacagatacttcatccacaactggccccagctgtgcttcctggccatggtgggcgaggagtgcgtgggcgccatcgtgtgcaagctggacatgcacaagaagatgttcagaagaggctacatcgccatgctggccgtggacagcaagtacagaagaaacggcatcggcaccaacctggtgaagaaggccatctacgccatggtggagggcgactgcgacgaggtggtgctggagaccgagatcaccaacaagagcgccctgaagctgtacgagaacctgggcttcgtgagagacaagagactgttcagatactacctgaacggcgtggacgccctgagactgaagctgtggctgagatag

SEQ ID NO: 24778 - DNA, 1089 bp, Artificial Sequence
  derived and/or modified sequence
atggccgaggtgccccccggccccagcagcctgctgcccccccccgccccccccgcccccgccgccgtggagcccagatgccccttccccgccggcgccgccctggcctgctgcagcgaggacgaggaggacgacgaggagcacgagggcggcggcagcagaagccccgccggcggcgagagcgccaccgtggccgccaagggccacccctgcctgagatgcccccagcccccccaggagcagcagcagctgaacggcctgatcagccccgagctgagacacctgagagccgccgccagcctgaagagcaaggtgctgagcgtggccgaggtggccgccaccaccgccacccccgacggcggccccagagccaccgccaccaagggcgccggcgtgcacagcggcgagagacccccccacagcctgagcagcaacgccagaaccgccgtgcccagccccgtggaggccgccgccgccagcgaccccgccgccgccagaaacggcctggccgagggcaccgagcaggaggaggaggaggaggacgagcaggtgagactgctgagcagcagcctgaccgccgactgcagcctgagaagccccagcggcagagaggtggagcccggcgaggacagaaccatcagatacgtgagatacgagagcgagctgcagatgcccgacatcatgagactgatcaccaaggacctgagcgagccctacagcatctacacctacagatacttcatccacaactggccccagctgtgcttcctggccatggtgggcgaggagtgcgtgggcgccatcgtgtgcaagctggacatgcacaagaagatgttcagaagaggctacatcgccatgctggccgtggacagcaagtacagaagaaacggcatcggcaccaacctggtgaagaaggccatctacgccatggtggagggcgactgcgacgaggtggtgctggagaccgagatcaccaacaagagcgccctgaagctgtacgagaacctgggcttcgtgagagacaagagactgttcagatactacctgaacggcgtggacgccctgagactgaagctgtggctgagatag

SEQ ID NO: 24779 - DNA, 978 bp, Artificial Sequence
  derived and/or modified sequence
atggccgaggtccccccaggcccaagcagtctattgccgccccccgctcctccagccccagcagcggttgagccccgctgtccctttccagccggggccgccttagcctgttgttctgaggatgaagagcagcagcagctaaacgggctcatcagcccggagttgcggcaccttagagccgctgctagcttgaaatccaaagtgttgtctgtcgccgaggtggccgccaccacagcaacgccagacggaggtcctagggctacagcaacaaaaggggcaggagttcactccggcgagcgacctccgcacagtctcagttccaatgcccgtaccgcggtgccttctcccgtggaggccgctgctgcgtcagacccagctgccgcccgcaacggcctcgcagagggcaccgagcaggaggaggaagaggaggacgagcaggtccgcctgctgtccagtagtctgactgccgattgctcgctgcgcagcccctcaggacgggaagttgaacctggggaggacaggacaattcgatatgtgaggtatgagtctgagctgcagatgcctgacatcatgcgcctgatcacgaaggacttgtccgaaccctattcaatttatacctataggtatttcatacacaactggccgcagttgtgcttcctggcaatggtcggggaggagtgcgtcggcgcaatcgtttgtaaactggatatgcacaagaaaatgttccggagagggtatatcgccatgctggcagttgacagtaagtatcgcagaaatggcatcgggactaatcttgtgaaaaaggctatttatgctatggtggagggagactgtgacgaagtggttctcgagaccgaaatcactaataaaagcgccctgaagctgtatgagaacctaggctttgtccgggacaagcgattgtttcgatattacctgaatggcgtggatgccctgaggctgaagctgtggcttcgatag

SEQ ID NO: 24780 - DNA, 1089 bp, Artificial Sequence
  derived and/or modified sequence
atggcagaggtgcccccgggacccagctccttactgccccctcccgctccacccgcacccgccgctgttgagcctcgatgccctttccccgcaggggccgcactcgcctgttgtagcgaggacgaggaagatgacgaagaacatgaagggggtggtagtcgctccccagccggtggcgagtctgctactgtggcagctaaaggtcacccctgtcttcgctgtccccagccaccccaggagcagcagcagttaaacggactgatcagcccagaattacggcaccttcgcgccgctgctagcctgaaaagtaaagtactctcggttgctgaagtggccgcaacgacggcaacacccgacgggggtcccagagctaccgcgactaagggagccggcgtgcactctggtgagcgcccaccacactcactgagttccaacgcccggacagcggtgccttcacctgttgaagcagccgctgccagtgatccggccgccgcccgcaatgggctggcagaaggcacggagcaggaagaggaggaggaagacgaacaggtgcgcttactatctagctcgttgaccgccgattgctctttgaggtcaccctctgggagagaagtcgaacctggggaggacaggactatcaggtatgtgagatatgaaagtgaattgcagatgcccgatatcatgcgtcttattaccaaggacctaagcgagccctacagcatctacacctatcgttatttcatccataattggccccagctgtgtttcctggccatggtcggagaagaatgcgttggagccattgtatgtaaactggacatgcacaaaaaaatgtttcgcagaggatatattgcaatgctagccgtcgattcgaagtacagaaggaacggcatcggcaccaatttagtgaagaaggcaatctatgctatggtggagggggactgtgatgaggtggtgttggagaccgagatcacgaataaatctgccctgaaattatacgaaaatctaggcttcgttagagataaacgtctcttcagatactaccttaacggggtggatgcccttcggcttaagctctggctccgctag

SEQ ID NO: 24781 - DNA, 978 bp, Artificial Sequence
  derived and/or modified sequence
atggccgaggtgcccccaggccccagcagcctgctgcccccaccagcccccccagccccagctgctgtggagccccgctgccccttccctgctggagctgccctggcctgctgcagtgaagatgaggagcagcagcagctgaatggcctcatcagccctgagctgcggcacctgcgggctgctgccagcctgaagagcaaggtgctgtctgtggccgaggtggccgccaccacagccaccccagatggcggcccccgggccacagccaccaagggagctggggtgcacagcggggagaggcctccccacagcctgagcagcaatgccaggacagctgtgcccagccctgtggaggccgctgctgccagtgaccctgctgctgccagaaatggcctggccgagggcacagagcaggaggaggaggaggaggatgagcaggtgcggctgctgagcagcagcctgacagctgactgcagcctgcggagccccagcggccgggaggtggagcccggggaggacaggaccatccgctacgtgcgctatgaaagtgagctgcagatgccagacatcatgaggctcatcaccaaggacctgtctgagccctacagcatctacacctaccgctacttcatccacaactggccccagctgtgcttcctggccatggtgggggaggagtgtgtgggcgccatcgtgtgcaagctggacatgcacaagaagatgttcagaagaggctacatcgccatgctggccgtggacagcaagtacagaagaaatggaattggcaccaacctggtgaagaaggccatctatgccatggtggagggggactgtgatgaggtggtgctggagacagagatcaccaacaagagcgccctgaagctgtatgagaacctgggctttgtgcgggacaagaggctcttccgctactacctgaatggagtggatgccctgcggctgaagctgtggctgaggtag

SEQ ID NO: 24782 - DNA, 1089 bp, Artificial Sequence
  derived and/or modified sequence
atggccgaggtgcccccaggccccagcagcctgctgcccccaccagcccccccagccccagctgctgtggagccccgctgccccttccctgctggagctgccctggcctgctgcagtgaagatgaagaagatgatgaggagcacgagggcggcggcagccgcagccctgctggaggagagagcgccaccgtggccgccaagggccacccctgcctgcgctgcccccagcccccccaggagcagcagcagctgaatggcctcatcagccctgagctgcggcacctgcgggccgccgccagcctgaagagcaaggtgctgtctgtggccgaggtggccgccaccacagccaccccagatggcggcccccgggccacagccaccaagggggccggcgtgcacagcggggagcggcccccccacagcctgagcagcaatgccaggacagctgtgcccagccctgtggaggccgccgccgccagtgaccctgctgctgccagaaatggcctggccgagggcacagagcaggaggaggaggaggaggatgagcaggtgcggctgctgagcagcagcctgacagctgactgcagcctgcggagccccagcggccgggaggtggagcctggagaggacaggaccatccgctacgtgcgctatgagagcgagctgcagatgccagacatcatgaggctcatcaccaaggacctgtctgagccctacagcatctacacctaccgctacttcatccacaactggccccagctgtgcttcctggccatggtgggggaggagtgtgtgggcgccatcgtgtgcaagctggacatgcacaagaagatgttccggcggggctacatcgccatgctggccgtggacagcaagtacagaagaaatggcatcggcaccaacctggtgaagaaggccatctatgccatggtggagggggactgtgatgaggtggtgctggagacagagatcaccaacaagagcgccctgaagctgtatgagaacctgggctttgtgcgggacaagaggctcttccgctactacctgaatggagtggatgccctgcggctgaagctgtggctgaggtag

SEQ ID NO: 24783 - DNA, 4210 bp, Artificial Sequence
  derived and/or modified sequence
atggcggaggtaccgcctgggcctagcagcctcctcccaccaccagcacctccggccccggcggcggtcgagccccgctgtcccttcccggcgggggccgccctcgcctgctgcagcgaggacgaggagcagcagcagctcaacggattgattagccccgaactgcggcacctccgggcggccgcctccctcaagagcaaggtcctgagcgtagcagaggtggccgcgaccacagccacccctgacggaggccccagagcgactgcaacaaaaggagccggggtacactcgggcgagaggccccctcactccctctctagtaatgcaagaactgcggtccccagcccggtggaggcagcggcggcgagcgatcccgcggcggcccgcaatggactggccgagggcaccgagcaggaggaggaggaggaagacgagcaggtgcggctgctgtcttcgtccctgaccgccgactgcagcttaagaagcccttcgggcagggaggttgagcctggggaggatcggacgatacgatatgtccgatatgaatccgagctacaaatgcccgatatcatgagactgatcaccaaagatctgtccgaaccctactccatttatacctatagatattttatccacaactggccacagctgtgcttcttggccatggtaggggaggagtgtgtaggtgccatcgtttgcaagttggatatgcacaaaaagatgttccgcagaggttatatagccatgttagccgtggattccaaatacaggagaaatggcattggtactaacttggttaagaaagctatatatgccatggttgagggagactgtgatgaggttgttttggaaaccgaaataacaaataagtccgctttgaaactttatgaaaatcttggttttgttcgagataagaggctgttcagatactatttaaatggagttgatgcactgcgacttaaactgtggctgcgttgagaaactgacatcaaggaacaactatcatccgcacagaatcgacctttgcatgcaatgcaatttgtacagaattgctttgcaggtggatttagtaatttccatgcagctcttacctgtcagtgtctcattgagtgtcgcacaatatttgttgcactttggcatggcacatttgttctgaattaaaagattgttttaaacttcaggagttcttttggtaccaacaagatgtgccagttgatagccaagatttatgtgttcatttgcaaagtctgctgacaatgttatttacacagtgatcattttatcacagaaccagtaagtggaacataatttttgttccttaaaaaagccaatgtggattgtaaaagtctttaagtatactaacatttcacacaaaacctgccctagttttctgaagtgggtgagggagacgcttcagttttaggttttattttttcaatattaaattttccattcttgaatattggtacctcagtgattagtgaatgaaaaaaatgtagggtgggtatgtcttacaatgagtaaaggtaacaattaaattttgtctgccagtgcctgtgtagataagtatatttgtcttcatctctagtttttgaatgcatgctatcttttccttttctttaaggcctttgcaagcaaacttttgtttttatttaaattctaaatttgataaattatttcagatttttataatttggatacttttttcaggtgaatgaaagaatggtttactttagaagtccctttttccttacagtaacaagttgaatctacttggaaaattgagaaatggctcaaaagagataagaaaagttgatggagccgggaattgctggggtttagatgcactttttcttttgagagtaagggaagttttggaaaagaatagaaaattagtgtaagttgatatgattttatttaatcaaaattactgctacgctgcgaagaacagcttttacaaagtagctgaatttgtttttcccacttgatttggattcacattgctttcatttcttaaaatgcttcacttcaggttcttggtcttggaaataaatttcaaggtgcattgtatccattttaagctgctttattttattttcacttgtatgagcaaattcttgggggagctttgcttttcttctgccagaaaaacaaaagggggaaatgaaaatcttttttggaatgagttctgtgggttttcttaacagccaccatgtttattagttacattgtgttttggccaatcagtgcaatgtaacaaattttacagttaattgctttcaattgagtcagtaaacctgtgatagataatttatttaactggaaaacctaggtacccataagaaaaaagattcattctctgtgaaaactgtaggaatctgttgttgttttcatttgaatatgctctacttctgctctagtatttggtttggaatatattttgtggctctaattactgtatttttaaaaaccctacctccattaacagttggtaaaggccccttttcaggaaagtttgttgctttttttttttttttaaaggaaagctgctctttgctcagtatagtgttttgaaagtgaacatagtaacaaatactttaaaaataaagatacacaatttatatttgaaaataaaaactttctgctggtgggattatttatagttctttatttttaaagaaaatgttttcctttttatattgctcttgaaagtttaatgagcagaatacaatactggttataataaaaatatggtaaccacacagtactcagcctttcaatatgtttttggtcaaacttcatttaggcactagcatttagaagaataccaatcacagtgatgcttttgttatttaatatgaaggaaatggaactaaaacatttatgtcatcaaattttatttcacttctttatatttgacttgctggttgatacataatggttgatgaacatatatttgcttaaatcactaatagggatggttgtaaagtagatagatcattggttcaaccattttagtgtttttgccagattgtcaatgaaaccatcatactgaccttttcctccaaaattgccaaattgactgaactggttgggtgtttgtaaagatgacgttaactgtgtgactaaaaagtcagatggttgccatattgtttggaatatgttgaatgtcagtgtatgccttatgtctttaattgggtatgcaaaaaaatttttacttaagtagattaaaattttaacctctagcatgaaaacccagcaccaacactgaaagactccattcaggttgaagtagcctcaaacagtaatttactttttgataataggctgttgtttttcttaaataagcttaaaacaattctatctgaaattggtagcatgggttcacttggctacaactgagcaaaatagatgcaactttcttttaatggggtgctgcctctttaggactgactgtactatccactgacactggtttggcagttggtactgctgaacatttttatacatgctaccatgaagctatatatgttagtattgaagaagctaacgggtatactatcatttttgatgtgtgggctgattataatttcctgtatttcctgtacattgggatgaaactactttagcaaagtccacagatcagaaaccagacggtagtttttgaagttgaaaccagcaaaataagaaaaaataaaaaatcgattttaatattttctgcctctttcccaaattacccttcccacttgctcgacaaatctatgtaaagcagtttgttttttcatgttttaactttaccttgccctgtgttatggtactggctgacatgtctaagactggatgtgtatatttattatggtgtctaaaaatcatgaagttcatcacttttcaggagtatagataaaatcaaattggtagtacatcagagttacttttcagtgcaccatgacatcactaaaatgagtgctgtaatgttacagggctttcaggtttgtaaaaacataaccataaattatattgacgtcagatatgagttgagtatctataaaatatcacgtgtatctcaaaatattggactgctgtttgactggatattgctgcataattttcttctattgtcccatatccttttggagagagatttaatgggatttgaaatgtgcaagctgtctaaataagatgcagtcaaataaagtatggttaagttgtg

SEQ ID NO: 24784 - DNA, 7644 bp, Artificial Sequence
  derived and/or modified sequence
aaactttacccggcctaacagctgaggcgctttacggcgacggcggctgagtgagaaccttggcggctgtggaggctgccgcggctgcgaaggaggcggcggcggtggcggaggaagaggagtggcggcagcggcggcggggacccgtgcggggatggcggaggtaccgcctgggcctagcagcctcctcccaccaccagcacctccggccccggcggcggtcgagccccgctgtcccttcccggcgggggccgccctcgcctgctgcagcgaggacgaggaggacgacgaagagcacgaaggcggcggcagcaggagcccggcgggcggagagtcggcgacggtggcggccaaggggcatccgtgcctccgctgccctcagccgccgcaggagcagcagcagctcaacggattgattagccccgaactgcggcacctccgggcggccgcctccctcaagagcaaggtcctgagcgtagcagaggtggccgcgaccacagccacccctgacggaggccccagagcgactgcaacaaaaggagccggggtacactcgggcgagaggccccctcactccctctctagtaatgcaagaactgcggtccccagcccggtggaggcagcggcggcgagcgatcccgcggcggcccgcaatggactggccgagggcaccgagcaggaggaggaggaggaagacgagcaggtgcggctgctgtcttcgtccctgaccgccgactgcagcttaagaagcccttcgggcagggaggttgagcctggggaggatcggacgatacgatatgtccgatatgaatccgagctacaaatgcccgatatcatgagactgatcaccaaagatctgtccgaaccctactccatttatacctatagatattttatccacaactggccacagctgtgcttcttggccatggtaggggaggagtgtgtaggtgccatcgtttgcaagttggatatgcacaaaaagatgttccgcagaggttatatagccatgttagccgtggattccaaatacaggagaaatggcattggtactaacttggttaagaaagctatatatgccatggttgagggagactgtgatgaggttgttttggaaaccgaaataacaaataagtccgctttgaaactttatgaaaatcttggttttgttcgagataagaggctgttcagatactatttaaatggagttgatgcactgcgacttaaactgtggctgcgttgagaaactgacatcaaggaacaactatcatccgcacagaatcgacctttgcatgcaatgcaatttgtacagaattgctttgcaggtggatttagtaatttccatgcagctcttacctgtcagtgtctcattgagtgtcgcacaatatttgttgcactttggcatggcacatttgttctgaattaaaagattgttttaaacttcaggagttcttttggtaccaacaagatgtgccagttgatagccaagatttatgtgttcatttgcaaagtctgctgacaatgttatttacacagtgatcattttatcacagaaccagtaagtggaacataatttttgttccttaaaaaagccaatgtggattgtaaaagtctttaagtatactaacatttcacacaaaacctgccctagttttctgaagtgggtgagggagacgcttcagttttaggttttattttttcaatattaaattttccattcttgaatattggtacctcagtgattagtgaatgaaaaaaatgtagggtgggtatgtcttacaatgagtaaaggtaacaattaaattttgtctgccagtgcctgtgtagataagtatatttgtcttcatctctagtttttgaatgcatgctatcttttccttttctttaaggcctttgcaagcaaacttttgtttttatttaaattctaaatttgataaattatttcagatttttataatttggatacttttttcaggtgaatgaaagaatggtttactttagaagtccctttttccttacagtaacaagttgaatctacttggaaaattgagaaatggctcaaaagagataagaaaagttgatggagccgggaattgctggggtttagatgcactttttcttttgagagtaagggaagttttggaaaagaatagaaaattagtgtaagttgatatgattttatttaatcaaaattactgctacgctgcgaagaacagcttttacaaagtagctgaatttgtttttcccacttgatttggattcacattgctttcatttcttaaaatgcttcacttcaggttcttggtcttggaaataaatttcaaggtgcattgtatccattttaagctgctttattttattttcacttgtatgagcaaattcttgggggagctttgcttttcttctgccagaaaaacaaaagggggaaatgaaaatcttttttggaatgagttctgtgggttttcttaacagccaccatgtttattagttacattgtgttttggccaatcagtgcaatgtaacaaattttacagttaattgctttcaattgagtcagtaaacctgtgatagataatttatttaactggaaaacctaggtacccataagaaaaaagattcattctctgtgaaaactgtaggaatctgttgttgttttcatttgaatatgctctacttctgctctagtatttggtttggaatatattttgtggctctaattactgtatttttaaaaaccctacctccattaacagttggtaaaggccccttttcaggaaagtttgttgctttttttttttttttaaaggaaagctgctctttgctcagtatagtgttttgaaagtgaacatagtaacaaatactttaaaaataaagatacacaatttatatttgaaaataaaaactttctgctggtgggattatttatagttctttatttttaaagaaaatgttttcctttttatattgctcttgaaagtttaatgagcagaatacaatactggttataataaaaatatggtaaccacacagtactcagcctttcaatatgtttttggtcaaacttcatttaggcactagcatttagaagaataccaatcacagtgatgcttttgttatttaatatgaaggaaatggaactaaaacatttatgtcatcaaattttatttcacttctttatatttgacttgctggttgatacataatggttgatgaacatatatttgcttaaatcactaatagggatggttgtaaagtagatagatcattggttcaaccattttagtgtttttgccagattgtcaatgaaaccatcatactgaccttttcctccaaaattgccaaattgactgaactggttgggtgtttgtaaagatgacgttaactgtgtgactaaaaagtcagatggttgccatattgtttggaatatgttgaatgtcagtgtatgccttatgtctttaattgggtatgcaaaaaaatttttacttaagtagattaaaattttaacctctagcatgaaaacccagcaccaacactgaaagactccattcaggttgaagtagcctcaaacagtaatttactttttgataataggctgttgtttttcttaaataagcttaaaacaattctatctgaaattggtagcatgggttcacttggctacaactgagcaaaatagatgcaactttcttttaatggggtgctgcctctttaggactgactgtactatccactgacactggtttggcagttggtactgctgaacatttttatacatgctaccatgaagctatatatgttagtattgaagaagctaacgggtatactatcatttttgatgtgtgggctgattataatttcctgtatttcctgtacattgggatgaaactactttagcaaagtccacagatcagaaaccagacggtagtttttgaagttgaaaccagcaaaataagaaaaaataaaaaatcgattttaatattttctgcctctttcccaaattacccttcccacttgctcgacaaatctatgtaaagcagtttgttttttcatgttttaactttaccttgccctgtgttatggtactggctgacatgtctaagactggatgtgtatatttattatggtgtctaaaaatcatgaagttcatcacttttcaggagtatagataaaatcaaattggtagtacatcagagttacttttcagtgcaccatgacatcactaaaatgagtgctgtaatgttacagggctttcaggtttgtaaaaacataaccataaattatattgacgtcagatatgagttgagtatctataaaatatcacgtgtatctcaaaatattggactgctgtttgactggatattgctgcataattttcttctattgtcccatatccttttggagagagatttaatgggatttgaaatgtgcaagctgtctaaataagatgcagtcaaataaagtatggttaagttgtgtttgcatttttcttttagatacagctgtgtgcattttatgattgggttgttttgcttttacctactaagtaaaacagcaacaaacaatatattgtttcccgcttcctgcctttcatctaagagttacggggaagaagtattacataattgtcatcactgttgtgtgttctgacaaagtaaatttgaaaataacatgaacttgatttttctaaaagtactcagtcaactcatatgtcagttatcggtacattttccatgtgttcagtcaaaagtttatctttttagtctgtttcatagcagtttatttctaagacagtttttattttaatttacttttttgtctgtacactgccactctgtaatgttccccccaccccatcccacccttggtaagacaccaaagtaaaatagagcaatatccaaagagctttttgcccctgtcttgtgaggagctttaaatagctgtgaatacttctgtatgtcaagattttcggattttagtggaaggatgaaatgatctgttttaatcatttaactgctaaattacttttatcatgcatgccaaatctttacattattctttagagtaatactgtaaaagtatctgagtttgttttatttgggccttatgtggaactcgaaatacttcataaattcactctaaggtctaaataagaaccagaaggttgataccattttttcacaccagtaaacacagatcagtattaacctgtagcccagaggtgttagatttattttttgagacagagtctcactctgttgcccaggctggagtgcggtggcacaatcttggctcactgcaacctctgccccctgggttcaagcaattcttgtgccttagcctcctgagtagctgggactacaggtgcatgccaccacgcccagccaatttcttgtattcttagtatgagacagggtttcaccatgttggccaggctggtctcaaactcctgacctcaagtgatctgcccgcctcggcctcccaaagtgttggaattacaggcgtgagccaccacgcccagcctatgatattctttttataagcaacttttaaaaagttttttaaaagatctcataagcatatagcactgctacactttagatcactactgtccagtcacactttatataaggatagatgtgtccttttcactccccagtatggtagttactagtcacatgtgtagctactgagcccctgaagtgtgggtgggatgattgagctgaatttgtaattttaatcaaagttagccacatgtggcttgtggctactgtattggacagcagagctttagataagcagtaataacaggaagggagtgtttgtataggttgaaagataaaatggaaggatcacaattaggccagatgtggtggctcacgcctattatcccagcgttttgggaggctgagatggtagtttgcaaccagccaggacagcatagcaagactgtttctgaaaaatcttttaaaataacacaactaaaaattacctctgagcaagagtatagctgaactgtttatactgacaatatatttcattaatacagtgtttgaccactttccaccccaccaaccactgcccttgttatgtagcctttctgagaaaagcagccctttcagattttattgttggaagttccttgggttgcagagatgcagattcaagtgccaaaagttgtttctgatgagacttacctttttagccttaaaatatttgtatagttggctctaataatttctcatttttgatgaatttgaaatcatttcacttctaaatgagattggtcatctcatgagtggtcaagttggaacatggaggtctatcatgtttttaacctccaagatccacttatggggatgaggccaaaggccaatgttacttctagaagaaccagattaatttttctgccttccatcaccgcagtgtattacctttgaccctcgctggtcatctggtaagtgtagttcatcaaaagagcagaaataggcatagtaaacacctggacacaaagacagtgccaggcttggtacaacctgttaacactgttgaggaaagagctcaaaacatgcattactttggggattaagtcagtgtttaatctcaatatgaaacagacctagaaataacaaagaccactgaagtgccaaatttatcttctaatactactatttaaactatgcaatatgggggttataatgaaatagttttagtctatgtaaggtttttataatgctaagaaataagcttatttttagatatggattttttatgactacctctttgctgtatgaatatcttaattttctaatacctcagtttcatgagaactgtatgtacatttttgtaaataaaataatttaccatatactaggagaaggacctgcttttaaagaaattgtgtaaagacatttgttattggatgtgttacatagtaaatcaatttgaaatttcttaaaaacgtttataagacttttctggtctccttgaccgagggattttagtataagtatttagtgagatttgtattctaggaagtgtgtgccgtcacttgttcatttacaactgcaaagattgtatgtctcctatgttttcctttcatgccaaagaaactcaccctttttaaaagccagcaggttgcacaaaccaaaaacaaaatattttgccccttaaataggcattttaagaagttttatttcctggtacttaaatattgtgtagagggaaagctagttgtaataatttgtaaaaatgcgtgtatttttaggaatgcgctatttccagtaagggaagtattgacatttttaaggaactgtgctgcattaaaatccacagttgcatgaaacttttaaaagtttaagatataaagtaattgctaaaatttgtgaactactcagaggactcaatgccctaacatgtaggggattgatcattgcgatgtttaggccaggatttctcatgattgtatatggttattgatcatttttaaggggctgaacctgctgcctttatacttttgacacctccctccctccctccctccaaactgtggctgtaaacagtgactctgcatagtcagcgttatacttgatttctttgtgaatgcaaataaaataaaatttgtaagtccaccaaatattgacttaa

SEQ ID NO: 24785 - DNA, 978 bp, Artificial Sequence
  derived and/or modified sequence
atggccgaggtgccccccggccccagcagcctgctgcccccccccgcccctccagcacccgcagctgtggagccccggtgccccttccctgccggcgcagcactggcttgctgttcggaggacgaggaacaacagcagctcaatggtcttataagtcctgagctacggcacctccgggccgccgcttccctgaaaagtaaagttctcagcgtggctgaggtggccgccaccacagctacacctgatggcggccctagagcaactgcaactaaaggcgcgggcgtgcatagcggtgagcgacctccgcacagcctctcctctaatgcccgcacagctgtgccgtcacctgtggaagctgccgcagcatctgatcccgctgcagcccggaacggcctggccgagggcaccgagcaggaagaagaagaagaagatgagcaggtgcgactcctatcctcatcattgacagctgactgctccttaagaagccctagtggtcgtgaggtcgagcccggtgaggaccgcaccatcaggtatgtaaggtacgagagtgagttgcaaatgccagacatcatgagactgatcacaaaagatctatctgagccatacagtatatacacctacaggtactttatacataactggccgcagctgtgctttctggctatggtgggcgaagaatgcgtgggtgccatcgtttgcaagctggatatgcacaagaaaatgttcaggcggggatatattgcaatgctggccgttgattccaagtaccggaggaatggcattggtactaacttggtgaagaaggcaatctacgctatggtggagggagactgcgacgaagtggtgctcgagaccgagattacaaacaaaagcgctcttaagctgtacgagaatttaggctttgttcgggacaaaagactgtttagatattatctcaatggtgtcgacgccctacggctcaaactgtggctcagatag

SEQ ID NO: 24786 - DNA, 1089 bp, Artificial Sequence
  derived and/or modified sequence
atggccgaggtgccccccggccccagcagcctgctgcccccccccgcaccacccgcccctgcagcagtggagccccgctgcccatttcccgccggagccgcgttggcttgctgctcagaggacgaggaggacgacgaggagcatgagggggggggcagtagatcaccagcaggaggagagtctgcaaccgtggccgcaaaagggcacccctgcttgcggtgtccccagccaccccaggaacagcagcaactcaatgggctcatctcacctgagctgcgacatttgagggcggcagcctcactgaaatctaaggtgctgtccgtggcagaagtcgccgcaacgacagccacccctgatggggggccacgcgctactgccactaagggagccggtgttcacagcggcgaacgtcctcctcacagcctctcctccaatgccagaaccgccgtcccatcccccgtggaagctgccgcagcatcggatcctgccgccgctagaaacggtttagccgaagggaccgagcaggaggaagaggaagaggacgagcaggtgaggctcctgagttcatctctaaccgccgactgtagcctacgctcaccaagcggcagggaggttgaaccaggggaggaccggaccataaggtatgtccggtacgaatccgagctgcagatgccagatattatgcgactcatcaccaaagatttaagtgaaccatactcaatctacacataccgctactttatacacaattggcctcagctgtgctttcttgccatggtgggcgaggagtgcgtgggcgcaattgtgtgtaaattagacatgcataagaagatgtttaggcggggttacattgcaatgttagctgtggatagcaaatataggcgcaacgggattggaacaaacctcgtaaaaaaggctatttatgccatggtcgagggggactgtgatgaagttgtgctcgaaacagagatcaccaataagtcagctctgaagctgtatgaaaatttaggatttgtcagggataagaggttatttaggtactatctaaatggagtggacgcattgcggttgaagctgtggctccgatag

SEQ ID NO: 24787 - DNA, 978 bp, Artificial Sequence
  derived and/or modified sequence
atggccgaggtcccccctggcccatccagccttctccctcccccagctcctcccgctcctgcagccgtggagccgagatgtccgttcccggcaggcgcagcacttgcctgctgcagtgaggatgaggagcagcagcagcttaacggacttatcagtccagagcttcggcatctgcgcgctgctgcctcacttaaaagcaaggtgctctccgttgccgaggtcgcagccaccacagctacaccagacggcggtccgcgagcaaccgccactaagggcgcaggtgtgcattcgggcgaaagacccccacatagtcttagttccaacgctcgtacagccgttccaagcccagttgaggccgcagccgcatcagatccagccgctgcaagaaacggcctggcagaaggtacagaacaggaagaggaggaagaggatgagcaggtgcggctgctgtcaagtagtctgaccgccgattgtagcttgaggagcccatcagggcgtgaggtcgaaccaggcgaagaccgcacaatccgctatgtgcgctatgagagtgagctacagatgcccgatattatgagactaatcacaaaagatctgagcgaaccctatagtatttacacttataggtacttcattcacaactggcctcaactgtgcttcctcgctatggtcggagaggaatgcgtcggcgctattgtgtgtaagctggatatgcataaaaagatgttccgcagggggtacatcgccatgcttgctgtagacagcaagtatagaagaaatggcataggaaccaatctcgtgaagaaggcgatctatgctatggtggagggagactgcgacgaggttgtactcgaaaccgagattacaaataagagcgcacttaaattatatgagaatttaggtttcgttagagacaaacggttatttcgatactacttgaacggggtggacgcgctgagactgaaactttggctcagatag

SEQ ID NO: 24788 - DNA, 1089 bp, Artificial Sequence
  derived and/or modified sequence
atggctgaggttcctccaggcccatcgtcactgctgcctcctcctgcccctcccgctccagccgctgtcgaacctaggtgcccttttcccgcaggggctgcgctggcttgttgcagcgaggacgaggaagacgatgaggagcacgagggcggtggatctaggagtcccgcaggaggcgagtctgccactgttgccgctaaaggccatccttgtctgcgctgcccccagccgcctcaggaacagcagcagctaaatgggctgatcagtcccgagttacgacaccttcgtgcggcagccagcctgaagagcaaggtgctgagcgttgcggaagtggccgcaactacggcgacacctgacggcggaccccgagctacggcaaccaagggcgcaggcgtgcacagtggcgagaggcccccacatagccttagctcaaatgccagaacagcagtgccgtcccctgtcgaagctgccgctgcctccgatccagccgctgcgcgaaacggtctcgcagagggaacggagcaggaagaagaagaggaggatgaacaggtccgattgctgtccagcagcctaaccgccgactgcagcctgagatctcccagtggtcgcgaagtggaaccgggagaagataggacaattcgatatgtgagatacgagagcgagctccagatgcctgatattatgaggctcatcactaaagatctctcagaaccctatagcatatatacctatagatatttcattcataattggcctcagctttgttttcttgccatggttggggaagaatgtgtcggagcaatagtgtgcaagctcgatatgcacaaaaaaatgtttaggagaggctacattgctatgttggctgtcgactccaagtacagaagaaatgggatcggcacgaatcttgtgaaaaaagcaatttacgccatggttgagggcgactgtgatgaagtggtgttggagaccgagataaccaacaaatcagcactgaaactgtatgaaaatttgggttttgttcgcgacaagagactgtttcggtactatctcaacggagtcgacgcacttaggctcaaattgtggctacggtag

SEQ ID NO: 24789 - protein, 153 aa, Artificial Sequence
  derived and/or modified sequence
MKHLRPQFPLILAIYCFCMLQIPSSGFPQPLADPSDGLDIVQLEQLAYCLSQWAPLSRQPKDNQDIYKRFLFHYSRTQEATHPVKTGFPPVHPLMHLAAKLANRRMKRILQRGSGTAAVDFTKKDHTATWGRPFFLFRPRNGRNIEDEAQIQW

SEQ ID NO: 24790 - DNA, 462 bp, Artificial Sequence
  derived and/or modified sequence
atgaagcatcttaggccccaattccctctgattctggctatctactgcttctgcatgttacagatcccatcctctggcttcccacagccactcgccgatccatcagacggcctggacattgttcaactcgagcagctggcttactgtctgtcacagtgggctcctctgagtcgacaacctaaggacaatcaggatatttataagaggttcctcttccattactcacgcactcaggaggctacccaccctgtgaaaaccgggttccctcccgtccatccgctgatgcacctggcggcaaagctggcaaatcggagaatgaagcggattttgcagaggggcagtggaacagctgccgtcgatttcactaaaaaggaccatactgcaacatggggcagaccttttttcctgttcagaccacgcaatgggcgaaacatagaggacgaagcacaaattcaatggtag

SEQ ID NO: 24791 - DNA, 462 bp, Artificial Sequence
  derived and/or modified sequence
atgaaacatcttaggccccagttcccccttattttggctatctattgcttttgcatgctccagatcccctcttccggcttcccccagcccctcgcagacccttccgatggactcgatatcgtccagttggaacagctagcatactgcctgagtcaatgggcccctctgagcagacagcccaaagacaatcaagatatatacaaacgattcctattccactatagccgtactcaggaggctacacacccagttaagacaggctttcctcctgtacaccctctgatgcacttggcggctaaactggccaaccgacggatgaaaaggatcctgcagcgtggttccggcaccgcagctgtcgactttacaaaaaaggaccatacagcaacatgggggcgacccttctttctctttagacctcgtaacggtcggaacattgaagatgaggcccaaattcaatggtag

SEQ ID NO: 24792 - DNA, 462 bp, Artificial Sequence
  derived and/or modified sequence
atgaagcacctgagaccccagttcccactgatcctggcgatttattgtttctgtatgctgcaaatccccagttccggattcccccaaccgctcgccgatccttccgacggtcttgatattgtccaactcgaacaactcgcttattgcttgtcccagtgggcgcctctctcacgtcagcctaaggataaccaagacatatacaagagattcctgttccattattctcgcacccaagaagcgactcacccggtcaaaacaggctttcctccagtgcacccgttgatgcatttggctgccaaattagccaatcgccgcatgaaaaggatactgcagagaggatccgggactgccgccgtcgattttactaagaaagaccatactgccacctggggccgccccttctttcttttccgtccacgcaatggtcgcaatattgaagatgaagcccagattcagtggtag

SEQ ID NO: 24793 - DNA, 462 bp, Artificial Sequence
  derived and/or modified sequence
atgaagcacctgagaccccagttccccctgatcctggccatctactgcttctgcatgctgcagatccccagcagcggcttcccccagcccctggccgaccccagcgacggcctggacatcgtgcagctggagcagctggcctactgcctgagccagtgggcccccctgagcagacagcccaaggacaaccaggacatctacaagagattcctgttccactacagcagaacccaggaggccacccaccccgtgaagaccggcttcccccccgtgcaccccctgatgcacctggccgccaagctggccaacagaagaatgaagagaatcctgcagagaggcagcggcaccgccgccgtggacttcaccaagaaggaccacaccgccacctggggcagacccttcttcctgttcagacccagaaacggcagaaacatcgaggacgaggcccagatccagtggtag

SEQ ID NO: 24794 - DNA, 462 bp, Artificial Sequence
  derived and/or modified sequence
atgaagcacctccgcccccaattcccattgatcctggccatttattgcttctgcatgctgcagattcccagcagcgggtttccccagccactcgccgaccctagcgatggacttgatatcgtacagttagaacagctggcctattgcctgtcacaatgggcccctttaagcaggcagcccaaagataatcaggacatttacaagagatttctatttcactacagtcggactcaggaagctacgcaccccgtgaaaaccggtttccctcctgtccaccccctgatgcatctagccgcgaagctcgcgaatcggcgcatgaaacgtatcctgcagcgggggtcggggactgctgccgtcgatttcactaagaaggatcatacggccacctggggcagacccttcttcctgtttcggcccagaaatggccgcaatatcgaggatgaagctcaaattcagtggtag

SEQ ID NO: 24795 - DNA, 462 bp, Artificial Sequence
  derived and/or modified sequence
atgaagcacctgcggccccagttccccctcatcctggccatctactgcttctgcatgctgcagatccccagcagcggcttcccccagcccctggccgaccccagtgatggcctggacatcgtgcagctggagcagctggcctactgcctgagccagtgggcccccctgagccggcagcccaaggacaaccaggacatctacaagcgcttcctgttccactacagcaggacccaggaggccacccaccctgtgaagacaggcttcccccctgtgcaccccctgatgcacctggccgccaagctggccaacagaaggatgaagaggatcctgcagaggggcagcggcacagctgctgtggacttcaccaagaaggaccacacagccacctggggccggcccttcttcctgttccggcccagaaatggaagaaatattgaagatgaggcccagatccagtggtag

SEQ ID NO: 24796 - DNA, 485 bp, Artificial Sequence
  derived and/or modified sequence
tctcacaatgaaacatcttcgtccccagttccctctcatcttggccatctactgcttctgcatgctacagattccctcctcaggatttcctcaacctttagctgatccttcagatggcttggatattgtgcagcttgagcagctggcatattgtctgagtcagtgggcacctctttctcgccaacctaaggataatcaagacatatacaaaaggtttttgtttcactactccagaactcaggaggcaacacatccagttaaaactgggtttcctccagtgcatcctctaatgcacctggctgccaagctcgccaacaggcggatgaagagaattctgcagcgaggctcggggactgctgcagtggacttcaccaagaaggatcacactgcgacctggggacgaccctttttccttttcaggcccaggaatggaagaaacattgaagatgaggcccagattcagtggtgaaagaaagctggatctg

SEQ ID NO: 24797 - DNA, 462 bp, Artificial Sequence
  derived and/or modified sequence
atgaagcacctgcggccccagttccccctgatcctggccatctactgcttttgcatgctccagattcccagcagcgggtttcctcagccactcgccgatccatccgatgggctcgacattgttcaactggaacaactcgcctattgcctaagccagtgggcccctctgagcagacagcctaaggataaccaagatatctacaagcgatttttgtttcactattcacggactcaggaggcaacccacccagttaagacaggcttcccaccagttcacccactgatgcatctggccgccaagctggcaaatagaagaatgaaacgcatactccagcgtggttctggaaccgctgcagtggactttacaaaaaaagaccacacagcaacatggggccggccattctttcttttcaggccaagaaacggaaggaacatagaagatgaggcccaaattcagtggtag

SEQ ID NO: 24798 - RNA, 462 nt, Artificial Sequence
  derived and/or modified sequence
augaaacaucuuaggccccaguucccccuuauuuuggcuaucuauugcuuuugcaugcuccagauccccucuuccggcuucccccagccccucgcagacccuuccgauggacucgauaucguccaguuggaacagcuagcauacugccugagucaaugggccccucugagcagacagcccaaagacaaucaagauauauacaaacgauuccuauuccacuauagccguacucaggaggcuacacacccaguuaagacaggcuuuccuccuguacacccucugaugcacuuggcggcuaaacuggccaaccgacggaugaaaaggauccugcagcgugguuccggcaccgcagcugucgacuuuacaaaaaaggaccauacagcaacaugggggcgacccuucuuucucuuuagaccucguaacggucggaacauugaagaugaggcccaaauucaaugguag

SEQ ID NO: 24799 - RNA, 462 nt, Artificial Sequence
  derived and/or modified sequence
augaagcaccugagaccccaguucccacugauccuggcgauuuauuguuucuguaugcugcaaauccccaguuccggauucccccaaccgcucgccgauccuuccgacggucuugauauuguccaacucgaacaacucgcuuauugcuugucccagugggcgccucucucacgucagccuaaggauaaccaagacauauacaagagauuccuguuccauuauucucgcacccaagaagcgacucacccggucaaaacaggcuuuccuccagugcacccguugaugcauuuggcugccaaauuagccaaucgccgcaugaaaaggauacugcagagaggauccgggacugccgccgucgauuuuacuaagaaagaccauacugccaccuggggccgccccuucuuucuuuuccguccacgcaauggucgcaauauugaagaugaagcccagauucagugguag

SEQ ID NO: 24800 - protein, 562 aa, Artificial Sequence
  derived and/or modified sequence
MTRNARPNIVLLMADDLGVGDLCCYGNNSVSTPNIDRLASEGVRLTQHLAAASMCTPSRAAFLTGRYPIRSGMVSAYNLNRAFTWLGGSGGLPTNETTFAKLLQHRGYRTGLIGKWHLGLSCASRNDHCYHPLNHGFHYFYGVPFGLLSDCQASKTPELHRWLRIKLWISTVALALVPFLLLIPKFARWFSVPWKVIFVFALLAFLFFTSWYSSYGFTRRWNCILMRNHEIIQQPMKEEKVASLMLKEALAFIERYKREPFLLFFSFLHVHTPLISKKKFVGRSKYGRYGDNVEEMDWMVGKILDALDQERLANHTLVYFTSDNGGHLEPLDGAVQLGGWNGIYKGGKGMGGWEGGIRVPGIFRWPSVLEAGRVINEPTSLMDIYPTLSYIGGGILSQDRVIDGQNLMPLLEGRASHSDHEFLFHYCGVYLHTVRWHQKDCATVWKAHYVTPKFYPEGTGACYGSGICSCSGDVTYHDPPLLFDISRDPSEALPLNPDNEPLFDSVIKKMEAAIREHRRTLTPVPQQFSVFNTIWKPWLQPCCGTFPFCGCDKEDDILPMAP

SEQ ID NO: 24801 - DNA, 1689 bp, Artificial Sequence
  derived and/or modified sequence
atgactagaaatgccagaccaaacatcgttctacttatggccgatgacctaggagtgggcgacctctgttgctacggcaataactccgtgtctacaccaaatatcgaccgcctggcgtcagagggagttcgtctcacacaacatctggctgctgcctctatgtgcaccccatctagggcggcttttttgaccgggcggtaccctatccgctctggcatggtttctgcatataacctgaatcgggccttcacatggctcggcggatccggtggcctgccaaccaacgaaactacctttgctaagctgctgcagcatcgtggctatcggaccggtctgatcggcaagtggcaccttggcctttcctgcgcatcccggaacgaccactgctaccatcccctgaatcacggtttccactatttttatggcgtgcctttcggacttctatcagactgccaggccagcaaaaccccggaactgcatcgatggctgcgcatcaagctttggatatctaccgtcgctctcgccctggtgccttttcttcttttgatacccaagtttgctaggtggttttccgtgccctggaaagtgatctttgtgtttgcccttctagcctttctcttttttacttcctggtactcatcgtatgggtttacacgaagatggaactgcattttaatgcggaaccacgaaataattcaacagccaatgaaagaagaaaaggtggccagcctgatgttaaaagaagcgctggcgttcatcgagagatataaacgagaacccttcctgttgttctttagtttcctgcatgtccatacaccactgatctcaaagaaaaagttcgttggcagatccaagtacgggcggtatggggacaatgtcgaggagatggactggatggtgggaaaaatactggatgccttggaccaagagagactggccaatcacaccttagtgtactttacttcagacaatggaggccacctggaacctttggatggagccgtgcagctgggaggttggaatggaatttacaagggcggcaagggcatgggtggatgggaaggaggcattcgagtacccggcatcttcaggtggccgagtgtgctcgaagccggtagagtcattaacgaacccacttctcttatggacatttacccaactctgtcctacataggcggtggaatcctcagccaggatcgtgtgattgatggccagaacctgatgcctttgttggaggggcgcgcatcccactccgaccacgagttcctctttcactattgcggcgtgtacctgcacacagtgagatggcaccagaaagactgcgctacggtgtggaaagctcactacgtgactcccaagttctacccggaaggcactggcgcctgctacgggtcaggaatctgctcatgctccggtgatgtgacctatcatgaccctccactactgttcgacatctcccgggacccttcagaggcccttcctcttaatcctgacaacgaaccactgtttgactcggttatcaagaagatggaagctgcaatcagggaacatcggcgcacccttaccccagtcccccagcagttctcagttttcaataccatctggaagccgtggctgcagccctgctgcggaaccttccctttttgcggctgtgataaggaagatgacatcctgccgatggcgccttag

SEQ ID NO: 24802 - DNA, 1689 bp, Artificial Sequence
  derived and/or modified sequence
atgaccagaaatgcccggcccaacatcgtgctgctgatggctgatgacctgggcgtgggggacctgtgctgctacggcaacaacagcgtgtccacccccaacatcgaccggctggccagcgagggcgtgcggctgacccagcacctggccgccgcctccatgtgcacccccagccgggccgccttcctgaccggccgctaccccatccgcagcggcatggtgtctgcctacaacctgaacagagccttcacctggctgggcggcagcggcggcctgcccaccaatgagaccacctttgccaagctgctgcagcaccggggctacagaacaggcctgattggcaagtggcacctgggcctgagctgtgccagcagaaatgaccactgctaccaccccctgaaccacggcttccactacttctatggagtgcccttcggcctgctgagtgactgccaggccagcaagaccccagagctgcaccgctggctgcgcatcaagctgtggatcagcacagtggccctggccctggtgcccttcctgctgctgatccccaagtttgcccgctggttctctgtgccctggaaggtgatctttgtgtttgccctgctggccttcctgttcttcacctcctggtacagcagctatggcttcacccggcgctggaactgcatcctgatgagaaatcatgagatcatccagcagcccatgaaggaggagaaggtggccagcctgatgctgaaggaggccctggccttcatcgagcgctacaagcgggagcccttcctgctcttcttctccttcctgcacgtgcacacccccctcatcagcaagaagaagtttgtgggccgcagcaaatatggccgctatggagacaacgtggaggagatggactggatggtgggcaagatcctggatgccctggaccaggagcggctggccaaccacaccctggtgtacttcaccagtgacaatggaggccacctggagcccctggatggagctgtgcagctgggcggctggaatggcatctacaagggcggcaagggcatgggcggctgggagggcggcatccgggtgcccggcatcttccgctggcccagcgtgctggaggccggccgggtcatcaatgagcccaccagcctgatggacatctaccccaccctgagctacatcggcggcggcatcctgagccaggacagagtgattgatggccagaacctgatgcccctgctggagggccgggccagccacagcgaccacgagttcctgttccactactgcggcgtgtacctgcacacagtgcgctggcaccagaaggactgtgccaccgtgtggaaggcccactacgtgacccccaagttctacccagagggcactggagcctgctacggcagcggcatctgcagctgcagcggagatgtgacctaccatgacccccccctgctgtttgacatcagccgggaccccagcgaggccctgcccctgaacccagacaatgagcccctgtttgattctgtcatcaagaagatggaggccgccatccgggagcacaggaggaccctgacccctgtgccccagcagttctctgtgttcaacaccatctggaagccctggctgcagccctgctgcggcaccttccccttctgtggctgtgacaaggaggatgacatcctgcccatggccccctag

SEQ ID NO: 24803 - DNA, 1689 bp, Artificial Sequence
  derived and/or modified sequence
atgacccggaacgcccggcccaacatcgtgctgctgatggccgacgaccttggcgtcggggacctgtgttgctatgggaacaatagcgtgtccacccccaacatagaccgtctcgcgtctgagggggttcggttaacccaacatcttgctgctgcttctatgtgcacacccagccgggctgccttccttacaggcaggtatcctattagatcaggcatggtgagcgcgtataatttgaatcgggcatttacatggcttggcggcagtgggggactgccgaccaacgagacaaccttcgcaaaacttctgcagcatcgggggtatagaaccggactgatcggcaagtggcacctgggcctatcatgtgcctctcgaaacgatcattgctaccatccactgaatcatggcttccactatttctatggagtgccgttcggccttctgagcgattgtcaagccagcaagactccagaactgcatagatggctgcggattaagctgtggattagcacagtggctttggccctggtgcccttcctgctgcttatcccgaagttcgctcgctggtttagcgttccctggaaagtgatcttcgtattcgctctactggcatttctcttttttacatcttggtacagcagctacggcttcactcggagatggaactgtattctcatgcggaaccacgagattatccagcagccaatgaaagaggaaaaagtggccagtctgatgctcaaggaagctctggccttcatcgaacgatataaacgggagcccttccttttattttttagcttcttgcatgtccatacgccgctgatttcaaagaagaagttcgttggccgttcaaaatatgggcgctatggggacaacgtggaagagatggactggatggtggggaagatcctggatgctctggatcaggagcgacttgctaaccatactttggtttacttcacatccgacaacggtgggcacctagaaccactcgacggggcagttcaactgggaggttggaacggaatttacaagggtggaaagggtatgggcgggtgggaagggggtattagagttccgggaattttcagatggcccagtgtgcttgaggccggccgggtaattaacgaaccgacatcattgatggatatatacccaacccttagctacatcggtggcgggatactatcacaggatcgcgtgattgatgggcagaacctgatgcccctgctcgaaggcagagcaagccacagtgatcacgaatttttattccactattgcggggtttacctgcataccgttaggtggcatcaaaaagattgtgccactgtgtggaaagcgcactatgtaactcctaaattttatcctgagggaactggagcttgttatgggtcaggcatctgtagctgttctggcgacgtcacttaccatgaccctcctctgctgttcgacatttctcgcgacccctcagaggcactccccctaaatcctgataatgaacccttgttcgacagtgtcataaagaagatggaggccgctattagagagcaccgacgcacactgacgcccgtcccacagcaattttccgtattcaatactatctggaagccttggttgcaaccctgctgtgggactttccctttctgcgggtgcgacaaggaggatgacatcctgccaatggccccctag

SEQ ID NO: 24804 - DNA, 1689 bp, Artificial Sequence
  derived and/or modified sequence
atgacaaggaacgcgagacctaacattgtcctgttaatggcggatgacttaggcgtgggcgatctgtgttgctatggcaacaattctgtctcgacaccaaatattgacagactggcttctgagggggtgcggctcacccagcacctggccgctgccagcatgtgtaccccttcacgcgcagcttttcttactggtaggtatcccatacggagcggcatggtttccgcatacaacttgaacagagcctttacctggctcgggggttccgggggtctgcccactaatgaaaccaccttcgcgaaacttctgcagcatagagggtaccggacgggattgattgggaagtggcacctgggcctgagctgcgctagtcgaaatgaccactgttatcatccactcaaccacggcttccattatttctacggtgtcccatttggcctcttgtcagactgtcaagccagtaagactcctgagttacaccgctggctgcgcataaaactctggatatccacggtggcacttgctcttgtgccttttctgctgctcatcccgaagtttgcaaggtggtttagcgtgccttggaaggtcattttcgtctttgctctcttggcgttcttgttcttcacgtcatggtacagttcctatggatttacacggagatggaactgtattctgatgagaaatcacgagatcatccaacagcctatgaaagaagaaaaggtggccagtctgatgctgaaagaggcgctagctttcatcgagagatataaaagggagccattcctgctgttttttagctttctgcacgtgcacactcctctgattagtaagaagaagtttgtcgggagatctaagtacggacggtatggcgataatgtcgaagaaatggactggatggtcggaaagatcttggatgcactggaccaggagagattggctaaccacacgctggtttacttcacgtctgataatggcggtcatcttgagcccttggatggtgccgtacagctaggcggatggaacgggatctacaaaggaggcaaaggcatgggcggttgggagggaggcatcagggtgcctggtattttcaggtggcccagcgtgttggaggcaggcagagtgatcaacgagcctacttcactgatggacatctaccccaccctcagttatataggtggtgggatcctgtcccaggatagagtgattgacgggcagaacctgatgcctcttttagaaggaagggcgtcccacagcgatcacgagtttctctttcattattgtggtgtttacctgcacaccgttcgctggcaccagaaggactgcgctactgtatggaaagctcattacgtgacccctaagttctaccctgagggcactggggcatgctatggctcaggaatctgctcatgcagtggtgacgtgacgtaccatgacccaccgctgttattcgatatcagccgggatccgagtgaggcactgccactaaaccccgataacgagcctttattcgacagcgttataaagaaaatggaggcggctatccgcgagcaccggagaaccttaacgcccgtcccacagcagttcagcgtatttaacacaatttggaagccctggctgcagccatgctgcgggacatttcctttctgcggatgcgacaaggaagatgacatcctaccaatggccccttag

SEQ ID NO: 24805 - DNA, 1875 bp, Artificial Sequence
  derived and/or modified sequence
atgacaagaaacgccagacccaacattgtcctgctgatggcagatgaccttggagtgggggatttgtgctgctacggtaataactcagtgagcacacctaatattgaccgcctggcaagtgaaggagtgaggcttacccagcatctcgcagctgcttccatgtgcaccccaagtcgggctgccttcctgaccggccggtaccccatcagatcagggatggtgtctgcctacaacctgaaccgtgccttcacgtggcttggtgggtcaggtggtcttcccaccaatgaaacgacttttgccaagctgctgcagcaccgtggctaccgcacgggactcataggcaaatggcacctgggtttgagctgcgcctctcggaatgatcactgttaccacccgctcaaccatggttttcactacttttacggggtgccttttggacttttaagcgactgccaggcatccaagacaccagaactgcaccgctggctcaggatcaaactgtggatctccacggtagcccttgccctggttccttttctgcttctcattcccaagttcgcccgctggttctcagtgccatggaaggtcatctttgtctttgctctcctcgcctttctgtttttcacttcctggtactctagttatggatttactcgacgttggaattgcatccttatgaggaaccatgaaattatccagcagccaatgaaagaggagaaagtagcttccctcatgctgaaggaggcacttgctttcattgaaaggtacaaaagggaaccttttctcctctttttttccttcctgcacgtacatactccactcatctccaaaaagaagtttgttgggcgcagtaaatatggcaggtatggggacaatgtagaagaaatggattggatggtgggtaaaatcctggatgccctggaccaggagcgcctggccaaccacaccttggtgtacttcacctctgacaacgggggccacctggagcccctggacggggctgttcagctgggtggctggaacgggatctacaaaggtggcaaaggaatgggaggatgggaaggaggtatccgtgtgccagggatattccggtggccgtcagtcttggaggctgggagagtgatcaatgagcccaccagcttaatggacatctatccgacgctgtcttatataggcggagggatcttgtcccaggacagagtgattgacggccagaacctaatgcccctgctggaaggaagggcgtcccactccgaccacgagttcctcttccactactgtggggtctatctgcacacggtcaggtggcatcagaaggactgtgcaactgtgtggaaagctcattatgtgactcctaaattctaccctgaaggaacaggtgcctgctatgggagtggaatatgttcatgttcgggggatgtaacctaccacgacccaccactcctctttgacatctcaagagacccttcagaagcccttccactgaaccctgacaatgagccattatttgactccgtgatcaaaaagatggaggcagccataagagagcatcgtaggacactaacacctgtcccacagcagttctctgtgttcaacacaatttggaaaccatggctgcagccttgctgtgggaccttccccttctgtgggtgtgacaaggaagatgacatccttcccatggctccctgagaccatgcggaccacgtgttacccaccacaaacttactgttacaatggtcataggagcagagctcacctgactgattcattccatttgggataaaaactgatggcccaacccattgttttatcctcagaaatcagttctttcaagagctcggtgaaattaaagtgggcccatataacagtgaacct

SEQ ID NO: 24806 - DNA, 1689 bp, Artificial Sequence
  derived and/or modified sequence
atgaccagaaacgccagacccaacatcgtgctgctgatggccgacgacctgggcgtgggcgacctgtgctgctacggcaacaacagcgtgagcacccccaacatcgacagactggccagcgagggcgtgagactgacccagcacctggccgccgccagcatgtgcacccccagcagagccgccttcctgaccggcagataccccatcagaagcggcatggtgagcgcctacaacctgaacagagccttcacctggctgggcggcagcggcggcctgcccaccaacgagaccaccttcgccaagctgctgcagcacagaggctacagaaccggcctgatcggcaagtggcacctgggcctgagctgcgccagcagaaacgaccactgctaccaccccctgaaccacggcttccactacttctacggcgtgcccttcggcctgctgagcgactgccaggccagcaagacccccgagctgcacagatggctgagaatcaagctgtggatcagcaccgtggccctggccctggtgcccttcctgctgctgatccccaagttcgccagatggttcagcgtgccctggaaggtgatcttcgtgttcgccctgctggccttcctgttcttcaccagctggtacagcagctacggcttcaccagaagatggaactgcatcctgatgagaaaccacgagatcatccagcagcccatgaaggaggagaaggtggccagcctgatgctgaaggaggccctggccttcatcgagagatacaagagagagcccttcctgctgttcttcagcttcctgcacgtgcacacccccctgatcagcaagaagaagttcgtgggcagaagcaagtacggcagatacggcgacaacgtggaggagatggactggatggtgggcaagatcctggacgccctggaccaggagagactggccaaccacaccctggtgtacttcaccagcgacaacggcggccacctggagcccctggacggcgccgtgcagctgggcggctggaacggcatctacaagggcggcaagggcatgggcggctgggagggcggcatcagagtgcccggcatcttcagatggcccagcgtgctggaggccggcagagtgatcaacgagcccaccagcctgatggacatctaccccaccctgagctacatcggcggcggcatcctgagccaggacagagtgatcgacggccagaacctgatgcccctgctggagggcagagccagccacagcgaccacgagttcctgttccactactgcggcgtgtacctgcacaccgtgagatggcaccagaaggactgcgccaccgtgtggaaggcccactacgtgacccccaagttctaccccgagggcaccggcgcctgctacggcagcggcatctgcagctgcagcggcgacgtgacctaccacgacccccccctgctgttcgacatcagcagagaccccagcgaggccctgcccctgaaccccgacaacgagcccctgttcgacagcgtgatcaagaagatggaggccgccatcagagagcacagaagaaccctgacccccgtgccccagcagttcagcgtgttcaacaccatctggaagccctggctgcagccctgctgcggcaccttccccttctgcggctgcgacaaggaggacgacatcctgcccatggccccctag

SEQ ID NO: 24807 - protein, 385 aa, Artificial Sequence
  derived and/or modified sequence
MASLGPAAAGEQASGAEAEPGPAGPPPPPSPSSLGPLLPLQREPLYNWQATKASLKERFAFLFNSELLSDVRFVLGKGRGAAAAGGPQRIPAHRFVLAAGSAVFDAMFNGGMATTSAEIELPDVEPAAFLALLRFLYSDEVQIGPETVMTTLYTAKKYAVPALEAHCVEFLTKHLRADNAFMLLTQARLFDEPQLASLCLDTIDKSTMDAISAEGFTDIDIDTLCAVLERDTLSIRESRLFGAVVRWAEAECQRQQLPVTFGNKQKVLGKALSLIRFPLMTIEEFAAGPAQSGILSDREVVNLFLHFTVNPKPRVEYIDRPRCCLRGKECCINRFQQVESRWGYSGTSDRIRSLNMRKSKPWDRMIPALVVMGQLTHSGSCSRNP

SEQ ID NO: 24808 - DNA, 1158 bp, Artificial Sequence
  derived and/or modified sequence
atggccagcctgggccccgccgccgccggcgagcaggccagcggcgccgaggccgagcccggccccgccggccccccccccccccccagccccagcagcctgggccccctgctgcccctgcagagagagcccctgtacaactggcaggccaccaaggccagcctgaaggagagattcgccttcctgttcaacagcgagctgctgagcgacgtgagattcgtgctgggcaagggcagaggcgccgccgccgccggcggcccccagagaatccccgcccacagattcgtgctggccgccggcagcgccgtgttcgacgccatgttcaacggcggcatggccaccaccagcgccgagatcgagctgcccgacgtggagcccgccgccttcctggccctgctgagattcctgtacagcgacgaggtgcagatcggccccgagaccgtgatgaccaccctgtacaccgccaagaagtacgccgtgcccgccctggaggcccactgcgtggagttcctgaccaagcacctgagagccgacaacgccttcatgctgctgacccaggccagactgttcgacgagccccagctggccagcctgtgcctggacaccatcgacaagagcaccatggacgccatcagcgccgagggcttcaccgacatcgacatcgacaccctgtgcgccgtgctggagagagacaccctgagcatcagagagagcagactgttcggcgccgtggtgagatgggccgaggccgagtgccagagacagcagctgcccgtgaccttcggcaacaagcagaaggtgctgggcaaggccctgagcctgatcagattccccctgatgaccatcgaggagttcgccgccggccccgcccagagcggcatcctgagcgacagagaggtggtgaacctgttcctgcacttcaccgtgaaccccaagcccagagtggagtacatcgacagacccagatgctgcctgagaggcaaggagtgctgcatcaacagattccagcaggtggagagcagatggggctacagcggcaccagcgacagaatcagaagcctgaacatgagaaagagcaagccctgggacagaatgatccccgccctggtggtgatgggccagctgacccacagcggcagctgcagcagaaacccctag

SEQ ID NO: 24809 - DNA, 1158 bp, Artificial Sequence
  derived and/or modified sequence
atggcttcactgggtcccgctgctgccggcgagcaggcaagcggcgccgaggccgagcctggccccgccgggcccccccctccaccttcgccaagctccctcggccctctgttaccgctgcaacgggagcctctatacaattggcaggccacaaaggccagcctgaaagagaggtttgctttcctctttaattccgagttgttatccgatgtgcgcttcgttctgggcaaggggaggggcgccgctgcggctggcggaccacagagaattcccgcccatagattcgtgctcgccgcggggagcgctgtcttcgatgccatgttcaatggtggaatggctacaacgtccgccgagatcgaattacccgacgtggagcccgccgccttcctggccctgctgagattcctgtactcagacgaggtccaaataggtcccgagactgttatgaccactctctataccgcaaagaaatacgcggttccggcgctggaagcacactgtgtcgagtttcttacaaaacacctcagagctgataatgcttttatgctgctgacacaagccagactctttgatgagccccagctggcaagtctgtgtctggatacaatcgacaaaagtacaatggacgctattagtgctgaaggctttacagacattgatattgacacactttgcgctgtgctagagcgagatactcttagtatcagggaatcgcggctatttggcgctgtcgtgcgctgggccgaggcagagtgccagcgacagcagcttcccgtcaccttcggcaacaagcagaaagtgctgggtaaggcattgagtctgatacggttccccctgatgaccatcgaagaatttgcagccggtccagctcagtcgggaattctgagtgaccgagaagtcgtgaacctgttcctgcatttcacagtcaaccccaagcctcgagtggagtacattgatcgaccccgttgctgtctgcgtggcaaagagtgctgtatcaacaggttccagcaggttgagtcccgatggggatactcaggcacgtccgaccgcattcggagcctgaatatgaggaagagcaaaccgtgggatcgcatgattccagcccttgtcgtaatgggacaactaacccacagtgggagttgttcaagaaacccgtag

SEQ ID NO: 24810 - DNA, 1158 bp, Artificial Sequence
  derived and/or modified sequence
atggccagcctgggccctgctgctgctggggagcaggccagcggggctgaggccgagcccggccctgctggccccccacctccacccagccccagcagcctgggccccctgctgcccctgcagcgggagcccctgtacaactggcaggccaccaaggccagcctgaaggagagatttgccttcctgttcaacagcgagctgctgagtgatgtgcgctttgtgctgggcaagggcagaggagctgctgctgctgggggcccccagaggatcccagcccacagatttgtgctggccgccggcagcgctgtgtttgatgccatgtttaatggaggcatggccaccaccagcgctgagattgagctgcctgatgtggagcctgctgccttcctggccctgctgcgcttcctgtacagtgatgaggtgcagatcggccctgagaccgtgatgaccaccctgtacacagccaagaagtatgctgtgcctgccctggaggcccactgtgtggagttcctgaccaagcacctgcgggctgacaatgccttcatgctgctgacccaggcccggctgtttgatgagccccagctggccagcctgtgcctggacaccatcgacaagagcaccatggatgccatctctgctgagggcttcacagacattgatattgacaccctgtgtgctgtgctggagcgggacaccctgagcatccgggagagccggctgtttggagctgtggtgcgctgggccgaggccgagtgccagaggcagcagctgcctgtgacctttggaaacaagcagaaggtgctgggcaaggccctgagcctcatccgcttccccctgatgaccatcgaggagtttgctgctggccctgcccagagcggcatcctgagtgaccgggaggtggtgaacctcttcctgcacttcaccgtgaaccccaagccccgggtggagtacatcgaccggccccgctgctgcctgcggggcaaggagtgctgcatcaaccgcttccagcaggtggagagccgctggggctacagcggcaccagtgaccgcatccgcagcctgaacatgaggaagagcaagccctgggacaggatgatcccagccctggtggtgatgggccagctgacccacagcggcagctgcagcaggaacccctag

SEQ ID NO: 24811 - DNA, 1158 bp, Artificial Sequence
  derived and/or modified sequence
atggccagcctgggccccgccgccgccggcgagcaggccagcggcgcagaagcggaaccaggccctgctggaccaccacctcctccttcgcctagcagcctcgggcccttgctgcccctgcagcgggagcccctgtataactggcaggctactaaggcgtctctgaaggaaaggttcgcctttctgtttaactctgagctcctttcggacgtgaggtttgtgctgggaaagggtaggggagccgcagctgctggaggccctcaacggataccagcccatcgcttcgttctcgccgctggttcggcggtgtttgatgcaatgtttaacggtggaatggccactacgtcagctgagatcgagctaccggatgtcgagcctgctgcctttctggcactgttgagattcctgtatagcgatgaggtacagatcggaccagaaaccgtgatgactactctctacacagcaaagaaatacgcagtaccagccctcgaggcacactgtgtcgaattccttaccaaacaccttcgcgccgacaacgccttcatgctgctaacacaagcgagactctttgatgagccccagcttgcatcactgtgcctggatacaatcgataaatctacgatggatgccatttcggcagaaggctttaccgatattgacattgatacactgtgcgcggtgctcgagagagacacactgtctattcgtgagtcccgcctctttggagccgtggtgcgttgggcggaggcagagtgccaaagacagcagctcccagttacctttggcaacaagcagaaagttttgggcaaggccctgtctctgatccggttcccattaatgacaatcgaagaattcgccgccggaccagcccagagtggcattctgtcagaccgggaggtggtcaacctgtttctgcatttcaccgttaatccaaaaccccgggtagagtacatcgatcgccccagatgttgtctccgcggaaaggaatgttgcatcaatagatttcaacaggtcgagtcacgctggggatactccggcacctctgatagaatacgcagccttaacatgaggaagagtaaaccctgggacaggatgatccccgctttggtcgtgatgggccagctgacccacagtggttcctgctctagaaatccatag

SEQ ID NO: 24812 - DNA, 1158 bp, Artificial Sequence
  derived and/or modified sequence
atggcttctttaggacccgcagctgccggagagcaggctagtggtgctgaggccgaacccggtccagccggtccaccaccgcctccgtctccgagcagcctgggcccactgctgccgctgcagcgagaaccactctacaattggcaagccaccaaagccagcttgaaagaaaggttcgcctttctgtttaactcagaactgctgagcgacgttcggtttgtgctgggcaagggcagaggggcagccgctgctggaggcccacagagaattccagcacacaggtttgtgctcgctgccggtagcgccgtctttgatgctatgttcaacggtggcatggccacaacttccgccgagatcgaactccccgatgttgagccggcagcgtttttagcactcctgagatttctgtatagtgatgaagttcagattgggcctgaaaccgtgatgaccaccctgtacaccgctaaaaagtacgctgttcctgctctggaagctcactgcgtagagttcctcacaaaacacttgcgtgctgataatgccttcatgctgctcacccaggcacggctgtttgatgagccgcagctggcctccctttgcctggacactatcgacaagtccaccatggatgccatctccgcagaaggatttactgatatcgacattgacacgctatgcgcagtgctcgagcgagacaccctcagcatccgagaatcccggttgtttggcgctgtcgtcaggtgggctgaggcagagtgtcagcggcagcagctccctgtcaccttcggtaacaagcaaaaagtcctgggaaaggctctgagcctgataagattccccttaatgaccattgaggagtttgctgcgggacctgcgcaaagcggtatcctgagtgacagagaggtcgtcaaccttttcctgcactttacagtgaaccctaagccaagggtcgagtatattgacaggccacggtgttgccttaggggtaaggaatgttgcattaatcgctttcagcaggtggaaagccggtggggctatagtggtacttcagacagaatccggtccctgaatatgcggaaatccaagccgtgggaccgtatgatcccggcactggttgtgatggggcagctgacacactccggcagttgttcacgaaatccctag

SEQ ID NO: 24813 - DNA, 1467 bp, Artificial Sequence
  derived and/or modified sequence
atggcctcactcgggcctgccgcagctggggagcaggcgtcgggggctgaggcggagccgggccccgcggggccgccgccgccgccctcaccgtcctctctggggcccctgctccccctgcagcgggaacctctctacaactggcaggcgaccaaggcgtcgctgaaggagcgcttcgccttcctcttcaactcggagctgctgagcgatgtgcgcttcgtactgggcaagggtcgcggcgccgccgccgctgggggcccgcagcgcatccccgcccaccgcttcgtgctggcggccggcagcgccgtctttgacgccatgttcaacggcggcatggccaccacgtcggccgagatcgagctgccggacgtggagcccgcagccttcctggcgctgctgagatttctatattcagatgaagttcaaattggtccagaaacagttatgaccactctttatactgccaagaaatacgcagtcccagccttggaagcacactgtgtagaatttctcaccaaacatcttagggcagataatgcctttatgttacttactcaggctcgattatttgatgaacctcagcttgctagtctttgtctagatacaatagacaaaagcacaatggatgcaataagtgcagaagggtttactgatattgatatagatacactctgtgcagttttagagagagacacactcagtattcgagaaagtcgactttttggagctgttgtacgctgggcagaagcagaatgtcagagacaacaattacctgtgacttttgggaataaacaaaaagttctaggaaaagcactttccttaatccggttcccactgatgacaattgaggaatttgcagcaggtcctgctcaatctggaattttgtcagatcgtgaagtggtaaacctctttcttcattttactgtcaaccctaaaccccgagttgaatacattgaccgaccaagatgctgtctcaggggaaaggaatgctgcatcaatagattccagcaagtagaaagccgctggggttacagtgggacgagtgatcgaatcagatcattgaatatgagaaaaagcaaaccctgggacagaatgataccggctttagttgtgatgggacagctaacacattcagggtcatgttcaaggaacccatagagatcctgcccaatgtgtgctacacagcatgtgcaacactcaaaggtccagattcccactatggcacaaaaggattgaagaaagtagtgcatgagacacctgctgcaagcaagactgtttttttcttttttagttcccctggcaataataatggcacttcaatagaagatggacaaattccagaaatcatattttatacataatttagcattataatacatcttggctaaataataccatacaatctagtgtcaaaaacataaatggccacaaaaaagtagtttgagtgttatgaatatttaaaattgt

SEQ ID NO: 24814 - protein, 156 aa, Artificial Sequence
  derived and/or modified sequence
MAPAVTRLLFLQLVLGPTLVMDIKMQIGSRNFYTLSIDYPRVNYPKGFRGYCNGLMSYMRGKMQNSDCPKIHYVIHAPWKAIQKFCKYSDSFCENYNEYCTLTQDSLPITVCSLSHQQPPTSCYYNSTLTNQKLYLLCSRKYEADPIGIAGLYSGI

SEQ ID NO: 24815 - DNA, 471 bp, Artificial Sequence
  derived and/or modified sequence
atggccccagccgttacccgtcttctgttcttgcaactcgtcctgggtcccacactcgtgatggacattaagatgcagattgggagccgcaatttttacacactgagtatcgattaccctcgcgtgaactaccctaaggggtttcggggatattgtaacgggttgatgtcttatatgagaggtaaaatgcagaacagcgactgtcccaagattcactatgtgatacacgctccctggaaagcgatacaaaagttttgcaagtactccgattctttctgcgagaattacaacgaatattgtacactcacccaggattccttaccgattaccgtgtgtagtctttcccaccaacagcctccaacttcctgctattacaattccacactgacaaatcagaaactttacctcctttgcagtcgtaaatacgaagccgatcctatcggcattgcaggcctctactctgggatttag

SEQ ID NO: 24816 - DNA, 471 bp, Artificial Sequence
  derived and/or modified sequence
atggcccccgccgtgactagacttctgttcttacagctcgtgctgggaccaacccttgtaatggacataaagatgcagatcggttctaggaatttctacaccctgagtatcgattatccccgcgtaaactatccaaaggggttccgcggttattgtaatgggctcatgtcctatatgcgcggaaaaatgcaaaacagcgactgcccgaaaatccattatgtgatacatgctccttggaaagcgatccagaagttttgtaaatactccgactccttttgtgaaaactataacgagtattgtacactgacacaagattctctgcccatcaccgtctgctccctttcacatcagcagccacctacctcttgctactataactcaacattaaccaaccagaaactatatttactatgctcaagaaagtatgaagcagatccgatcggtatcgccggcctgtatagcgggatctag

SEQ ID NO: 24817 - DNA, 471 bp, Artificial Sequence
  derived and/or modified sequence
atggctcccgcagttacccgccttctgttccttcagctggtgctgggacctaccctggtgatggacattaaaatgcaaataggatctcgaaacttctacacactgtctatagattatcctcgcgttaattacccaaagggcttccggggctactgtaatggcctcatgagctatatgagggggaaaatgcagaattcagattgcccaaaaatacactacgtgattcacgctccctggaaagcgattcagaagttttgcaagtactcagactcgttttgtgagaactataatgaatactgtacactgacacaagattctctgcccatcaccgtctgctccctttcacatcagcagccacctacctcttgctactataactcaacattaaccaaccagaaactatatttactatgctcaagaaagtatgaagcagatccgatcggtatcgccggcctgtatagcgggatctag

SEQ ID NO: 24818 - DNA, 471 bp, Artificial Sequence
  derived and/or modified sequence
atggcccccgccgtgaccagactgctgttcctgcagctggtgctgggccccaccctggtgatggacatcaagatgcagatcggcagcagaaacttctacaccctgagcatcgactaccccagagtgaactaccccaagggcttcagaggctactgcaacggcctgatgagctacatgagaggcaagatgcagaacagcgactgccccaagatccactacgtgatccacgccccctggaaggccatccagaagttctgcaagtacagcgacagcttctgcgagaactacaacgagtactgcaccctgacccaggacagcctgcccatcaccgtgtgcagcctgagccaccagcagccccccaccagctgctactacaacagcaccctgaccaaccagaagctgtacctgctgtgcagcagaaagtacgaggccgaccccatcggcatcgccggcctgtacagcggcatctag

SEQ ID NO: 24819 - DNA, 471 bp, Artificial Sequence
  derived and/or modified sequence
atggcacctgccgtgaccagactcttgtttctgcagttagtcctgggaccaactcttgtgatggatattaagatgcaaatcggatcccgaaacttttacactttgtcaatcgactacccccgagtaaattacccaaagggctttcgagggtactgcaatggtcttatgtcttatatgcgtggaaagatgcagaacagcgactgcccaaaaatccattacgtgatccacgctccgtggaaggccatccagaagttttgcaaatacagcgatagcttctgtgagaactacaacgagtactgcactctgacccaggactctcttccaatcaccgtctgctctctgtctcaccagcagccaccgacctcttgctattataacagcactctgaccaaccagaagctttacctgctctgctccagaaagtacgaagccgacccaatcggaattgctggattgtattccggcatctag

SEQ ID NO: 24820 - DNA, 471 bp, Artificial Sequence
  derived and/or modified sequence
atggccccagctgtgacccggctgctcttcctgcagctggtgctgggccccaccctggtgatggacatcaagatgcagatcggcagcaggaacttctacaccctgagcattgactacccccgggtgaactaccccaagggcttccggggctactgcaatggcctgatgagctacatgaggggcaagatgcagaacagcgactgccccaagatccactacgtgatccacgccccctggaaggccatccagaagttctgcaagtacagcgacagcttctgtgagaactacaatgagtactgcaccctgacccaggacagcctgcccatcaccgtgtgcagcctgagccaccagcagccccccaccagctgctactacaacagcaccctgaccaaccagaagctgtacctgctgtgcagcaggaaatatgaggccgaccccatcggcattgctggcctgtacagcggcatctag

SEQ ID NO: 24821 - DNA, 1607 bp, Artificial Sequence
  derived and/or modified sequence
atttttacctagaaacctttctagcctctcctcatctcttgactgtcttggccttggcaagaagaatacacgtccctacccagctatcttcagctcctgtccttcctcccagctgccagagaattgtcagcaggaggaatggcaccagctgtgacccggctccttttcctccagcttgttctggggccaactctggtcatggacatcaagatgcagattggcagcaggaacttctataccttaagcattgactatcccagggttaactacccaaagggtttccggggctattgtaatggtctgatgtcctatatgcgaggcaagatgcaaaattcagattgcccaaagatccattatgtgatacatgccccttggaaggccatccagaagttctgcaagtatagtgacagcttctgtgagaattacaatgaatactgcacactcacccaggattccctccccatcacggtctgctccctgagccaccaacagccacccactagctgctactacaatagcaccctaaccaaccagaagctctacctactctgctcccgcaagtatgaagctgatccaataggtatcgctggtctctattcgggaatttaattcctgagccactccccaacctctaccaccacaggccagctgtctccatttccaacactctgatccctgtaacaagacttccttcctgacttacgaggcaggcagggtcccctcccaagagaccaggtgggtgcgaaaatgtccagggctttgatcaccatgcaaagtggtgctatcttctaggttctttccagcttgtttaccccctcttcgcccccacctcctcatcatccttcctctcccagagacagtaaaacccacccaagaagttgactgtgtccagttggcagtgactgtccacccactgggccagatcctaagtcctggatggaggcccagggcctcagctcacaccatggcaacaggcaccagctccgagtctcacctccccatccccaccagccttctcatgtcagcctcccccagttcccttataattccctccactcacccacctactcaggggatatggctagctataggaacctccctgaggccctcagactcatgttagcctcacttccccacaacccccagtttccagcctgcttctctctgtgaaatcatggtttctcccttcatataactgtcctctcctgcttcctcttaccatggagcctaggactgtctcccccacactcccaacaaccgtagtcaccctgccttcctttttccaacctctttttcttccagtcttcttaccttggctcactggcatttcaaggtatcttctctcacccattccccagaggttcctgcttcccttctcttccagaagctcctcccaaatcccccagactccagagtctgcccctgaccaggcagcgaatgaggcaggcccggctctaatcgaacataaatttctaaaaccacatctgagtatgtaagatgtaaccattgggggaaactgggtgaagggcacacgagccccctctgtaccattttttgtaacttcctgtcaacccataatcaattcaaaataaaaagttaataacaca

SEQ ID NO: 24822 - DNA, 471 bp, Artificial Sequence
  derived and/or modified sequence
atggcccccgccgtgacccggctgctgttcctgcagctggtgctggggcccactctggtgatggacatcaaaatgcagatcgggagtcgcaatttctacaccctgagcattgactaccctcgcgtcaattaccccaagggattccgtggatactgtaacggcctcatgagctacatgcgtggaaagatgcaaaactccgactgtccaaaaatccactatgtgattcatgcgccgtggaaggcaatccagaagttctgcaagtactcggacagcttttgcgagaactacaatgagtactgcacccttacgcaggatagtctgcctatcacggtgtgttctttatctcatcagcagccccccacctcctgctattacaactccactctgaccaatcaaaagctttatctcctgtgctcgagaaaatatgaggccgatcccatcggaattgcagggttgtacagcggcatttag

SEQ ID NO: 24823 - RNA, 471 nt, Artificial Sequence
  derived and/or modified sequence
auggcccccgccgugacuagacuucuguucuuacagcucgugcugggaccaacccuuguaauggacauaaagaugcagaucgguucuaggaauuucuacacccugaguaucgauuauccccgcguaaacuauccaaagggguuccgcgguuauuguaaugggcucauguccuauaugcgcggaaaaaugcaaaacagcgacugcccgaaaauccauuaugugauacaugcuccuuggaaagcgauccagaaguuuuguaaauacuccgacuccuuuugugaaaacuauaacgaguauuguacacugacacaagauucucugcccaucaccgucugcucccuuucacaucagcagccaccuaccucuugcuacuauaacucaacauuaaccaaccagaaacuauauuuacuaugcucaagaaaguaugaagcagauccgaucgguaucgccggccuguauagcgggaucuag

SEQ ID NO: 24824 - RNA, 471 nt, Artificial Sequence
  derived and/or modified sequence
auggcucccgcaguuacccgccuucuguuccuucagcuggugcugggaccuacccuggugauggacauuaaaaugcaaauaggaucucgaaacuucuacacacugucuauagauuauccucgcguuaauuacccaaagggcuuccggggcuacuguaauggccucaugagcuauaugagggggaaaaugcagaauucagauugcccaaaaauacacuacgugauucacgcucccuggaaagcgauucagaaguuuugcaaguacucagacucguuuugugagaacuauaaugaauacuguacacugacacaagauucucugcccaucaccgucugcucccuuucacaucagcagccaccuaccucuugcuacuauaacucaacauuaaccaaccagaaacuauauuuacuaugcucaagaaaguaugaagcagauccgaucgguaucgccggccuguauagcgggaucuag

SEQ ID NO: 24825 - protein, 137 aa, Artificial Sequence
  derived and/or modified sequence
MGAPTLPPAWQPFLKDHRISTFKNWPFLEGCACTPERMAEAGFIHCPTENEPDLAQCFFCFKELEGWEPDDDPMQRKPTIRRKNLRKLRRKCAVPSSSWLPWIEASGRSCLVPEWLHHFQGLFPGATSLPVGPLAMS
